United States Patent Application Publication US 2014/0057251 A1 - sequence listing, part 54

SEQ ID NO: 71829 - DNA, 1784 bp, Cannabis sativa
tttttttaattataatcggtttttaagttattttatgttatttatttttacttattttgttgtggaacgggttctattttaatttatatctgagacatgtaactcgagtgacgatagaaatttcgataactttctgatgacgatgacaactctagtgaattttttgatgacttttccaataattttttcggcggcagtgactttctgctcgaattttttaggagatatttgttattaaaaattttaccaactttattgatggtcttttgttttgttttcaacattttaaactttgtttattttttaatactatatcatccttttgtattattttttttataccatataaaattaaattttaaatttttttccacatttatgaaaattccctttattaagtgcataaaacccaaaagaatagattgtaatatttttaggtagaattattgttttggaaaaaaaataattaaaatattgtttaataattcaaaatttgtaagaaaaatgaaatattaattaaaaaaatttagatagtcataaaataaataattttgttagttgaacatattatagagtagtgtatagatataaaatattatatatatatatatatgtatattatagagtagtgttaagatctaatttgaatcatttaattaaatcaatgactacaatataaatgaaaaaatacaatagcaattatactagctcccttatatattgcagtaatagatagcaaatatatatttgtcatttcattcactatatatttttttttttgaatttttattttcttttctctgaaaaaacacagagagaaaggaaagctctttgattcactatatttatgtcttatcaaacaaaaatttgatatcatattggttctattcactaaaatggactagtgtacttgtacaacatgaaagctaatataaaagatcatattaggaggaaacgaaattcaacaatatacaaaaacaccaagatatcttctctagctacatagatatgtgtacgtattattaattaggattgatggaaggatatcgatcataaatgaatcactttacatatatgtgtttatatatatgatatcaatccgaacgaggcaacaagaaactaaatcctgagttctcacgaatgagcggtggaggttcgatgtcggcgatgtctatttgttccatggacttagataagtcatccaccgagaatggtatactgtataacagaaaagttggtatatatttttaacaaatatatataaatgagagaattttactttgtttcttgagaaaaatagcatgaatgaaaatatgtatatttatatacctggaatcatcatctaagaggaaagaattactgacggcgttgttggagtcttcggtcattaaaaccctcatgttggatataacctaaagcatagttgctgggcaaggtgagtgttatatataaaaatggagttctatagtattatcatatcattactgaggagaaaacgacaataagttggaaaaacgacaataattagtaaaaaacgacaagaatcatttggaaaaacttacatctgtggagacactgtgggtgccatatttgtcatcccagtacattgtactgatccggtacagctgttgtatgctaagcacctattcaaagaccaaaattaattacttccattcacattcattgtgttcaaggtcacaattattagatcaagagttggttaataagactattattaatcaattattagaaaaaaaaaaagtatatcaaactaagtatatagt

SEQ ID NO: 71830 - DNA, 876 bp, Cannabis sativa
tttttaaaaattattaaaaatatgtgtatatttttttaaaaaatattgttttatttgggcttttataataagttggccctagtcacgggcctagtccgtcttagcctagggctggtcttgttagtaatgtacagtatcttttataggtagtagctctataattgattatcaatattctttaaaaattagtttttaaaattataaaaaacttgatatttaattatagtgtaatatggcaccgataaaagtattatatactagtaatactttttaaccattctcaataaaatgatgaaaaaacaaagaagaaattaaaaaaggaaattaaagtagggttggtaggcagagatgttgttgtgggttcacatgcattgtcagcaacgacgcagcttactataatgtcgtacgttctcttttttttccttttatttatttattttttttacaaatattatttttataggtttattataaggtattgttattggacacagtagtgtttagcagcttttagatgtatcgtcttacgattggttagtaatactctctaaaatttattatattaaactatataagattcaatgctaaattaaatcaataatattaacacgcatgagaatgctagacaccaacagaacctttttaacatttctcttattattatatatattatatgtatactttcatttttatttggtgtgtggagtagtgtagtattatattataccttaattaacctagtaatatagaaattaataagtactcatcccatcatgtgtacacgcatatatatatatatatataacatgttatgttatatattagcttaaaacaagggatacaatacaacccacgttgtttgtctttaattatatg

SEQ ID NO: 71831 - DNA, 1016 bp, Cannabis sativa
  modified_base (158)..(158): a, c, t, g, unknown or other
ttctccgggaggcatgtctaaggtaatcctgcgctttaaggagacttagctattttatttaaatgctaaccccttcccatccacgtgtcaccgtccagttggtctatgtattttgggcaaaatcaggggacacaaaacctaaaccgtaaatttaaaanaaaaaattaaaaaatagtatatgcagtaatttcctattgattattatacttaaaaatatataataatatgattatattaatttaaataaaaattagtgaaaaatattgataaaaaattaagttagaaaaagaaatgataaataatgaagatttcttgaatcttgaagttaagttataatttaataataacagttgttatagtaaatgttgcttatcaattattaaacatttaatcgtttcaaaaaaaaaaaaaatattaaacatttaaaaatagattaaaataatattttatacttatgtttgcaaagaaaaatcactaattttaaaataatattaatacaaattattttctaaatatatatgtatggatgcatttttaatgggtattacccatcaataagtagaattagaaaaatttaagtttttatgtttaatttttctatctaattaaaaaaatttcttatttttacaatacatgggctgagattattcccacggctgaaaaaaaaaattaaaaaaaaaagtttttcgacaaacaaaaaagatagttaaatttctattttattattcatcattaaattaaaatttaatggtttaataattttaaaattaatagttataattaaatttatttaataagtattaatatgagtattacccattatttcatatatgtattacatgattgcttttcaattataccacagtaaaatttagggaaatttacatttacaaaggtaaattgtattttattattaataataaggtcgcaatattttttgtaccgttattaatgttattgtgtcgttttttaattgataaattgacaactactttttttttgggaaatttttatat

SEQ ID NO: 71832 - DNA, 1194 bp, Cannabis sativa
agagagagagagagagagcatagatagtaaaaagagagagaggttgatggagaaagagagagacactgaaggtgaagagtgagggagacaaagaaattacctccgaacggttgtggcggcgatgtgtacgagttgttgggggtttccactgcgtgtgagggcgacttggctctgatttgagctgagcgatttgggacttaaaaattaaagagagagaatgagggttgagagagaaagaaagaatgttagaaatggttagggttagggttttcttaaaggggcccaaagcccgttattaatatgtctttttttttttttaatttaggaagtttgcatcggtgcacaactcacgctaattctcttataatcgacgctaaacctgtgtctgcccataaccgacgctaaattggaccactaatcatttgcgtcagttatgtaatttttctgatgtcataaccgacgcaaaatgtaatatttgtagtagtgattatgaacatgtcatgctcactagagagacctttgaagatagcagagatatgatcacgatcgtttagtgtttctccaacactagctagaagatccacattatgtttaaccttcaacaaatactcattcaaggacatagaacctttttgagggttttggagtttagtaggaaactccagaatcttagatgacactcaaagagtgaagtatttttcaaaggaattccaaatctgtatggctgtcttgcaccttgtaccattcttgttagcatactttctatcatagattagagaagtcatgaaatgagaagctgatcttggacatccctttccacaaaagcaggattgaacatgccattagtttgatatgcatcattgagaaattgtggaggagaagtaacattttggatgaatttcagcaatcgatttcgaggaatggcagctagaacctgatgttaccaaagaggaaagttgtgatcagcaatcgatttcaattttgattgttgacctaatttccaccattgacattgttagcagctgacccaccatgtgcagctgtttcaggaccggagtgcgccatgtttgccaccaatggaggccacagctttgataccatattaggagagttgaatctccttgacattgaagctcgagtagaaaaacaacaaagaacagtgagaaaaggctaaaaacaaaaaaaaaaaaaaaa

SEQ ID NO: 71833 - DNA, 1657 bp, Cannabis sativa
gagaaaccacttgctatttttttttactcgaggagacgagagatttccccaaaaacaatgcagtagccagaaatggagcgtctagtgtcttggcagctgccccaatctgcattggcaaagaaggaaacttggacattgtcgcgtgataagttggtttcagtgtaggcctacagttggagtgctgtatcaaacgagaaaagaggccttgaccaggggtttgcttgaggtattgcaaaattctattggtggcctgcatatgggggacccgaggacatgaaaggaattggctaagatgattaacagcatatgtaatgtccggtcgagtgatggtaagatagattagtttacctattaagcttcgataaactgagggatcggggaggagtttgcctttgtctttgctcagtttaagattgagttccataggtgtagaggctggtttgactccgagataacctatatctttgaggagttgaagggtaaagagccttcgtgaaaccgagatatctttggaagttctaccaacttcaagtccaaggaagaaacgaagtttgcctaagtcttttaacttgaacttggcatcaagtttttgagtaaattgtgagatggcaacaatattgttgctggctataatcatatcatcaacatagatgaggatagccatgacgatagaattggttttcttgataaacaaagaattttctgacaaggattgagtgaagccatcctctagcaatgttgagcttagtatggcataccattgacgggatgcttgttttaagccatagatgcttttatttaatttgcaaacagtatcgggtggggcattataactaggaagaattttcatgtaaacttcctcatggagagccctatgtagaaatgcattattgacatcaacttgatggattaaccaattattgatggcggccaaggccaaaaaaacttttagggtgttgaattttgcaactgggcataggtttgtgagtaatcaacacctggtttttgattatagcctttagcgacaagtcgagctttgaaccttactacgtcaccagcttgattgtatttgtgtttatacacccatttgcaaccaatcagtttgtgtccaggaggtagtttggtaatgatccaagttttatttatctaaagcttgagtttcattgtccattgcttcaagccaatgtttaaattgggaagcctcagcataattttgaggctcggtttgtgtgtaggctgcaagaacagcagcccaaaatgttggatgaagcttaatgtaggacaagaattgttcaataggatgattagtggaagccacacgacaaacataatttttcaaatgagctggtttgaaaataggtctacctttttttgtggtttgtatgtcaagggaggaaatagtgccaagtctggttgttgttgaatcaacagcagtttgctgatcctgggatgatttggctgctggtgtagctgatgctgatgcatcagactgttgggaagatgaacctggtgcatgttcgactgttgcaggagtaatatgctgctggagtgagtttgttgtattgggtactgttgctggtgcaataggtttttgacatggcagaattgtttgagaaaaacaatgatcaatctcagttaaagaaatggtagaaaagta

SEQ ID NO: 71834 - DNA, 1011 bp, Cannabis sativa
accaccaagaacaagttgtttcccctattgataatgataatgatgacgatgagcttaatcaggtttgtctttctaaacatgattttcaaatgattgaaattaaaaagttctaagagcagtaatacattttttcgtgttttcccctaatttttgtgtaattgaaaaataggatttttaatagtgtgtagaatgtgcttgaagaaattgttataatgcattttaggttttgatgactttgacactattccaatgtctgagcatgagtaaatttaggggtacaacattgtttcacattaagtttgatcaattagctcatagggtgtagaaaatatagcaatagaagatgaacaagaaaattaaaatcacacactggtttatatggaaactccaaaggagaaaaaccacgggcataggagagaaattcactatgttagagagtgtttttttgcagtacaacatcaagataataccaaaggggaacctaacaaatgataagggtctacaaacacaacatgaggttgattgtacattaagatcaaattatttctatattcaagtggaactttcatcatatgaaagttccatatagaggttaaggtggttcgttggaagagaatagttttttttttctatgatcagactcgatcatgtcatatgtatgaacaggctacgtaagatccagtagaaaaaatcgggtttgttgaaccatgttagacataaggggtgtaatacttggcacctttttgggatacatgtctctggagacctagcctgaatgataattctcttacttatctctaatgttggtctaagtttaagattaagattgtttcaaaagaaaaaaaaaatatctttcattcttttgctttgttatgttaacctggtatctaatgatactcctgtaagtgagaagaatttctctgtcaattgcttgaagctacactttttgatctattgaactttcattcttttcttattgttcaaacttcaaaccagaaagccttagcacaa

SEQ ID NO: 71835 - DNA, 1843 bp, Cannabis sativa
ttacttttaacaagtgagacttatctatataaaaataattgattaaatttgtgtataatttatgtatacacatattattactcctattatgtgttaatggtggaatggaaatgtaactcccttcttattcttctaaataataataataataataattaattgtgtggtaattagctttctacttttgaaataaaaaacatgattgtagagagcttgatatggcaaacaatatcctcctctattaattacttagcatataagccataagtgattatgacatggatttaccttgagaaccgccctaaatgccacattgctcaaaacaattcgaactataaacaaatgacactaaacgtggatgatttaccaaaagtcttaccatctcccaaataaaaacaatttctctttttcttattttatttatttctttgaaaatatcagtgtgaggaagggcctttgccttgctatatatttcaccactttggtaaaagactcatctcatctttttctctatgcttttcactatatatttctctcactcactctctttctcaactagctatagctcaatttcacctcatatgtgtgtactatcaatcatgacttattttcttctatatatgtttttattatatatatatatgtaaatatatatgtgtatttacatattttctgtttcatttttttgattctaatatatatcttgtgggttttttagggttttttgaagagaaagtttgaagggaagataaaagagttgttggtctgtgtttctctagctacctaaaagccaggtaaattttcactatgaattaacagtttgattatgatttttttttttattttgttttttttctgtgatttttttttttgtgtgtgtgttgtgggatttttaattttctctatttttcttctttaagattcatttcagatggtttctcatctcaatttttggtattttgtttgatgttttatatttaatggaaaaaatatattttttttatttcagcaaattacagataaaagagtaagatatcttgaaaaaaaaaattaaaaaattgaaaatgtatttaatttctgtgggttgaatagactgaatagaggaaccaattatagtatttcatttattctttttcttcattttcctttactagttaatagtactatatgtgttttaggagttatataaatatatatcttattttataagaaaattatttagtagaggaattttatgtagctggtctacataatttttttcttttgatattttcttttacataaattataactcaattatttaatatatgataatatatattatagtaaatattaaaaaagttaactttattaagattagagttcaaactgttagttgcacgagtatttatttattattgtattttgaactctattttttatactataaattatttaaaaaaaaaattaaaactagtgagatgtttgctaatcacatgcaatctataataagtgtaatcatattaagtgaaatctatattattttataaaaaagttataagttattttttttgtacttttattttacatgatacaaactttggtttgtgtcctctgcccttgcttagaatttttctctgagaaagtggagtttaattctttgagactttttctctgaaaaaacgattgaaaaattttaaggattatctattctatataaagtgtggttatgtaacagaatttttggtgtaaagatacgttaactttaacagaatatcctattacttaacagaatattctttattaattttataatattattatatatatatttaaaaataaaaattatatatataaataaaaa

SEQ ID NO: 71836 - DNA, 1588 bp, Cannabis sativa
  modified_base (1533)..(1537): a, c, t, g, unknown or other
cggcccaaagtatttttgtaagtatttttgtaattttttttccttttttgtatttttttgttttttccccaaaaattaatggtttgctaatgtggaagttcaaaaaatatattttatgtttttttttattaactaactattttttatatttttttaaaaataagtaatattaaaactaaaaaaattaatataaagttagttttaaatttctcaaaataaaaagaataaattaaataaatacaacacaaacaatcatatatgtctaacattcattcaagaaattaaaatatttttttaaaagggaaacactaataatcaacaataaaattaaaatacaaatttataaacaagtaatattaattatacttgaaataaaaatttaaaactcaaatcaatctcaacaaaaagttactaagagaaaaaatagatgagtactaagaagaaaaaaaacttaagttgatatgcttttgttcattttttttttgctaaaatagataatataaataatatgagtagttaatttttatttattttaaaaaaaatttttactgatttttttaaaaaatttagaaacatttaattaataaaaaaaaatcataaaatacacgttagcaaaccgttagtttttttggatggaaggggatacaagtgttatagttcggggagtatatatttttactagaaagcaaaataattcaggaaaaaacagtttttttcttttttacaattacaagtacaataattcaaagagtgaaaaagctttttgtcctaaatattaaaacttattaatacaaactgtaataatttatggttaacaactaaaatattaattaatggagaaatattaaatatatgatatatattgattgaaaacttacatgacttgcaaggatgtagaggaaaaagtttagtccacccttaacccaaacaattctagtcactgtatcttgactcttttcaagttctttacatgattggtagattcgaaaaactctaggtaaatattgagacagaagaatagcatttagcaatattttgctagaagattccgacgcctcaattactcctttatcaaaccctaaaattattacctacaaaataacaatatatatatttcaattatagtagagttgaagaattttaattataattttttttatacgaaattatatatatattaattgtagtcaagtattgaaaatatttgaaaataatacaatcctaaaaatatattagtttagagagttacacttaatccttcatcaaaacctaaaattattattacctataataaaacaacaaagaatttattgtacataattttttttttttttaattttataatggtccattcaaaaggagataactggctagtttacaatctttttagtaatatatataataacaagtaaatatatatatatatatatatatttaattatatatatgtactttgtgcatgaacaattttcatcatttcatgtaataacttcataaaaaaaaaagtaatcttcaataatatatatatatatnnnnntatatttatacatatatatatgtacctgaggaagggggaggagggctagaa

SEQ ID NO: 71837 - DNA, 1353 bp, Cannabis sativa
gtctcaacccaagctgaagtataattttgatctttgagccaactcaaagcttcccgaaagctcaatgcttcagcggtggttggagcgatgtttccaatatgtaacttggtgcgaccttcgataagcaaaccattatggtcacgcaccaccatggcgcttccaaaccggttctctctttcaaatatagctgcatccacgttgatcttgatactattttcctgaggtttaagccaacgctccatcccatcacagtcttgaagattagaccataatgactcaatttgagttttttgagcgtgtttccattgatcaagatagccttttgcagaggcgattatagttgaaataataaacggttttccttgccaaacaacatcatttcttgctccccaaattgcccaacaaagggcagcagccaactctttttttgctgctgtcagtggcgtgaaaatgtgcatacaccagtccataaaaccgcttcctgctgcagcaacagtggtaccaataccaactctttcccacaccaatttgaccactctgcaggtaagtagaatgtgcgagattgtttcgtccatctcctcgcacaaagggcagcgagtattaactggaacacgcttggaagctaactgagcaagggtcgggaggcagctagaaccagccctccacaccagatttttaatttttggaggcaatttcaaggaccaaagagccttccaaaagtcggaggcttcactctcggtagcagtacccttcatttgttgttgtagagcatatgcactcttgacagagtacacaccgtttgcttcattagaccagcagagcacatccgattgctggtgtacacttaaaggaacttgcaaaatcaatcttatatccctctcctcaaaaagatcttcaaggatatccacatcccaagatgtcatgtccatggacattaagttactcaccttagcaaggtaaagggctggatgggaggaagtcacacacggttgtcgttgatcgggcagccaaggttcgttcaacacgtcaatagaagaaccatttcccacactccaacgaactcccgcacggacaagagattgagcttcccaaatactacgccaaacaaaacttgggttgtttcctaaagaggccgagaggtatgttccattgggaaagtatctagccttgaatatccgagacactaaagactcagctcttgttaagaaacgccatccttgttttcccaagagagccaaattaaaatcatgtaaattccgaaaaccaagacccccattactcttgctattgcacatacgatcccaagacatccaagggatgcccttgttttcttttgatgaactcttccaccaa

SEQ ID NO: 71838 - DNA, 696 bp, Cannabis sativa
attacattcagcataaccctaattatcgtaagaataagaggggtcacgacactcacttctagtgttgcggcccgtgtcttcaatgcacgagatctccttctaaattttccatagcgggtcgcgacactacaagtaagtgtcgcggtgcttgaagcccgatttttgatagagaagaattaatagtttcatgaccttgctaccaaatttttgtattttaatgccctgacattgaagtccagtgttgatgcactactccacactttccaattctttagcattagaagctccaatcgcacctaatttctttcttgaattattttcttaatgctctagcgacaaaaattttatttaattcatccttcttacacattttttttttttttgaatttgctctactcttctccaatactaaacctaaaaacatattaacacaactaaaagcgtaaaattacacaaaaacacaactaaaaactaattaaaaccactttaaaaatctactaaaaagcactaatttagtcctaacactcgtaccaatagagatacgtacttccttatatacccatgatccttcttatttctagtcaatatgaaaaatatgaaattttagttgcaaatttgaattttttgaattttacatattttaatttaataattataagaaaaattatggcatctttgagaacttttttttttttt

SEQ ID NO: 71839 - DNA, 1453 bp, Cannabis sativa
tacatttttacggttttccaaaaaataatacgaaaacaacataaaatcaagaagaataataaatttattatatataacatatatataatatatattaaactgatatgaacaatgtttattaatattaataatataataatataatacaataataataataataaatttattattaatagttatctcattattttttagccactcagaaatctttaattttagggtatttggtaaattctgagtatttcaaaataccacattaattttaaaattaacttatctcaataatctcactaatattttgttgtaataattttagccttcaatcgggtttccaaggtcgttgaacctgtaaatatttttatttcacaaataatttacattatatccacatattctaaataaatctctataaattaacaaattacgcttatttatccacttataacaaaaaattataagttatgctaaattaggttagtaagatcataatcctacttattactacctaattaatccataatatataataaattgtaattatttataattaggtttctgagatataacagtcgttgtgcgggaaagtgacttgggcagcatctccttctgtaaaagagatcgtgggctctccaagtttggttgcttagagcccttttctttgatagctaggatattgcttttgagatcgtgacggagtgtctaagtatagctctccctagctttgctggtctcgcctgcaatatggagtctgccaataatgacccctaagtgacgtaccactggagatggcattgggtctccattttaggtaccttgttgttaagtttgatcgttctacacataacaacacagatgaggatttttttttttctatgaggaattcaatctccctatttaaattttgaaactcattggtgtcgtggttgaagtcattgtgaaactgacaaaacttcgacatgtccctcttgatcaacctctatatattttagatgactatgacaagaaaaaacagttcggacttacaatttggctgctttaaaaattcgggtcctatatcgaaaatacacacaacttaaaagaaaactaagaatataattaaataaaagtaacattaacctaatttgatataatatctcaattattcgacatacctgttctgtttgttgtcgtatacctcaaatattttcagttcatttatttattaaccaaaaaaacagctgtagaaagctagtactaaagtatcaaattgttttccatgaaaacatacaaggtatgtccaactaaagaaaaaaaaaacatgttaggactcatacagcattactgttatagtcaaaattggaattaattttaaaagaagaaaaggtttacagaaaatatgcattaatttgctcccttaagattctagaggaccaacttgtttaaagtattgtggctcaacagacacttcatc

SEQ ID NO: 71840 - DNA, 944 bp, Cannabis sativa
gtaagcaaaagggaaaccttccctcaagcatgtagccctataaatagtgatccattctcactggtaagggggtcgaatgaatgaaaaaagaattatctaagagagcatactcagtgatttcatcgtaagagctttaagagaggaaacaatgtattttcttcgttcttgagtcaatataggggagtaggctattaccgaattgctcggggtcgaacctctttgaaaaccttgtattctttatttatcttttcatatcatatctgaattatatctgttatcgtttattatcaagactcagtgtcgttggctaaaagcaaggtcaacatatataaataaagttaattggttgtatattttcaataagtattaatgattttattgacttttatagctaattcgcactttgtgtattggaatacaaatacaaaattgggtcaaatataattttgtgatatattttgggccaaatttaacccaaaatatacaccatctaatagagataatctttatgtgtttaaagtgagtagttaattatttattttatttacaaagcaaacctattagtaagactagtgacaactataaatgaaatacaatgataataataattttaaatgtggtggccaatatatacaagtactgataattatttaaaattatagaataagttttgtataaatttatcaataatctttttctttagtttttattttatatggcgattcttcaatttttaataattttttttttcaataacatttaataatattaaattatttttataattaaaaaaattacttatactaataaaaaaaattatataaaaatattaaaatattaaattttaatataaatagataacttaattatcactaacaaaaaatatatataaggactagtatctctctagacacttcgactgtccctgttctctctctctctct

SEQ ID NO: 71841 - DNA, 932 bp, Cannabis sativa
cccaccacctccaccaagcccaccaccacccccaagtccaccacctcccccaagaccaccaccaccaccaagtccacctccaccacctaaaccaccacccccaccaagtccaccgccgccgccaagtccgccgccaattccatgcctaaaaggtttgtgaagaagaggaggtttcaaacgtggtctcaatggacgaggcttaataaaaagtggacgagggaacaaatgcttatcctctttatcatgatcaaccttgttattattattatttttatcatcggctacaactaatattaagccacaaacaagaaaaatgcacaagaaatatgaaacaacaacaaccctcattctagctcgttttatgagaagaacactatatgattttgagatatatgaactgatcactaggtgtgaacaagtatatagtagtagtagtagtggtgcaacaaaaggagtggcaatatttatattagggctaagttaaattaaaaattgtaacaataattaatgtgtatatatattatatagtgacccaactgtcacgtttggatgtagtaaatgaggttcatctgtcatttggcagataatttattcctgcccaactgccaacgtagtctaagcctcttgcattagattttgatttttgactttctagtcctcttttttccacgtctctttttttttttttttttttatttttagaattgttagaaagtatggtactattattggtataattaagtatcaagttctatataacttgaaaaaataatttttaacaaatatcgctaactaataatttttagagaatatcgtcgccacttatggaaagtgctaggtaccgctggtgcccaatatcaatgctcttttaggaaatatcgttaaccaatcataaggtaacacctataaaaagtgatacgcaccactggtgt

SEQ ID NO: 71842 - DNA, 1055 bp, Cannabis sativa
atgagactgaaagaatagtcttagacttaatcagagagcacaatacaattatacacaagctcaatagagttgaccaattaactaccaatctaactctaaccgaatcctaacaactcacataattgtcgtagcagatagctaactaagacactttcctcaaatttaaagttagtaatgtcaataatttcaaatttagttctgaactgattggaccttcactttgaaatagtctttgtaaggccatcaacaatttgagctatttcgaaaaatgttagaatttgaaccatcttccaatatagtttctggtccgaccttcgcaagatcgtaatcatgtttacattttaatagtcggtttagtgatcaacaatctcttcaatgactgcggaaaatagttcttgtgtgactagtctcaacccacctatttccccgaaacgatcaaatacttattaacttagaagtgtacggtgtagccgtaagttcaccttctaattcgggatttacgctgtagtagtaatgaatatacaccaacaccgcttgtgcagtcttggaaaatagttgcttgtcagtcaacatctgtttacccttttcagaaaacttcaacactcctcctcttgttagtgctttctttcatgacaattctctttatggaagttccccactagatcaagtgtaaaatttcatatgctccttgttgaatttgcaagctagtcagtactccttagcgaactcttttgccaaaggcaatatgtccgcattgggtaaattcgtgttaccaaatttggtgagaatagttttcctcttatagaaggaggttagtttcttctctaacataagcacgaaatcatttggagacttacagacttccgcaggacctgaggtgtcttttgggagataaggttgaacagctgcatagagctcagtttgctctggcggcttgtaacatcctacttagagaaacgtcacgtgtcgtgattacaaattactaaagtcaagtgatttaaaaccaatattaaaattacatatctagaatctgttagagaggtggactcggccca

SEQ ID NO: 71843 - DNA, 2021 bp, Cannabis sativa
  modified_base (161)..(162): a, c, t, g, unknown or other
  modified_base (1585)..(1589): a, c, t, g, unknown or other
gttataacttttcttagagtctcagtgccctagggatgtaagaatacatgattataatgatgcatgattagagtgctttatgaagcactgaaattgagtggatatgctaatgtgtgaactggagtgctttatgaagttgaaagtaagtgtttataatactnnatgattagggtgttttttgaaacattgaggttgttgattatgtataaatacaaatacttttaattttgtagtaagtttgctcgtatagatgttgaatcgcatatgtacgttaaaagagtaaaacctattggtatgcataaacagttgaaattatatctgctatcactttccatgatttctctttatctagtagttttcttgctgagtcactatgactcacgggtgctttgtggtgcaggtaaaaagaatagctttgttggtagtgtgggtatgaattttccactaccacaagattaagagcaaaggtatgccatgaagtaagagattatctgagtggaaaggtagtagaatatacatagttgatctcgggcaatgtggggatggagaatgacactaaaccagactgattggctaagttctgttttgaggaagcgactgttaaggccgctagagagtctaatctagtagaaggtgggaaaagtatatcggtcgaagtgtggatatagttgttgagcaactaggggttttctagttctatgctcaggtggttgatctaacctcttttgccaagagtgtaaggtcgagatgtaagagacaccagcaaagttaatgctacaagagagcatgttttcagtgtggggtagtaggccatttagaagaagctgcctactgtttccgtgactgatgaatagggtgatgacattttagattttgtttgggtgtttgtttgacctagactgagactggtgctggtctttccaacgtgataagctgaacttttatgaatcataatttgttaatagttttaattgattttggtacaacgtattcttatatttcgagaaggatgattggaagattgtataaagttaaggatgtgttgctaagtggttacggtattctacttttactgtagaactagttattctacagtaggtggttcaaatcccttccagagttgtgggggaagaaaggaatgcttagttgtaatagttgagctaagattagagaatcctgaggatgaattaagaatggattgatttgtaaagtttaatgcaattatcgattgtgaaagaaagatggcaactcttggaccagaatgtgaggacccattcgtgtttgtggccaaggttcaagagtcctaaatttcatcaatttcagggtttaaggcaagagatttaatttggaatggatgaatcagtttcttaactagtaaggtatatattatgaagaatacctatgggaccagaatacattccagtggtctgagaatttttgaatgtctttccaggggagttactggagttactattaaaatgggagattgactttgaaatggatctggtacttggccagagtttatatcttaaactccgtatcgaatggtatttgagatggttgaaggttcagttacaggggatgnnnnntgttggacttgaaattgttggactatgtatcccatcctggagtatgccagttttatttgtgaagaagaagaatgaaactttacaaaagtgtattgatcgttagaaattaaataaactcatgatgaagagtaattattcctttgtcaaggatagaaatggtgatgattgattttagggaagtaccatcttctatgagatcggtcttcgatctggttattaccagtttaagatttaagagaaggctatttccaaagcattttttcatacctgatgactttgcaaatgttatcattaatgatattctgatttcctccaattcaaagaaggcatttgagaggtatttttggatggtattgcaatattttaggagcttaaactttatgctaattgctggaaatgctaatttgtcgactctaagtaggtttcttagag

SEQ ID NO: 71844 - DNA, 1113 bp, Cannabis sativa
aatcgggtacacttcacgtgcgcgtgcggacacgagtgatcactcggtgtgcacgcgcattaagacagtctttgtccgaagccccacgctcacgtctgtgtctgaagcccagatctgtgcgcaaaattcctattgtgcagggtccgtgtgtggcaaaacccaactgtgcacatcttgcacgtgtggatggtatgcagtgcataccatccacactgcataccatccgagccaaatgcaatttttttcaattttttcatgctttttcatggaaataatttcgaaatttttgtgcaatttaacatttcaacgtgtaggaatctataaaagagctagtacccatcgctcttcagcaatggcatcccatcactcttcaatgatggcctttgcacggtaagccttatagagatagccaaatataaaagagctagtacccattgattttaagcatggccttccatcactcttcagtgatggtcattgcgtagtaaggcacgcaggggtagccacaacatgatttcaaaagcgaacactaagctataagcttttgttacacgtaagaccaactgtgtctaaaccacttgctaacaagtaacttcttaaagatattgtttttcaattccacatgcgtacgcccggtagcatcccaaagaaaatttctaggcaaggtctatgaaacttggtgaattgcaagtgaccaagagactgtaaatctgtgtgttcacttgggggtacctacatcgtacaatgcataaaactagcatggagaacttatgcagagaaattttaatgcttagaataagctattaaacctgcctctaagtcaagtgtaggcatacttcaacatggcataaagaaaagtaaatagggatacttacatgtcaaagctataagataatagccatgacgatcatatgcccatagtaaaaggctttaaggctaaacaatagaagtgttcgaatatagagtgcctataggcaaaaagaaagaacatgaaagcctcaaggccaaatatgaataaaacatcagttcatatgcataaggccaaggccacacaagaaccgtgtggttcaaaaatgcataaggctgatgttaaaaattattttaccaggatct

SEQ ID NO: 71845 - DNA, 1057 bp, Cannabis sativa
aaagtggtcatatatgaccaattttaataactatgcatttaggggaaaaattatagggtattttaagtatggaaattcaaatttccctatccttattcttagataatcttttcataccctattgaaatttaatggatccgacggaatacatttttgtaagtgcaaaagactaaataaaaaaaagataatatttactatttagtatggttcaaatttgacccacattatatttttgttttgccatattataatattatcatataccaaatttgacacatatttatagaagtgtgctaaaaaatagtaatgtaccattttaattacactattagaaatggtctataagctaatataatcgatcaattatttactaaagttaggaatttaattgaaaaatgatggacattagagacttaagtgcagaatgtagtacgatataagttttgaggttttttctgcaaatgttgacacagaaatttggccacactcgctcgttagattgagaagaatgtagtgagagttaagtataaataagagagataataaatttatagtaattcacttctcgtgatatgatggtgatagaggtacgtctacttcgagtttttatctcaggagaattacaagaaactggctaagtgtggggcttgaatatctagagagagaaattagagagagatactctgactatatggggacttagaagaatgtacaaaatgaactagaggatctctcatttaaaagagaatgagccccatttaaataataataaaaaattacaaaaaatatgaaaaaaattactttgggctaatcttggccattgatgatgatctaacggtgaaaattgactcttggtgaaaatcgtcaattttcagagtttaaatctcatttgtcagatcgtttttaggtaatttattgaaaaaaaatagcatctaggttgagaataaattttggacttaaaatcttcagaattacgatatggatgcgagacatgacttgatagctctttgaaatgtaaattgaatcgcgtcaatcatatcaatattgagtgagttat

SEQ ID NO: 71846 - DNA, 698 bp, Cannabis sativa
aaaaattttactttcattttgtaattaaaaaattgaaaaacaaaagtgttactaaaccacacttaaatgtgtatttataataattataacaggtcctacaattaattcttgtagtagagttatatatagacatatacctactaattattataacttaatcaccaaaacttaattagatttagatccccacaattttaatttactgccatttgtggctcaaactggcacgcaaaaatatataaaaacatactaatatagatgaaaaaaaacatatactataataatatatttataaagtgacagttattacttaatattgatgtacttactacgtataatatcaatcaaattttaatatgttagcaagttttagaaattgtaactatatgtaaaatatatatataaatatatattgccaaatttgctacaaaaataaaacaaatgttatattttgattcaatacactataatattttatggcacaatattaaaatgattgttttatatatttattataaacaaaatattatgatgtatatttaattagtttatgagatcggtttattttaattgagtattttttttatattattatatagctataatatatatatatgtatcatacataaattttatacgaatagtgtacataaataacataataaacacaaataaatagcatggtgataaaatatata

SEQ ID NO: 71847 - DNA, 2140 bp, Cannabis sativa
  modified_base (579)..(582): a, c, t, g, unknown or other
  modified_base (2059)..(2060): a, c, t, g, unknown or other
  modified_base (2086)..(2089): a, c, t, g, unknown or other
aaagtactttagaataagacaattacactagctaaaagtgctgtagagaaacaacaaggtggaagaagcaagttgagagttagagtcgtaactgtgggagtagtatcctaagtttctcagttaaattctgagggtgaaatttctataaggaggggatggttgtaatatcctgataagcctaatggtgaataattagggtttatatatattatgggctaatcgggtaataagtaggattatgatcctactaatctactttagcataaattttaattttgtattaagtggataaataagaataatttattaattacagagatttatatagcatgtatgaatataatatgagttattggcggaataaaactattttcaggtttggcaaccttggagacttgatcggggggccaaaaatgtcacaacaattttagtttgtaatattgatggaattattgagataaatcaattatagaattactaggatattttagggtactcggggttgaccaaataccctaaggttaaagacttcttagtggctaagaaataataaaatatatatatttattattattattnnnnttattattattattattaatgttgttgttgttgttatatgttgttttaaaaacaacagctatatataatttaagaaagaaagaaaaacaaacaaaaaaaaaagagcataacctaaaaacccatgttttctttccttctctctcgagaaagaaacaccaccaccaccatatcactttctttgatttttttctgcctaaaaacgagctttctaatttgcttttagcatctaggagtgaagcaatctataggtgaaagctaagataagaagtttgaatccttttggttttgaaaagcttaggtttaaaggttgactttttattttggaggtgctaggttaaatatgagttcatggcatattttgattgagagcatggttttgatgttttgttacatagaacatattgtatggatgatatatatgtgttctgtgaagtttggaattatttggttaggtttggagttagtttggaggattttaaggttgaagaaaatcgtgttctggcttttcagaactgaaatttcgtttggtcaacttttgagaaatgtcgaattttgtattttggccataactttttattgtggtttttgttttagacgttctatataccgttttgaagcttgtgacgagatctataatatggtctatgttttagagccaaattatgtatttttattttaaggttttctaccactaggtttggtagataatcttataccattttatgtgagtattagatagtgttttgggatagaaacttatcggtttatcgttgttgagacatagggcctgggatcgttgttaggctatttttagcctaagtttcaggtcacattaataagcattttctcagttattgtagcctttttggagcgattttacgcttgatttttcttgtttcgggttcctggtgcattgtagttcaaattcagtcaattggggaaaagacgggacaatttggtgaaaaatctgctgaagctgccagacgtgattagtagttgcgaccatgacaaggcctagcgcgacccttttatctggtcgcgactagggtagattggcagaatgctcatttttcccattttgcctatggtcgcgaccaaccattaaggtagtcgcgaccaggtacgaaacacgagatttttgacctaattccgatatttttccaattagaggcacaaccctaattcctatataagggactcgactcagattgtcaagggcatcaaaaatcggccccgaaaagtgaatgaaggaggagaggaagctatctttaagatccggagagaaatcaccatctagtttctttcttcaactctttaatttccttatgtctatttttgtttcagatttaatcatggatgtttattttatttttatgaactaaattcccaattgggaaagatgatgaatgttgtttgaatttttgcctagtttatgtgtaattgccattcatttaatcttgatttgtgaaattatctnnatttgtgtttaattccatgtgtaagnnnnatcaccttctacatgttctatgatttgaattcaaaatctaaaaagtgagaa

SEQ ID NO: 71848 - DNA, 1488 bp, Cannabis sativa
ttagggcataaaacccaacaggcggaggtggacttcgccaagaaggacgcgaaagacgccagggcgaaacttggagctgttcgaacagagctgggtgaagccaacaagaagctttctaccagccagaataaaatagatgagctgactaaggacatcgaggtttctgaccagcttgaggagatcatcgagactttgtctactgaagtgaacaaccttcaggatgagcggacatctcttcgagcggtcatcctgcgggtggaggaaacgagaaaatctaaggagggggagcttacggccaaggtgacgagactgaaagagaaagttcatgccttagagacagccggccttgagcttttctatgacttctggcgggccaatcctcaggcaaactttgactacttgggggaagctaaggacatataccttgaattttgggcttcccaagtagcttatggtgaaactggggcggctgcttctacctccggccagaaagctgatgtacctcccattcaaacaacagatccttcagctcctgccggcccagaagacccgaaccaagagcctgggactccagctgtctaaacatttctcgtttttcttttgatttatatatcttattcggccacaaggccttttctaagacatcatgaccggccaaacggtctctaaacttggaattattttttattttttagacaacgggctgattgggcagcttttaatcctggtattgcgtgcctttgttgtctttaatgaatttaattctctgtttacattcatcgtgcaattgtgattgttttatttttaccaaatgctttgtacaggtgtaggtgcccccaagtgaccgagcagacgtatgactcttagtcacttgtcttttatttgttcggtgttctgggtttgactaaaccttttgtacgcactgcatggtaaattagaaacatgctgataatttcaactcaatttgaattttgaaataactatctttattcatttattgattgaaaatgtatttgttaccagagtaacttacatcagagctatttgatccaatatgatcttttaccttagcatgaaataaaacgaattgcagaaataagaaactgtactttaaatgggggtcacctgacctgagtactttgtttcttttgtcaaaacctttgggcatagtctgctcagtaggccattcgcagagcaaatgtttgtttagtacttagtggggtcatccgacctggtactttattggtagtatttccttaaatgttccccattccaatatcgtggtactagaatgagttgcattttttcatcatacttacctaatttgtatgctctaaattcgagaactttgatcacttgatatggtccttcccagttaagtcccaacacacctgtcatactgtctttggtgtttaggaatacccttcttatgaccatatctcccacgaaaaatttccgagctttcacttgtttgttaaaatatcgagc

SEQ ID NO: 71849 - DNA, 1049 bp, Cannabis sativa
gaagacttagttgatagtattgtattatttaattaaggtaattgttatgggtcaatatactcacttaattattatctaattattattaaatacaaatttgctgtatcttgaatttatttaattttttaacatgttagtgtcattattctttcccatgatttatttttatcttttttttcctcatagcaaatatggaataacatttaccctgtgacagattttgttgcacctaacaatggaaaatggaattgattttggtgcagtaaataccatacatttcattttgtcaacaataattataggcttataataatagtcatcatagtagtagatacatatagtcaaaatgaacaagaaatagcttgtcacttacctatagatgtcttaataaaaacccctttactaaaagtctcatacaaaaatggatgcaaataaatttcaaacatataaagtgtaaaacagattgttcatatttaaattttccacacacatgttctattgatcttagtctatgtacccttatcgcttaattatttagctagttctcattttattttgcttataataaaatgcaaaaactattgaaagtgctatatatgtatgtgtgggtgcatataccaccaacccaacaaagctgtcatgactcatgaagacaagaactacccactaatcttatataacataatataggcaatgaaataaaaataaagattaatcaaaaccctctttagttgtagcaatctgttaaattaggataagctgtaggtaggtctggacattcgatctgattcaatatatatatatatatatttttttttttgagttgatccaatctaattatatagtaattgaatttaaaaaattatcattcgatccaattcaattaaaccttaaaattcaatcaaatttaattactaattagattagatcggtttttaattgaatattattatacaatattgtcctgcatggatcaaatgtaaaaatattaagccatatgtaagaacatgagctactccactcattaccaattggttttgagatggaac

SEQ ID NO: 71850 - DNA, 840 bp, Cannabis sativa
atcactcattctcaatatttaaatccacttgaatatttaaatatttttcaatatcatttcaccaactaaaaccacttacataaatcaatgacccacactgccccaagaaactcatcacctataaaatccaccattttttctcgttcaaccaacatacagcaaagcaaactccactttttttgttattaaataaaattctaatttcacaagatatagcataccatattctggaggatttttatcttctcttctgatattcaccagtgttcaatttacagctcctttgatgtcgacccacactgcacagctactcgtcacagtagaagctgaagaaatggccacctctcgatattctccttcgcacaactatgtcgtcgacttcaatggaagatgaaatataacaaacctctagcaatcgtccacccttaaaccagaataagaagcaaggactaagatttttatttttgggtttccgttttaatggtgattttggggaaatatctgattttggggttttatttttgggttttgttttgatcgtggttgtggttttagaatattgtaataattttagtttttaattgttatgatttaatttttgtatttaattattcaaatatgttttttttttttttgtgttttaattatataaaaaaactgaaaaagaaattttattttaacattatgtaattactttgccatgctggcatttatttgtgatctggaggctgacacgtaaggggtaaatgggtgagatgaacggaatagtgaatttgctaacagaacaaaacaaaagggggtttccccactaaaataaaagaaaagggggttaagtgttaa

SEQ ID NO: 71851 - DNA, 775 bp, Cannabis sativa
ttgctctacgttgatgatatgttgttgatcagcaaagagaaagccaacattgagaacctgaagaaaattatgggaatagaatttgacatgaaagacttgggaaatgctagaagaattttgggaatggacattaaaagaaatagaaaggaaggaaagctgactctcagttaagaaagctacatcagaaaagtgatagagaagttctctatggttggttctaaacctacaaagcaacctatgacaagccaataccaagtcttagagaagcaatgtccaagtacagagaaagcgaagaccgagatgaataaagttccctatgttgctgcacttggctctgtcatgtatatgatggtgtggaccaagtctgatttagctcgtagcataatttgcttgagcagatacatgagtaattcagggagagatcactggttagctatgaaatcgttactaagatacctagttggtacaactaaagaatgtttggtatatgaaagaaggaaaggaaaagtcactatagaaggggttagtgactctaattatgctgttgatagggactctaggaagtcgacttcaacattttagttccttatatgtgggaattgtgttagctggagatcttagcttcaagaaggaaaaaggatcttcccaaaaattgatagggtcctagcaaatcctagctggcttgatgagttccctaatgtagaggctctctttttaaatgaaggtatttttgattatactcctgctctgcttaccatctatcctatttagttat

SEQ ID NO: 71852 - DNA, 775 bp, Cannabis sativa
  modified_base (320)..(326): a, c, t, g, unknown or other
aaataaaaaatagaaaaaggcatcatatctatctatcaatctatccatttgggatttctagtgacgtggcccaatgaacgtgggcataccatgttgctcttcaagaacagtaatggtgtgtgtgtgtgtgttgttaaggtgaagactataaatatggaaccaaaatccatggtgatatgatatttttgtacgagtcaaattaaccttttcttccgggttggccattattttggtctttaagaagaaaaaaagaaaacaatctttcactcattggtgacactcactatcaacctctctctcaattattattattattattnnnnnnnttttttatatatatatatacataactctctcttccaccacttccttagtgggagtttagactgggcattccattttaaactcagttttctttctgggtttttctccatttggcctctagttaaggttttgaagctgtttgagctttgttcttgtaatggcgttttgtgcattatcatttcctgctcatattagccgggcaactacaccagcaccttcagatcttcacaaatctagttctttctcttctcggttttattggggagcagatctgctgaggccatctcaatacaaggttaatcagtttttttgtgatttgtttctaaaccaggaaaaggaagaagagaaatgatgttaattatgtgtatgaaagaatacccatgttgtagaattgggtttctttccattgtctgaatttttagctttacttctcttgctttggtatttgttt

SEQ ID NO: 71853 - DNA, 810 bp, Cannabis sativa
catttttgaattattaccaaaaggggctatctccccaatacccggcagataaactaggggcatctgggtaataaccatcccaggtggggaatcgccaacggagtcatcgtcctcagagacgattctcttcttccctggaagctgccgacggttctccctcatttcgtcagaatctccgttttgaatagccctctgaattttcaccaagtttcgggttgtaggatctatggatagctttttttgcatcacccagtcctgaaaccattttgcaagaggagtagagaatgttgatttttcaggagcttctttcttcaaccaaaccccatacatggggaaaaaattgccctcggcatctttaatcacggtgggtggcttaaagcaagtgctttgatcatgggtaagaataccacatttaaagcataatttagggagtctttcgtacttatactgtatccacaggtccggcagtcgttgtcttcttagataaaaaccagagaaaattggtttgttaagctctatagtagccctgaaacgcaaagaactcattcccaccacgtcttcgattccaagcgggaggtcaaacacaggtgaggctttggtagcaagctcctttaaattggataagttccaatagaaaggggggatgcggtcaatggtaacccacagtggggttttatcaaacttcacttccgagggggataaccaagcaggccaaggcataatgacaagtaatgcaccacacacaaaccatggcctacgggataagacattcagggcgtcctctctccgggcaaaggtgaactgtagaac

SEQ ID NO: 71854 - DNA, 2009 bp, Cannabis sativa
tagaaattaaaataatactaaaaattgttattatatctttcctcgtaatagtattttataagtgatgaaatgtgttatataatatactataaatgacgtagtgaaacacttatcttctcattcaaataacatagaaaatgtgttatggttggtcatacaataacacatttctataactaatcaaaagtgttatgcaaagtgctctgacttacgataacataatcggtcttaacacattaaaaagtgttatcgtatattatgataatacttttttggtcttattaaaagtagtttttcttgtagtgaacttgcaatttccacacaagaaagtttgttcgatccaatttgaccgtgagagatgaattgagagagttctgaaaagaatgccattgggatgaagaagcagcatcaggaggagcagtagctgcagtggtggtagtagcagaaggattttcaagaacaccagaatccatggaagactaacaatgtcgatggcaatctgatatcatgtagaagcttatcaatacaaggttatcaatgaacacaaaaaaaaaaaatatatatatatatatatatatttagttacaaagtcttgcaaaaagcttgagccataaaatgaactcatgatctttatttataggctatagagaaaatagttggaagagttgttacaaccgtcacaactgtaactaactctgacaaaacaaaacagaaaataacaaaataaaactaatcctattctgtaatacatttcatttaacccttcaaattttaattttagtagtaaaatcttctaaatttctaaaccgctaacaaatttaagcattattcatttatcatagttaaatgctaacatagacggttgatgtgtacattcttatacatatgacacatttagattagtaaatattattatttaaaatttatgaaaaatatttttaaaagattattttgaattacaaaacataatttaaaattataaaactattaaaaattaaaaaataattttttattttaatattcctctctcctcccactaactccctctctatctctctctttccattacaagaaatatcacttttgtcggcgcatatttataccggtaaaagcaggcacaacgcaccagcatactttggtcagcacataagtgcgccgataaaacgtgtctactattctcggtcggtaaaagaatttgtttcgacacaattagtagttgcgccgagaaaaaaccaaatgctagtgtaaaaaagttcctaaattctcccattgaagggaaaaataattacttttgtcagcgtagatatgcaatagtatctgcgtcgataaaaagttcgcatattttttccaattgacgagtaaaagttttatcggcacagatttttacccgccaattggattatgacgggaattagttatgctaacgcacttatgcgctaacaaaaggcttacccgacatatttttttttatggttgggtacgtttttccggcacaatttcgcgctagtaaacggctttttttaattttttttttttataaatttaataatttattatactttaataatttatgatagtattataattaattttaaatattaaattaaatttgaaaaaaacataatcaaataaaaaaacagtattcacatttataattaaaacaggaaaaaaaaaaaaaaaaacacctgtttcgattgagaaaaatattatggacaaaaatagcagccactgctatgacaatgctccctagcatgcctcttctcttaggattcaatcaagtttttcagctagcatagtcttctggccaagccttgaaacaaagctaagtgaacaattgattagagacaagcttggtcagaggaaaagtaaagaacaaatgatcacgagcctcatgcattaattcacaaacaggacataacagagaaggcaagctcatattaatctgagctagaagatctcttgtgagaagctggccattcactacttgccaaagcacaaatctgtgtttg

SEQ ID NO: 71855 - DNA, 716 bp, Cannabis sativa
ttttatcatatgttaacaatttataaatttaagaaggcacataataattaacaaatatactttttattttagatataattcattaattttttaagttataatattcttattttttaaaaatatttaatttatttattattatcgtgataatttttttttatcagtttgtacctaaaaatactactgtaccctatacattagagtaatttcttatcttcttcagcatgaagctttcgagagagagagagtcgttcttttgaaacgcgttgcagcaccttccagcatagaatggcgagcttcgctgggactgatattgaagctattaaccacagccacattatcacagtagaaaagaactctcttaaacttgcatttagctgcaaattcagcaccgcagaccagcatttgtgctttagaaagagcaagattagtagcactaaatcgtgaagccaaaatggcgtgtatttggttcttgcaatccttaaacactgctgccccataagacttgtttgcacaaatagaagcattagtgcagcaaacaaaccagttaggcggaaggggtacccaaaccacatttcattgatatgaggagttcaacaagaggaatgatcgtgaaattggtggcacaagtctgatagcctccggaactagagtgagacgagagccaagaaccacgttgttgcacgtactccaaacgacatcaaagatgcataggg

SEQ ID NO: 71856 - DNA, 715 bp, Cannabis sativa
aaacattgttttatgatcattgatattacttaaaatgggaaacactttcatgatcatattgtttgtttggatcaagaataaaaacgaatcaaaagggccctaaatataagtgggcctatgcctaaagccccaaccgaaaggagcattgagaaaagaggttttacaaaaatactgaattttatataaaaatttataattttactgtcatatggaattttttataaaacaaccgtaaaacaacaaaacagaacaattaaaataataatagaataactaaaaaataattgttgaataactgtgaaaactttaagcagtataaaaaatatacagtattttataaaggaaaaaaaattgtccccacagtataaaagttagaaagttcaatatccattataaaaatccattatagaaatatcattttttttttttttttttttttttactcaaaaaaaaaaaaatatcatatttttttgttaaggaaaatcaaatttcacctattatcatcttatatatattaactagaaaagtaccacattttatattggatctcaaatgtcgcacataaccaatccttgtatatgcaaaattcctaaaggtagatcagaaaaaaaaaataataataataataattaaaaaaaaaaaattcgtcaggtcaggtgaaatttagcaattttatattagaattttttagtagtacctgtggcaactggaatca

SEQ ID NO: 71857 - DNA, 869 bp, Cannabis sativa
tttgggggtgcgcacaatatcatgttctggcataagggacaagatttgatttggtgggaccaggcgtcaaagggcagtcacgtcaccctacgagaggcttctggagacgcctcttagacttcctcctcgtaggtatcttattaattgttcggagggctttgtttgttctatctcttggaaggctgggcaggctttgggagtaaaggggcctcatcttcggaggcaaggctttaagagtttagatgagctcgggcccagctccgatctagactgggcttttgtatacaggaaggcttgggccttagcttacacggaccaattatactttgaaaatgccatatttttcccatctagaaatatagataacatttaccccctaagcttccgagacttgagagtggcaaaagcttgcagtctttcttccatatgactttggacactttggacacgtgaaccattttgaaacgttggcttattcatcttccataccacggaatgtgaaaggttgaggacttttggggctatagcttacaatgcacgtgtgtccttattttcttggtctgtgaattttatgcacctttcgaaggtgcatgatgtttggggtattgcaacgacggctatttgatgtcagcacaaacactgaggagaatattgatgatggaaaaacaccttgagtactgaaggcgtattaaatattgcattttcagctccccaactgttggattgatattgtgcttttcttggaagctctaggcccttgattaatgcgcacgcagatctctaacttcaagtataaataggagcgagggaggatcttctaccattttcacatcttcgagattttaaatttgaatttgagaaagagaaaa

SEQ ID NO: 71858 - DNA, 1224 bp, Cannabis sativa
tttaacacctttatatcgcagaaagccactggttatactcatccatccttatgataaaggagcttgaacttgaagatccccctccaccatatgccttcatgtttaaaatggcattatttatcatatcataaaagtatacatactagaagaaagtatatctgcaatgatgcatactttagcaacttcagaggtatcaatgccattaacagtactcctcaagcatactttgagattacttccttgcatgtgtatgacagctcctataggcctggcataataacaataacaataacaatagttctaaaatatatatataaaagatgacatcattatctacagtaaaagaatataataattatataaatacatatgcctaaaaatatctgtaattaaattacctgagacccgcagcggcactttttacactaagtttcttgccaatttcatcaactaaatcggaatttgtatctgctcgaactccctacaatatccaatatcataattagatcttaagataaatctgatatttccaaggatcagttatatataaagttgagataatgggaagttgcagctgtatcataaaattattttatgccacacacatgcacaaaaaagaaaaaaaagacaaatgaacaaaagtcaccaagagaagtccacgctgtgaagaaacaaaggtaattttttttaagttttgtattttaagacttgtaagggagtagataatcaataccaggcattccccataaaatcctctgcccaacataactttgaaagctttattaagcaacttctctgcggctttttcacgagtagaaatataagaatttccaacagcaattaaatcagcagaattaatctccatcaactgcaacaatattatcaaaactcagtcaaagaaaagaaactgtgacactagacaacaggctcagagcacaaaaatcccaccccaatggctttcctttactttgacaagaaacaaagaataatatacattgttttaatatacagattacaatgaataactcatataagttacaaacaagttgagttccatgaatctttagttattacttctttctagcaaaaactaatgttgaatactaaaactaaagcaaaaatcctttatggtacttttgactcatgtatgcatagcaaggaggccatagaaattctgggttatgtgaagttgttgtgcacaagacagacactgaaagaacattt

SEQ ID NO: 71859 - DNA, 1293 bp, Cannabis sativa
agtgaaccaatgtggctcttgaagagttattttgacagactttggaccataagcagctagcaaaacttttggttttcttatgccagctttaagtcttgttgtcattggatgaacaaatgctagtggtgttgtatttacaacattgtctacatgtaatttgttaggggcaacaagtatatgagcattggaaacattggtaattggcatgggagtagtggttccaatttcatattgaataggaatttctataagagtagtagtaggtacaatagtgttttgtgtaagtgagttgatagtaggagttggagtgggaatttatgatggagagttgggtggggagggagttggattttgagagacatgaggaagccatgttgaaaagtgttggtagaacaggaaacacagctaacaaagtgggaagagcagatgtttgagagatgttagaagataagttgagagattgttgtgtagcaacaatagcataaggaaaatcaatttcatcaaagacaacaactctggaaatgtacatccgtttatctttagaaagatactaaaagcatttgtgagacatactgtaaccaagaaacacacaaggagttgacttgtattggagtttgtgtttgttgtagggcctaagatttgggtagcataagcaaccaaaaactttttagttgactgtaatctggtctagtgtgaaaaagcacctaaagtggggtagaatcatttaaaataggagtaggcatcctattgattaaatgggtagtaggcttcatcccaaaattttaatggcatgaatgcatgagctaatagagttagacatgtctctactatgtgtctgtgttttctctcatagttccattttgttcaagtgtatggggacatgcaagtttgtgaacaatgtcacctctccaagatattggtaaataatctgaattcaccttcccaatcaaattggagaactttgattttgtatcctagctgcaactcaatctgacttttgaatttggtgaatgttggtaatgcctcatcctttgttctaagaaggtacaaataggtatatctagagtatgcattaacaaagctcgtatagtatctacaaccattagattagttcattggggaagggccccataagtctaagtaactcaagtggtgtgtgataagtggtggtagagttgggaaattgtaacttgtgtgatttaccaagacaacatgcagcataaatattagagaaagttttattagttaatggaatgttacagttgaagagagcctattttacaattggagcat

SEQ ID NO: 71860 - DNA, 1191 bp, Cannabis sativa
gattatagagtgccacatcaccgcctcatatttctccttcatatatatatatatatagattgtcaaaatatcctgaaaaatatagagttatctcacctataaataatataggtaccgcgatcttcaagctcattactcattttgtaaaaatactaaatccatctaagagagtttggaagtctgaatacccacactaattaacttagtttgctttttcttttatagattcaaaactcatgcgaaatcaaagctcagacaatcaatgtttggaggtatttcaatacattcttcatatttcatatatgttcatttcatacatgattatatatgcttttgtttaccaaattttttggcaaccgataattatagagcttaagtaatgaaggtataaataatacaataacacacaaaaaaatttacgtggttcagacgttaactatccttagttcacgaatctattttattaggctctttggccgatgattgcttatacaaatacaaaataatggacctctactccctttcactgtgttcctcttgaagaagaggaaacttagtaggaatattctagagttaatggcggggttacagagatgtgttttcttgatgaagaatgggtcttcaatctcaaggtgaaggtccgaaggatgggtcagaaaaaatctcccctcctgtgctttctttggagtatttataggtcggctccattgcatgggctaccttggatggatcttcatagggatgaatgcccaccgttgggttggtaggtggtatattttccatgtggtctttaccgatgtcagattgtactggatgtaccggcagggctttcgacgtgtgtcactccagggtcgttcttatttaaatttccctcatcactagcctttggatttcttagcacagtacacaaggacacgcatgctctgcatggcagcgaggcgtgacaaacaacctccgacattgtacatgaaaaatctcgatcagtgggccggtagcctagcatgcgcgagctgaactttcgcgagtcatagacgtaccccgaactggtgcatcctagtagaaggaagatccatataccctttccaagagcaggacgttcctgttggaaatattttaccaggatctagatttactactaagtatgtttaattaacatcctaatatgaattctaaaacaaagatcggaagagc

SEQ ID NO: 71861 - DNA, 846 bp, Cannabis sativa
catacatcacccaaaaaaaacaatgacaaaaaaaaaatgggccgaatgcttaccttcgacatctcggaggtagtcgggtctcatggtggtcggtggtttgtgtaggcggtgaggggtaggttcggttttggtgagggtgagatgttgagagagaaccgagagagatagaggaagaaagagagttgaggtttgaaaataagaggggtatttttgggtttattataaagtggtcatattttttaaattttgaaatgcattagtttaggcacaaaattttagagtcttttatgcatattttttcaaattttcctattataaatgctttcttttacatagattgtctttggtttctaaattaaagaaaaaaactatttttcaactagtatcttattatattagttatttttctagtaggcttaatcttcatgagttatcttttccttccaagaacttagtttagtgctagtagagggaaagtatggtatttatggagaacaatttgattaacatagtctcatcttagtcatatattagtcgtgacttattaaatttaactttttggtaacaacataattactatttagttattttaggaatgatcttattttattacttatagttattcttcttttgagtgtagcgtaatggtattttacaatcaattaatatgttgtaacttaaaggttttggattcgaacccatgacctctcccttttcccatccctcccttttacttatagttattctattatgttaaaaatgtattctaaatgaatttataatacaaattgaaggattatttgtagacattattttcctactatagtcaaagtaacacctttgact

SEQ ID NO: 71862 - DNA, 1243 bp, Cannabis sativa
tttttttttttaataattacataatctttattaagaaagttattgagtctaactcactctaataaaaatagcttgttcgggtaggatttactttcaccttatattaagtggatcaagcatatatcatcaaattaatatgagactttaataatatctatgtaagaatatcttaaagtaaaattaatttatgagaagttaaaactaagtaaaatattggtatacaacatttcttacagccaaaagtatcaattttaacaacaataacaatatgattttctaataagtattattcttctatcaaaataaaataaaataaatattattcaaacattattttgttgtgtttttaaaaaaaattgataaaacaacaatatttttttttaaaacacaacaaaataatatttgatatacatttgtataatatgatctttcaatcaacatgatatctatatatatacatgatatctatatatatatatatatatatatattatattacatccggctatgtaatagaaagtgttgttctttttaaaatattacaattcaaatttaaacttcatcaaattcaaactccaaacattacatcaaatttaatttggtctctcttatcttgtatatcttatattaattgtattttttagcattgtatttcaaatttgaattcattgcacatatttaaaataatatatttttattattaattttttacctaatccgcatatctaaaaaatatttctaatattattttttaaaataataaaatagaaaaaaaaatgattatgtttcttaaagaatcacagttgtaacgtggttacctagaaaaaggatatgctatttctaaaataaatgaaaattattataaaattaaaaatattacaactaaattaaaattataattaaccataaaatttaaatattattatatttttttatataaatattatttaaagtaaatattttctaataaaaaatatgttatttttttaaataatatatataaaattaattatataattaaaaatatacataactaaataatatttatactttaacttcagatttaggccaactccaactgacctctaagacaccaaatataatgtagtttcacactatatttaatctaataggacactaaactatactcataaatgaatttgtctacagtatcccactaaatttagtggagcacggtagaccacactattttttttttttaagtttttaataattaaataat

SEQ ID NO: 71863 - DNA, 1345 bp, Cannabis sativa
aacatttcaaatgctttgaataggaagccagtgattataggaacacatctcaaagttaaatcttataatggtaaaatacatatacatttaacctcaattatatatggctttcaaaagatgaattgtaatgaaaattatcttgtaggtttgtctgtttccacaaaacgtaatagtacaatcttaattaatcctcaatttgaagaagttctccaactgacatcttggttagcttgttttgtgaacttaatgttattattgttcttcattccaattattatatcatcttcttaaaactcaaatggtctctaattatttattgtatttttattttataaaaaataagggtggacaacattgacaagctcaatgacattgtcaacaacaaaactttttgtgcaattactgtggtagctcctgctgcagaaaaattagtgcagctcaacaaaattaaagatatgttattcaagatatagctataatcaaatttatttaataatgcatttaacttctcatcaattttattgtatttgtcttatgtttttttttcttaatgcagcaacaaagtttttgggtgaaggcaaaagtcactactaagttaactaatcaaccactttggtacatgtcatgtgacaaatgcaataaagtcgcaaatgcttgcaacaaggttgcagatattaactacaatgaaatttatgaatgcatccattgcaagaataaaaagcaattgcagttctaaggtgtgcttttaacttttatttggtatatataatagtttatttaaattttatatttaatatatattactttattatccactttattataaaataagttgcattatataaagttttatgtatatatttcagctttattaactaatccttatcatttttgtagagtccgagcttttgttaacttagaagattcatcaggttgtatcaatgcatccataattggagaacctgctgagattttatttggatgcacaggaaagtcgttgatggacatggactctttggtacatatataataaacaaaatttgaaaaaaaaaattatatgtgaaatgtttgtttataataataatattaataatactatactttgaatgcagggccatgataagaaactgcttgatattatttacgaatctttaaacaatgactacattatttatctaagagctattaaaaaagactccactatagatgaatacaaatacaatgttgtttttgtcttcgatctaacttctaatatggctcaagcaatatctccacaaccaaatgaagttggacatacagaaaataaatcactaaactgtaaagtccttttttggcaagttaggtg

SEQ ID NO: 71864 - DNA, 1414 bp, Cannabis sativa
taatttaatataataacttttaggtagtatcgctagcttatcgcacgcaatatgtggagaaagtgctagctaatgctctataacaagcatctttactcatgcaaataagtgatggtgatgtaaatataaaatatagtttgttttataaaaaatttacttattttattatttaattttagttagcttgattatttgtattaaatgatttgcatattattattattattctattattaaattttatatttatattcacaatattattatttatatttctaatacattattagatgagcatacatattaaaaaacaataatctaatttttgaagttatctaattggaaaaagtgatttgagatttttttttttactgccacttgaagactttgcttactataacaaaagaattttagcataggcataatagaattataaaaacaatactacatttgggcaaaaaaagctttcatcacagcaatggcaagtgtggcaccgaagactgtggttgcagacagtggcggacccaggatttaaattgaggtggggccacacttttatttttataagtgaggggtgtattttttttttttctaccttgcataacatgttaaaaattaatggaaatttatattttagtattaagtaaaataaaaatattaaagtaaacatgattttattgggattagaactcataacctcctttacatgtatgaaatgactttacacttattttatgtgtataaatatcacttttatttataaatatatgttgtaactaattaaaatgcacatatatttttttctcaatttttttttttcaggataagcgactgtctcaccttgcctctatgtgggtccgcccctgattacagacggtgatggaacaattaaggaagcaataaaagcaacattcaagtctcgcttttattttagtttttttttttttgtcaatattttatttattttttttttaataaaaaaaaaaagtaatttaaagaaggaagacttaatttgatatagacacctacataataggtaatttgtgcactcataagtcataaaaaaatatctctatagtatgggaacaaaactaatgtcactacaacctaaaataactataacctaacctaaaataaaactagtaaatgggaatctcaaaacatagatctaataatagtaaataataaataaaacccatatgttttgactcttcaaatgttactgtaattttgttctttttttgcaggaaaatgttagtatactttgatatctctttcttgcttatgggaaggcaagaaaaatatacaaataatttatttatgcaaatgtcacccaaatctaaaacaatcaaattcaaaccttatttagtatatattattaaaatacatggaaaaccaaaaattacaaaacaaa

SEQ ID NO: 71865 - DNA, 1295 bp, Cannabis sativa
aaaaaaataataataaaataaaaactaactattttgtcaaataaaatattaagaattcataaataatcaccatatcatatgctgaaaccttttattttaaaatttatgctctgtaattatattatatatcctaataattacatgtaattactatcttagttaattatacataattacgtactctaataaaaacctcccattgtataaaaaaactattatcaaatatataattttgtttaatatctaaattacctcatataaaaaaaaaataactatttgtacaaaagttatattatgatatatggtggaattaattactttattagcatataaactgacaacttattaaaatgtaaatgctatagtttatatatattttgaaatttaaaaaaatcatatatatattttctgacaaaagtaaaataatagatattattaataaacgactatacatataaaataggtaaatattattttgaattttgtgtttggtaaaaataatgtattaaaggttttattttgttaaatgacaaaattaatcatgtattttccaaaatagtaaaaataagactctgaacttaatttttgacaattttttttcaaataactaacttgaatacaatttctaacatgaacaaatacagaaaatataaatacttttagatcaaattattattaaattttattttgacaaaaaattagtttagaattctatttatactattttaaaaaatacagcgtctattttatcttttaacaaaactaaaaatttaattaataatttttacaaaatagatagtttaaaataatatttaccaatctcttatgcaatattagataactatttataaggagaacactctaataaaacatgaaaaaaaaaaatactgggaaaactaacacaatcagtgagcacgtgcaaatgacttcttggcaacaaagtaattccaacccacgttcacacccaaaggaaaatttatttatttatttattttttaaggaaaagttaaaaaaaaaaatcgttattgaaattttgatatatgtttattctatacattacattttatatattatatgtaaagcaatcacttacagattcctggaagagcatcgccaagataacgttttttttttctttgtttaaaaacttaagtcatggaaaggataaaaagggtggctgcgtgttacctctcatatgagcaaaaaaaaaaaaaagagaaatataccaagtaaagtctgcaaatcttgactttgcttcatcaaaaataaaaccctctctctcttttttttttttt

SEQ ID NO: 71866 - DNA, 1388 bp, Cannabis sativa
atgggccgcgatattcaaaatccaatgtcaaggcccgctaagacaattaggcaataaaaagggtttttaaatcctaatttcgagaggaatggaggacttttgaatcaccagacttttggaggacgaaaaatagagagaggaagcgaccttagaggttacaaccattgatcttcaaagattttttttcttctgtctttaatttcatgtttttatcaattgttcacaaagacagttagtagctaaacttttaattagggtgttaatggatattatttgagatttctctatggttttaatgtaattttagttcttccctaatttattatgagcatcttttcatttatgtttaatgtttataattatttgattaccaattatttgtttatggttttaatgcaaaatctaaaaaagtgaatgttgattatgctatagtggaatagacatagatttcaatattggatgaaagtacctatatgttttgtgtagcaattagaatttttatgcttaattcaaattacatatgtaatttaccacagaagtgtaggaattttacatataatttgaattctatatatcctaataagaatatagattgaagtagttattctgttattacatgaaattgaaatagaaattaaaattatattaggccgtaggaaattgatacaattaaaattaattgccctaaacttctttgaacatcattatttacttatccttttattcatttcaatttcaaatattctttaaaaattattgtcaccatatagaactaagattttagtgtcgtgactggggactattttagctaatatcattgtattatatgagtttgtcttgcgaggctcataaaaaattatacatcaagattatcttgtaagtttttttaacaatataatgagccattatatattgcttaggggagatttaatgcattggtagagagatattatcacaatttcttagtaagtgtcttattctgctcttttataatggattagatgatgagacaaaattttgggtggattatggagcaaggataactctagagtctttgtcaagaagaagcaatgatgatataataaatctgttgaatgacatggtagatttttattaccaatggtattgggatccctcacttcatggttggagtcaccaataccctccttattcactaatactcatgttcatacatgacatgatcgagtctattcatagaaaaaaataattctcttccaacgaaccaccttatcctctatatggagctttcgcggtggttgtaacaattagtaggggtatctattatgttttagaagacattctaagagttagccaaagatctatgtttacgaaatcctaaaattagtctagttacttcgttctctatc

SEQ ID NO: 71867 - DNA, 1237 bp, Cannabis sativa
tcgaatgaaaatcaagctgaaactcaaatggagggtgaagattaaactgtaagggcaacaaaaaatccaccagcctctattggacatagaaatcaagacatacaattcatcaacttaaaaaatccactcgaagatcccacaaatccatacaacttcatcatggtgataacccaggtaacattcttgtctctcaacttctcactggacaagataattatgtttcttggagtagagttacgcaactttcaatctctgttaagaacaaacttggcttttttgatggatctatttcaaaaccatcaccttccgattatactctgtataatgcctggattaggaacaacaatattataattcttggatcttgaattctgtctcaaaagaaatctcttcgagtatcttatatgatgaatctgctgcaaacatctggactgatgtcaatattcatttctaccaaaggaatggaccacacatttacaatctcagaaagaacttaatgaaccttaaacaaggactatatatgcaagtctatagtctagacagctaagaaaactaactggctaacaacccactgacacataaccaacagaaataacaacaataacaaaccataacaactaatacactagaacttaatacttgtgtgactatgagtgtcactctgtgatgcaagacaaaacttctactccacatggtcttcacaaatttgtatcctatgacaaattatcagattctcacaaaacttttatttctgttattacatctttgtattaaccagctacttataatcaggcttctcaatacaagatttggaaccaagccatgcaaaagagttgtttgccttactcaaaaataagacttggacctatgtcaagttaccacctaacaagaaagttattggatgtcgttgagtgtataaaatcaagctcaagagtaatggtactatagaaagacataaagcctgtctcgttgctcaaggctacactcaacaagaaggcatagacttgttcgacactttttcaccagttgctaagatggtgactttcaagttaccgctggctaattctaccgtcaaaaaatggcacactttgcaactcgatattaacaacgcctttctaaattgagacctctatgaggaggtatatatggaacttctcaaaggactgactttacccctgaaattgacaccaactccaacatagtatgcaaattaaataagtcaatttatggactcaaa

SEQ ID NO: 71868 - DNA, 824 bp, Cannabis sativa
  modified_base (679)..(681): a, c, t, g, unknown or other
catcatttggtacatccaatgtgcccaccgattatggtatagaccatatctttcatagtgtaaagttctgcctatctagtttcaaagagaaaagttgctttagggtattgctaaaggggtttactcctattggagaattcgatgatgttgcaacttgtagagcagcagtatttttggttggtgttgtgctttggtttaaagctgtgttttaggtagatttttgaataataggattgacattttatgggttttggctggtagactctacagtaggggctaaattgctttgacaccaattgaactttatagaaaactttagaaaataatgatatcacagctcaaacgaagcagaaaaatatttcatttataagcaaagttagaccaattcattataacatccatgcttcaagtctttattgggcccttacactcacgtaattatctcaggtcaagcacgcttaatcgtatagagttcttttgtgatgggctaccaaaaaacaagatacaccttgttgatataagtagtatcaatcaatccatttaaatcgtctttaactgtgtagtctcatacctgcacagtcgttgggaaaacttcttaggaggtcacctattttgaaattacgtactccaagtcaagcacgcttaatcatggatttatttcgtgatgggctaccgaaannnaagatgcaccttgttgatataaatagctagtatgaatcaatccatttaggcactcttcaactttgtagtctcatacctatacagtctcagaatcatcacacttggctttctccaagcaattacgattgtatagcttatctgtt

SEQ ID NO: 71869 - DNA, 973 bp, Cannabis sativa
  modified_base (49)..(75): a, c, t, g, unknown or other
attaagagactttgtatggtgtaattaataaataatataaatgataatnnnnnnnnnnnnnnnnnnnnnnnnnnnaaataaataattttgacatttatatgcttgcattggaaaatattgtattattgaaagaagaataattggttgaaataaaataacaaaattgtaactagagaatggtcctttgtatgacctatttttacccaatatttttttttaattcatataattcagccttaagccctagttgaaaaacatgcactcactcatctcttgtcaacttgactattcaacctacttgttgttatggtgagtgatctctaattttcatatgggcgaataagcttttttttttgtttaacagaccagaaaggcgaacagaagatatcattaataggagatctcagcttcgatgaagggcttcatacaaccacaaaaaccaagccatcaaacacagtcaaacaaaataataagagccaccccattaacaattctagaacaacaaacaaaagaaatatcatgaaaaccaggcaatacgactacataaccaaattattgcaactattgaaaatataccagttctgttgttaccattccaaaaaaataaaataaagtaaatctgttgtattctgctaatcatagcttaaatttacttattaacatatacaatagcgatgccataatttgagataggattttatttaaaatttccatatttcatagcattacacgtggctattttttttttttttaaaaaaaaaactaaaataaatccattcatatgattagttaaaaattaaactaactttcttcaacaaaataaataaactcaaacaaacttgttaagtgtaatatttgagcataaactgaaggcatcccaagttgaaagacaagagcaaattgggatgtttccatttcttcatttgaatgataagaaatggatatgttaatgtccaatcctaagtatatatca

SEQ ID NO: 71870 - DNA, 717 bp, Cannabis sativa
tttgtgttcctattatctaggttcatatatttaattggactattctaatttgtcttgtatatattttgtgttaaaaaatctcaactttatgttctcgtgtgtacctatcatgttcgcaatatcatatataaattatctatctaattatatatttgaaagtattttttctttctaatttatatatttttctatgaaaattaataatattttaattataaattaataattttaataatatattaaatttaaacaagtaaatttgtgttgatttcaagtaaataataatattcgaattcgacccaattataatctgcatctatattttttcatgaccttaactctaataatttgtattaagtttgtatcgtattatcgtatcatcacttgaatacaaccttagggttaattacatcttccacggtttctttttgagaaatggttcatacataatggtaacatatgtattggttatatgaagtaattttataacaaaacatgagcgtataattttaactatttaattgaaataaactgacactcctacagaaataaacatgagcgtattattatctaaacctattgcttcagttcacaaaaccttagtgagataattgatatcatgtgtaagcctaattatattgaataatgaattgtaggtattattacacataaagttaattcaaatgtatcatgaggtgtgtaatgattatttttggt

SEQ ID NO: 71871 - DNA, 994 bp, Cannabis sativa
  modified_base (119)..(121): a, c, t, g, unknown or other
  modified_base (842)..(857): a, c, t, g, unknown or other
gcttggaatatgatgagttgtgatatatagacgatcatgaaattagatatttatttgttaattttataagaataaaaggcaaccacataaatattaggggtatatatatatatatatannnatatatatatatataaatagaatataaagaaagaaagaaagaaatcaaaaagaatgaatgagaaagtgtattcgtcatcatccaaaactcattcgatacatagaagtaatagaaaaatgtccactacactaatttaatgttgaaatatttatttttagtataatataacactttaataatttacactaaacatcttacttttttttttactaaatatcttacttaataaatatattttacctaaaaaatagtatatttcatattatttaattaataatccaaaataattaatacataatataaatatatcatgactactactaagaatttgaatattaaaataacttaataaaataaaatattaatttattaaatcaattaaacattacatttaaaaaaaaaaaaaaaacttaaataaaatcacacctaatattgtttatcaaattattattttatattttacaatatattagtattttaaattaattattatttttgtgataaatgttaatttgaggagtaaaatttaagattaatttttaaaataaattaaaataagggttagaatacaaaaaaaaaaagttttgcaccaaattggtgtaagttcgaaattcaacaccatttagtgatgtaaaatttagtgcatactaatttggtgtactattagagtaaatagtgtgaatcactacaaaaaatagttacttttagtgacaactttttnnnnnnnnnnnnnnnnttttgtgattaaatgtgacttttgatcgcaacaaaaaattacttgagattaaaacataatatttaaacacaagttgtcactaatttacttttagtcacaacaagtattttgactaattgtaatttttgtgactaata

SEQ ID NO: 71872 - DNA, 1071 bp, Cannabis sativa
gacattgcattttcaaatgttatattactttctcctattagaacttacaaagagaggctcttcaatcatgttgtaggcttgtagctatttgtcaacattaaatatggttctattgatataatccattctttgccatttgacagctctaaacgatagaattacttaagcaacaacaattgtggaatgaaagatgagttattattaattgtaaatgcaaaaagagactatagtccctacaaggagtgagagccaaatctctctgatgtgataagatattcttagagttatgaaatccgtcaaagaaaatctctttattgatgatgaaataaaagaacaatttagctttcgagatgttagtatcttcaattacaacttttcgagagggttgcgagtctattctcttttatttttaagctcaatccttctttcttatttataggcactgaataacataaaagagtgtcaactaagatgtactaaaaataagataaaacaaccttttaaaataaaagttctctatcctaacttagtgtatccttctgttatatccaaaatgtatacgaggcctatgaagatgctaagaaaacactcaattttaacatgccccaactaaccctttactgatatcggacacatatctgtcttcatattggtatgatattgtttcctttgagtctacgccctcacatatttatttttgggcaccttctcaaaaagtttcataataatagagatattgtctatccttatatactcataatccttctcatttttagtcaatataagactttggatgcacacccaatatttttttttaatttattttttgaatgaattttctccaaagattatattaaattgctgaaacaccatcattaacattacaactatagaagataaaattggtaaacaaaatttaccatatatgtaaatgtgcacacattttggttgaagtctcgtcttaatgagcttcaaagttgaaagtattgttagagtttgtagtttctaccacattggtagtgtgttcaattattgcccattttagaccatttataataagaaatgtgatta

SEQ ID NO: 71873 - DNA, 1115 bp, Cannabis sativa
ttaatttgtaaatttgatatttaagtttaaatattaaaaataatattttaaattgatattagggtttgaaaattagaaaaattcaaaatttgaggaaaaattcaaaatttgtggaaaaattccacaaaaatcaaatttttggtacaagatgcatctactgcccacgaggaggtcgcatgcagtagaagtgcgggctggtgggattgcagggtgtgtgagcggcataattcggcaggggtagcatcaggacatgggcgtggcaacatcatgtgtgtctaaaggttgggcgagacacggcttcaaacaaaaattatttaggtcgcgcgtgcatcaatcctccttgtccgagatgctggtgcgatcgagcacccatctcgacatctatatgcatctgattttcaagcaaccataactttctcaatttttatcggaattgagttccgtaaaaatcaaaattgctcaatttttcacaaggaatccaaataaattattttcagaataaaaaaaaattattttcatggaaaaatttcgtaattcacattcaatcatcaaatcacacataaaccaacctgaacacattcatatcaacaatatcatcattttaaatccatatttcatgaaagtaaattattaccatggctctgaggccagttgttaggaatattttaccatgatctaaatttactaccatatatgttgaattgacattctaaatataaatatatctaatacgatgaaattaaacacataagaggttagaaaatcttacattgattgcagcagaataatatgactccttttgttcagatctctagcccttgatttctttctgtcgtagaggattatcaagatttgaacttggatctctttctctccttcgagtttagttactaccgtcttccgcactatgattaagtacttgactcgctatgtgtgggcatggcactcgatcactataggccgattatgaagaacaatgaagtaggctcaaaattactatagaaagtatctctcatctactagttgtgagagaatgaaaactagctttaagttggttgaatagtcatttggatgagatgagagcatcatgttccctttatagtatttcaactagg

SEQ ID NO: 71874 - DNA, 694 bp, Cannabis sativa
tattaaaatttagtaaaaaataattttagtacaaaaacaaattgagtagttaatctctgcttgatttgcctattgtaatacggtcgaggtcttgtgtttttgtttttttattgagaaatattatttttgtaattttaaaactttaaattagtatttttaaaaatttaaatttctgtgaaaaaaaaacatatttatgtaaaaatgccaaaattcttgaagaaattacattgtacactcactttactttacttgttttaaattttacctctatttttatatcattggcggacccagaatttatagtgaggggggcgtaattttaatgtagttagtggaatttgaacttttatcctctaacatattaataatctaccttaactattacacctaggttactattatgtctataaatatcatcttttaatacaaatatatgttgtaactaactaaaatagatatacatttttttcccaatttttttcagggggcatctcgctacaatgtgggtccgcctctatctacttttatagatgatgtccctattagaccccttatgttaatgtaaattatatgctagacttaagtagagaatgatggtatattgggtaactcaaggtatattttaatgaaatataatgtgaagatatttttgattaatgaataataaaaaaaagcatttttttttttttttttt

SEQ ID NO: 71875 - DNA, 1272 bp, Cannabis sativa
tccgcactttgcggattggattggatcgtgcaaatttgattggatcggctattttatgaacacccctagttcctgaaattttaagaatgaagaatgaataaaacatgaaaagcaataaactcaactggacaagaagttgagtacaacccaaaagagaagtccccacagcaaggagaaggagatataatgatacaaaataagaagagaataagatagtaataataagttgggacttttgttccataacattaaaaggatgtacacacacgaccgtacaataaaaaaagatcctatcttttctagttaaagacaaattcagctattcatcttttttgtctcttgtttcttcctttacagtagaaaaacattacaaaacaatggtcatagaataacacatcaattcttcatgaataaatgattacacatcaatggtcatacaatacaaaacaataagttgggactcattacatcttgctgctaacacttttactgctgggaactatcattattttgtctctttgttgtggaagatttggaattgcaggaataaatggttacatacaagtttagctacaacacacctgcccagctgctgctttcggttgcagatttcttagaccaatatcaaagttgtaatatgaaggcttcttctactagtcacacacagagtgttcctttgctgtccaacgaaactgagcccaccattcaaagctataatctccggcttttagttgatgctgcccaggatgcaagattaaataaaatgggcttcggtatggctatccacacaaaccagggagaagtactcttgaatttagttatgccttggcgtggaactcaaccccctttactaatggaagcacatgccttatactttgccctttcttggtgtcacaaccattctatttatacagaagtcattgtttcggattgtaaagttttagtagattatatttataataatgatacacatcacctacatcttagcaaatttgtcactgaaattaaacgctagctagcagtcttactttcctagagctattcttagctacatcccaaggggggcaaaaggctttaggcctagatcaggaggcttcgtggaagaattcatctttacaattgtaatttgtatccaggttctctttgctttgtattaatgatacagatttctttcaaaaaaaaaaaaaaaaaaactatcaaagttaattatttaaagtttgttcaatttgtgtccgcaaggtcagtttgaccagttgtaaacacaaaaaaaaa

SEQ ID NO: 71876 - DNA, 1076 bp, Cannabis sativa
aaatgtagtcatatatggcctatggtattacatttaggtttagaaaaataatataggggtttattatgtatagaatttcaaatttccctatcatattttattgtaaaatattatgaattagattataaaatgtaaatatttaaagcttgagaagtataaaaagatagtatgaagtatttaaatatttcattggcatatacaataaattttaagaaatttctaaacaatttagttttttttatatgtatatatgtatttgtaaatgtttttataaaaactcaattttaaatgttatatcttgatgtttaaggtttttgttcctcctctcttctttctcctcattcttctctacaactgaataacatcatagactaacacaaacttcctccctcacattaacttaaacaagagaaaaacatgttaattagataaactaaatagataagaaataatcattgttgaggtgttagggtgtcttttctttattaagacatctatatatataatatttggactagtaaaaaagtattcctagtcaatatgggactaaccacaaaagataattttttatttatttttctttaacaagacttctgttaatagatttttttaaggcatgtttcgtacgtatgaataaattggattagacaagttaatttgtttagtctaatgatttcacatgctgaaagtccagataattgatccaactaattctatccatttagagttatttatcacatctagcagtgtatgataaataatccatataagtagatttttattatttatcattttttttattttgattttataaatatatgttgaatttaataataatttaaataaaagaatggttacaaatttatttatatatttttttgttaaaacttattcattataattaataaaaaaaatatataattttgaaatatcatatatagggatcgaaattgcagccataggtatgaggccgacaagaataattttttatcctcgaatgttaaacaagaaatagcacccccaccccgatggtgacccattcaaattttaatttattttgtaatattatttcaatt

SEQ ID NO: 71877 - DNA, 1419 bp, Cannabis sativa
aaaaaaaattgaaagaaaatatattagtttaatattgtggtatattgtttaatgtgctatggtacataataaacgaaagagggaaaaaacatgaaatgttagtttaagtatgatatttgattgaggtatattgatttgaaggaatgaacaaaaaaaaaaacttggggaatattaaattaagttttttgtttaatttttttttttttactatgttggtggtatattaattttttttttcaccgcgcaaacagtagaacaaattgaaaaaaatagagttgagcttcatctatataaccaagggcattttaggtattaatatttataaaaggccatttacttaatttttttaaaaaatagatattaactttcattagtgtgagatttaagccatttattacaatttcccttcgttatatacaatttgaaaattgctaaaaaatagtatttggtattcctaattttccatgaagtacatactattatttgcttagttttatttttctctagtaaaatagtgagtgctaaaaagcattatgcgtgcttaacaatttctttggtgtaatattagtgtaattaagtatcggtttatatgtaatttaataaaataaattttaaaaaatatcgttaaccaatcgcaggtacttacttattgaagcttctattttgtttcttacccctcctctcttctcccatgcgattctcatactaatccattctcatgcacactaccttattaattcaaaaatatcatttttttttcaaaaaatgcaattgtttattcatgttttaatctgtgtaacaaaaaaaagttactgttgtaaatagcatatctccacgtattttgattaaccaagattatttgtcccccaaaactcaaatgattattgtgttcaacctacccttgtcggtaaatcttgagcatatcttttagcttaaattaacgtcaatctacaaaatgtcattagggatattaataaaaagaaaaacggaaacttcataatctttatttgtaaaagtaaccaatttaatactcattatattatatatagaataataagtctagtgtggggatttaaattatggccccattagtaaggatttaatttggtgtggggatcacatgatctaaaggtttggagttcgggtatattgtaggtggtgtgtttttgtgcatagaagattttttttttttttttgaaacgtagcaaattcaaagggatcaggaatggttgttgtcaaccattgatttagtgttcttgttctttcattgtttgtccttctggttttggtgttctttctgcttcttgtcgttggcccaggactttgaccttttattttgttttactgtagcttctaagatctttcatttgtgattttgcctcctcatggaggtacagtttaccaaaaaaaaaaaaaaaa

SEQ ID NO: 71878 - DNA, 1589 bp, Cannabis sativa
ttcgagtttgggtttgagtcttgggtcttaagtctaggtctgggtctgagtctaagtcttaggtccaggtctgggtctgggtcccaagtccgggttcagattcgggtctgggtttgggtctaggtcccgagtctgggtccgggtctttagtccaggttcgggtctcgagttctaggttcgggtctaggtcacgggtcccgggtcctggtcggtgattggggttgatccggatcctttgtaaatattatcatataaattaatacggactatttattatgtattaaataatacaacttacattgtataaaaaattttagtataagtagttttgagatttaatattaaattgtacaatataatatatagccccttcaataataataaaaaaaattacagaccaaaattattttcttttgttatcacatatggagcactaaaatgtttacattttttttttatattaacaataaaatccttcaatttttttcttttcttttttagttcggttggcaaatccaaaatactatttacaacacaaataatattcaaagagccacacaaatctcatgaaggagatgactcgaataaaatgtagccaagtggtatacactagtattactaatcaataagatagtaaaatatgatatcctaatttgaacccccttcatagataagttgcttttaaagaatattacactcgataatcaaacaacgaacaatgacataaaaggtccacaaccttagatctttttattgaggaaaagatcgattacaaaattattggttgaagctatagtcttttcaaggtaaggttataaacatcattattacaatctcaaaatgacaaaatattaggacaaaaaagaaaagaaaaaataaactaagtcctcaacatcgttaccattcaacaaacctatgaatcttgacccattatgataagtgtatatttatttataaaaaatatatatatatatattttcttttatgattgttatccaatgaattctttaaacactttaagaatttgattagtgtgattttgatttgttaagaatttagaaggacaatcacctatttaaagttttttggagtgattttaatttttaacacactttggtgggaaaaggtcaagatcagagagcttatttttgcaagttaaaacttgttgggggattttgatgtctttaaagttataaatggatttggagctaaacataaagttttagatcttgttctcagttttttagaacatcttaaatcgtatgattttgaattgtattaaatgagttatggtcaaaatactgttaaagcacgcaaagcattttcccacctgctgcagcacaccaaaccacatgttgcaacctatttcgtgaaattgcaattttgcaagtaaggagcagtcaggttgagacacaccaaaccttgagttgtggctagggctgagcaattttgcaacatatttagttatgctttcaaggagaacaaactagtgcaaccaacactagcacgcctagagtactgagtggatgtggtattataactagttgtacttatagtatagattaatgttatcacatcagtatgactag

SEQ ID NO: 71879 - DNA, 1867 bp, Cannabis sativa
tccaaattaattatttaaaattaatacaatttaatattgttattcaataagaattaatctttggataaagccttttagtcagctgtggatatttctttataactatataaattacacacttttgtattcattcatattcacaattcaatctctttctttcttccccatatccaaaattcatccatggctattagggcaattttgataattactatagtgtgttatatttcatactatagtaaagctgaagaagatttcaccacaaaactatcaaagctagaagagttggaaattgagaaggagcttaatcttttgaataaaccaccaataaagactattaaggtgtaattataattttattttatttgctcttattataaatattattattatatgaaaagatgatttaatttgtttataataatttgacatatatttacagacaaaagatggagttctttacgattgtattgattttttcaaacaaccagcatttgatcatcccgcgttgaaaaatcatagctatcattataaggtttgtaatttaatttgtgcatgtttttttttttctttttcttataatacgtaatatttatgttgataatataatttttattattggtgtagatgaagccctcgtttcgtcccaagataaataaacgtaaagattacctcaatataaattcgaaaaggttaagttgtccgattggaactgttcctattagaagaactacaaaagaagatctcattaaatctaaactattcacaaaaacatatggttcactcactactgagaagccaggtcttcatgtaagtttcttctaaatgtttttatatacaaatatatatatatatacgtttattaattttttttattacaataataaaaactagtttattttaaaaaaaaattaactacaaaattattaattttaattttagttcaagaattgttttatgatttttttttttatcaaattaaaagttagtaattaaataataattaatatttttatttagcatgctgtgctccgaacaaaatctgatcctaaaaggagatataatggaggtggagcagtcatgaatatttatcaacctaatgtcgttggccctcaatatagctcatctcaaatgaccattaaaaatggacctgatagcatacaagttggatggacggtaagttatattttattataaggattttcatacaacatgcaaataacatataaacaataaaaaaaaaaaaaaaaatcatgtgaaaacacattaaaagaacagttcttcaagacacctatgacctatctaaagtgaagatgatcgatttaagcttgtgtttgcccttatcattttcatattttattagtgttatatatatgtttagtttatctttaatgcatactatattcataactttttctttttttttttaggtcaatccaactttatatggcgacaataaaactcacttgttcacatttttacaagtaagtctcattatacagtcatgttcagttttgttgttttcaaaattcttattttttgtaactttattttctgaaaacaattaacaattttcagtttttaaaaacaaaaaacagttttttaattatgatgccaaacatacacttaatcttctaaatatattttctgcaaaaaaaaaatctcataaatatttatttgttctctctctacacaggcgggtggaacatcttgttttaacacacaatgtcctggctttgttattgttagtactgagatacctctagatttcacttttgaacaagtttctcaacgtggtggaacattatacgaaacaagtgtgtttatttatcgggttagtaataagttgttactacaaaattaaagt

SEQ ID NO: 71880 - DNA, 847 bp, Cannabis sativa
tacataggcagtaaacctgccaaagctccaatggatccacggcaaaaacttgatgatcaacaaggtgtactattggatactccttccaactacagacaactcatcgggaagctcctttatctcactctatcacggccggatatcacctacgctgtgaatgtcctcagccaattcatggcttctcctcggactccccatatgcaagctttacaacacctcctcagatatttaaaagggagtcctggtcaaggcatcatgtattccgccaactcttcccttcatcttagaggattttccgactccgattgggcttcttgtcctattacaaggcgatcaactacgggtttttgtgtttttatcggcgactgcctcatatcatggaaaactaagaaacaaaacaccatttcacgcagctcagccgaagccgaatacagagcacttgcagccaccacaagtgagttaacttggctgcaatacctgctgaaagacctccacataccacaaccgaatccagcgtttatctactgtgacaatcagtcagcgatacacatcgctaacaaccccaccttccatgaacgcaccaaacatattgaactggactgccactttgtccgtgacaaaatcaaccagtccactattcgacttattccggttccaagcaatctccaactcgcagatgcttttaccaagccattaccagcatccactctctcggttcatactagcaagatggctgtccaaaacttgtaccgtccaccttgaggggggggtaacacgatttatgcctctctcatatcctgctgtgtattggtcagtatgaccgttatttctgttagtggtttaggtg

SEQ ID NO: 71881 - DNA, 1001 bp, Cannabis sativa
attggatcggatgactttctgcacacccctaggctgtcggggtttagggtccaagtctgggtctgtgtttgaggtctggattcgggtttaggttctgggttcgggatctgaatttgggttcggggttcgggtcttgttatgtgtcggggtttggggtccgggtccaaggtttgggatccaaggtctaggtccagggccaagttcgagtccggggtctaggtctagattcgaggcatgttctgggtccagagtgcgggtctgggttgggatccgggtccgagtccaagctgtggttggggttggggtcgagtttattttaaaaaatttataatttacataacctattagtacaaatcaatatcaaacgtagtattgtataaaataatactaagacaatacaatacaacccaacatagtactatacaatacaatacatcacagtgtactaaatgaaacttaaattaaattatttatgactcgatatttaattacactactaattatatgacatattaggtagcgctagggctaagcaccactgataatttatagcatttctcttattaaaaatgataattttacaatttattttaattcattaggtattagtaagtttatttatatttatttacaatctctaatatgatcaaggggagttctatttaccctctcataaaataataagcacaccccaatatttaaaaaaaaataagcttaaatataattttaaaaattactcttaatatttttttttaaaatttttttttcatattaatttatgttaatactaattttatttttataattttttttaaatcatgtataatttttttttatttttcccaataaaatttcatataacttttcgttataatatatcaatataatttatttttgtttgataagtatattttttaagaacataagttagaagaaaaaattaaaaaataaataaatagaactaagttatatattttataaaaataaaatattattaaaat

SEQ ID NO: 71882 - DNA, 3067 bp, Cannabis sativa
ttgggatttagagatcttgcaggaaatatttgaggatcgagatatcagtatgatcaccaaaatccctttacaagtagctcaggagactgaccaacttctctggcatttagagaagtcgggtatctacacggtcaagagtgcttacaaacttattcaacaggaaaaggggctagttttttaggacaattactctaagctttggaagcaattgtgggcattgctcatccctccaaaggtcaagaatttgatttggcgtgctggtacgcaatgtcttcctactatgtgccagttgttaactaagagagtggcagtaacagctgtttatcctgtgtgtggactggaggaggagtctatcatacattgtttggttacttgccatgtggtacacctgtgttaggacagggttgggacaataatttcttatcttggattgcttctctttctgaaaggatagaggttgataaaaggggattggtagctactctttgttgggctatttgcaatgccaggaatgactttgtttggaaaaataggaaggtgagtgccttagatattgttgtgtttgctacaaattatcttgattaatggagaaatgctcaaaaatctcagattgaggtattatggcctggttttagggcgggtgatggagctgagcatttgatttgtccacctgagaatagtgttaagattaatgtagatgcagctttatttgaggatggggctcgggcaggtgttggagttgtagccagggataacaagggtcttttcattgaggggttcacaaaaattttcaatgaagctctggaccctactttggtggaagcaatgggagtgagggaagcgctgagttggctaaaggagaaaatgtggcaaagagtgctcattgagacagattgcctaacggtggtacaagcgctctgcagtcaggtcaaaatgatttctttatttggtaatgtaatcaatgagtgtaagagtgtgcttaaagagttaagaaatgtctctatttgttttgtcaagcggttagctaatatggtagctcatagtcttggtagctgaatttgctggttaataaaagtattttccttcaaaaaaaaaaaaaaaaacctcaaacaacatctcaacaaaaaaaaaaaaaaaatcaaaacaaataagaaaacattatacttttagttttctaaaaaaaaaaaaatgaattcctggtgacttgaatattggggtagaaaatcacatattaccttacatacataacacctttataaatataatactaatgtttcgatgtgagataaaaaatatatgttttaaccatattttttcatgcatgatgaaagatgaatgaataatatgaattagttaagttaggattatgctatatatgtatgatatttagatagatatttatatagtgttgtttttttttttttaaaaaaaaaatgtagcatacaattaaaaaattgattatttggtataaataatttttaatttctcttttttaggtgaaaatagtagaaaggtttttttctttattaaaatttattattatatttagatttgaactattggtggttgaaaatgatgagtataaatatttttgttaattattaattaatatttataaatttaataaaaaattagaaaaatgagagaattaaagagagaatagaaaatgtcatgtcaccgtcttatatttctcctctatatatagatatagatatttataaatctaataaaaattaaaaaaatgagagtaataatctatgtatctatatatatatttagagtaattttaaagtgtaatgtcaccgctttatatctctccttaatatatatagattatgaatttgtaaaaaatgaaaaaattatcttttaaaaattattatataaataaaatatcaagtagtaggttttacacctaacaaaaacataagtagtgaatttaattaactacacagttaaatgtttctcaagaaaaaaagattaaaaaaataaattaatgtattttgtagttattattaagaaaaatactttaaaatattgaaactactaagaaatgtgaataatacaattatttctttgagtacattctcttcactttaaataaaaaatttaaatacatactaataacaaaaatcaaaactaataaagttacaaaattatctctaaaatatctactatatcaataaaagtactttaaatatgaaaaataattttcgtaatatatatataaatatatatactgtagaaactttttagaaaaccgtttgttagaggtcaaaatattaaaaataatattttaatccattaactatgttttgttattttttattttttatttttttttataaaaaaaagaaaaaacatgttttgtcttattgaggtgtctcacactcacacctctaaaggaagtgagggactaaataagtaccctatatattattattaattagtaagtattcatgcgtatttcatttaaaaaaagtatatatatgcacatgaagatggagtgagctaccttaggtgttaatagttaaaatatatatataacttggagtagaagaatatttgaatactagcttgtagtattcatcattatcttcgtctcatctttatgtaccattataagtagcagtagtacttatgtcctacacacgtgccctgatctgttttcctctttaattccttcatttcctttggcataaagacattttttaattaagcaattcttttatgtatatttgtaagcagatcagggcacttctttctctctctcactcactctccatgtcctaacgttgtcctggcgtatggcatccgtatcatattatatctaaccatgcctttgcatttactgcatgtatctattctatatatataatagctctagataatctaattaagataaaaataaacaaacaaaaagcatagtattcttattattgcttatatttgtatgactgtataattattaagtaatcttatagttttttattttttttttctaagaaaacgtatccctgtattgataatcagaattagtggtccaagatacaacgtaaggggtaaggat

SEQ ID NO: 71883 - DNA, 1341 bp, Cannabis sativa
gtcatctcgaagttgcttgtcctcggcatcattgagcagtttgttagctgataacatcctagtgttgagcttgtcgagcagcttcagaatggatttgtttccttggaacagctggggtatgtcttgagaggccaatctctcaaacagaacttgaagtgaggctgagagcagagcaccagcaaccaattcaacagccatattcaacgaatgacaaagaagaatgttgagtaaggcagaagaaagaaagaaagaaagtgaagaatataagagttgtgagagaatgagtgagtgagtggagtggtcaattgataattataatcagtttaaaagcaaaaaagggagtcaccaatctatttattagctaggcacttagttcaataaattttagtttattaattaagtgggttggttggttggctgtgttattatggaatggaatctagtcagtgatgttttttttaaggaataattaggtggggtttggttcattaaaatgtaattagctttaaggaataattaggtggggtttggtttattaaaatgtaattagctgactatcatattcattagctcttgtaacatcttgactatgtgttgttaggatttataaaacactcaagaaatatatatattatagatccaattatattcctaaaagtgttttaatatagaaaatcataaatcataaatgcttttgttaaattaaaaaaaaagaagatgataaaagatgagcggaatcactaaatacactattttcttaggtattttctctgatggaaaagagtgaatacagaaactctagtgtttattggaaccactacttataggcttattatataatgagtttttggtatttatactttgactcctcaacaaattataaattaacttatggtatctacacattatttccatgacaatttaatacccttttgatacccataacataattggtcacttaattttgtatcacattttataatagcatatacattattatacatatgtgcccacatagaatttttaatccaacaatctctcacttggacaacatatcttacctctaataataattaagtatgagaatgatgaacatatcagcagaaagaaagaaagtgaagtgaatgctcatatttgagctctagagttaagtgtatcagtctcaatgaaccaaacacatatatattgtaattacgaactgaaacataagttatgaaaagagagaaaggcaaagaaaaaactgtacagagtgatgccactgagatccttggtacactagatgatcttcttgctcaaaggatgctcttggcttgagagtgaaagatcttatcaatacaagca

SEQ ID NO: 71884 - DNA, 990 bp, Cannabis sativa
atatttaaatattatagctatatattaaggatgtttaggggccctatcattcttgacctccctaatatctagaaagtacattaattgttaaaattagattgttgaaattttgaagatttctgtttattaatgtagctacacaggcacagaatatatatactttgaaaaaaagtgactaattgacaaaccatctaatctgacctaaaaaatatgaattttccaattgaaactaatattgagctaacacgtaatactaatttactattaattaaagttttgtgtgtatcgaaaagtttagaggctcaagttagatacgtctcaaacaaggcaatttttatttctatgtgtgtgaagtgaagtctttactagtaaattgtaatgttattaatttcaagcaaaatgttaaattggcatgaagatttctttttctttctagctcatgcaaaatggggtagtcctttctcaaaattacataaaataaaatagtttgctcttaacagctaattgcgattctttctttgtgaattatttcggtttcgatccagaataatatgaagaagaggctaaaagaattgaacaacttttcaaagatgggattttgttgaaagcaaaatgtacactatctttgacaagttaatcgctaatgaattgatgttccatcaaaaaaaaaaaaaaatgttaatctctaacgatcaattgattttacctcgtccaatcataacaccataaaaagatttagaccgtttagactaatttgcgaattagtaatatactaatctaccaacaacaataatatcaccattatgctaaaaaagaaagtacgcagtaaaactccacttacttgaataggaatgcttaatattattacaagatattatattattattggtataattaattattaaattttatattttatattattggtacactgtatcattttgtattatattgtagagtacaatgttagtttaggtgccgtttggtaac

SEQ ID NO: 71885 - DNA, 724 bp, Cannabis sativa
ttgccgcctccttggagttggcctgagtgaagctaataaaattaatggtgagtttacttatatataaacacacaattgacatcttccatattggggcaacacttatagttgttaaaatgcacaaatcatgttaaaatattatattttttacttttctctcattcacgtaatatttaaaaaaaaaaaaaaatactccacacaactctaagaattaatgattttttaagtaaaaattaaaaaaaaaaaaaaaaaatatgtggccattgtctaagtaacattttacaaaattaaactacattacataagtaagactactttaatagacaactcccattaaagatggtctaagagtgagattaattgagaattaaattccccttttaaattgatgaatccgaataaaaattaaaataaattgtttacttgactaatcaaaatacacaatttatattgaggtaacattaccgtaagttttaaacatttcccattcagtaatctcattttaggaatctaaacatacccttaaataaagttttatttgaattttttcaaaatcttacttagttaaaaaagaaattttgaaagagtacaaaataataaatcccatattttactcccatccctaaaacaaaccatatattttaaacactataatgaggtacttatccatcttcattactgaaggaagcattgttattgagtaccagtggtgcctaacaccttt

SEQ ID NO: 71886 - DNA, 1095 bp, Cannabis sativa
attctcttacaaagctatcaaccaatgtatgttttgcatagagttcttcaagcaatcaaacttgatatgcataaatcatataatcgcatggagtgggaatttttgcataaaattcttcaagtaaactcacatataattaaattgatccaatctaataataatcgatcgattcaattataatcgacagacaaacattaaatatttaattgttatattttttaatatcaaattaaatcagatggggtatttaaaaatttaaaacatatgtaatggaactaattagaattttatgtttgttatataaaaatatatattttatatgaaaattaaaattaaaattatattttttttattggatgaatccaatctaataaatattgaattttatatgctaatgatgcacaagtttctgagttggtgaaattgtatcaatctctatgaacggtagtctggccaattatgcagtaaagcgaaatcaagtattcttttctctgcaaacatggatcaatctaggaagaaaagtctactagatttgttgaaagttcaacagatgagtggagactggagaggaatgaaaataagaataaaaatagaataatataaaatttaaaatgcatacaaaaattaattacaaaattaagaaattgatcccaaaacaaactaattgaagaggttaaaagatctatgtaggcttcgtgcgtcgaaaacaatttaaaaattaactttaatttcaaagagtgttcttgggtccaaagggattttttccagaatttttttaaaattttatgaatcatcttatcgttcatgaacaaaataaatctatagcattatataaatgtattaatgcaaagagattcgaaaaacacatacttaaaaagtttgaaaataaaaccgtgaaccaaaagtttttcaaataaaaactttaatgtattatgttagtttgaaaaaactaacataaatttagtatacattaatgtattaatgtattaatgtatttgaaaataaaaagtttttcaaataaaaccgtgaaccaaaatttcccgtatctttatatattaaaagtgatttaactgcattttttggtttaacagaata

SEQ ID NO: 71887 - DNA, 1695 bp, Cannabis sativa
gaagggaaacgtttttaattactaatattatatatcgattaatttaaggggttttttcatttatatatttcaaaatagttttttttttttttttgtattttaccgaattctatacagaaactcctattgcaactagctaaattgtaactagcgctacaaccaccctagaaatccaaaccgtaaatttgaaagaaaaaagttaaaaaaaaatagtatttggggtaattttccttaatttaaagtataaatacgtaatttaatttcttgttgtaaataaatatttaaatacttaagttataatttagaagagaaatgttaaagggcactagtatatatatatatatatatatttatatgatactccaacataacttaaataactactaccatttgattaaaaatcaaaagttgtaaaaatgtcctcatttgtgagagcaaaagtaatgctctcacctaaggagttcccaatatatatatatatatataaatataaatttgtgttaaagattaaaaaagaaataaaatgcaatataatataatagaaaaagaggtatataaaattcaaccaacaagatagataatcacgagaaaataaatacgaggagaaaaaaacacatcgtaatttgtaaattaatacagagcacaataattattaataataatgaaaattatattgttgtcaaaagaaaataaaattttttaaattgtaatttttttttttaagaaaatgataataattattttcttaaattattaaaacacatcattcattatccaaaaagaaaaaaaataaaatcataccattccaaaaatcaatatatatatatatataaatataaagaaaatctaattagcaaagatatcatttaataaaaggcaaaaaataattaaaaaaatatactcgtgatctcattaaaagattcgaaaataacaattttttacaataaaataattattttaattttattatcgattattattaataaatattttttttatctaaaatacattaactaattattattgtttaataataataacgtacaatcataataatataaactgaaaaacaaaattaagtagcattttatttatttttttttttatgaaaaagtagcattgttattgcaattaaattgtcaaaatatttttttttattattttaattagtctctttttattttcttcttttatttatgtttgttattagtttttttggaaagactaaaggtattgaggttcttttttaaaaaagaatagtcattattagaattcaatatacataaattttaattacaataactttattttacattttttaaggtttttttttttttaaatttttaaaaagtagtgttattgccattaaattatcacaataatatttgtatgtgaaattaatgtataaattttttattataaatatattattgattttataacttaatgaaactcaaaataaatttctaattatctgatgcatttaatattattataataagaagaagcacatttttgaaatattgtctacgtaaatttacatatagctagcattatcaaactcacaccgctcatcaaaagaaataaacaaatcattatagtaaacaagaaaaagaaattgaataagaaattaaataaataaattaaaataaggaagtaaataaattaaatcttcaaaaagataaaaaaaaaaaa

SEQ ID NO: 71888 - DNA, 1337 bp, Cannabis sativa
tgacctattgacaattgaactatggttaaaattagatcattggatttgtcaacaagttaaccataacaatttagatcaaacaataataggttttataaaagaagtttgaatataaataataaataaaacacacatgcaacaacattggatagttagttatatgatttatttaatttaaattaaataaataaattaattaaatatcaaaattcttaaataaaaatatttaatttcgaaaaataattaaattattaatttaaaatgaaacctataaatttgaaaaattaggtttataacaaaccgaaatatcttcttcaaaaattatcaactaacttttcaaatttatgtttttttaaaatataaattaaatatctaataaaataaaatgataaataaatatcatttatctaattttataatttaatataaataaaaataataaatttttaaaattgataaaacatctcgttagtttttcaaaattatctagattattttattgaaatatattatgttttcaaatttcaaataaggtcattttataaaaattgtttaaataatgaaatataaaatatctgaccttaaattcaaaaataagataaaataatcaaaaacaaattaaaaaaaattaaccaattaagccaaaaattgtagatattatcttttcgggttcaaaatctactaatatctaaaattaattaaaaagaatcaaattcaaactaataattagatttaaaatttgaaaaataaaaatctatatacaaaattacacgaaaaaaatttgaaattaattcccagaaatagaatgaaaaaaagaaaaaaatgaatttgttttggatttggtgcggatggtatgctgtgcataccatccggatggtatgctgtgcataccatccacacgcgtgtgggaagggggactaccgagaaaacttggcattggaggctacatgcaccctctccgcgcgtagaattgggcttcagacaggagctgggcgtgttttcttggacagatgctgtcctaacacgcgtgacacccgagtgtcatggggtgtccgcgcgcgcacggggtgatgccccttcctatttttttcaacttttcaaaaaattataactaattcaaataaaatcaaaatccagttctgcaaaaaaataaatttcttaattttttccatactatccaaataaaataattccagattgtgaatccaattattttgcgtaaaatttttgtaaatatcaagcaatcatcaaataaacacatagatcaacatgaatcacagccaaatcacacatacatcgttttaaatctatatttcttgaaagtaaatcattaccat

SEQ ID NO: 71889 - DNA, 2291 bp, Cannabis sativa
tttatttatttatttattactttttatttaaaattctgaatatatatttatttatatatacatatttaaatttaatgtgtttaatttataatggctgttagtgtataatttaattgtaaaaatttggtgttgttaaaaaaaatagtgtgttttaaagttagttaatattgtaaaaatttaatgtgtaaaaaatatttaaaaaaaaatcaaagtagaaaacattttagtttatgtaacatttgtgattgtaaaaatgcattagttgttttaaattattttatgtaaaattataaattgatatttgtaaaaaaaacataattgtataaatttaagttaataaatgttctggtataagtttagtatagttagagaaaaaatgtttattataagtttaattttaattagtttgatttaataatatttttaattgtgtattgttaattttgtgtaggtgtttatttgtggtgatatcatttgaaaaaacttgagacactatattagacttggtatctacttaaacttttttatttaatatttaaaaatgttagaaaaattaaagtgtttctgattgttaatttcaattatgtttaggtattagtgtgatgttgttcgagtaagcttttaatttaatattttatatatttgtataggtttcgggttctttgtactaattgaagattgcacaattgtagctatctttattagagaaaggtataatctctaagactttaaaatttatttagtggagtttgaatatgttaaataattcatccgtggtaaagtaggttctgcgattaattgtactgtggtcggatgagaagaatatgaatgtttgtagagtttggatatcttaaatatttattcgtagtgaagtaggttatgcgaatacatgtactgcggtcacatgggtgaataattttgtattgttattattgtattattatacgtgcttattaattatttttttcatgttttaaattttgagaatgtccgattacaatcattttgctgtcaaaatttcgatagaattaggataattttttaataaaatgcataaaattcactaaaatatatatatgtggtaattaatttaattaattattactagattcaattctgatttcgtctaaaccatttgtctagtttttcatagtgactgagagctatgaagtcaaaagattaaaattcacaacttcattttttcacttttctgacaaagtgacttatttagaaattggctagttttgagtctcctaattttcccaaaacaacatctctaagaactggtgactaacttcatcagaacacagaaactggataagtgatgtcaaaatatcacttaggcatcaaaaaatacattcccaacacgatttcccacccacccagcgtctaggttaacgtcatatatcaacttaggcgctggatgtcaacctggatgctgggagtaaaaaacctttaataaaacgaccataacacagtcaatagtgatttgattgacatgattcaacttgaatttaaaaggtatttcaatgctctatcaagtcatgtctcacactccaataacaattctgaagttatcattttttcctcaagagagttacgaatttaagctacaacttacccgaattgagtcccacagatgcgactcatgtctcagaaattgacgatcgacatgtggagtcaatttcaccgttagatcatcatcaacggtagaaaatagcctaaatttatttttccatattttttggaatattttattattattttaataggacctccttccctttaaaaggagagctcatctaactcatattttacattcaaaaaagtacccataaggtcaaagcatccctctttattttctctttctagaattagagctttcagacttagccaattttcttgtaattctcatgagaaataaaaacttgaagtagatgtagctccattaccatcacatcatgggaagtgaactactataaatcttatgtgtctttctaaattatttacttaaactcattattcatcttgccaatctagcgagctgatgttggccacttttcaacgtcaatattttagtgctttcatttaaagccacaactcgagttcctgattacagtttgatttccttattgggagcttcgttctaaaaggaatccataagttctagcaagtaatcatctgcgaacacgcaaagccacactaccactcctggtagtcgtgccaccactcaacatgtaaaagccactgaaatttcccatatggaagaaactatgagcgagcatccaaaa

SEQ ID NO: 71890 - DNA, 825 bp, Cannabis sativa
ccgccaatgggatataaatcttctccaacagcactttggtcaaatcgacattgatcgcattctttctatttcgattagccctaatccaagagaagatagattgatttggcatcactctaaaactggtacatatacggtaaagacgggatatcacttggctgagagtattgataaaataaatgattcatctacatcctcttctaatagcacttggtggaagcgtctgtgggcgttaaagctccctaaaaaagtaaaaatttttgcttggagagtgattaatgatgctttgcctactgctgtaaatctcttgcacaggaaagttactcaatctaatgcttgttcattatgtaattgctcaagagagtctttaggccatgctctttttctgcgtactcgagctcagcaggtctggtccttatccccttttctcaaggctgttcctaatatgtttcagtttaacgggtttgaaattttttcttccattgctgctgctgcttccaactctgatttggagagaattttgtgtcgtatgtggagtatttggactgaacgtaataaggagatccatggcacaaaaccaaaaccggcatcccttatttgctcttttgctgacaattatattcaacaatacattaattcctctctgcagcaaacttccttggatccctgctcctatgtacagcctagttcaagtcataaggagcaacggaatgggataccgagtccctctgcaataattaaatggtctcctccgcctgctggttttttcaaactaaacgtggatgccgcttatgatgctgttggggctgttattggtattggagc

SEQ ID NO: 71891 - DNA, 1733 bp, Cannabis sativa
attgaatctaaagattgatatatattataggtatggtaaaactcagatcaatatacgtgattttcaagaaatctcattcatctaatcatttgaaaaagtttctcgtttcaaacaatattgtacagatatatcaataaaaactctgttcaatctaaaacgagaatttacgattgaacaagaacaaccaaactagattttgagttttcggatcttacaaacagagctactcaagctttttctctgtactgatgaaattatgttactcgaatattgaagaaatctctagggtgggtagaatgaaatgtacaaagtaacaaacattacatatatatatatgtaaaatttgatcggtcgatccattttcaatcattcaatgaatgataaatcacttacacttttcttttcaagaaatcaagaaggtaacaagaaaaactgaaggcgataaggaaaaatttctattgctaaaaagagttagtttataacattatctagatcccaagtatttattatgctagagtaaaaagctaacaaactaaacacgtagaaccccacatgacaattaatataacagaaaataattaaaaaaaaaattaacatgcacaaaataatcatagacaagactatctggatacagtaactgatctaatttgacaaaaacgacatttacaatatttttgtgcgagcatgggaaattggattagaaataaagaaaatattgctatgatttgtcacactagatatggagaagaactgttgttggagagatatttgcagctcgtgaagcaatgattgaatccatgtcactacaacaaaaattgtcatcacgagcgacttttttcgttccataaaaccttttaattcattccaaaagattatttggtgcgactagtcattcctaatgttttattcctgataactcgtgcctgaaaattgatatcaggaacaaaatatagcgacgtgcctgatgctaaaatatttagaaatgaaaatgaattattcctgaaaagtgaaagtcgttctaaaaaatttagtcaggagcttagtttttacacattatcgggaacagctgttttattatcagatacaatgcaagacttctaaattatgctacagttgacctactaatggtgacttgcttatgagattttcaggccacaagattccttccaaagtagacatatgacctcatatcatctatagtatagggcacggtttaaccgtcccttacactctcctaaaatggcattttattaaaaaatgtcgtctattttatttattacgattttaaaccgccaggaatactaaatttttcccaacggttttaaatagttacttgatttttttagcgacggtcacaaaaaaaatcgttttaaggaccatcgcgaattctgatatttgtaatagtgagatcagcactattacaaaaagtataattctcgtcgatttctaagtgttatttaaagaatttacgtcagtttagagaattgacgtatataccataatcgcaaatagttttttatttgcgttgtttttgaaatgacgtaaaaaataattatcttcatttaaaaaccgatacaaaatatgcactcttcttttttatcttctgcgtcggtttagaaatgaggcaaaattgattgtggcaaaaatgtaggtaagggaaaattgcaaattttcatgctatttttcccacctgcattatcaaattttaaaatgattttatataatagtaaata

SEQ ID NO: 71892 - DNA, 1022 bp, Cannabis sativa
gcgatatggttgactggtgtggacaatttttaaaagactttcaggatactaatggaggacaaacaggtattggtttggctagggaagaggggaagtggtgtaggccgggggtgggttgtgtatatatcaatgtggatgcgagttaaaagactaatgaaggccatgctgcacttagctatgtggtgcgaggaaatgatggtgcagttgctgttgcagctgccaaagtggtacaccaacaactaacgcctcttatggttgagctgatagccattaaagagggactacaagtggggatacaacggggttatcgtaactttacagtggaatttgactgtctacgagcaatctaactgcttcaagaaaaagaagatagttgtcgcgacattgacgagctgctacaccaaattagagttttattgcaacgtcctactgtttttggtttattttttgtatatcaagaggccaatcaagtgtcttatattttagccaatcaaactttgttattcaaagttagtactatgtgaattgaggctacacctcttagtgtttgccatgctattcggctggacgatttttttcccgtggaactttctctgaatgaatgcattctcttaaaaaaaaaaaaaaaactgaaaactactattaaatgcaaagattggactaatcaaaatatttgaatgaaactttttaaaagacgaaaacgaaattcaacaaaattgatcagcattattgtgtaaaatcacagctcatgaatatcctaatgatacaagcaaactccaattaattcagctatttcaacattaacatcactttagtgggaaaaatcatgtgtcaatatttttcacccaccttaacaacctttattctcatggctgttttgtactatggaaacgttttcatcaatatgagatcatttatagattatagagcaaggcagaattaaatgtgtacattacactctaaacaatttataacttcaaaccttaaaaaaatatatacatatactttaaatcaaaggatgt

SEQ ID NO: 71893 - DNA, 992 bp, Cannabis sativa
ccgccccattaaccaccaagacggggaattcccaccccattaggggtgggtccccgcagttacccatccctgcggtataaatttccatctctagtgtcattgataaggtttgtttctttgaatgtgggatcgagaccccgaacccgtaccaaataggaaaaatttgtaagaaaaaatgtgtagtaattttaatttttttttttttgtattattgtgcattcatttttatatgagttatatatagttttttattcttgtatttattgtagatatattatatgaacttttgtatttgtataaaatggaaattaatacaatgatataagctttaagcctgcatatcaagctcttaggataaaatctgtctttgatcactttctttctttaacaactttgaaatcattttatattatactatactattactattactatagtgataaataacgaactttcactttcagtttagttggttattttactgttagagttagtttgttatttctatccacttgcctctgtttctttaacagagtttgttttcaactgttcttgtacaaactcttgtgaattctttgcctatataatggaaggttcagctcttgattcattagagcttttacaattctttgtgttcagttttaattgttccagatagggattttattgataagctactctttcatggtatcaggaagcccttgacttgcgtcgttaatggatcctagacacccagagaatacctctgctcactcctccaccactgctcctcttccacaccagtggaatccatttcaaaactctctaaattcctcacttactgttcgattagatcgcaacaactaccttgcttggaaatcgcaggtgattcccacagtcatcggacatgggctcgatgacatccttctcaccggcgttgcccctgttgagcgccttgtcaatggtgttatcaaccccgaattcacaatctggaaaagaaaagatcagctact

SEQ ID NO: 71894 - DNA, 1131 bp, Cannabis sativa
ttattttcacttttactacttattgatgtaattaataattgtttacatttgatttatatatttaatagggttttatataattctaataaaaatttaatatttttgtgactttacacatttatatcaaaaaagtcgattaatttaagcactattataaaatttaggtcaaatataacattaacttatttttgagttatattgactcaaattatataccatctattggagatggttttatataataccattgaagtttaattttttcttaacatgagttaaaaaatacatatacaccatctttatagcactgcattaagatgctctaataagtattatattatttttatgaattatcttacatacatttatctcatgagaattaaaattaccacttatattaaagacttttttatcccttttaaggtatttttgtcaataaaccaattattttgtaagaaaattacaattaaagtgcattcaaatcaactaaaaatttaattaacaaataattactaatgataagattaacaaataacacacacaacaatcagagataaaactgtgatgaatatagtatctaaatcagaaacgagtaaagcaataagacaatgaaatcaacacgaagatatatactggtttaagtcctataaattgatgtgatctatgactctactccaattttagaacaccactgaaatcgtctttattgattgagttagaatagggtagggtacaatacagccgagatcaattctcaatggattctctcaaagtgtttatctctcacactcttacccaagaatctttttcatctacaggatattcttcatacaaaacccaagcccaatctatctcttttctctgtacctctctgtacctctcaatctttctctctcaagatcacctctcataagtcataactcgtctgatcaatcacaccttagaaagataagtgttggtggtatttatagatctgcaatatagaatccaaagtcggtggctaccaataattagttgttaagttagttaagacttaacaaactcctcataacaatatctccacgtcagcataagtgaagtgcttccgaatgagacgtacgcttcctggaagacaggccaaagcatatgctg

SEQ ID NO: 71895 - DNA, 780 bp, Cannabis sativa
gtgatataggaagttatgggtcatgataatcttttaaatgttcagaagggataattctttttctctgttatccttaatctcagagagtgggtgatccatccctctttttgttctgtacgtacatgtatgccttttttccttcttataaattcaagtgaagtgctggtttaccccatcacactcttctaaagaatacattcagagatcatgacacatttacttatccatataaacatatatatatatatatggtcattactatatattttattagtaattactatatgaaacctttatagcttcactatatatttctctatgtatacacattggttgtaatttgcttaattgctacaacaagtataataacatgggaaaagggcttaaacatgtggaagcaaatttcctttggcaatttgtttggaatattaatagttgtgtagtcctctttgtctaggctaattcaactttggttgtaaaatggtaaactaaatttttctttacggaaattcataataaaaaacaatttcaatgaccacacctcaaaactcaataaaattgatggactttatacaaatctatatataaatatagacagtatatatacagatatatatatatatatataatataagatctgatcatctacttgatttgtatacccgtataggtgtatatgctgagtagggaatgaagtcgtgttggtccgtcaagcatgtcaataaaaggtgttgttgaattcacattatatttgtcatgtttacaaatactaagtttcac

SEQ ID NO: 71896 - DNA, 681 bp, Cannabis sativa
tgtgatacaacctccaaaagtgctgaagaaaattcaagtgtcatatttgtctgtcatttgattaagaattttttatatataatatttagttataagtatcacgaaaactaataagtaagatgaaaagaagtatcaaattcgaatacttacttatttactcactattgtaacctacccagggcgggcctttacagtgtgcaagttgggttactgtatagggctcctaaaaaaataaaggatccaatacatttttttaatgccttttaattgttttttaatgaactcaacttttcaaggggctaacaacttgttattggatacttccatcccaatttccaaagttcattttcaattctattattgttttaagcaaaaaaaaaaaaaaaaaaaagttatttattacttttttcaaacatttcatattctttttttctattaatttttgttgtattggaatcaataacaagtttaataaaataattggagtttttggtgttttgtaaaatatataaccgtatgataatatttaaaaatattttttataagggtctaattttaaaaattagaacagagcttctaaaatatttaaaatgaccctgaacctacctacaacatataataagatgattgttgaaattattttaccaaaatcttagatttactaacaagtatgttatttaa

SEQ ID NO: 71897 - DNA, 1028 bp, Cannabis sativa
tggtgtggtgttctgttcttgttggtgtctttgtctggtgtttggctcctaggcgctttttctattctctaatggcttcaagcagtttgaatgttcatggtatggatagcctttatgctgagattcatttggatgaggaagatgatgatgttctggtttataataagggcagtatcgttgataatactgtcgacgatcagtggtgcttagatgggcatttcttaacggataaaccaatagattttgatgcaatgcaacatttgttggcttccttatggcagccgggacgtggcatgtttgtgaaagaacttgatactaatcgttatatatttcaattttaccatgaaattgatattcaacgggttatggagcgtagtccttggacgttcaacaattttctgctggtgtttaaacgattgaaacagggcgaaaatcccagagaagtgaagcttgatgaagttgacatgtgggttcagttgcacgatctacaatcagggtttatgtctgcaacagtggctagagatgtagccaataggatcggtaagtttgttgagtcggatccgaagaactttatgggaatgtggcgcaattatctacgagtacgggtcactctcaatgtcaatcagcctttgaagaggcgtttaaagcttcgtaatgacgagggggtggagttttacacaaatttcaaatatgaacatgtcctaacattttgtttcatatgtggaattctgggtcattccgatcgtaattgtgaaagattatttgatacctcagatggtagggtggttcgcccttatggagagggaagccaagacgtcgtaatcacactggagtaggcgattctaatctcctagctgttcacgttcccatgatcacggaggaaattatgcggggtgataccgcagtgaatgtatatggagaaaatcaaggggagagatctttgggtgttgctaaggagatgatggtggattcctctcctaatatccaggagcaaaatgcgcagctagttgatattcctattaatgagg

SEQ ID NO: 71898 - DNA, 2312 bp, Cannabis sativa
actttctaggtcttacaagttgcacgactaggtgacacacctttatgcccatgtgtttgcatgaatatgctatcactcctgctcgatgcatgtgaatttttctctgtctcttcaaatgttcttattaatttccttgccttagaaattacatattggggatcgtgcactaacggttacacaacccttgtaatgattacctttttgcttttttggagagaaatcgaatattttaaaattaattaccaccataccactcggtaatcctataaatgggatcaaaatacccatttccaatttttagtcatttgaaattttctagatcacaaagaaagttgttctcgaattgtctgactggtgaatttttgattgaagtaatcttgtcgagaactatcaaccaccttgacaatcattgagttagttctttttccttgaacttttacaattccttgattattgctcagtgaacgtgcaggattgcttgctttaatttactggttgtaagaattttaattctcgaacttttggttgaaataaatccaaatgtcgactgctagggttgactcggcccgtattgaatccttacgagtataacctttttatcgcaatcttttgtactgttacctgaagcttttagggttttccgctatcatgcaccctaaaatccctcttttttagaaattcgaccaagaattaggttttaaaactaaaaatataaaagatttttaatcaaagacaatatgacatccgtttttcttaataaccgacagtataacggactacggcgtcggttataaaaaacaactaatgccttatagtctttgatttgcaccaagattctcctgtgtcgtcgattaatatgagcacatacaacatctttttgaatagtgacgataccaagttttaccgaaattgatgccaaatgctccaaaatttttacctctaaagctcttttttgtagtagtgaaatcttattctggctcatgttatgcataaatgaattttcttagctctcggtccctttgagatctttgctttttagtgatgtctctgaggctgttttcttaaaagaagaataagaaaaagaattaagaaaaaaaatcctattttattgcatgtaagtgagtttatatcgcttttgagaacaattagttgtcttttaaatatgttaagttggcaactttataaagttttttttttcaaaaaaaaaaagaaaaagaaaaacaaaaatggggatccccaaagtttgaaagtgttagtgttatgttttaagttattaatttattttgatagtaaatttttaattaaatcacatttttttatgaaattataattcattattataaattaatttacaaaattatatatgtggcgtctctatgggttaaagtgttacacttaatttacctcctaaggtaacaagttttgcttggagattatcctctagttggatcccacctataatcaatctttaaagatatggcctccttaatgacaatatttgcccaatgtgctccactgatttgaaaataactcaacatgctcttgagatagccaacttgtgacagttcaaaaattttgctctttcagtcttagtgatccagttgccattgtgagtgacattcataatttcatttgcatttttattgaacatcttcctcgcatgaaattgaattgattcttaccacttgatcgagaatatggtaccgaagaaacaagaaagttcatgaacaaaagttgttacaccgtcagagcttgttggcccttgggcggctgactatctcctcgcctaccaagcatgagaatgcctatgttgttccatgcaacttcgaagtgcagcatacagatgttgctgtcgtgcttccttgctggcttcctccccttcataggctgttcaatgttaattcgtatcctgccatcaatttggttggtgaagttggtggcattgaaacgattttttgaaatctaatagtgttgttcttacttctgtcgcttgaaagttgcttggaattatttttccaaaaattaccgaggcacttgcaatttataatgctatgtctcaagaccttatactcggtttcaacaatgtttaactcgacactgattgccaaagtttagttcataaacgtaataattctttagttttagaatcatttttgagtttaattctagaagatattagaatttcatgttatcatttcaatattgtaagttttatatattgtcctttaatgtaataattaattatttagctaaatttgctttaataactattgcaagcacaatttggctattttctctcaaaataagaaaaa

SEQ ID NO: 71899 - DNA, 958 bp, Cannabis sativa
tttttttttttttttggaaaagcacgaatttgtgtttcaatttgttgttaactgaaggttaagtatttttgaaatagtataagctaattagcaaggaaaaattaaagatatcaaattcgattaagacatatttacaatgtgaacccgaagcatatctaaaagataataaaaatattttaatttgttaccatttgttatcaaatcttgataaattacgaaatggaagaaaagtttcaacttgaaaactatataagtagattcaacaataacaataaagagtcaagccgtaagtaaaaatgcaatatgtgattggtctgggttaaaaatgaggagtgattgtttaatataaattaaataatccaataaactttttcaaacaaactaatattatgtttttgaaaaaaaataactatttaataaaaaggtaattatttaaaaactggagaaaaaagatacttatgctcaatctcgatccaatctaacatttgtaccaaatcttagaactccacacgatcgagacctgaagaagatgcaacagtagcagatttgatatgttgtgtgacttttttgcttggcttttaaaaacaacaaggtcccatacatcatattcaagatggatctcgttgacacccatctcaatcactatctcaacattattataaataattgtcccggcatacacttcttcatcagggcgagagaataaccctctcaaaacaacctgttgaaaaaagaaacatgttagaatcctttcgcaaacctatcaaaactagactaaatgcaacagagaaaaaaaaaacacaacttatcaatgatatcaataaaagataaacaatacaataataacagaaaaaaaaaatcatacccttttagaaaatattggagcaagtatttcttttagaatgtcataactgttgggttttatgccctaaataaatctcatttcaatataatcaga

SEQ ID NO: 71900 - DNA, 1091 bp, Cannabis sativa
  modified_base (1019)..(1026): a, c, t, g, unknown or other
taagaggagttttatttgcaactttctattacaatcacttttttaatttttgtgttcgaaaataaatagcaaaatttttttttttctaatttttttcataacgatatttgttatagttacaacattatctttataaaatttttaaaaattctgaatagtttataataccgacaacagagtttctaattttagttcaccacgtttagtgctcaaaaaaaattaaacttattttcaatattataaactataaattttttaaaattttatatgaataatattgtaatataacgactatcacacattcacactgctaacaaaacaattcaaataataaatgaatgaggtcatataacatactacgtgaaagatgctttgattattatatagattaatttcacctactattttttttgttagttttttaaaataacaataatataaattaaaaaaaaattataaaaaaggtgaagtgaatcaaatatgatctaatcttgttctttagaaaaaatgagaaatattaaaaggtatggtgtttagtaccttccattctaacatgatacatatagttgttagtcaaattttaagtattgaatcttatatggtttaataaaataagttctgaaatatcgttaacttattataaggcgctactacctttaaataatactaggcaccactaatatcttataaccaccaatctcttataacaatactaaaaaaaatcttaaatcttaccacaaagaatttgatatgttatatttatattattggtgtgtatacgtagtcttttcatttaaatctaaaaatacataccacttatagtaattttgtttttttgaaaggaagatataccggacctagtattgatacagcggtttggtacttttttcttttcaagtcttaatttcattttgttaatttaaagaaatgtaatatgtgtaattaaattttaaaaaaaaaataatagcactaatcttgcatttatatataaatatttttatactagatgagagttacgnnnnnnnncacgtaaatattagttttatataagttttagtggtttttgtttaagaatccagtaactgagcaac

SEQ ID NO: 71901 - DNA, 2150 bp, Cannabis sativa
agtgaccaagagtcaaaagtttgctcggtcacttggggggcacctatacctttacaaagcatttggtaaaaaaaaaaacaaaacaaacacaattggagtatgattatatatcagggatgaaattcattaagaataacaaaagcattgaaaaccagaattaaaggttgcccggtcagccagttgttacaaaaatgaaaaatatattccaagtttaaagacagcttggccggtcactttatctcaaaagaaggcctactggttgaacagacataaaaagagatagtaaaagggaagcaattaaatagtaggagttccaggctctttgtacgggtcaactggatttgaaggagccggaggatcatcattttgggtggaaggagcctcaacattctgatcggtaggagaggtggaagtggttgcctcgggttccccgtaggccgcctgagcagcacagtagtcgagaaacatgtctttggaagtgcccacataatcaaagtttaccttgggattggctttccaaaagtcataaaatatatcgagaccagctgtctctaaggcattcaccttctccccaagcctcgccacctcagacttctggttcttaacctcagactcgagttcctcctccttagccttcttctcatcctccaacctgcggagaagagtccagagaccctctctttcgtcctgaagactagtaacgtcctaatacaaagaagcaatattagcctcgagcttctcggttgatggcgtctcctgcagttccttagtcagctcaacaactttggtcttagccgctaagagtttcttgttgacctctcctagctctatccgcacagacccaagttgaacccgtgcatcctcggcatgctttttggccaagtccacttctgttcgcattgtgttggaaatggcaaggtttttaagagcagccaatttagctcgggaataggcatatgccttcttgagaccagtctgtgtggaaaaaatacattaaaaatccaaactagttaaagaagaataaaagaaaaatgtcagaaacgacttacccgcgaaagctctttcgagactcctcccatgaccaactttaaagataaatcattatccgccccagccaactgtttgttcacctctgggaccgaccggctcacatagtgattgagcatgtctctgcctcttttggtctccatgtgcaatgtttaaggtggggcaggagccttaacttgttcagacccacttctgatcagctcaggtccacctttcgcctgctcaaatccatttgaactccctcatcggtaacttttggacttagtgacctagggtccacggtaggttgttcctcacaaagatcaatgacctcttcagctggttccttctctttggatggagtctcaccgcccttagacttcttggccggaggcgacaagcccgaacttccccccactctcttcttcaaagcctcaatcatcttttgagacatttctgtacgaaataaaaacaatatagtcagaagaaggtataaaatatatgaaggcataaaaatcaagaaaaataaatgcaagatgagtacttgcacgttgggaggagcagttgcccgaacaagcacagatggggcatcatcaattgaagagtcttcctactcttccaagacggctttcccttttccatctaatggagttgatggtaaagcaggtagatcatgctctctgatctggatagtatgttcgatgggcctctgccaaatcgggagggttttcttcttcttgagcggcctctcctgctcagaatattcttgagcctccttctcctgctcagaatattcctgagcatattgcttggctcctgcatcacccttcaacttagcctcacgcttaagtttaatgagctccttcttttcctcagctccctcagcccggccaaacttggacttcttcttcctccccttcacaggctggggtataaagtctattggagaaagcttgtacttcactgagctgtcctccgaggtcaacaaagtgatattccgagcagcatccggcagctggataatcttttgagctctgtccctaagtgccaaagtgaggggtggacgacagtatattgggatctattgaaaccgagtataagtggtatccatgccttccacgaag

SEQ ID NO: 71902 - DNA, 807 bp, Cannabis sativa
aaaaaaaaaaaaaaacctatttaacagggtcgtatggggagtgtggaacctcatcctacagaatttattaaattgaaagaggtgatcaactacattaaactgcaagttgatagctttctttattccaccagcaacatctctaaacacattgaaattgaaatcgattgttttattgttatgcaagctcttgtagtaacttaatgtggaaggaataccaagtcgcaagaattatggtatcgggatggagaaaagaatagcaaattctttcatgtcactactatgatcaaatagaagtgaaattttattggtgcagtttcggataatagttaggtttggattgaaggtcagcaacatgtgggggattgtttttttttaatatccaaattcatgtttgttctttctttgtctctttctcatgtgccacatttggattttttgatcattccttgtatctgagatgaatggaattctgaacttattgtaaacttaagaacagagtaacacaaaagctaattgagattagcagcaaaagctaatcaaacaattagactaatccctttatttataagcagagagagtttgttacaaagtacaaagatcaagaaagaataatagaaataactaccttaacagaaaaacaactaactgtaaaaacagaaaaacagttaggtgttgacatcccccctcaaacagagcaaggatttagccatgtgaagtttggacttaaggtagttgaatctctatgtagataaggatttggtaaggagatcagccacttggtcaattgaaggaacgaatctaacagca

SEQ ID NO: 71903 - DNA, 1900 bp, Cannabis sativa
ataggataagtctgattgtagttctagagcttcataactcaagacatgagtggggtttgaaacatatttcctcaacatcaaaatatgaaatacattatgaatagtcgatacgatacctgcccaaccttctcgagtatctcaaatggccctataaactcaggtcttaacttgcctctctttccaaagcgcctaatgctcttcactggagaaaccattactaatatccataattaataatattctataaataaattaaatattattaatatatgatatttaggttaaaaatagaaaaatatggatttctactaattttggaatttttcgggcttttatttcatttaaaaaaatgaatttttaattaaaaaaaaatggcaaaaatccctcaaaattcgaaagagcatgcatgaagcatgttggtgtgagtgtgacaccatgcaggtactgagatttgcacgcacgaaagttgctggtagggtgggcgcacacggataggagcttgcaccagggatgatgcgcccacggatgaggcaactggaatgagatgtgcacacagaagggcctcttggaccgactattctcggccaggtccgagattccacacccatcaaggcccaacttcgtgtatttgggtcaattttgacccgattttagatctgtaaaatccgtacatgcttaaaattcaaccaaatttaattctaaaataattttaatcacaaaatatgtaaaatgacattatttttcatagaattacatgtaatttcacataaaattcatcaaactcacataaacacaacatgaaccatccaaatcacatgaaaaagcaatcaagtcattttaaaacatatttctcatgaaagtatataattaccgaggctttgatactagtttttagaatttattttaccagaatcttaatttactaatatttatgttgattatgaacaatataatttaacatcttaaaatatgaaatacttagaacgataagtaaacaacttatagtttaagattactcacaaaaatggcaaaggaatataataactaattttgttcattactctaaccctcaaatcctttctgtagtagagtatcaccaagtactgaacctggatagctttccttaacccgataaataccttcttctacatagtcttccacaaagtttaaaaaatactttgaattgtgtgggcaagcactcaatttactaatcgaataaatttgggaggagaaaaaaaaactatagaatttcaaaattgaaagagaagaagagagcttttctttctagggttgtatcacttagaatcatcttatgacaaaactctcatctcttttatatatttatccttcacactagagttaggttagatgagatgggcttaaaattaaaagccaattaggcttaaatcactctcatgactgaaatcaactaatgggtcatatagttagatttttgccactttatttcaacttaatgaaacagcaagtctttttcaaattttactactaatctcatctaattatttaaataccaattttaatttaataattatcaaataaaatataatttaaatatatttattaattagataattaataaatagaccattatttctcttttcttcacaaatatgctcaaactaagtaaaaattctcaaataaaacatagtttaattttgaattcggatgatttcttaaaccaattaattgagtctacaaagcagtattatctaaaataatgtggggatcgtgtgcctatgtaaataaactcccaataagtagaatgcactatataccaaatgtagatacgctatgaattatctattatttcaatctaaacaatcaatgatcctctatagacggtttacatcgagtaaggataaatttaccgttttatcct

SEQ ID NO: 71904 - DNA, 842 bp, Cannabis sativa
ttttaaaaaaaaaaaaaaatcccaaaatttcaaagatattacacaacgacatctacgactgttgtacatcgtggaccgaggaggagagacggcttcaacggtgattacaagagaagaagagagctctagtctgctctaaggaccacaataggagatctccagctagggcttttggttatcttagttgagggagggccaatctagggtgggacggccaaatggggctactgtcgtcgaatgaaaggaggggtatggtcttgcttagggcttggtatgaagtcagggtgtctgatatgttttagttttaggtttttttattattatgctaagtttaaaagtaatattttaggaaaatgaataaattattaaatgcctgggctggcgggttggtacgggtctaacccaaacccatgcaattgcaaaaaacactctagaacccacccgagaaaaccaaatggggtggacccaaaccgcttgtataaacatgttttccaacgcaactaggttctacgagtcagaactctgggtgggttgactaggtccaggtcaaatcgaactcaaaggttcaaccctaattacatcaaactcggataacacaatcaactaaaatttaaccatctcaagattgagattttattaatttatatataatcaactatatgatatgatttagaatatatagtaaaagtaaatttacttattatacccacaatcaatataggttcactccaatgtaacaaatatatttaattatgtctactttactaatactctcgaatagacataccacattacaaaaaaattacttttaataatatttttttagttacaacataaatttt

SEQ ID NO: 71905 - DNA, 1958 bp, Cannabis sativa
aattaaaaaataaaactataagtctacaatcgggagagatagtatgtgaagaagacctatcgctaggaggctgaaatggtataatcagtggaattggaggcatcgagacatgttgaatcctggaacagtgacggccagttacattatttgttgctgaaacatgctcacgatttgattctgagtctccaacatttgttgttgccactcgttcagtgctaatagtttttctacccttcagttcaggggctcatattcctcttgggtgatagtgggttgcttggagggaccttcttgggagttaccttctttacccacgtcctaagtctcgacaactagcacatccctctcaagtggcgtgaccgctcacccagcacttgtgtcataagacacatgtctccagaaaattagatggggtcaacattgtactgctaggggacattggtcagcgctggctgagtttcacaaatctcaaccattttggcctacaaaaaatttaataaattgttagagtggaatagaaattaaaatataacacgaatttattaaagatataaaattacttacatgctattgttatgtgtgttcattgcgccatttgttgttcttgtagtagaacttttcaaaagtgtccacaacattaggaagtttccctatctcgggatcaacctatttttatacaatacaaaaaattagaaatatattattcaaaaaaatgaatttttagacaaatatgctcacaacatgataccccgctcacaatgtggacgactatggtcttaatcccctatccaccttgaatcttcatctgccctcaatttattgcattgtgttcggctcttgcctataatttataataaatttattgttggcaaaactgagtaagaaatcataagttaatagacattcaattttacaacttttattttatacctgttattttggatctttccggtatgcgataacctctgcgcacacctccagtgtcaccacatctagacgtgatctcctagtcgcttctacatctccatatttctcaatattctctttcgatgatttttttgtgtccactctctagtcacgtagcgctcttgatattaatttaagaacgtaatccttaaacaagattgttaataaggaattcaaacatgatttgaaaaaaaaaaataaacattaaaatcatatatatttgttatttttgtataataattttatatgatctattacaataaaaaattgaatgttactgtttttgtgtcccaaatagtctgaataaatgtttccttaacgttctcaaagttgaacttgttcaaaagaattgtattacgaacaaaaaaaattgatataattgttaaacttgttgtcatagtcgtctatcggggacctagtccccttacgaaatctgaatttcaatttttatctcgcagactgcttagccaattcttgttcagtatttttccccttgtagtttcctctaactcccttttgcttacttttgcttgcacctaaattagccattctatacatacaagctagaaataattaattaattaacctattaacaaaagaaatatgtatttgatttaattaacgatgtgtttaaatattacaatactttaaagtctacaagctatcataatcatcactatcattaattgttacattatttttattatcactatcactagtgtcttcatcatcactataaacaatgaaatcatctaaatcttgacggtgacactgctcacagtccttgttggtcacttcaattaggtcgacatcatcacagacatatttgacatcatccatttgtgaaagttgaatgactaactggattctcgaagagtttctttcttgtatagtcgtggtctcatcatcatcctcatctaagaaattccaaacattgtggggtagaaaatattgacaagcttccattcaactccattcttcaaattgggaat

SEQ ID NO: 71906 - DNA, 820 bp, Cannabis sativa
gtaaatgtgaaattaattatgtgattaaaaatatgaatgatgataaaaaaataacttaattttaggttgaattttgttctgtcattaaaagtttttatcaaagtaaatttttgctctacaagctttctcatgaaaaaagagaaagaagaagaggatcctactagtgtgtgtaatttttactaaggtagactaggaaattagagtttttattattattttcaattctttaataaaaaagtatctaattagacgaaattaccctaatctttaaatggttaggacaacataccatgaatgtgtcctccattatgtctcagattctaattagccataaatactattttccttaaaaaaaaactcttaaaagctaaatttattagaaattaaacaacctcaaaacattcttttccctaatacaagttatatataaataggtcatactaaaatgaaaaaagaaagttgtgatagtcaatagttccatgatctgtaaggcaaaatatcatgtaagttatgcaatcccatattatttagtagtgtgtgtgtgatgattctgagacagtatagttataagagtatacagttgaggagggcttaaatggattgatgagtactacctatataaacaaggtctattttattttttggtgacctattacttaagaactgattcaaagttgagcgtgcttaacctagaataatcttagaatgggtgacctcctaaaaatttttcctagaaaacgtgcgagcgaggacaaaacatgctgaaaatactcatgttgatttgcaaagccaattatcaatccagaaaatagttaaagta

SEQ ID NO: 71907 - DNA, 654 bp, Cannabis sativa
cgaagcttttgtgtgtgattggtgtggtgagagtttgtgtttcctggtttttttattgattgttatcaaaacgcagtgtagttttgtgtgcatgtagcgttttttctctttttcgatatgctttttttgagttattggtgtaggtagataaatatttaaatgttaaaggaaatttcttaaaatatcccacataggaacacaactcaagaactgaagaaatgtttgatttatgtagtttttttatttatttatttatgtagttaaaatatcatgcaaataaacaattataatacatatgtttagtgtctatttttcacaaagagcatctccaatagagagatataaatgtaagtgatgtaaaatgtgtgtcaaatttagacacaaaaaatagcatggtctaaattttagctcacagtaaataattaaatactacctttttaattatttatttactacttattaatattattcattgactttgaatatatttataagatattaaactatttatatttaaaaactcatatcttaaaaaataattaaaaattcaataaatatataaacgtattttagaaaaaaagttatacattaaactaaaaaaatgttatgtttaatcaaacaaattaaaagttttggagataaaaaatagagtca

SEQ ID NO: 71908 - DNA, 890 bp, Cannabis sativa
cagattgttgatatttgcaccaaagctctcttgcctagccaatttcaatctttaatagataaaatgggactttgtaacctatacactccaccttaaaggggagtataatcttgtaaggtgtcatgttagttaagtttgttacaaagttagttaagtttgttacaaagttagttagttgattaggttcatcttctccctcgagctggtatataatggaagattcaattcattttttcattcgtttttctctctctctcaaaactaaaattaataaaatttattttatgattcaaattatcttaaataacaacatattcaaaatgtcaattagatgtccaactcaatctcaaaacaccaactgaactagcaataaaaatgtctaataaatctcataacaccaatttatcagtaatgttaagtcttgaagttgagcttataagtcaagctttttctggaatgtctaaaaaaaactacaaaacaaagaatatagaatacattataacattaatatggaatctgcaaaaaaattgtcactgtctcaatataatatcattagttaaacacaaatgacctatatatattagttggatggattagtatataggataacagatgatacaaaataccaggtcttgaactcttgattgatttataacttaggattttgaaagtagattttatacaaatttcagtcatcttattcttacctgagacaaaaataccatacgatttggattcatagctgagaagaattgagaatcaaaagtgacaaatttataaacgttaaaacagagtaagcagaaaagtgattgataatacttacaatctcagtctaaacatcattcctctatattatggaaagtgcactaattcacttacaataatattaa

SEQ ID NO: 71909 - DNA, 1080 bp, Cannabis sativa
tgggcctgttttggaggaatcaaacttcaataataattgttctattgttgggcatgtggacccgatttcttctatgcctactcaaactattatagggccggctcatttggaccatgctattggtggccaagttgggctaacatcttcaaagcccgttggtgagtgtgtagatcaagtccaaataaatgaagagcaagctttgtctcatttctttaaagctcaagaggaattgatgaatgatctcaaacactttggcaagctagatttgtatgagattcgcaagataggtggtgatattggagtcccggcttcttctgaggttaatgagaggactactcctttcaagaaaaggaagtttgaatcttcggcatctctttgctctaggcctcataaaatccaccgcaagcacccaggtgtagtccgagactttccctgggactcaaagcataaagagaatgattctgatatggtacttgaagagccttctgaggatagttctaactctccaagccgatctggtattctgaagaaccccttgattggctcctttgtgattgacgatgatgtttcgagtgggtctgcttactctcatacccctgtggaggagaatgtggaatctcctccacaggagccatgagaggcattgcttggaactgtagagggttagggcagacctctacagttcgggaattgaagtccctcatccgatctcgagctcctgattttctatttcttaccgagcttaaggtggatgctaatcctctggtacgtactcttaaaaccctccatttttattttaatgtttgtgttcctgctagaggcactgcgggtggtattattttggcttggaaggctgggtttaattttgaatgtatttcgtgctcttgtaatcatatttcggggttagtgtattcggaccccgcttcccacccttggctcctttcgtgtgtttatggtcccccttaccttcatgctaagaaaaaattttggtctgagtttttgcaactgggagatagattcggggggccttggcttattttgggggatacaaatttcgttcttaatgcctctgaaagggaa

SEQ ID NO: 71910 - DNA, 1986 bp, Cannabis sativa
aaaagattacattgaaatgtggagagttttaattagggcataaaacctaacatctatcacttccacaagtttagctcatacatagacaacattaccaaaaataactgcgaccattaccaccaggaatacttctataccataatccttccatcaagacacatggccctttcaaaagacctgctcctctaattgacatgaagaggagagctaatgccatgttgattgagattgatgcatgggagaacttttttcaataccaaaactctttcaaaggttggactaaaaatatcttgccagtgagtgtacgtcaatactgacttccctaatgaatccgggataatgccactcaagcaagatgatgaggatgctcaaagtttaactatcatcttgtcttggacaatgtcagaagatgtgaccttagattgaaatgacacagagtatttaggaagaatatatgtgttcttagaccaggaagatggagaagttaactcgactcgaactgctttaaataaggatggggaatcatcaggtggttgatgctccatgttgtgtagtttaactttgttattttgctttccttcagttgtactaaccacttgtattttttgtttgcagacaatatgagcttcttggctgctatggcatcttctttaaactcaaagcaaaaaattttgctaccgaaggaatatgaacctctagtcaaggaagttatttagggtatccttgctacttttgttgcttcaaagaagaaagttagaaagaggagtagacctattgatgctgctcctcttgcccaagactctagtagagagaagttcagtactattggtgctgatgagggatatcccattgatatccctccgaatgaggctaacaattgttttctgaactcgggttcaaatttagtggagcaattgcgtacacagggctcctggctttttgctcatggtgatgccttaattggttctaaggctgaaaacatcccgttgcagaagttatttagctctgaacctccgcatgttattgctcaaagatgcttccctgacatcttttagataactatttttcttctctccttctaacttgacaattcttttcttttaacatcacccgacattgttcttttattttaggcttgtgttgggtatgcttacaacatggacaacgaacacaagaaagtagttaagcttcctaagaagctcaatgctgtagaagatcgtgtcgttgctaaagaagactaggtgactactttgaaggagagaattgattctctagagagtgagctaaccagtcttcgagaagtggctagtggtgccaaagctcaggagaacaacttgaagaagagtttagcagttgcttagaagaagactttagatgtttaagagtcttctcctcttgcacttgatgagcaaaccttagcgactactcaacttagagatcaagtcaaggtcttgaaagagcaagtgactaaactcgaagagcaagctgctattaacgtcaccttctacgatggcttatgctttgatgccatctacaatgcttggttatctaatggaggaactttgtcatttgattggtcaggtttccccgatactaaagtcccaaagttcataaggcattgttagcaacgtttcagtgaagaggctctctagagaatagtttttaccttgaacggtggtgagccagtggctaaagaagctagaagagttgaaggctacagccccgagcatccccatttcccatttttgcagttgaagtgccagttgtagagagtgaggataaggatgaagctaccattggtataataggcttctagggcattgtttgagtttgttcttcttttattttttgcttttagctttagtgtgttagttggtcgtctcgggcaacctttcgatgtggataagccttagtaaaatgttatcaaaattattttaattaaattagaaattactccaacttaataaaaactttattctcacattg

SEQ ID NO: 71911 - DNA, 835 bp, Cannabis sativa
tatgatctgagttactcgtctgataagaacaattaatagctttcagataatactcttatgagtcaaaatttaaaagtctcaccttagacaaaaagggaaggtcaaatttatagatcttgaagtaatatgcgaatgagaccagaaacctacaacaaagtctccttaggaaacataatacatacaaagcatggcaaatggagaagcgtgttaataaaaatgagttcaacgagaagaagaaggttatgctagttgcaagatcgaaggctttcatcacaagaggtacaaaatatacaatatgaagaagtgtgcatataagaattatataagaattatacaaaaattatccaaaacctcatttaagaaaattcttgttgagaagaaggctcaatgaatcattctaattgcgagaagcatcctcatgatgtatgctaaatcatctatgttatttgcgaggaggataaatatcgagtagaaagatggtttgataagtaactgctcaaagatgagatcaaaagtcataattatttgagttaatcaaatttagacaattattattattattcttacatgttcaaataatatgaaacgtggagaatgtccacgtttcatgaaccatcattgagataagataaaaaagaatgactgtcgtagtaaatccttataaatagtggtagaaattattgtaaaggggtggtgagttctttcctaactgagagaatttatgtaagttgtatcttgcaatcagaaaattcaaaaattagagtgattcgtaaactatgtagatttaactacaaaactacgtaaaaaaaaatccttctcaatgtatatattttta

SEQ ID NO: 71912 - DNA, 1730 bp, Cannabis sativa
tttcaacgtacttaactacactccctgtgggatcgacctcactcctagtgagtctactacttgaaacgatacgtacacttgtgtgtgctaaatctgctcaagagtttctacacatgtaaagtcatgcataattccaaacttagcaaaaagatccttaaaaaccaactcgggtgcattgtcatatctgaaacatttgaaaaggcaattaaattgagtttgaacatatgacagaaatcgaggaataatgtgagcaacatcagatttttgtttcatcaaatataaccaagtgaatcttgttttatcatcaacaagagtaagaaagtatttatgattggagtgagatgggacatgatagggtccccaaacatcacaatggataagatcgaatttgttttcagcaaagttattgtgcttaacaaaaggcaatttcttttgtttagctttaggacaaatataacatggttcaattttgtgcaaatcatgcatattacaactcagtttattacagagtaaagcaagtcttttgtgcgagggatgccccatttttgagtgccatacatcagccgtgacaacaagattgtaagcatgggccgatatgcttctccaaaatgtacaaaccatcacagcctttacctctgccaatcactctcttgctgagagtttccaggatgcaaaaatcattagtattgaattttactttaacatggttatcatgggttatgcagcttacggataaaatattgaatttaaagctaggattaaatagcacattgttaagcacaatgtctcctgggatttcaatagttccactttgctgcacaactaaaaactcattgttaggtaatattagtttagtagcaagtgctttgcatatatatatttaaaaggtttgacattgttacatatatgcctagtagcacccgaatccacaatccaagaatctttttcaataaaagaagagttatatgttaaggccatatccgtgttacctgtagaagtgctggcctcagaattagtcacatttggttgctggtttgctaataaattgagcaactgctggtactgtgctgtgcttagttgaggaagaagagtgtgagtctcttcactggaagtgttattgtcattactggtctgtacttgattggccgtggcatccttagacttagtttgcttattaaatcctggtggatatctatggattttgtagcacctttcaatggtgtggccatgtatactgcagtgggtacaaaaaggtctacctttcttagggggataggatttgttttgtcatttttgttctgcacattcttgtccttttgaaatgcaaagggcatgttggagttgggatcattagcattaccaagatttcctttctggttttcttcttgagaaaccaggtggaagactcggttgatttcaggaagaggttccatcaacaatatgctactcctaacttgggaataggaatcacttaaacccataaggaaagaaattatgtattccacatggtggaattcctggagctttttcattccaccacaggtacacccattgcaagtacaagtgggtttgtaattagacaattcttcccaaatggatttcaacttagtaaaatacattcccacagattgagcatcttgcctaagattcatcaagcctttcttaaggttgtatatatgaggaccattcctttgatggaatctaaccttaagatcagcccaaatagtggc

SEQ ID NO: 71913 - DNA, 1038 bp, Cannabis sativa
agtgtctgattaaaatagttgctagtagtataaaaaatacatttttatagcatttccgtcagtttctaccgacaaaacaaagacaatatttctaaattagggcaaaacgaaaaaaaaaaaaaaaaactaaaatcaaaccttaggcatttgatcgccatgcatcttccccttctaacttctggtatagaactcttctcagcttcattcctctttgatttcttcttcatataagatgacgatcgagttttgttactggttctacaaaatctagatcaaagtcatcatcttctacaataggtcgtttctttttaatgatatcacattcattgatgtaggtttagaacttttagaaatgggcttcttaacacttagttttttcacatatggagatggagaagaagaggagtaagtcacaactacttatacggaaattagtagaagaagaaaaaacagaaataaaaatcatggttggagcttcaatggcaattggagattgtgggggagcaattttgtggagagaaaactgattttgattgtgaaaaaatgattcaaaagaaaaatgaagatgaaaaataaaaatgaaaactgaaaatgaaatggagaacatgtatataagagagaggaaaaaatagttttgagtgtcactctagtatcatgacatcatcatagatacaaaggttgatctatgcgtataattgtaaaagggaaatttgattttctatatttacatatacctaatattttttccctaaattaatacttttctacattgaaaatatatgaccacttttccaaaatcccaaaaatactcctctcaaaaactcttttttttttccaatttttttgggcttttaaggggtcgagtccgatggggcccgatgcccgtccgatgccgacccgatgggacatgtttttgggtttttgaaaccgggtccgatgggcccgatacccgtccgatgagcccgatgccaaatttttggggtccgattggatattttgggtttttgaagtcaggggcccgatgccccgtccgatggg

SEQ ID NO: 71914 - DNA, 1060 bp, Cannabis sativa
gttcattattaattggttcgatataaacatcactccatttgatgcacacaaaaagcttgttctgttttgttaaaattaataaacctaatataattaatcatgatcgtgatagttgaatagttacctgagataaactcatgattgaatttgaagcgagatattgatgactaagattagtgtgtgaaaagtgcatagtagttggtagagttattatttttaattatgtgatcttaataaaagattaattaagataaaagtatttaatttaagtttgtgttaatatttgattgggggctataacgattaaaataattgtaagagaaaatcgagtaaaacacaatataaatcctagttgaaagcccaaagcatgcatgcagaacaagggctcctgtggacctgtagtaccatcaacatgtcataaaaaataaataattggcttaatttcatgaactatttatgacatgcacattagttaatactcagaattaatttcgagttcaacgaatttatcaacttgatttcaatatgaaatttaatcgagttacctatttttacccttacttattattttgccaaacttaaacatgttaattttatgtcattttctaattaatcatgtcatcatgtgtcttatatattgagtcaacttcatgttcataaatttcaacacaagaatcatgggcaatatcaacgagaacaaatattgtcattaaagaggcgttttcattagtaataattatcaatgacgatattttgttggtaaaaaaatcattagaaatagctcgttggcaaaatgtattataaatgacgatattttaaatcgttgtgaaaagaaatatcaataacgacgatgttgtcattgataataattttttttaatatgttggaatattaatgacgataatgttttcattgattacattatcaataacaacattatcgtcattgatatacttgattttaaaaaaatcaatgtcttcattgattacattatcaatgacgacattattatcgttgatatacttattttaaaaacaaatatattataaatcaattttga

SEQ ID NO: 71915 - DNA, 885 bp, Cannabis sativa
tataaagtttgttttttcttttgtatacctctttgtattttttttattagctttttttttttcttagctgacttttctctctctctttttcttttcttatgtaagtttggcttatttgtttttttctttctcttctctttgtttatcttttttctctttcatccttccctatacatataataagtgtacatttttatatatatttattttcaaacactttgtcactctcacaaaactttattttattatttttttttcatatttttttctcatattttttaacactctttctctatcttagaaaaaaaaattaataacattcctcctatatctttctatttctcacatgattactaaaaagtagtattttttttttggatgttttgtaatttattcgaaattaatttatgaatgatttgcatatttgaacaaggttgatgtcttgttttttattgatttatagctatcttttgttatttttcatagttatttttatgttatttttaggtattttataattgttttatagttatttttatgtatttttttttgcagagttgttatttagtttatgtgcattttttatggtgtatatttttagtttattccacacattttttgttgtatatatgtgcatttattttattatttttttagttatttttaagtagttttcagaatatttatttgttcaacatttatttttttagttgtttttttatggtgtatatttttagattcttcctaacaattttttagttgtatgtatgttggtttgtagtttagatacatatatttagtttattttttttaacacattttatttaatttttttatttttttaaatgacagaatatgcattagtaaaaattgatatattaatta

SEQ ID NO: 71916 - DNA, 1682 bp, Cannabis sativa
  modified_base (29)..(61): a, c, t, g, unknown or other
cattgtcttagaattcatattaggatgtnnnnnnnnnnnnnnnnnnnnnnnnnnnnnnnnntggtaaaatatttccaacacgtactagtgttagtaacacagtactgtactctttaaacattatacattgtaccaacgcattcaatatcgctaccgtgctagtgttggtagtataggaatcacaaatagcatgcatatatcacacatacacatactcatataaaatacgttctatgctagccttacctcatttccgaattcaagtgtacaacctgacttgaacagaacatcacgtgttggatggatgccctatgtcacatttacgcaaatgagtaaataacactccaaaacctaattcgggaacctaaactcacaactatgagtttcgatattgacaattaacatgataatatcttaattatcgaggaaacaataaactaagactctgaaaataacacgaattgacaaaatggattgttcggggatccttcctatgatttggttaaccggttctacaagacttgtagaaccgattaatcggtttgcactaggtaacccaaataaatccaaaacttgcccaattcgcacccaaactataccaaaccttccaaatcacccgtattaacctcaaataatattttccaagcaataacaacaagtaaaacacataaaatctacaagtgtcatttatgactcaagtttgagtcttcaaactcaaacttgttcattgtaaagaccacttagttttaatttaaaaattagcagataattagggctttattatgaaaattatttattaatattgaattacttatttatgattatttatttgaattcagaatgcatttttatgtcacatacagaaattttataattttgcatatttgtctctggcaacattggaacgcggtgtttggctattagaatcacatcataatattttttagtatagcgggacaatagtttagacattgggaatgttgggattttagaatttcctaaaatacccctaagtgccttttaacccttttagtgtgggaagggcaaaatagtcattttgccccataagcttttgtctttatgtgaatttaattagatagatataattagttttattaaggttttggctaaaaaggatttaataaaaccatttctttattttatttccttcattttccaaggataagaaaaaaaaaagaagaaaactctctctttctctctctcaaaaattcctagggctgctagggttggaatttcttcagtttccctctgaatctcaactggttgtttgtgaatccaagccaaggtaagcttctagtaactcctcctttagtttcttgaagtgtaagataatagtttcagaggttataatatgtttagaaatgttattttgagcatgaattaagggatgtatgtacgtttaatcaagctttgagttttagaactcaaacttggagctttaatggtgattttggattttgagctttaattgttgttttgttgcttggaaatagtttattagggtataataaaaaagtctactaaaatatagatttgtatggtaagaaaacattactatttttttttttaaataacatttgatatgaaaaaaaaaaacaatacaatcattagaaaaagatctaaaacatgtaattgttataaatattaataattatgtggat

SEQ ID NO: 71917 - DNA, 1174 bp, Cannabis sativa
  modified_base (1095)..(1095): a, c, t, g, unknown or other
agaatacggtcatgaactgcgtagccaattctggtcccagcgacatcattttctcagtaggaattgcctcaccatatacacgaattcgtcgttcacaaatttgtcctgaagagtcacaaaagtgtgagctctgatagccaggtcaatcatgaccttctctcccttgtcctcagcagacctaacttgcttcttagacgagttaacagcaagagtcgcgacaacatcactcttgctcttctgaggaatgacgggagaagtcgtcgcagttacggtctttggcttgcagttaagcactagagcttgctttaagaaagtcaattctgcaaagacaaaaacaataagataagtataaatctgttatgttatattacaagtatacacaatgatttacctgatgttggtctagaggtttgtttggatagatgcttgtctattctctccttttgtttctctgacggctccttgtacattggctcccgatgaaggctagcgtcctcgagaattagcttatgttctcgcaacttcaaagttgtgcacagcaattgccagtcacgatcttgaacaggaaggctaccgaggacctcatcaacttctttggggaccgggtctagaataggtagagccggtctatctgcaatcaacggaaaatcgaaatgttaacgactatataaggtaacatgaatagaaactaagtgttggaaaatgtgacgtactaggtcgacgattaaaatctatcctaatccctggtactcggaatacgtaaaaccacttagatttctaatcccccatattggaaaccatcccttctacctcgtaaatttcagaagtggcccacttgctgaaacaatagaagaaattatcgtggcccacgtgttttatatcattaaaatagctgaagtcctccatcgagggcttcctctgcgcatactccatgtacatcgcataaaacccaagggctatgcgataactttttggggttaactgaactggagaaacattgtatcgcttgaggatagcagtaataaatggatggaaaggtatcgacaccccacatcgaagaataggtataaagacaaggctaattagtaatttttncccctgaactttgacatgtactgaatcgtgccccctgaacttttttggccgttaaaaattccccccgaactattgagat

SEQ ID NO: 71918 - DNA, 647 bp, Cannabis sativa
  modified_base (26)..(28): a, c, t, g, unknown or other
aaaccaattggcaatgagtggagtannncatgttcttatatatggctcaattctgtaccatttattccatgtgggacattgtccacaatatatataaaattaacgaataagtgggatctggtgattgcattactgtctatttaatttttattactataatatatgtgagaattttgtgaaaattgagaccagcgcagagcattgaaatggcttcaattaatttctaggtattcgtgacttaaaataaagtgaacccatatatatttttcaaaatattttattaggaatatatatatatatgataaattaatatttgaatgattgatctggtgaattgctaacttgaacatctagatatatttgactttcatatgtgcacaatttcaactgcagtagaggaagctaataacttcagttcaggtgcgcccgccccaattattggtgttttaattttaatgggtaccccatggggattctcctatctcaaatccatcggggattaagcggggcggggatggggacataaattgaaagcgagaacggatttaggaggtgcattactcgcttattacctacccaattttcatctctaataaaatgcctaacagtaacagtgttaaatgacatgtgaaaaaaaaaaaaaaaaa

SEQ ID NO: 71919 - DNA, 847 bp, Cannabis sativa
gttgtggcatgtttgtacagatttgcatgttgtgtttaacactatcctttatgttaaaataagctctaataagctatcatagatggagctcaaagcacaggataatctcaaattgaatagaagaaaaaaaaaagaaaactcaagttttacttcataaattgttgaatcttctcatcttttcaatttccattattaaatgcctcaaaaatgttaatttggttttcagcaataacttcttaaactcaaattgttcccaacataattagttagcatcaatattgggatttaaaatgaaaatatatgtgtttttttaaagaaaaaatatatgattattggagtgctataaaagtggagtggtgcattgcatttgcaatgttttagcaaaacaaactttaacggtgatacaaaatgtttggtataggataaatttttgaaatttagctcataatgaatgtctcatttcctacttactcttttccctgttttttcttttttacatgagaaagggaagattggaacttaagacttacttttggtgaagatatatgtagttcctttgagttatatggccataaaattaaaattctatcaacaattttaatttaattatagtggaaaatttatgagtatttatacaatgtatgtaaaaatatgatttaaataagaaaaagaaatatgaaaaaaacagtttaggataacaaattatcccttatggagtgtttggtataagagcagctccaataccacattgtcaacggttgcccatcaggttgtgttaggggaagggttgttcaaaaaaattaacaaaccgcttaaaccaaaccgaataaactgacaaaaaatacaa

SEQ ID NO: 71920 - DNA, 1196 bp, Cannabis sativa
gactaaagaaatattagtcaatagccacagttttttgttgtagctaaagacatattagtcacaatttttttgtagctaagtatatttaggttgtagctaaaaaaatattagtgacaatacatattgttatcaaagataaataatttgtagctaaatgttaattgtgagtaattgttgtgacataatttaattgtaacttttagtcataaagattagttgtgattaaaagtgattttttagtcgtagcattatttttttttttgtaattaaaatttttggatacaattttttatttataacactgttaaaagaaaaaaattggctaaaacttttgattaagatattttttttacttttagttacaattttagttgtgattaaaaaaaaaaaatcgtggtagccttacataattgaattaatagacgtataggcgtatagctatagatagggatcgatgatgtgtgactgttttacaccaactccaatttaatatattgaaattttaattaatgctttgtcgttttaattttcaacagaaatatataaaaagaaaataaacatattacgtaatacttattacatatatgtggataaaatgatttcttatagtaattcatataattaataaattaaaaatgaacataaaaagaagaaaataaaaaaaatatataaatttttattttatttttttatatatatcttttatcctatatacactatattatttaataaatatacaatgttacacgtttttctcatgccttttcttataaatattaattgaatatttatatatatatatattgtgcttaacaaacaaaaaattatggtggtgcatattttttttggggggtcattttaacaattttagaagtcacgtttgaactataagaatcttatattttaactaaccttaattgaattatcggtaattacttcaagatttcacaacacataaatgacacaacttacgacaagctcaaaaggactaaacctttaaatttttttagaggagttatagtggatttcgaatctttgacccaaataaaaagaaggatataatttattcaaaaaaaaaaaaaaaaaagatataataagtaaagacaattcctactactataccccacaacacgaggtttgtctgcatctatatttgcttatgcctttttctctttgtttgtttgtttgctacataa

SEQ ID NO: 71921 - DNA, 780 bp, Cannabis sativa
  modified_base (716)..(735): a, c, t, g, unknown or other
ctcaaaaccaattggcaatgagtggaggagcccatgttcttatatatggctcaattctctaccatttattccatgtgggacaatgttcacacaatattccctataaattgtgaagtcattcaatgcgaaagggaatgctttttggtactcttaactagcgattactctgcataaatctttgtatactctcgagagctattaagaaactcacatggccagaccttgtgatcttagtagttttctctaagtaatacaattaaaaggagagtatactaataccactatatggagccgaacctttataattcttgttttattttattgtttttattattaatttattatcactcttgttgctttaattaactctgtattgttggtcaaaagcgagatcaatagtttatattattaatataactgtttgaaattaaatattaaatcaactaaaaataattcttatgttttcttataggaaataaacaaggtaaacacgtatatcttttttcgtgggtaacagagttgtgctgaactactgataggaaaatgtaaaacataacgtttgatattgaattcataacaagaaaaaaaatgtaatatatgtgtataaaactaaataggctgattgagatttttgccccttaaactttaacacgtacaaaatcatgtccactgaacttttctcgccgttaaaaatttttcctgaactattgagattnnnnnnnnnnnnnnnnnnnntctaatttcattcaattttactttcggtgattgtttatgtactaa

SEQ ID NO: 71922 - DNA, 2459 bp, Cannabis sativa
aactaaatttcattgaaaaaaaattagcgttcagtacatcaaaaaagaaagaaggaaaatcctccatccaaactagctcaccatccaccctaagtgtatgcacatctaattcacgagcagccatattggccgactgacgaacatgaatcaatcagggacgcctcaggaaaattaattaaatagtagactagaaatatcatctaaaagagaaccaaggtcattataaagagaagatcttttaggaaaagcataaatcacagctaggcaatcagactcaatagaatggagagggggaccaattccaagcgaccaatccaacgccaccataatagctattgcctcaacttggataactataaaattctctacaaaaccaacatagaacataataagtttcacctcaagataataaactaaaaaaataataaaagctagtaaaatgtagaataaaataaatattgagtctattatgaagagaagggaaacctcccttcctccttacaattcaaataaacattgaacccaacctcataccttaattggaagtgtgagaaacaacatcatagaaaatttctaaatcagcaaaacattaatcaaaagtaccattaccaaataaagatttcgacatgcatgccatcactaatctttgtgagtttcgaataattgcttcaattctaattgtatcacttttatcatccacggatgcatccacattcaatttaaaggtccccaatggtggggtgatccaccttgacgttgatgtacaaatagtcttctcttttaaactggcgatatgttggatactgttaaattcatcagaaagggattgaatacatgaaactataacttcaggagaacgaatttggtgtccatgcactactttgtttcgctctccccaaatataccaagctgccacaaggaatacttcaaattctgtctgtgataacacttcagatgctttaatgattatttgttgaaaagaaacttcgatagagagactatttaagagtttgaactttaataatttccacaaaaaaatagcatggctatttgtatccgaattgtaaccacatagtggacagttggaatggtcaataatattctttttcttcaaaccaacatttgtaggaagtatctcatgaaagcctcgccatacgaagtttaaaatctttttaggtaaatgcatcctccaaaacctcttccaccaaattgaaaatacatctttggaaggagattgagtatacaaatcaaaagtagaagccacaacataaccacttttaacggaataagaaccatccgacgtaaaatgccaaagccatgaatgagccttaggaaactttccaagaggtatagaaccaattcattgctgatccgcgacgttaaacaattgtcgaatcataggtaaattccacacccttctcgtatcatctattaaatctttgaccaataaatttggatgtgtaatactattggatgaaggtaaaaataaatatggctgaggtagccaaggatctttaaataccaatatagagtctcatgttcctactctttttcggattccttttttaaggagagagcggccccaaataatactacaccatatataattaggggatcttccaactgtaaaaaatattcaaaatgagactaatttaaataaagaagtaataaagaacctcacgagttaaattgataaaaataaagttaccaactatactaaaaaatagtattagttaaccacttagacaaatgaaaaaattaaagactaccacaataagtcgtagtttaattttgaatattaaaatattaaaatattaaaatattatttattttttttaaaaaaaaaaaaaacctgcatgaccttttttttttatcattatttatgaaattagtgtttttatagtggaatttaaggtctaggaatttttgctttggtgagagagaaggaaagcatagtgggagaataatagatattacagtagacaaatttggcaaaaactcattggaaggcatacttttgtagtaattattaaagttagcacttagcatagaaaataagaaaagtgttgaaacacaatctcctagttaatttcttttttaacctttgtccctaaagacatatgataaagtatgctttggtggagagtgatttgagagtggttatcaatgcccttaatgggacggagtcttattgggcgcttgagaactatatctcattttgttctaaatcttatccctcttttaattgttgtaatttcgtgtttgctaatagaacttgtaattttgcggcccataatgtggctaattgggcttttattaagaagttgtatggctctattccggtctccttagttccggaggactttttatgtattgaccgagaggtctaaaactgcttatttaatggaatgaatacgcttattatctaaaaaaagtattttttttttcattttttttat

SEQ ID NO: 71923 - DNA, 971 bp, Cannabis sativa
ttttttttttttttttgaaatagcaatacgtatattattaaaattacataattagtcaatatctatctgaattatatatagtttagtgtactaattatactatatatatgtacatctacgtacaatattctctcttgttaaattaattatagctatatacatatacttatactaatgataatgtgtatgtatactaggataaataattatgagtggaatgaattaattatatattacttgtttcattggaaaagtattaattaccaatgtaaaatgtattataattttctcatatatgataataaaaaaaattctaataaaaaaaattatgatattagaattattaacacatgatatttagtaagaaaaacgttgcattgtgagtattaatataaaatggttattatatataatagaaagcaaaaatctttgcagtggttggtttttatatatatacatatttatataattagttatttgtttgtctttatatgtatgtcttttgttaatttgctgtagtgaaatttgtaatggtgcagttataactaaaatagattatttttttcttcttcttttggagtaatatacaatgtttgggtgtttgacaatgtaatttctaaaatgagtgtatcatgaatgaagctttatttgttttgacatttaggaaaaaaaaaatagtctatttttttttataattatatatgttatacctatttaaaatatttagtattttttacccgtataaaataaaaaatcgtacaataaacatttaaatcatattctcaatgtatttaatttttttaaatttctcaaaagtttataaaatgtcttaaataactataacatatatgattgaaaaaaaaaataagactaaaaatcctttcccataccgaaataaataagggtgcatctccagtctttttagtgagtgcatagaattttcatagtttttataatatatatatatatat

SEQ ID NO: 71924 - DNA, 872 bp, Cannabis sativa
tgatttaacagacaaatgtatgcaactattgtatcaaaacctcaaatgtttgtaccaattcttaaaaaaagaaagtaaaatccagtactaattcctttagaaagttgtggaaaataataacaatgacatgcataccttatttgcaatttcaacgaataaatattcatcactgaaaggtgccatgtgtatcctacagaagcaatcaacttaaaatcacgagaattgaacaagtaaagatttgtatataacaaattatatgcaggaaaaaatactcaaaatataaaactttgatttggtgatattgacatgattataggggttttttttttattctcctattactgtatctgtaaggttatagctttggattggtagaggaagcaggtctgctgcaatcaaatgttcaatggaatctagcgctagcacattgtttgttaaaagcgtatgataattgtttcttcaaccaatacaagaaagattgcagcatgaatatatatatttttatatatatataatatgcatatatatatgtgtgtgcagattacagacacactccaatgatgttactgttttcatgtcaatgcataggttacatttggaaagggggactagatcggatatataatttttaaaatgtaattttgttatacagaaaggatattgaaaaaactaatgcaacaacctaaataatccccctagtttgagataacttaatcccactgaacattttgagataattttatcctatcaaatccttatctccatgcgtcttaatagtaagaaacaagaattattaatttgcatccaacatatttatatctaatttattgttagtaaatggtcaactcatcatttttctttactttttcttt

SEQ ID NO: 71925 - DNA, 1760 bp, Cannabis sativa
  modified_base (1196)..(1206): a, c, t, g, unknown or other
  modified_base (1252)..(1265): a, c, t, g, unknown or other
  modified_base (1422)..(1433): a, c, t, g, unknown or other
  modified_base (1593)..(1593): a, c, t, g, unknown or other
caaggattgcattcattgtgaatctgtttgtacattgatttacaatagttaagctaaaaaacgtaaacattaataaatagtgaacagtttctgttcactaaatacagcaacgtatgcgacttctaatgtgcgagttggcagttcatattcttgcataagctcgtggactaagaatacacctaacacgatgtctgcattcttgaatagtcgcatttacggacatcgtataacgagctgatagaaccaagacatgtgagtctatattggtttatcgaggttactgggtcaacgagactagcccgcattatagagaatcgatctctatgttttcacaggaggatcaagaggatactcgcatatatcttggtacatacgagctaaatcttttccttggtcctagataatgcgagtcacacggatgcgattagacttggtcatatccgcatcatctcactgagtctagctcaggcgaggtttaaatttgaggagtctctcattgacatctcaactttccttggggaaattgagtacacgtgtccttcaaacaggggtctggtctcgagtttcgaggtgagaaaaatctcactataactataacacctatagccataaaaaacaagatcagccacaaaaagattcctaaattttatctactttgatgagaaccacaaactttttctctagtttagtgttgactacaatctcctcttgttttaaaattctattgactatgttattgagttcttctttgataaatgatattaaaacttttaacacaaaaatctagttaaacacttaatcaaataaatgcaagtgatatgagaagaaataatgtatatcaaataatcaaacttgtaaagtaaagagttaaaaggtaagaaattgcaaactctcgatttttacaaggtttgatagagctaagatacctacgtccttggtcttcaaagctatggacctagctttgagttgcaatatcaagccaagttaacgggcttgactaacccttactattgggaaatttttaccaagatgtttcaaaacctcttacaacagttttacactgccaaggacaacctcacctcaatcacaatatgggaatgagtttgaaattacaagtaaattcactctacaagtatgatgatacaatagatgttgagattattttaccagtatttagatttactaacaagtatgtnnnnnnnnnnncctaaatatgaattttctaatatgatgaaattaaacacataagagnnnnnnnnnnnnnncattgattgcagcggaataatataactccttccactcagatctctaacccttatacctttctgtcgcagagtattatcaaaatctgaccctggatctctttccttccttcaggtttggttaccatcgtcttccgcactatgattaagtacttgactnnnnnnnnnnnngcatgacactctatcactatgggttgattatgaagaacaataaaggaggctcgaaataactatagaaggtgtctctcatctactagttatctaacagagttagaaagtagatttggtaagttgaaggattggatgagaatgagagcatcatgttcctttnatagtatttcaactagggtttaggtttaaattatatagagtaaagaggaataaaataatgggaaaaattacacactgtggctgaccactagagggtattttactagttacaattttgctactttatttcaactacttattcttctttcaataataccatattttcca

SEQ ID NO: 71926 - DNA, 1003 bp, Cannabis sativa
attgttgttatcatcctcttcgtcgtcaccggataacggcaccaacatcaccatctgtcggcccaaagagaagagagaggcggaatgggcagagaatgaaagagaaggagattagggttttcatacttagggtttttttccaatcactttctatttatacttttcaaaatttacccccaaaatatatttattttaataaataaaaatattatataattaaggatcttaaattaaagaccataaatgccataatttttaattaacgaccccaaattaattaattttcttacagccaaaaaaaaaaagatcccaaattaattttctaattacatttaattaaagataattgtccaatgatattttagtcctctttcacaataattttttttaaataacttttacaataaatttttaaatacaactaatttctaaaattattctttaattgaaaatacacaaattctaaattttttaattttataaattctcaaattataaatttattaaaaaagttctttttttattttttaaatttgaagttttttttttggtattttaatttataaatacatttttttaagaaaataaaaaagtacaattttttttaaatttaaaattttttttttaagtattttcttttattaaattcaaatttttttattaagcaaacaaaaaaattctttttttttataaatctgaattttttttggtacactaaaaagaatatttcccaacagtttttaattgttgggaatactaagtatagccaacagtttatacttagtatttccaacagttataaactgttggtatttactatttttttttttaaattctatttagtattgcccacggtttttcactgttggcattagttttttccaacgatttttctgccttggttctaaactgttgggaaaaatctctgcttagcttttccaacggttttcacaattgacccccttataaaccgttgggaaaagccaagtttgtagtagtggaa

SEQ ID NO: 71927 - DNA, 956 bp, Cannabis sativa
tctcaacctatatgcttagactttaatatttctgggacaaattgtttactttttttagattcttgaagatcctagttccaatggcctagaactttaaaaattcaataatttattccttgaagcatttaataaatgctacttacttctggatccctagggttctggttccaaaggcttgggtctttggattttaatttttttaaagcctggccttttgtgttttgaagcctaaacttttatatttttaagcctgaactttcatatcgaagcctgaccttctttataatttagccaacctaaattgacttaacaatttattaacttttaaatattgtaagaatgttgcttactttcggtttcctgaagcttcaacttcaggcaatacttcctgctcccatacttaatgttaacttacttttgtaattttttgaagagatacttaatacatgttacccccaagtgatttaagagtttggactcttggtcacttattatagtacaactaaaaaaattataagactaaaaacttaattgaaaaattcttatgtttttatttaatttaattcctgccctgaggtgtacatgaaaatgagatgaaaaataaaatgcagaaagattaaggacctggacacccttagtttactgatagtattgacataggtggtctgcattccatgcttgtacaatttctaatacgtccagtcttttaagatggtacgctttgtcatgaaccttatgttgtatctcgtatggcccttcccaagtacgtccaaggactcccagtcctggctcttgagaggcgggaaacactcttctcaagacaaggtcaccaacttcaatttttttgctctttactttagagttgaagtgtatggaaatctttctttggtatatttaaggttggttttgtgatttctcccaaagttcttcaaataaatcttgagattcttaaagta

SEQ ID NO: 71928 - DNA, 952 bp, Cannabis sativa
gttcgaaatgtggtacatataagaacctcacttatgatataaaaaattataaaactcaaacatgaacacaactcaaataaattttatatcttgtcaaacctacgaaatcggatgacacgaacatgagtcgtgatacaaaaaattgataaaatacgaacacaacttacataattttcgtatcgtgtcgaacttctaaattttcgaatcatgttcgtgtcgaacttacatatagttacatgaattgtcaccctgcactatcgaacactaaaatattaagataatatgtagatagatataaactttagtaacgtgtataagtaaggatatattgtatgtttatcgagattttcgataataaaatatttaagagctaaaaaaataataacttgcaaaagtaaagaggaagattttttacgtggttcaggtattaacaaattttagtctacgagtcagtctattagcttctaaaggcaatactgatgtgtttataatatttttgcatgaaaccctaactctttactctaagtttttcttggggaagaagaagacctagagtaatattgtcagagttttaactatgtcaatcctaattcccccttcgcatgacaagagaggggtatatataggctaagtggtgggtatggagaggcccatgatttgcctaaggtatctactcaaattttactattagggtaaattacatgcaatgtttagagctgactggatgatctcgtaggtagtattatgcatgtgcatgcaacaactagataatagggaccactttgtaccactagaacacgtgtcacacaaaggttcaacctttaaaagtagaggccatgtgtcgctcaaagctcattcctttacgaccataactctgtaatactcatttggcaaaaaagtggtagttgtatgcgcactaccatgctcggatgtgggagacaagattgatctt

SEQ ID NO: 71929 - DNA, 1056 bp, Cannabis sativa
atctaaacttaatgttgtcaaacataactagaagatcagttaaaatcaatgtgaaaggaaagaccaatagaggtgggggctaaggatgtatgttccgcggacccacagatggttgatattttagaaaatccaatagtagttaaggcaaaatattggggcgtcacatgaatgacccaaatgcccctacattatattatagcttatgtattgttggaggggtagaataatcatttgataagattttaaatttttgtcttatgtgaatttttctagctgaaataagttattaatattagattgattatttagtttatttactaaattgataattaaggttagtcaacaaagacaaaaataagagttatcaccaaaacctttatctttcttccttcctctcaccttcgaaccctaaagacctagctgcaaccagagtttttcatcacaactcagtcaatccttagctgattaaaccaactttaggggttgtacaagattggaggtaagttctatatccttcccttttgatttcttaggttgtaggttaagttttgatgagttcttatttgatttcaggtctataagaatttttagagtttaagcatacttttaagttttaattcaaggttgtttgagtgtgtattgagtaattctttgacggttaagtttgattggagtgaattgagttcaagaactcaataattcactcatctatggtgaatttgtaattttggggtgattctatgttttgaatgtttaaatacattgtatttgtgatatagaactgttctgtgaagtttgagaacaattggttaggtttggagcaagttttgggactttgaaattttttcaagtttctgttatagtgaactggaattctggatggtacaaggctgtaccaaccagaattctgtttggtcagttttttgagaatcgccaatttttgtattttgaccataacttttcactcgggtgttcattttagatattctatatacaatttcgaagcttatgaagagctctactgtatgaaacataaattagagcaaaaatatgtat

SEQ ID NO: 71930 - DNA, 976 bp, Cannabis sativa
tgctcttaaaagtaattccaaagttttactccttattaccttctgttctaagaagatggtttttatcttcttgctgctactatgagtgaaaaaaatatcctatgagaccaataattaacatagcttacaggctgtaactatatttacactacaacaagcaaaataacacacccaatctcacactcaaatatagcattccgtgccttcatttttcattacacatagttagtagtcttacttatgctacggctataatataatagcattccatgtacacaaggacattcatgcatatttaacaaacaaatcaatcacttccccgttatgagaaaaagcctctccttggtctcatacatgcatggtagttgtttgatgaatggaatgatacttgtaaagttgtagtagaacaatatattccattcaactaaatcgaaaacccataatgggttggcaattgaattctccaaatgcagagttgaatctcattctccagttaaaacacaattccaagccacaaacaacaactataacaacaaaatcaacaaataaagaaagaaatagactaaataaaaaactatatattccattctactaaagcaaaaacccacaataggttggcaattgacttctccaaatgcaaagttaaacacaattccaagccacaacaacaactagaacaacaaaatcaacacataaagaaagaaataaactagggggcgtttggacggaggtaatgaactggaatggaagcaattttcatttcattcctttgtttggttacatattaaagtattataatggcattcctttccaccattccaatgcatcattcatcaattttttttatacattttaaattttattccattccatttctattcctatttccaccggttcttatttctattcttatgtttctattcctcccaaccaaaagccacctaaattctgtaaaaggataaagaaagcaaaggta

SEQ ID NO: 71931 - DNA, 891 bp, Cannabis sativa
aatttaccattggctaatatatagtttgtgtatttatatataattcaatgtttgtatgtttaatttatataggataatataatccaaataaatacaaagaaagtaaatgatatataaggatatattataatgatatataaggatatatagtgatggaatataatgagctagaatcacaaatacatgtacaaataattcataggccactagctaattggttcatagaaaatgaatatattatgtaatatatatatatataaatatatatgtatagtggcgtttatttgaatcgtttgatagtgataggtgcatggccatgcatgtatgagctctcatgcatataatatatataaatatatatgtgtgtctggtggctatatatgcttgcccctacctaatgcccatttatatattttcatttctaaatcgattattatcttaattattatgtaattttagctacttaattaattattattattagctcaaatacgcgatcatgtcatgcatgcatgcatggtgttatgtaataattatacgtacttaattagctaaattacgattctatcaaaatcataattttatttatagttacttgcacttccacaagtgatgtaataataaaaatatattcaacatattacaaatgtccatccatccatcttctccttaaacaaacttgactttttattaattacatatatatattatgttttttataatataaatatgcaatttcattaacactaccaactactcaaaattatatcacctaaattactcgaaattatagaatctgaataaatacaactaacattatttaatcacgaaattctagttaaatagtgagcaaacaaaattaatagatcgcttgacaaaaattattattaa

SEQ ID NO: 71932 - DNA, 1024 bp, Cannabis sativa
aagattagtctagtaggggtagtattactgatactttggaatagccttaagttgttacagatgtgcctagtggcacccgagtctatgatccatgagttattagaaaatttagatgaagaataggttaaaaccataccagaattttctgtagaagtgctaggatcggtcgaagggatattaccatgttgaccagcaagtaaattgagaagttgttggtattgagtagcacttagttgtggcagtatagtgtgagtgtcttcattcttaggattgttgtcagtagttgattgcacctggtttgtaacagcgcctttaggcttattagacttattatatcctggaggatatccatggatcttgtaacatctttcaattgtgtgaccatggatgttacagtgagtgcaaaagggtcttcctttcttggaatttgggggtttgtggccttgattatcagacttatttttgtctccttggaaagcaaaagcatggctggtgttggaatcattttcagcagtgatattccccttttgattttcttcttgagtaacaagatgaaaaactcgattcacttctgggagaggatccattaagagtatgctccctcgaacttgagagaatttgtcagacaaccccatcaagaaagacatgatatactccatgtgatgatgttcttggagtcctttaattcctccacaagtgcacccattgcaagtgcaatttggtctgtaatttgccaactcctcccagatagttttcaatttggtaaaatacataccaatggtgagagagtcttgcttgaggttcattaaacttttcctcaattatagatgtgtggtccattcctctgatgaaaccgcaccttaagatcagtccaaatgttagcagcctattcatcatacattatgctggacgaaatttcttttgaaactgaatttaagatccaggatataactatgttgttattcctgatccaggcattgtatagaatataatcggtaggaggtggtttggggatagaaccatc

SEQ ID NO: 71933 - DNA, 1606 bp, Cannabis sativa
aagttttacgaatttttcttgctttcggcaggtgttttttcttttattatattttcagtactcttatctttaaatattaattcttatttatttatttgaccgtgtaatataatttttaattttgacattttaaattattagaagaaaaaaaaaataaaataaataataaatatacattattattaaaatatatatggtgatatatatatatttatagacaaaacctacagatatataattagtatagtactccagctggactcaatgcatgcatgcgcattgatatataatccatcatctcttggaaaactcatcaaagttagggttaattatacatatatatatatttatataaatatatacgtaccgtacgttacgtataatgatatgacattgactatacatatgcatgcatatataataatttggttgaggcgtgttgggaaccatttttctttttcttggtgggttgggaagaaaggatgaatcactcttggattaacttaaggttcactacatataaaaatgaaaatgacataattattaattactcgtattttataatagttattatataaaattatgtatttaaaaatcgatagttaattatacctataacaatataatattttgattatagtgctaaacaccaccaatacaatttttaataattattggcgcccctaattaactggccttttgaagctctagaagcatttctagtgctggttggataatgagtgaattttagcttttaactctagaaagctttttaatatatataaagtaactttagtaattttttcaagaagagtttcttaagaagtgaaaagcaaaatatagatagaaatttaaccaaacagaactaataaaaattgctagatcaagtaaaataaaagagataaatattgtactagttatcataacagaaaaaacaacatttagtaacaatcttttagtcataatataaactttttgtggctaaattaatgtgaacttttagtcacaacaaaaaattatttatgactaaactatattatttagatacaagttatcacttatttagttttagtctcaatataatttttttgtgactaaatgtaacgtttagtcacaacaaaaagttacttgtaactaaaacacagtatttaaatacaagttgttactaatatagttttaatcacaacaaatattgtaactaaaaatacatttagtcacaacaaattgtaattttagtatctaattagtacttttagtcataatatagacttaataatttataactaagtacaatttttatatttttaatcacaagtttaattgtgattaagagttttttttttagtgtattttagctattttgtatttgtaggctttgtttctctgatagattcttgtggtccatcttatttatttcatatttatcatatatatcagcaattttgttgactgttaattgttgaaattaattaattaagattattattaaagggtagtgatctgcatatagtactgtattgctgcaaatgcaagggtccagcccatatctcaggccgtaccgttttgttgtttagtttctcactatctccatttgactatatatata

SEQ ID NO: 71934 - DNA, 872 bp, Cannabis sativa
gaatgatctcttttaaatgggtagaaatccaatcaaataatattacacatgtgttgagggatttttgacaactaagaataggttaatttctaccgcaagtccctaaaaagtattgggttttggtccttaaattttattttttggtaaattaatcctcaaactatgtaagttttgactaaatggtcctcaaactttaatttttggcaaattaatctccagacttttattttcttaaaaacataaagtcatcactctcttaaatgatggtgttttatttatttatttagttttgtattagttttaaatatttttatattgatatacattatcaaattaaaaaaatgcatattttttatttatatatttttttaaataggccaaaataagaaaaaaaaaatcaagacatatttttaaatataccgaaatatatattttttattatatgtattttttttaatcaaatcaagacatatttttattattacaaaattatatatacatatgaaccaataatttatctttttatgaacaacacttacacaaaatactttcgctatggaataattcatattcattctccttaaatagcatgatgggcatgtacaaaaaaaaaactatatatagtcaataaaagtttttggatgctctaattatttttcctaccattaaatgaggatcatttcttaaatatatgaaagaactatatatgtagtaaaatattattttgtgcacatggtattcctagaaattatgatattctcacctcgagttttctttgaatatcctcactacaaaaattttacttttagtcacaacaaaaattgtggctaaaagtaaaatagttgtgactaattacaaatcaccattcttat

SEQ ID NO: 71935 - DNA, 1517 bp, Cannabis sativa
ccaagtaaatttggagaaatcatctacatacaatgggacccattaaattaatatgcatcagttgtataactctagaggtaagtagagcattgataggagggtgagaggacttgttttattttgcttgttgatagggaccacacaaccgaccttttccaaacgaaattcatggactccacgagctgcttttatggtcacaattttctttagatctctgtagtttaggtgaccaagtctgtagttctataaatctggtttgtccagaaacactctatggaatttcacatgactagttagaacataacagtgatcaaccgttctgttgcctgtgaggattgatttcccattagatgtaactaaatactgggacttagtgaaactaacatcataattagcttcacaaagctgattgatgctaattagattttcttttaatccttttacaagaaaaactccagtcaaaggaaatacatctaagagatttaaatctccttgccccattatctcccctttattcccatcaccaaagggacaaacccttctttagatgcatgaaaattgtgtaaagattcataggaaccagtcatatgtcgtgaacacccactgtcaaaatactagcaattatctttcatggaagatgaagatgtatgagcaacggagcatgattgtcacttttgggtttcctcttagtagtctcacgttgtggagtaaaaggaaactttctttgagccaatttattgttgataatgtttgtcaagtactttctaagcttgtagcatctaggcctgatgtgacctctcttgttacaaaagtgacaagttggggcaaaacgttctttatgtttgatattggatctctcattaacagaagctcttctatctgagttcatgttgggttcaactaagtgcatatctaactcttcgttcttgaaattagtagcagcaaacacaaactttagcttatcactagaggttgatgtcgatttttcatcaatagtcagatcatgaccttgtttgtatagcaatttgtatccaattgatgttctgtcaccatttggcttatgctctgaaggatttgattcaaggcagcagttcccgagggtatgtgagagagtgattgcttggttctcacaaattctgctgtcaacttatatatttcactatcattggaacataattccaaagttagtttcttgagtttctcttcaaggttagatttactatcatcaagaaccttgttcagatcctaaagctctttaaccctcttggccatgtagctccattgtcttcataggctttattcttctcatcaataatggattcagagttagaagatgcatcatctccatctgatccttcagtgactgtttcacaagccatgaaggcagttacagatttttcttccttaagctcgtcactagcctcttcttcttcactctcactccaagtgacagtgaaggctttctttttctttagagtgttggcacattctgtctgaatgtgaccaaaacccgaaca

SEQ ID NO: 71936 - DNA, 1574 bp, Cannabis sativa
tgctgagtcctcttcggtagagaatattatccatcatcacatattgatgtgcttgatattgtagccttctggataggaccctttcttgaggcaactcaccttttgttgtatatctgatgatggggtccatccaacttggctcttgctcaatggcaaccaccgtatctttaattctgatacttggctccgcgaggtgttcaacgggcactacccccagtctttctatctcgttgtctgacgccaacttggccaaacagtatgcattagcattcttctctcggggaattctttccaccttgtattacgtgaactcatggagcagttcccgaacaatagctacgtacgctgccactttctctccatgcgtttgatattctcccgagacttgattaaccaccagctgcgaatcactaaagatttctaccttggcagcccccacgacttttgctaactttaaacctgcaatcagggcttcatattcagcttcgttgttagaggctgggaatgaaaaatgcagggccacctggagccggagtccgtctagcgatgtcattgctattccagcactggatctgtttttgtttgatgccccgtcaacgaacactttccacgctggggttcgcggtactggcacgcttgaactggcttctacttcattacactctgttatgaagtctgctaaggcatgtccttttatggaaatgcgtggtacatagtgtatatcaaactggctcaattccatggcccatttaaggagccttcctgacgcttccggcttctgcaagacttgtcgaagcgggtggtttgttagtaccttgatggggtgagcttggaagtagggtctcaactttcttgaagccatcaggaggcagaaaactaacttctcaatcaacggataccgtatctcagcccctatcatgcacttgctaacgtagtacacaggatactggactttgtccacttcccggactagggctgcactgacagcgttctcgaagacggctaagtacaataacaagtcttctccgtgaaccgactttgatagaattggtggtttagccatgtgctcttttaattttctaaatgcctcctcgcattcttcagtccattcaaatttttggcatttctttaagatgttgaaaaaaggggtgcacttgtcagttgatggggaaatgaatcggcttagggcagtaacctttccggtcaagctttgcacatctttgtgcttcttgggggaaggcatgtttaataaagcttgaattttttcggggttttcctctatcccctttggttgacgatgaatcccaaaaatttccctgacttgactctgaaagtgcatttctttgggctgagtttcattccatacctccagcctacttcgaagcattctgtgaggtcgtcagcatggctcacacatgctttggatttgactaacatgtcttccacgtaaacctctatatttcttcctaggagtcctttaaacatctggttcaccattctctaatatgttgcactagcgttttgttgggttttatgccttaaataaaacttatttcagtataatcagatttact

SEQ ID NO: 71937 - DNA, 1179 bp, Cannabis sativa
ttttttttagtataattacacgtatcattattcattattgaatatttaatatgacgtaccggctttatttttgtttttattacagatctaaaaaaaggataatctttgatactatatactatgtaatctgaagagtagctcatatataacccattagccaggtaatgagcaatataaaatgaagataaataaagatcatgatttggacttataattgactgacaactatattgatattttagggtattttgcacatatttaataaacaaaattaagtgccaatgaaaaatataatatcaaataaataaataattttcacttgacatgtcaatttcttatcacaatgaattgacataagtttcatattaattaataacaaatatatatacaaagaagaaaaaatagtaatgacaatacaaaatatattggaaaatatacaattatttcaccatcttacataattactacaataattttgtatttatacaaaacaagtaaatattactttgaatctcggttaatttttggtcaaaataaaatttaataagttagaggtattatgaccaaggctgacccggaggagaaatcaggcataagtaaaaaaaaaaattggactcttatcataaagataaatagtatttttaaaaattataaaaaatatgtattttttaaaaaatatttttttatttggacccctaaaataaatggaccctaatcgtggacctatcccgtcttagcctaaggccggccctgattatgactccaattggctacataatttctatctgatcgcgttgaaaattagtttcagattgattatattttatattatatattgagtttttttttttaaaaaaaaaagttatatatattgagttctggtgttattttttaccattttaaaaaatataaagtccattatttcatttaagaaaataaaaaatctaccaatgctttcacaaaatacaaaatttaaaatatagtatttattgatggtaaacttttctagtttttctaattaacgtgatttgaagggaaaataataataattaggtaaatgaaaataataataccctcaaaacttattagtcgttccttaaagaataattaacttttttagtccctgtacttatgacactatactatgatgccccttaatttataagtgtagttaaaaat

SEQ ID NO: 71938 - DNA, 2579 bp, Cannabis sativa
gcaaataacaagtctcaaatctcttgaaagttgaaccatatatttacaacttcaagacaatttgatttttagcctaatccaacaattctcacatataaaaaaaatatacatttatataatttttttaatgggatgcataaatataatttatttacttcaatgtataatatattacgtaccctgtctccgataattttgccatcagctgatattgctgaaaattaattatacatttatcattagttacaactttcataaaattaaaaaaaaaaatcattaatcataaaatatattagttcatataattatgtgttttgtgaactatttatttagacatgcagtgtagtttgataaatcaatttttagatgtctttattttgtataagtatttaaataaagacctcaaaatttaattttactcaaaacatttttaaatataattaaaaatactattacttatattaattaatgaaatgattacatacataagataaacattctttttttagagagataagatattgaacaattatgataacttcaagaacacgtgtttctaatttttttttaagctatgtgtggtatagttattctaaataaaaaggtcttcaagagttattcctaaaaagtttgatgtctccaggatgttattcctagacaactaacttatccatcctggaaggagtcctatggaatgatagttgagttcagaagggagttcccggatgactatcatgtccattccatgcttagtcttcaagatagttatttctcctccagaaaggagttatggatagctagttattcttcctagaagctagttccgaatagtcgactccagctagttctatcctatccagaagctccttcagcgagtgcctttggtccgtgatctcagaagctcatatatgttctcaaatacactaagactaatgctgatgtggagatcttactcataggagagtttgttaagttagttattggataactaacttaacaactttgtttattgaagccactaactttagaatcttaatcttaaggctataaataccatccacactcaagcatttgagacagaattgaaaggacgaagatcaaatgattcaggttgagattgagagttagagagagaaagatattgagagatagagagagaaaggtactgagaaaagagatatttagtttgagttttgtatgaagaatcttctgtagatgaagaagattctttggtaagagtgtgagagttgaaacactttgagagaactcaacatagaatttgtctcaactgtaatgtacctgttcttgctcaatcaataaagaagatttggtggtatttcagaactagagtggagtcatagatcacatcaatttatcagacttgaaccaatatatatcttggtgttgatttcgttattttctacacttattttttctggttttccatactttatttacctctattttttcatccaattattgttctcaatgttaatcttgtcattgctaattgttcgattatttaaagtttcattgatttaattctactctattagtcatagttttcccacaaatcagagcttggtaatcgatcaagaactcaaaatcaagattctttccgctataattcttgaagaaaactttgaactttatcaatggtgagattcgaattggagaaatttgatggaactaaggactttgcgctatggagagaaagtttaaaaggaatcctagtgtaccaaaaagtctccaaggttcttggagatgagaagttattggcagaaaagaaaccagaggaaaaataaaaaatggagaagatggcgtactacatgatcatcatgtatttgtcaaatagtgttcaaaggaaactcattgtataaagacaacgaaaggagtttggaataaattagaagaactatattaaaatcatcaattgttagcaagattaatttgctagagaggttatacagttttagaatgattttttcactttgtttagatgatagtattgatatatttaatgagattattattggtttggctaatataaaccacaaggttgataaaagcaagaccatcattctgttgaggtcactatcaattgcatatcaagaagttaaggcagccatcaagtatggcagagatgtgattgctttgaaagatgttcttgccatatttaagttgaaagaattcaaactacaattggaaaaagaatccaagaaagaagaagtgtacttggtaagaggtaaattgtctaagaaagtaagttcaaagagtaaacaccatcactcgcaatcaagattgaagtccagagagaaggaaacaaggaagtgttacttctatggacagtctgggcacttgcaaagattttacaataagtacaagaagcaacaaggcttcaacaaatctcacaatggagataggaaggataagttatgtcaccacaagaaggattcagttgcagtcacagaagatagcgacgactactccacatatggacaattattctccatctcagaatcttcaatgaacagggaggcaattcttgattctggatgcacttatcacatgtgtctaag

SEQ ID NO: 71939 - DNA, 1731 bp, Cannabis sativa
tcgaaaatgaatgcatagcaatcttaccataaaaaggaaaaattattttgacacctaacttgccaaaaaaagactttacactttatggcagaaggcaatggaccacataataaatggagtttaaaatcacaatccaaacatctaaatatggaggaatgagttttatggaattcattggaattggacatgttgactgattgcttcaaacaagtgtcgtacacattgcaccgatcacattgaatgttcttttctagaaaggaaagaatgtgtggatgatcttcatatgtaatggctcttcgtgtcattccacattctaaacacaattggtaatcacattgaggacattcaaaatataaagcaggtttggttgaatatccacaagtattacatttacaattataccttttcatatgaagggagaggtggttgtgattaggttggtgggaggtttggattttttgtggtaattgatcaatgcaatgtttatgaagaaaatacttgcatctattgcaaccataatacactccactaacatctgatgttgattctttggccgattggcatgcaaaacatctaagattgacatctttataaatagtatctgttgtgtcaacaagtagtagcaaatgaggatgactagaatgttggatgcaatgttggctttcattaagacatgttgttatagagtttgacattaaggcacattcaatatccatgtcaaatccacattctttacaacagaacatgagtctcttttggggggttttgaaacaagattcgcaccagacagatcttgatgtaagaatgagaggatggcgaggatgaaaagagtgatcgatttgctttggtagttcttcacatgacttgtggatataatatttgcatgaatcacaaacataataaggagattgtttcacagaagacttacatagttgacaactaatttgatcagtaatgttgatttcactatccttaattaggtgcaaattatgttgttgattgcagacatgttgaattttctgatcatccatctatttaaagcaagaaacaataatataacacaagtaattaataagatgttaaaatacttaaatggaagaggatcttctgtctagagtgtgtcgaattctcagtctaacatatgtattaggacatgtgtcaatataattaatgtgctataaaacattgtttgatggaaataaatttaattaaataactttgaaaggataaaaaataaagtctgaattaaaaaaaaaacataaatgcatcaaaatatttatgtaaacaaaacaattcataacatatatataaacattgctataaaaaaaaatatattatatatataacgaaaggatacaatataactattttacttaataaataattttgaagtattcttcttttcttttttttttttttttgtcacaaaagtctaggttgaaaataagagttacgcttcattaagatcattttgctttaaaattagtgtaatttaattaaattttttttaatttaataaggatttttttcttaaataataaaaggcagcattactcatctaatttttttctcatgattatataaattatagttatttaagacatcctacaaaattttatgaaattctaaaaaatttaacacatcgaaaactgctttcaaacagtgtattgtacgagtgactattttattttatacgcgtgtaaaatagattgtttgaatattattttctat

SEQ ID NO: 71940 - DNA, 1124 bp, Cannabis sativa
ctccttggggaggctacagattttgaaaagatagggactggctggccataccagggaaaatgtatggtgaagatcagccatgccctacaaaccctagttgactattcccaagtatgggagttgacctaggctggctaggcttacacctggttgttgtgctttgttgggcaaacctacatttggtagggtctggccgtacagtgctcctccatggctggctagacctgtaaaaggcagggtctggccgcatgtgatgcctccttggtggggcagaactacattgggtagggtttggccgctcgtcactcctcggtcgactggtgttggtatgagttgattaggggtagatcacaccaattactggagtttggtgaatctagatgcctaaagtgatcagtttcacttctcgaattgccattttaggtgtttccacccactcttggtcctcgtcgatcaaagaccgatctttgtgcacctcgctccccttagggaggaagtgttgtaccctagctgaccatgggtactcctactgatggctggctggctagtggttgcataataagggttactgttgagctagaaatccctagctggccccccaagcacctggttgctgagatctggctgttcttgccatttgacctttgagaaaaggtttgtcatccctctagcaggggaagatctgtcctagttccttaggaactagccaatagtcttcctcgaagtggatccctaaggagatcatggcctcttctgtcggttctctgattgaaccatcttattagatcactagcatccaagttgcgacaatctaatttacttggtaatcggaggatgtactcctggtcatccatccttcttaggaattcacgtctctgctgagaaaaaacatcgcaattagcagcgtgtggttcttcagttagccctgcacggcctataacttccctgagtctggccaacttaaggtcttctccttggtccaagtgaggctcgcccactctcgggcctgtctctccagcatagaactggctttgaggtctagttgttgttccaggaggctgtcgcccctgggtccttccttcagtgggaggtgccaatggtggatctgttaggttttatgccct

SEQ ID NO: 71941 - DNA, 1026 bp, Cannabis sativa
tcgacgacaggctggaggacaacgacagcaattcctaacgtcagatttgagcatggtgtaggttggttgcgaatcatgatgatgagagggtgaggtgaggaagggaacttgttgggagaaatttgagtatttattttattttattttattttttaaatcctttaattattactatttaagttttgttttattgctgtcgaacaaactaagcatttaattttgtttaatgtttaattaattttaaattttttttgtttaaataaattatattttattcttttaaagaattataatatggacaaataattgtttgacatgtggcactattaaattgggtactaataacactgttaagtttagaaatttaagaatttatgctactattttttttcgggtatttattagcaacaaattttatactttaaatatttatgctataaattttcctattaaaaattagttaggttaaaaatttaatatatttttactaataattatcattaattaaaatacataatttaaaatattttaaacatctgtggcgaagggcgagatgttttttttttttaagataaaaagctattatattagaatgaaatcataatacaatagtcattagaggaggtgagaatttctccaaccaaacatattttttgtccacactgaaagagcatacgaagggcgagatgtttactagtatctcttaaatgggaaatcgattcacacgtgtccaaggtcgccagcaaagtactcccacttgagaagaaaaaaaaaaactgaaagaaaaaaaaaagtgctttaaggcagcgcaagagagagcgctcagtcaggatgtttgagagactttattctttattaaaacagaaaagcaaaaaaaagttacatatttttaatttggattgaatttgcatataatttatgaatagtgctaaaagcatagaccaggtggtaggcacgacaaacataaacaaaacatatatatatatatatttatagaagaggtttcaatggttacatttttattgt

SEQ ID NO: 71942 - DNA, 779 bp, Cannabis sativa
  modified_base (738)..(738): a, c, t, g, unknown or other
tggaggcttgaagcggggacgttacatagtctatgttcacatagtttttcaattatagaaggtcccctactgattatatcaaattgaatatttattttgtgaaacttttaatatgggcttaggtcactcttacctggctaatatgagtatgtgtgttcataaatactcacattgctaggattacataaagcttttgaatatttttctcttctttaaagtgatattattcttttattaattattttggtaactaaaccaattcaacaaagagaagaataaaatgcaaattatcaagaaaatttatttaagtcttacattgagagaaaacaagtatagttatctttgaaaaaaaaaattaagacataaatgaattgtttaatatttccaaattaatttttaatttttaagacaaataaattgtttcggatttttttttttataattgttaattttttttattattttgttgagaaaaacttttgccaattgtagaattagaaatttactatattgttttgtaaataatttaaacattttagaaatattgtccctgattttgcccaatatacgtggaccaaccgaacaaggacacgtggatcaaaagatcgtaacctttaaattatttggtaagtctttataaagaaaggcatcatccgggacctgcctcccggagaaggcattcggttgagcttatgctcctggaggcctaagtaacatcaaagcatctccgcgaggtgncaggcttcccctgagcagtcaattcgcatttaatgccgcat

SEQ ID NO: 71943 - DNA, 1454 bp, Cannabis sativa
aatattataatagtaaatatttttagaaattattaaataattgaatttttttaccttgtgacaaaataataataaaaaaataagaaaaaaattatgtaaataatttgttgtataatattcttttttgacattctttttcattttaatggtaaatatctattaaaatatattaaaattatattcatgtcatcaaacattctttaaaatatttctattggagatgctcttagtcagagtgttgcaactagtactacctctacgagatatgatgggctagggcgagatcgccttgttggtatgggtggtttggttgacgctccattgatttttgcttcttttctagcacgttatgagatttcttctgcatctacagtgaggcactcttgcctcatatttggtgtcactttccagcttgtctagtggcggttacatatggatgtcgtcgtacttcaagatgtgggtcgtggttcaaggttgtgggttgtcgggttcctccttatcgttgtcactgcgccttatgtacttattggagtttctttgttttgagctatgttttagtaggctatgctatggttctgaatgttagatatgttttttggttcgagtaatggtgcttgaaatgcttttatattagtatatcttcatttttgaaacttgtaagagttggttcattttgacttggtgaaggaaatttaatatgtttgcactaaagaaaaagaaaaggttatttggtaaaagaaagaagaacattttcaaaattagtgattttaacttcattaacaaaaatccattttttattttatttttttagtgtagtaaattttggttcttattcctactcaaatctctaccttttaatataaagtaaagaatctctaccaaattaaatatttctttcgaacatactttcatgttacaaattataatgcactcttgagaatcaacattttcatatgagttagtctgctataggtatatatggttttgtattttgtcttatatgaccacatgtagcatgttgtaattcatgattaacattattggtagtagtagtagtacaagtcatattagaaatgacattgtcattattaggtaactaatcattatccaaaataaatataaacatcatggaaaataaaataccaacttactataagccattaaaaaaatatcacaatcaaacatattatataatccaatttaagcaaaaagaaaaaaaaaaccgataatatatgttttaagattatatacccccaaatcttttgatggaagaaggatatcaaaatacttttatttttatataatgtgtgggtgttcatttaatctaatccgtactattttgttcatattgcatctgatctacactaagtgcggatttcattttttagatccaatccaatccgcacaataactcaaatccaattcgcaaaagtgcggattagattgattatttt

SEQ ID NO: 71944 - DNA, 1323 bp, Cannabis sativa
aaaaaaaaaatatgttatttttgtgacagcccacatctcatcaaccatttaatgaaaagataatataataattattaaatattaataataataaataataattttttaaatctattaaaataaaaaaaaaataaagaattagtcacttttacacaaccaataaaaaaaaatagagctgaattaaaaggcagtacactgccgaactaaaaaaaagaaatgtataaaaaataggaataaactaatatataaaaacctataactaatggcagtatactgccaaatacatataaacagtaaaaatataaatgtaagcgtgtgaaagtatttttctaacaaagaaaaagttagtatatcatgtcaatttcacattattaataataattgactattcattagtttcatatccacgattgatttacgagtccatactctgtctcaactccaacttgatatatatgggatacgggtgtgtgtctctctctcatatcattaaatggtttggttaattgtaccaatcatgtgaaatggaattatatgtaaataataattttccgagaaatgctaaaaaagaactagcggtgcttagcaactttatgtgtcaatatcgttatttgtttaaatattgctttttgtccaattaagtatcggattctatataatttaatataaaaattttaagaaatatcgctagccaatcacaacgtaatatatcaagaaagtgctaggcactactagtgtctaatagcaatatactctaattttcgtatatgaaaacaagtcataaaggtgaatttgttttaacaaatgagaaaaaaattcgtatctctagggcactaatggtataatattatatttatatttgagttttcttggattaaaaatttcattgttcgtatatatatgtataatattaggttcatgttagaccatcttgaatccaaaatgtaaaatttgtactaaatttagcacaaaaattgaatttttgttataattagctcactatttacaattctgttcaatataaagatgtaaaaaaaaatataattatattaatcatcattaatgttatattaaaaatatacaaacattattattttttatttttttatcgcttaagtaatggtaatataataaataaagaagattaagtcatgtaaaagtcaatgaaccataataatgactggcactataataaataaaaaatgtagaatttattgtaggccaaatttgacacgatgctatatcttgtgccaaatttagcacaattttagcatgtgccaaatttgacacattttttaaaacaccattggagtagtatttttc

SEQ ID NO: 71945 - DNA, 945 bp, Cannabis sativa
aaaattgactaaaaaattattttaaatactaaaacatattaaagggtgcattactacatttttaggtggatgacctttttataaattgttttcactgccacagaatatcacctttcgttgtaagttatatgtctatcactttctcttcccttggtggatatatcagcacaaaagccagcccatcaggattattttcatagcaatatatattgtgcatgttagtgtatccaatattattattctatatctatccttatcttatagtagtatccatatgtgtatgcttctacattgttccacaattgtgcaaaggtgtaccatttttagaactttgattatgggatactcattaaatataataataatgtgaaatacgaaagggcagacgacattatgttttggcggacactcgtttatatgatttgcttccatttaagaaatacctggataactagcactaacccacacaactccacttcgaaattttattggggcgtttttagtttcatgtatctaaatatatatagtcgttattgtaatgatcaattagatttgtcggtttgcaacctgtttcactcatatttaaacacatcacttccaaattatttgctaatttgctatgattcatcggtcaaatatttattattattattaattaattatagatgccattaaaaaaaatttgatctaaattttttatattcgtataaattataattatcaaatatattttgaaaaatttagaataatttataatataaaaaatagtatccaaacaatctatttcatatgcgtataaaatcaaatagttatcgtgcaatacactgtttgaactctatttttgactaataggaaacggagtcgtcttcgagacaggacaagtctccaagctaggattggctaatacatttcatgaaaataagaaagaatacatgagaattgttt

SEQ ID NO: 71946 - DNA, 838 bp, Cannabis sativa
taaattatttaaaatttcttgaaaatttatatatgatttggaatagatacaatatacaatgaaatgaaacttttatattatttttttttttttttaaaaaaaagaagaagaagaagaaattagtagacttacaaaaagggtatcaaacaaaatcaagtctacatagaggaaagaaagaaacattagaggaccttatttaataacagatatatgataacatgtcccattttttttttgtttttttgctaagaaaagttgttaagagaattcctaaattttttaaggtggaaacttctgttacattacatggtacaacgaaataaaagaatttgtggaaagagatttactttttctccttgtttgtgtaccatacaaaagttgtaataaattaattcaaaataaatatttattcttgattttgccatttttgtattatcttcttagaaaacatataacttgtgcttcttaattctccatattactaataaaattaaattaaatttgaattgaatagtattcactagttttctcttagcaattaataattctctatcttaccaaatttatttaccagcatttgtaacaaatcagtttggaaaaatatttttctcttagcccaattgaaaactactctttattttgtaaaagcatcactgcttcctttgcttcttgtttattttatttttcggctagatcttataattttatggctcataatttggttaattagacttttgcccataacttatatggttgtattgacatttctactattcctaataatatttgttgtaatgaccgtgatgtctaatgtcttatgaatgaacgtttcttttca

SEQ ID NO: 71947 - DNA, 1993 bp, Cannabis sativa
aagtaatacacaataattcaaactaattataataaaaaaaaaagagaaaattagttcttaaaatactaaaacataaattaaaaataaaactagttctacaacaaaatgagtaaaaacgaataacacataatacctcataaatcggttataatttaaaaaaaaaatgtggggatcaattctaaaaataccgagacatccagttccataacaaaataaataaaaataaaaaacatacaataactcaaaatataatataaaaaaatttgttatatttataaactagataaaaatttaagacaaagaacctagtttcgtaaagtaactaagataaaaacttacacttaaaagttagttaaataaaataaataaatcaaaaatcagttcattgaattaactaaatcaaaaatcgattcccgaaataactaaattaaaaacaagttccttgaattaaataaatcaaaaaccaatttatgaaataaataattcaagaaccgttttctgaaataacttatgtaaaaaaaaaccagatgcagcataaaaataacacacaataactcagaaattagttattaaacaaaaaacaagagtgaatcaattccaaaaatactgatacataaattaaaacaaaaacagttccacaacaaaatgagtaaaaataaataacaaacaataacttaaaaattaacgttctaattaaaaaacaaaaaaagaatcaattccaacaatattgaagcataaattaatagaaccggttccacaaccaagttaataaaaatatacaacaaacaattactcagaaaccgtttataattaaaaaaaaaacattataaatattctgatgatcaaactatgcatacgagattgaaaaagacaccttcatcacaattttgtcactctaataacactctaagaattattactcaattacacaagaagaggcaaaaaaggaatgaaatgatatggatgtattattatttatatttcattattatgaattatcgagcacaatgtttaaagcacattaagcaaactattttcctcacaagacaccaaaacagcaatgtaaaattaagtgaagtactacataaaaaaaaaaagtcaatacaataacaacacaagagaagaaaacaagtcaaacaaaaactcaaatttgggattcactatatacaaaaacacaagcattacaacaacaactaacaataaaataaacacaaagcaggatgcaaaacaataaaagttgacggttattttccttcgaacccaaaaaagaaaaacttgagtaagaataaaaatgcatatacaaattaccaagttaaatatcatgatatacatacaaacatatatcccaaaactgtttgacattatctacaatattaaaaagttttaaactctaattctaaggatcaattattaaataataccagtcttactaatttcaagcacatagttcggtaacacagttttacgtactattcatctccatgcatataccgtattcttcttctctttcgatttctatatatgtataatgtcaattctcatcatcacttcttcttctgtaccttgctttctgcagtataatttcggtgtctgtaacacctttttgaagttgcaaaagtgaaggataagactgtagcaacctattattgctaaaacagaaatatttgtaaagtttttttttggcaactaaaatatttattcttttatggtaagattgatttgcattcatacccgattttattaccttgtatatttggtttttattgctcttttctatgttaggaaagatgtatttttcagaacttttcttgtatggaaacttcttataagagaaacaatcctcttatggaaagttggtttttaaaggaaactttgatctttatcactttccttgttaagttcgattttgtcttgattatatcagatcatattcgctgtttatagcagctatcaagacccaatacaaaatcgaacctgtttatagtaagtttcc

SEQ ID NO: 71948 - DNA, 942 bp, Cannabis sativa
atccaaacgtgcaaactcctggaaacacgagaggaccactaaggataaaccccaagcaaattgatacacaaccacctacaacaggccatggagtgactaccctctagctaggttcacaccaggcatacttgagactgggaacaccagtacggatgccgatcaaactactcctagcactgagattacatcaaccaataatactcaaaggcctgtcatagatgacactgaacttcaaaatctacgagtagcacttgggcttatgcatggccataacagcaccctacatcatgatcaagaagatctttgagcagccatcaaccttcccttcgacgagcagaggcgtcaattaatagagtggagggaccgggagacatagtgcatgcgccccactattgtagggtgtccttattagttttgtctttttaggttaattaattaattaaatagataaatatttaaattttaaaagtagttgagatattctctcaagtgattgagagattcccttaatcgattataagatataaatatctatacctaaattcggttatattatttattcaaataattaaatatgatttaataaataatttgaatttaaataattaattatataaaatttttattaggtttatttaatatatcacataacaaagttgtatatagtttttgaaatataatagtatttgtaggtaactttctgaaagccttaaatgattttattagtaaacctttttctctctatcataaaagaaatagttcttgctcatgtgttgagatttaatcaagaacttcatatacactattatcctactagtccgcactagtccttgtgtgtgatggaagatttagaaaatcaaggtgtgagttttgtcattagcattccaaggatacaacatacgaaaagactcgaggatacctgataggcttcgagaggtaaat

SEQ ID NO: 71949 - DNA, 3494 bp, Cannabis sativa
tttctcccaaatgaaaggatagcccaccaactccatatcaataagactgcaaatttgaaaccacatcttaaaatccctgaattaaaggataaggtcaaccgcctctcttgccactatgatgaaggaaattattcaaatcccccattaaacaccaaggaagagtcgattcccccgtaagctgctgaataagcctccaagaattcccacgcaaactcctctgaggttcaccatagaagccagtcgcacgaaacaaagggtatccatcaagcttcaaatccaaatcaatgtgattattactaaagctaagaagtttgccatcatcttgagttttccacaacattgcaagccccccactatggccacgggcctcaacaacaaaacttccatcatagcccaataaagctctaacacaatcaactttgtctttcctgcaaattgtctcacagaaaaaaaattaaattgggttcttttgaaaaactatttctttaaggaattgaacaactcgagattcccaagcccacggcaattccaacacaactaactcataacttgcaaaaatcacacaccactcaacagcaaaaaaatcacataccagacatgtcaaaacgacaagacaaaaatgattattattattaaattatagatcaaaagaataacacttatttaaaaaaaaaaagactaattcccaatgctcttcaactcagtgagtcaactcgttcctctaatgcaactcctcaaccttcgattccgattccgatcaccaccacctccattccacttcttctccatacccctcaaaccttcctcgttctcctccgtttctctgaaaccctatagcttctcgaatggggatcgctttgcaaatagctctcggtgtttacatcgacatcgatgggcttctcaaccgcacataacgccaaaattccctttggctgatcactcggccaatagtttttgattacgttgtttcaatttcacaaccgttcttttattagtttcgatgtaatcgaaagtacgagtttctacgcatatatacatgtggtataatcgtatatgtattatgccataagtcaaccgcccttgacgcttttttcatcttccacgggatcttgggagacaaagacgatcacttccaagttctttattattggaagttacaaattggaaaaaatttctagatatagcctaatgttaaacatgagaaagagacaaaagaaagtaatgaataattttggtggtgatggtggtattttggctgtgacaaaaaacttgtttagtatagtatagtattatactggttatcatgcataataatcttgtttggctagatataaatattctatatttcgttggatatataatattatactgattatcatgccatgtttagtatttatttgatgaacaggagatgtttagttgtatgacgttattcttttttaatgaatttattcattgcaaaaaaaaaaactttttctaaattattagagaataaacaattcatactttttatcaaaaataaacaaataccaaacttccaaataattccctaattttcggagtgtgtttcaaagtgactgtataatgattaggtagtgtaattactaaagtggtaattacacggtttaataattatactatattttaaaatataagatgtgtttagatatgaagtggtaattacatatgaattcataatatcttgtttggaaaaatagttagtaattacacttaattctcataggaccacgagaattagagagtttaattggaacccctcaattacctctaattacactattacaagatatggtcagacaaacatgtaaaattgtacaattacctctaattacacacaaatctaattacaccgtagctttctaaacgcatactagttgtggtttcaaatgactatgaaaaatatacaaatttcaaatatatatatacgcccaacttttgtaatctttttatatatatttgtacttattgagtgatataatcttaaatataacattttgatgtgtgtgtattataaataaagtaatagtattaaaataagaaacataatttgttatttttaaaatatatagaaagatggtgatattgtgacaaacattaaaaatagtggaattgacaaaaaattgtaatggcttacttctctgttcgtgccttggcttcaacaatgtggaggtccaatcggattgtcaacgtgttatccatatcatgtagaagaatgacttattcttggctgagtttgacctgactttaaaaacatttatactatttgtaatcgtattaatgtttctaagtttctcttttgtaatcgttctacgaactctttagctctatgataaatttttcttgtctttggaaatgacaagagtgtggtggtcagatttaccgaatgttccttatgctctctcctagatcaatcgactcatgaaaagatctagcggatgcttttggcaaccaatttgttccttcccgacaatgccaaattgagcccaatgatttggtggatgtcaagcaacaggaagacgaacccctcaaggactacatctaacgattcttggaggcagctgctaagaccaaaagtcttagcgaggacgcaaggtttatgtactcgcaacaaagctcaaggagatgagtatttgtggtctgaccttcgtctcaaggtggtatacactatgaatgacttccctgatagagttgatggatttattaaacttgaagaagttgtcacctgagccaagggctcaaagggtgccaagaagaaggcatcagactttgaagcccctgctactaaggcgcagggcaatgggaagaaaggaggtttgaatggagagaagagagccaacaatagtggcaagcaaggcaactcccccagaagaaaaaagcctatgactgggggcaatcccttatgagagtatgagccttgcttcaccacctactccattctcttggctccaacagaggagatttatactgccacacactcaatagtgtcatatcgcaaacctcttcccttcaaagagtcaaggaagatagacatgaacaagttctgtcgctaccacaacaattacagtcatgacactaatgagtgtaatcagttgcgagatgagataaattttctcatcagacagatgcatgctgctctttagcattatgtacgacctaaagctctagttgggggcaatgcacctctccagcctgtgctagttgtagacaggctagagatcgtgattggatgcccttacatagctgaaaattcgaggaagaccttagaaatgtatgcaagattactttgacatgaaccaagagccaaagtcctggaggtagcaaaacgtcgttcgaagtctcaatgctacgaatgtgaacctatcacctttggagaattaaactcctatcatgtcatttattctcacaatgatcctttagttgttgaggtacaaatagctaatatgacagtggccagggtaatgattgataacgaa

SEQ ID NO: 71950 - DNA, 1100 bp, Cannabis sativa
ctcgagctcttggagagaatttggtggggtggttaacatgagaagcataagctagacaaccaaaatttcttaaatgagtataagtgggagccttgtggtggagtagctcgaatgacgttttgtcatttaagagagtagaaggtgttcgattgattagataggaagctgttttaatcatgtaactacagtagagaagaggtaagtgtgattgaaatgctaaggctcgagcaactgtcaaaatgtggtgatgtttgcgttctacaacaacattttgttggggacgaccaacacaagagtgatgattaagtacccctttgcttgcataaaattgtgtaagggtgagttcctttgcattgtcagttctaacagattttatatccgttttgtaatgaattttgacatatgtgaagaaattttgaatgataattggggcatccgattttgctcgtaacaggtatgtccatgtatatctagaatgatcatcaacgatggtcaaaaaatatttgtatcctccaatggaaggtaaggggtaaggtccccaaatatcaaggtgaattagatcaaagattgcttttgcaaaattattgtttgcaatgtatggtaatttcttttgcttggatagatgacaagtaggacaatgatatggagaagcaagattctttttaaaatgtaattatttattgagtttattagtcatgagtacagatggatgaccaaggcgtgtatgccattggttttgagatagtacattacaagaaagaaaattacaatttggaattttaaagagatcttgctgaaggtaataaagttgtccttgtttcctagctgtcccaatcttcaatgtcattgaagggccctgtatatgacagacattaaaagtgaagatgagagtactaagtgtgttatgcaatagagcactaagagaaagtagattaaacttaaatgatgggacaaagaggacattgtgtaatgtgatatgagagttaataatcacactgccaatatttttgatttggacagaggtgtcgtctggtaatgtaacatgtttgttgtataatgtattagtaaagtttgaaaaacattgtgttgggttttatgcc

SEQ ID NO: 71951 - DNA, 725 bp, Cannabis sativa
gtaatgtctgaaaactcaatctttaagtttgattttattattatgattattttgatgatcatgcttgaagagatgatatagttactcagccaaaaaaaaaaaaaaagaattaatgatttaataatttttttggtatatttcttaccaactattaatgatttaatttgcataaatttataattgatagattaaagaagaaaagagaagaaaaagacataatgggtcactaaaactaccttctttcattcatttctgccatcttgtacatcatttaagaaaagataacgaagatgagaagaatttctaccaaaaattgaagttctatggttagagctatgatttttttgttatttctttttaatcctgtacaccatttgagaaaatgtatgaagaagaggaaaatttacagttaacatacaaccgactctaaaagcaaactccgatcgtgaaggcccaaaaactagaatacaaatttattacaaaaatgttgcccatctaattaccttttttccccaatctttcacattacaaccctttctttttaagcagtttgaatatgtggacttcgactttagtcaattgtaatggtaataaaattaccagaagaaaaagaaaaagacaatttggaggaaggatgctaaatgcacagtattatgtggttactgacattttatgtgattccctggaggccttgttcaggcgggtctgttcaaataatccttaat

SEQ ID NO: 71952 - DNA, 582 bp, Cannabis sativa
ataaacaatgagcataaactaaaactattttcaataaaaaatacatataacaaatatctttatcaaattaaataacagaaacttttacactaaacaatcaattaaaaatcttaaacataaaaaaagtcttgccacctggcatggtattgaatgtttctctctaaaaaaaaatcttttgaagttttctgcgtacggttgttttcttgctttacgattggtgcggctgggtagttatcgtttccgattggtgcggcttcaacggtggagcacggcggcgttctctcttcgtcttccagaaggttcacgattgagtttggcggtgttttatttggggtttctgcgtctgcaactgggtccgactggggtgttctggttccgttttttggttgcgttctcacgggcaaaggttggcgtcgactggtgggtgatattgtcgtatctctcgtcggtttttagagtctcacggtggatagttttctgggttctgggttagttttctggttctctcaaggttggatcatcttctacatttgttttggtacggctgtgttttttctttctctgttttgtgcgaattttttt

SEQ ID NO: 71953 - DNA, 775 bp, Cannabis sativa
catacaacattgggattccctcattcactgtcctctgtatttgacagctcagcacttgagtcaattcctttgacaccacccctcaaacgaaatggacattgtgtcacattgagtttgttagtgaggaattagaaacgagttggagtgaggctcttggttaaacaatcaacaatctgatcatgggatggtacataccttatttccaatttcttgtcaagaacttcgtctctcacaaagtgcacattaagttctatgtgtttagttcttgcatgatagacatgattcgatgcaggagaactagcacttaaattatcacaccatataacaggaactcatgtacacttgaacttcatttcattcagtaattcttgtaaccaggacagctctacagcaaggtgtgccaacgctctatactcggactcagtgctagatcgagccacaattgtttgtttcttagatgaccatgagatcagagagtcacccaagaaaacacaatacccagctatggatttcctgtcgtctgggtagcatgcccagtgggcatcagagaatccaacaagatttaagttcgtactaggagctatgtgaagatcatggtgtatggttcctttgagatacctgagtatacgctttgctgcgccctaatggatgtcagttggttgtttgagaaattgactgagtttgttcaccggaaaggaaatgtcgggtctggtgtggctgagatattgaagagctcctatcacgcttctatagactgttggctgggtaagtgggg

SEQ ID NO: 71954 - DNA, 960 bp, Cannabis sativa
tgatcaaatggaaaaatgcccatatgggtgactttcatattcctaaagtaagaagaatgaactaaattaacagcatagtatttccaataatagaagtaataaaagtgttgagagtaacttacagggagcccaaagatgacaactttcttgtcctaaatcaaacaacaaattccgccccaaagaaaaaaaaaaaatcagaattttgagtattatatatatcaaacaaattaaaattcacaaagggtaaaaaataaacgaaagagtgtatgtaacattgtagctgaagaaatagaacccagaaatgaccttaaagatatctttaagaggagtagttgagaacttggtggagacaccttcgtcccagctgcgagctttctggagggaaacatctggtgcggccgagactatgtcagtcccaactgaaagcgatgcataggacctaagtccggttgagagagctcccaccattgatctcattcccgagtaagagcttcgcttcagaaccatagacgccatggctgtgactcaaactcgctgagtcggttcggttgattgaaagtttctgcttctgttcccaatttctttgaaagagagaaacaatggagagagattggctaacgattggcccacatttagcccatggaggtgatttacatgggctgggccgcaatatattttttctggtttttcacaaaaatactcttgttttttttcatttttattgtcattatttttttagaagtttcaaaattacaaaaatattatgtttcagtaaaataaaaaacaaataaaaaataattatataacaacaacatgaaaacaactataaaacaataaaagacatgtacaaagcaacagaaaaataataaaacattgaccttattgcaatatgtaagacaatatcaactctcaacatgtttttgtattacgaaattctttttttttacttaattttgacaa

SEQ ID NO: 71955 - DNA, 1040 bp, Cannabis sativa
agagacaaaaaaagtgtcaccactgtacaaattttctatgtatataaatttgtggtatatgaacaaatatcccaataatgagctttcaaagataaaaatacaagacttcatgtatggagaaaaaaatattgttttaaattcaagcttatcaactaaataatatacaatggtgataagaagcatcaacaccattcttgcatctcaataacacaaactgcgagcttgattaattttattttcttgcatataaccttatcatcatattgtaaatattagtctaaacacaatagttcttatgattcttcatccatctaaaaatttgcgtacaatgctcaagcaatcctctccttgccatttcctaaaaatacacaaattaaattcagcatacaaaaaccaaaactttttcctttttttttttttcaaaagaaaagagtcaattaccctaatgagaagaggaaaattctcccttgaaaatcggtcgacccagtgattcaaaatgccatcgatatcttcccaatgtcggagctggtaaaccttatcgatgacttctgataaggtccaatccctctcaaactggtcaccaataacatgcaaacattgccattttgggatatcatattttctgaagctggtgaggtgaatggtggcctagtgttttccctgatcatagtcaacagattcatgcttcttattgtcaatgaaggtggagaaggaggaggggtcgttggcagagctgctgcagccgagtgagatttgaggaggtggaaactcagtagcaaagaatgatgagatatggtggttttagtctacgtatctgaatgaaagaaaagataaaatatgaaaatacaaaaatatagcatatgttaaactacaaaaatataaatatttgtaaaaatccataacccaaatatattaaaaaaaatgtcataaaaagtaaaacttttaaaaattctctctatttgtaaaaactcataaccctaatacattaaaaaatgggggtaaaataaaatatactcttttttttttttttttattcagtt

SEQ ID NO: 71956 - DNA, 902 bp, Cannabis sativa
cagtcagccaccaacaaaccaaactgagatggcatggagactgaactatttattgattgaactaccatcaactcatccgactcaatgatcacatcttcccaacctttatctttaacccaactcaacgcttctttcattccaatcacttcagcaatttcaggaaaaacaatcccactcctacttgctaaaatggcttcaattaatcttccatttgaatcacgagccacacaactaaacccgaacctttgatacgcttcaaaaattagctccatcgacatttaccttgacctttaaactttctggtttacaccaatggttgcaattaaaagaaacaccagtctgaaaaaatgacggctgagatctagcaaccttccattgatcaaggaccatcctagccgacttcactacactcgaagctgtagcagatttttttctgccataacacctcatttcgggtcttacataagcttcaacttaccattgctgcatcaagtataatatcaccacggtcctcctctaaaagagcaaaaaaccaactgctaaactcctgaaataaaccaaaattggaggcagcagctgagagattccagcaacttcgagcaaacccacaatcaacaagaacatggaaaattgtttcacattcagcattacaaaatggacaaaataaatccacatttacatgctttgtactaagctgaaccttagttggaaggcaacccgtacaagccctccacaagaagtgttgaacttttggagggacttcaggtttccacaatttttttccagcaattttcttcttccaaatacagccaactcccagcagcagattgcagaaactgttgggttttatgccctaaataaaactcatttagatcggaagagcgtcgtgtagggaaagagtg

SEQ ID NO: 71957 - DNA, 585 bp, Cannabis sativa
attattattattattatttaaccgaaaggaaattccatttttgttgtttagtcaaaatgaaaaacaatttcccaataactaaacactagaaaatgagatggactttgtttttgtttcgtataagagatttcaatttacagctcaggtgatagttcatataatatgtactttttcatttttaattattataaaaatatgaatatgtgatataattaatagagataattacagtataattaattacttaaaattttaaatttactgtataattaattacttaaaattttaaatttataagcaacataaatacaataattcttttagcatcataaacttatgatgtagaaaaaaaatttagaagtaagggcttctttaacggtagatgctagtgtgggtgttgtctctctttctcgcttttaattggctaattgaattatttttaatatataaaataaaaaggtaggcactcatagttgcttgtattaaacttgtcctaattgatattatatattttcgtctagacttaattatttaatttaaaatatgagttttacatgtttcttttttacataaaactaacgaaat

SEQ ID NO: 71958 - DNA, 626 bp, Cannabis sativa
aaaacaattttttgtttttaaaaacaaaaaacaattttttagttataatgccaaacatgcactaagtttttggagtctagcttgttcacagagtctcaataggtaaaacacgcacatatgtacacaactaatatagtttgagaagagaagaaattctattaattttttttttttgagagaaagaaattctattaaaattagagtttgaaattgtgcaaaaaaaattaaataaaaagttttaatataagtaaatatttatagatatgtgaaaatagaattgattccatataatcaaaattaatacacataaaaatattgtagtagtatagtccttgcttgacaaatacgtacatgatgtaggggtgtttatacaatttaattcgcattattttgttcatagtacatctgatccgctctaagtgcaaaattttattcttttggatccaatccaatccatacaatagctcaaattcaatccaataaaatctgcataaataagaattcaatcgattattttaaattgattacttttttaaattaaattatttaatatttataaaaaaatattatagtagtagtatagtcattgattgacagatacgtacatactagccaacaagtaaaca

SEQ ID NO: 71959 - DNA, 2029 bp, Cannabis sativa
tcagcaaaagccatatggctttgatgtccaagaaagggattattaccggtattaaacggagaggagtgttggacatgtggaaaagagaacggtatggttggatccgtcttggtgccggaaagattgaaggtggtagccgtctgagtcaaggtcggagttgaagatgagaaaggcggaagcatggttgatgtcgaggccgacgccggagcggagctggagatgaccagtgctgtggagatttgttgaatcggtccagaacttggaagaacaccatctggaatggagtcgagtacagtggtggtggaaggagcaaataatgacgaatcgacattgatattctccgagatggagttagcaagtgatgaggaactgaacggagtatcttcatgaacagcaatggaggaaggagcttcaccatgggcgacggttggagatggcagctgaagagatggaggctcactgacggaagcggcggcgacagttgagtttctagttcttggagccatggaagagaagagaagatggagaaggggcagctagggttttatggaagaagaaggtatatcactgataccatattagaacatttgagagggaaatctctctgttcgagatgagaggaaaaagtctgaaaatgacttattattttattaagtgtattctgtacaaaataagactatatatataaggtagacaacccaataaacaagtgggcttaagtcattgggcctaaatatctaataaatagagactatatttgcaagcaagttctgaaaaatcataataaaaaacccacactaactcttatcttttccaaaaatgtgactaagaacttcaaaaactaaataaaaaatgaaaagaagatgatgaagaagaactgaacaagaaaaaaattaaaaattatatgttaatggagaaaaatagagagactttgaggaagctaagagtgaaaaaaaaaaagaagaagatgatgaataggaagagagaataatgggaaagtggaattaaagtgaaaggaatgagtattaaatatatagggtatcacattttttatcatcaattttaattaaaaaaaaatttaaaaaaataaaaatgtgacaacgtaagtcaaatcacacttttataacttaaaatataatacaattttaattaaaaaattaattaaaaaaaaatatgtcacttttgtgatagtgacaacattacatattcaattttttgttaatttatatatataaatatatatatataatgtgagtggattgtagctcaaaattaaaaaaaaataataataaaatatagtatgaaaaaataatacacagtataagaaaaaatattagaaaagtaatatttttcttacaacaataaaattaaaagaagttttgctaggggcatgtctttttggcctaatatcaatatttttggcatataaataaattataattcaaataattttgtaagattttgtaaatagtagcattttaaacctcctagaagtttgacattttgtaattgaattcaaaacactaaatttcatgtgcgtatataggaggcttctaaacaatttttttttatatatatttatatatatagtttacaatataaaaaaattatatggccgaacatattgtaattattgagatatatttataaatttggaagatattttaaataatttccaatacttttttttttttgaaaaacactgttattatagaattcaaaacaacaacagagtagattggaaaaggaattttccccaatcaaatacaatatcattatccaatcgaagagcaaatctagctaagccatgagcagcgttattagcttctcgcttaacatgagaaaccattactctaggaaaagaggataacaaaacagaattatcatctatcaaatcatgcaaatgagatacacagccaatagaagaaactttgttaattacattaaccacaagaagggaatctgtttcgacgtagtggatagccaactggtttggaagagcccctttttaactgtagataatgacatt

SEQ ID NO: 71960 - DNA, 668 bp, Cannabis sativa
tatatggtttcctcatttatatttcccaatttcctcattaaaaaaggaatgagatccatatattttttaaaaaattattaataatattagtggtggattgaaagtagcttctcattttaaattatttgagacaaagacaaataaaggggaacaaaattgggtcacttgcattaaacatgtcctttaattatgtccatatatcgatgtaaatttaagaagaagagaatttaatttattttctttgtatatatatataattatgttttttagaggtacataaaaccataaaagaaatgttattagtaataaataaataaattatattttgggattttattatttgatacaattttgaatgaaattatgaatatataggaattttttttgccaattatgaactctctgatttttaatttatttgttgaaaaaattcctctaaattataaaaattgttgcaatatagttaatttaaaatacaagatctatttgacaactttaaactactcaaaattcaatttattagcattaagtgtgcaaatattaactctgaatacatgattcactactacaaaaatgtaatatccagattaaaatagtatttaattttttttttaggatattaattgagcgaggataattatcttgtttctttgtgttgttagtgagtt

SEQ ID NO: 71961 - DNA, 1138 bp, Cannabis sativa
gttaaatattacaatgaggcagtccacagtactaagaggaaagaatttactgatttggtccaaggtgagaatatgttagtaatgaaatatacaacaaacttcgatcgattagccaagttggctttgagaatagtgcctatagactttgacaagaaggaaaaatacttggcaggtttgaatgccaagattaggcatgatctagtgattactacaaatgatacaacaacctatgttgtgatggttgagaaggctcttcgagtcgagggtgtagtggaatttcttcaagagccctaagggactctaagagtttacgagaccaccacccttcctacttctggctatggtagagatggtggtgataccaacatatattgaaagaggaatactttcttgacattaggtggttcgaaggttctatgggaaccaaggtagaggtggtcaccaaccttattcttattttgagtgtccctattgtaagaaacatcatcccaggaaatgtaatcagaagacatgtttccaatgtggcttggttggacacttcaagaaagactctcctcaaataaagaaagaagaaccgaaacaaaaggcaaaacccatcacagctcggatgttttccatcacacaagaagatgttgcagccaatccttctatggtaataggttaacttcctgtcaatgaatcctattatattttactgtttgactctggagctacacaatcatttgtagcgttaacagtagttaatgaattgggtaggcctaatgatgttattgagatagggtttggaaccctactacctagcggagaattggttagtggattagatctatgccaattataattgagaatagggagttaagtgttgacttagtggagttggaatcaactgagttcgatattatacttaggatgaactttctatccaagtattcaactagcattgattgcaaacgaaagatggtaactttttagccaaagggtgaggaaccatttatttatgtcgagactgtttagggttctcggattccaatcatttcagtgttgaaagctaaagatttactgcacatttgatgtgtaggatttttagcagttgtgattgactccagtagacctaaaatatttgggcctgagtatgtca

SEQ ID NO: 71962 - DNA, 604 bp, Cannabis sativa
aagaacaaaacctgaagcaataaattatacttggcaaaaaagggattagcagccaaaattaattgctcagaggtattatcccctttgtctttaaaatcaacatgcagaagtaatttattacctctgaaaagagagaataagggtatcgataataaatgcgaagatttagctaggatatggaagaggatgtgagatttggatttagtaagtaaagaagcaaatattaaaattaaaatactggcagttgaaccagagaaagaaagggatgcacccctaggaaacttccagagcatgctggagaagttgaaagtgatgatcttttaaagaagtttttttttttattaatttaatgttcttgtttgtttgtttttatgattatatgtcgtttttcgtgacacagtcaaaatttgtggctttaatggtagctttgaaatgaactcttacaattggatttactttatattttgtggagtttaactctgtagcattatactaatgcttacgagtttgatgatattacgagtttgatgtccagtgtaatattcagaaacttaattataaataattgtgatttattatataagagcattgttattgggcacca

SEQ ID NO: 71963 - DNA, 1072 bp, Cannabis sativa
ataatatatcactacttatttatgtttcctatcctagtgtttttgatatcgttagacgtcgtcaactatgccgagaaacatcgataactatagaaaaactcaaaaatagaacgattggcaatagatatcaaaacccaaacacagaaatttaacataaaatcaaacaaattcccttaaactcaagcataaattacaaaacctaatcttagaaaaataaaaaaaaaaaaaaaaaaccaagaacttactgaataatgggttttagtctgtgttggtgtctcaggtcttccaatctacatcgacgatgtcgaaatgttggtaaaatagcaattcagtcattattttggggctttggggcagttgtcgtgggtttcaggggcaattgttgtgggtttcgagggcagttcttgtgggttttaattcaagaaaaagagaaagatggtgagagacaaagaggcccaaaagtcacggtggaggcgatggtcagtggtggttgagcgccagagacagtgaagggttagagtgagagagagcgtgagagactttgtgagattgagagtttggtgagagtttaaatgggaggggtattttgggagttaaagtaaaattgaagtgtattttgaaaactttttgtagtatggaatatgaagagtctatgcacaccatttaagcatgaaatgtcagatttcccttccataatttccagcaaagcattacaatcttacagacttcactcgtctgaaaagagttaaaaataatcttcaactaatcaataaagacaccattagatacatatgtccttctcacccccaattgaaatcaataattttgtttttgtaatcattgaatattcttctaataaattttattctctgagcgtggtcccatgaactagtaatagctgaaagaatattgataccatgtatatttcctgtgttagtcaagttcattcttatcttccgtgatgaatttttttttaaacatattgcctttttgtttaaaagactttttgtctgcgtaaataattctgtaacagaacatcaataaattatctattttaaataattaagttggt

SEQ ID NO: 71964 - DNA, 566 bp, Cannabis sativa
ggcggtgtttagttgctttaacacacgaaaccaactggaatatttcaggatggatgctaaccagactcctcttccggccagacctcctccgatgcctgaatcaaggataaaggacaaaggagagggacatatcattgagagtcacagagaaccagagctgcagtcgacagtcagcaacaaaccaagaaggaaagtcattagggtgaaaggaaatatttcaggtgctactattggaaaatttgaaaatagtagaggtgggaaccaattgcccaaaggatctagacaagctgcgcatgccttctgactatcaagctgttaagagtcgattgagagggagacaagctcgttcagtttccccaagggctctgagatttcacaaacaaggtaatacaagtacaattcctgaaaatgacattataaataatttttcttcaagacccccacccaaccctgctgataatggaattctcactactataatggcccaaactgggccctcttatgatcaaatggtagaaaaagcccatgttgaagtttgtagctctagacaaccccacaaacaccct

SEQ ID NO: 71965 - DNA, 614 bp, Cannabis sativa
agctgttaactctccccctggaagagctcccagagtttccacctctccttcaagaaagacttccaaagctttaatttcttcttctggacccatttcatgcagtccagcctcagtttcttctccaacaagatctatatagctctgaggtcgaaatcgctattagacatgttgtttgtagctgaaagaaaggtgaacttcaagcagttaatatcctagacttgagatgaatagcatgggtacggggaaggcctcccctatgatctacttggagagtccccaccggactggtcatctggaggcataacctagtccttacgaaaactacatctccttataatcagttcgaaacacagagaataggcaatgtaaaccctaatatgttgcctagaaccctaatgactctagaccagaggaaatcaatacactactacaaaagtcagaattcgtgacggtcctaaaaatgctttttttttggggaccatcgttgaaaaaattaactaactgtttaaaaccgtcggaaaaaattagtattcttgacgatttataacggtaattacaggaataggtgacgattataattggaattcgtaaatttattgggtccttatacccga

SEQ ID NO: 71966 - DNA, 699 bp, Cannabis sativa
caaagaaaaaagtattacaacaaaattttgttattataatatttcatgcatgcactatatttcttacactacataaaatggatttttcaaattattcttttctcctatatattttttttagataactaagttttttttttgttttaggtaataactaagtttatttgtttttgatgttgaaaattatagctaatctgcatacatatagaaaacttcattgctaactacatattgttactggtgtaattcaatatatatcatattttatacattttaatttaataaacatagcataagaaaactgctaactataacatgctacatacattaatatgatattagacaccttaagtattgaaaataaaaaacacaaatagcaaaagtaataaccctacctataaaaacacactcatctaattaaatatatttgtatatatataaatatatatatatgtatatgtatacttacgagtataaggaggtgtgtagaaagttgcagttcctttttctgcaaatgagattaaggattggcatatcatgatcatgcctacaaatactatgattactctcattgttgccatattgatgatcaatttgatacccaaattaataattattaatacgtactaaattatacagttatatattatgttattctctttatgttttttcttttgtggtacttaaaactcaaaactt

SEQ ID NO: 71967 - DNA, 1041 bp, Cannabis sativa
ttagaaagcacaaactcaaaaaaatatgaacttaatccacatcttaatgtataaattagaacaacataacaacacgacaaatccaaagacacggtaaaaaacatgatattctattaatattataatgctagtatatttttatttgctaattatatgtaaattaaagttgattcacatattatataactcttatttctgagtataaacatggagtatttattaagaagtattaaatttcaatattaataaatattcttgatatgattgtgtgtaaaataaatgttaaaaacatagttaaaattataataaaatactaagaaatgcatttagtagtgtgagcccttaatattttttttcttgaatttgtgagcccttaaattgttaaagagaaaatgtagggttcaaattctaacccctctgcgtcttttagtaaagggtaacataaattaaaatattattttttgataaaaacacctcatctatttacaattataggctttgaatcaaaactacatcccactccacctacctttactatttttattccccttttttttcatcaattttttttttctcaatctccatctgtcttactatcaaacatagtatcaattttgttatataaattgttatcattggaatataaagaatataaagcctacgagtcttcaattatgtttaacaaaaaaatcattaattaaaaaaaaaaatacaaattaattacagagttacagtaacataaaattaaaagaattagtttttttttaaggaagtttacagtaacataaaccacatcaaagagagataaatctccattaacataagaggaagtcattggggaacccatccccaaaatcgaaactcttatacaactaaattaatatcatacatatctttctcaaaaaaaaaaaatatcatacatattattatattcatttttcacaatcgatataaaatctttgtaattgtaatgttgaattgatgatttgtttaagattgaataaaatagttgaattttaataggttggggtgtatttatta

SEQ ID NO: 71968 - DNA, 1047 bp, Cannabis sativa
attattggtagaggttcaaaaggtaaaataaaaataaacatgcttttattgggattagaactcatgacctcctttagatgcatgaaatgactttaccattataccaaagcttatttaataggtataatatcacttttatttgtaaatatacgttgtaactaactaaaatgcatgcaagggttagagatctgagtggaagaagacattatattccgctacaaccgctgtaaggtttctgaaacgaccaccttgacgtaatccaacagacaaagggtcaccttgatgtaatccacgtcctgacaacattttagcccaaacctcaccattaatgagaatagcgaagctaaccgatgtaacatactgcataattttgtccagccagtgtttgtgataccccaatttaagcatcataacttgtagaaactttcactccacctgatcataagccttcgtcatatcttgttttaatgccatcttccttccattttgaaacaagttttttctcatgcaatgtagcccttcataaccactaatagtgttgtcatggatcaatcttcctttcacaaaagcgctctgtgtgtccgaaatgaccacacccaaagatgatctcaactaattagataggcacttggagataatcttgcagataacattgcagagactaattggtcgaaattcttccacttgttttggcttgtcaactttgggaatgagcccaatgatagtatcatttagaaaactaaagttagcccctccattaatgtaacgccctgatacttaggcgctacagtgattttacaattactatgccacctttgctaatcaaaggtttttttttttgaaaattgtgtaaaattaaaactttaaatttaattgctaaactttaataaaattttaaacatttaattacataagacgagatcccgttcttaaacttttacaaaatatccaaaatatatatagtcaggtcgcacattgactacaaaataaaatcccagatgtcccaagattgaacactccaggtcgcatcgccatgacatgtacaac

SEQ ID NO: 71969 - DNA, 890 bp, Cannabis sativa
acctttatctattgagtatgttaatgagttggattctgtgaaatacttttgtatatgtcttttctctctctctctcacacacacacacatgcacacacgcgcacgcacacacacacgcatgtatacacactcacacaaggaggcaagggcagacacatgtatgcgaatttgcacaagcatttacaatttgaattccctactacttattgcaatcatccaagtgcaaaaaaaattgcaatcatctaagtgctaatttgtttttctgattcttggtttatcagatatgggatgtaggaagtggaaagctaaagcttacactgacaggacatattgaacaagtacgaggttagttctttatactttatcgctggtggtatggactactgttgtttattatgcccgagagaacgatatcagatactaacagctgcttgtacagatggagaaggagtacttatggtactctattttttttagctaaaatagctaaaaagctaaaatagagaaccatttttagtgttgttgctccaatcatactccctactttaattagtatttgattattttaatagtttttactaatttgaatttgtcaaatataaattaattttataaaataatgataaagtaatagtgcttttgattaaaatattattaaaaatgtttagcaaaagagtagggagctccctatccattctttattatagagagttatttttggtatggttagagctcattttttcaagtcacactccctattttagctaaggagtgtgtttagagagcatggttggagatgtttcgaggaaaggacttatgattgcacttaatacttgtatctgagttatttaatgatcccccactcctctttccttcaggccttgctgtca

SEQ ID NO: 71970 - DNA, 881 bp, Cannabis sativa
ttgtaagaattagcccatttggtggataataaagaaaacatatagaaagaacttgcttacagagattattgaggaatcgtttcaaaaatgggttacccatttgttcttgtgttcaactgaaaagaaggtttctttgaagcttttgaataataaccgatgtggtggttacaatcaccaggtggtggctggcggcgaggacagcggaaatggagactttgatctggactttgataagtgggcccaggcccattaaccaaaggcccaaattaactaaccgcaaaggcccgagggcaatcttgacattttgacaattcttcaaatcgggtataaatacaccaccttgtcaaacccctaaaaatcgaatcttattcttctagggttttcaatttcgaaccagagttacaattacgccgacataatcttttttcttctataaattcttcattttttatgtattttctttgtgtgtttgctgtagcttatcgttctcctttcgatttcacgtttttcttatgatatttgctttaaagttttgatttttgagaatgaggtgatgatttggatttttgttccctattggattgattcgccagaatgatggcttcaaatgtattagctctagctgatcgttctcctttcgatttcatatttttcgtatgatttttgctttaaagctttgatttttaattttggtttttgagatttgagatttgagaatgagatgatgatttggatttttgttccctattggtttgatttgccagcatgatggcttcaaatgtattagctctagctgatcattctcttaataatgtttttttttctgagattttaatgttattctgaacttaagtttaaaattttagaaaatgggcaaaatt

SEQ ID NO: 71971 - DNA, 2064 bp, Cannabis sativa
  modified_base (739)..(742): a, c, t, g, unknown or other
atatatatatgtatgtatatataagatttgggggtggagtaatatttatatatggttggagaaacgtacaagttaagccattgttacaagtttattgtaactttacgtttagacagcatcttaatttgtggccctactaatttaaaattaattattattattaaatatattaaacaaaataagtactagagaataattaattatttatttgctaatctaaattgtatacataattttataattatatagagacatgacatgcatatactacaagttcgtatatgaaaaatacatatgtaagtatattatatgacattaatgttgttgtacaatctaattattataagtatctttaattattattattattattattatatatacatgggagaataatcacctggtagtgtaaaagaaatataaaaatataaatagctaggtagcttagaatattattattattaattagcaagtgccatactttagcgaatgtggtttgaaatttgtttttggagaaggcaatgtatggtggctcatactttattagctaattataacaattgataaaatatatcttatattttttaaagtgataaaaatagcactttgaacttaatttttaacaattttattatttaatataaccaactttaaaataatttttaatacgaacaaatacagaaaatgtaactaattttgtcataacatctttagattatattattattaagttttattnnnncaaaaaatcagtttaaggtcctatatttatacaattttagaaaatacaaggtccattttattatttaataaaacaggtcgtaaaacacatatggtttgaaatggtatttacccaaaaaaagacaaaaaaaaaattagtaaattgttaatcatgagatgttagctaaaaacgtgattctttacaatgttattttctaattattagtactcttacccctaatgagatatatatgtggatatataaacacacaattcattgattagatattttttttttttttggctgaagtgattatatataattatgtggtatagttaaatttggtgaggaaacttcctggtttggacgtccataatagaaagaaactactttatgatcatgtgtgattcacgttgtgtgtattggcaatttggcatatatatatttttattaatggatattaatggatttgggtttgtgtattcaaaaagtaattttcctttttttttggtactgttataacttataagttatactgttattttacctttaacagtttatcttattaattatgctttgcatggtttattgactactataatatgctgacatgtgccacgcacgtgatcagttccaattaacaataattaataaagtaatttacggtataaatatctaaatctaactttcgattgtaaataaatactcaaatttaatttttagtactgataataatacttaagttataattttaaaaatttctataagtcctggatattaagtgttaagtaaattgctatgtggcaatccctgattggtattggtctaggtcattaattttttttaaaaaaaatagtttaactatactactaataaaataacatgtagataatgacttaacaattaatggtcaattatctactagataatgtcacttcttcctcttctctttattttcgaaatttactaagtttctctctcaaaatattgtctttgagtatcaactcactctattcaaggtgatatttagacttttgtggaagactatgatattgaacacaatcgaataaggagaagatccacgttcagatcttaataatgctctataacatacatgaatcaaagactataaatctgaacggaatgagtcatattattttgttgctaagattttctatatttttatgtgtttaatttattgtttttaagaaatttatatttaggatattatattataaaattataattaatatacatgttaataaatctagatcctaataaaataatttttaacagctgaccatctttaataaatagtgtaaattttatgttaaatttgacta

SEQ ID NO: 71972 - DNA, 1610 bp, Cannabis sativa
atgtatatatgaatatgatcagtcgtgttgcttgtatcatgtgcttgctgtagaagatcacttggtttggtaatttgtcatgctcattagctaataattatttctatcaattaattagttttcattctattgatcactgaatcggtttcaatattgaattttcacttgccatgcattcttacacttgaagatcgagcgttctatttgtttggtttattagctacgatttggtgatattcaattaatcataattggtcagttaaaatgaatggaatcggttttaatcatattgaatttttagtttccattaatgattcttagagtcgactgatatctatgtttggtttagctacgatttagtgatattcaattaataatagaccatgatgaatcttcacgagattaaagaattactaatgttttttttttccctccgcagtacaatcctgcactataaaaattgtttttaatagatatatatagtatggtttgcattaaaaaaaaatgattttggttggcctatttgtgaaattttgagaacatgttttttttccttcaaatggaatttccgtttcatcacccaaataatgtaacatttttttttgctggaaaaaatattaaatttaatttggcccaaaaagaaaaaaaaaaagataaatgtagaaaaattacaactaatagtacaaaatttcatgtcaaaaaaaaaaaaaatagtgcaaaatttaattaatgaaactttaacattaatcaaacaattagtgaaaatacaattaacaaatcaagaacaataatcggataaaaataagagcaaacaaagtagtattaaaaacatgaaaacaataagtacagaaaataaaaaaattaacaccaagatatatattggttcaagtccgatagatcaatgtgatctatgactctactctagttctggaacaccaccaaattttctttattgattgagacagattctctgttgagttctctcaaaatatttcaactctcacactcttactcaataatcttcttatattcttcatacaaaatccaacccaatctttctacctctcaatcttaatttgaattgtgttcttttcgtcgtgctcaaaagcttaagtattggtggtatttataggctttggatcaagatccaaattgaagttattaagttagctagacaataaataacttaaccaactttcttatgagcgagatctctacgtagcataagtctaagtgcatctgggaatatgtaagagcttctgggattacggaccaagggcactcgttgaagaagcttacagataggatagaaccagctggagtcgactatccgaaactgccttctagggagataaatcgtccaggaaggataaatagctgtccgaaaatcctttccagaggaagggtagctaccttgaagactcaactcggagtgaacatgatagtcattttggaattttcttctcgactcaactattattccaccagacttcttcctaaatgggtaagttagttgttcgagaacaacatccgataaacacctagtgcatgtttggcatcataactaaaaactgttttttgtttttaaaaacagaaaattgtttataaaa

SEQ ID NO: 71973 - DNA, 892 bp, Cannabis sativa
aaattagtagtaatcagaatatgtaagagtagtagaaatcttatcttaaattaaaaaaaaaaaaaattgaaatagtaaaaatgttaaatacattatttaatataccaaatacgattttaagatataaatatatttataccaaaaataatcctaactagctagggataccataaataaaatttaaatttaaaagaaaaataagtaaaaagacctatttgattatttttaaatgactgaaaattaaatcaaatcaaataaaaattaacaacatattaatagcactagaaaattgaaaattaaaccaaataaaatttaataagaaaataaatatattatattaaccttacaaaaattaaagaaaaaattaccaaaatagatataggaattaagattaaaagttttaaaagaaaaagttactttaattaccagaaatcctataatttcgataaaataaagaaagttaaaatgtttatttaaagaaaaaaaatttaatgtaaattcatatgaatataaataataaataaaacgatattgactaaaatttatttatgtatttataaatagtatttaaatattaatgtaaaaatatacaaaaataaattatttacagctattaacatttgagttaatgttaaataaataccatataattataagagaaagtttacgtttcaaaacatttaacttgtaaaataaataccaaattgctcatgatagtcttcgtaatctcagccctgtgaacttcggttctagctgtgatacagtcgtagaaacaagtgtccatggcgaccataaatgtcaagcaaagtcgtaaaaaattaatttcaaataataatttacacatatataaaataaaacaagtatatgtactatgtgtgatgtcatataagaa

SEQ ID NO: 71974 - DNA, 933 bp, Cannabis sativa
atgataatgtttgacatacatatttaggctgtgtttgaaattattgaagtggtaattatatatgaattctttaataaaatagttagtaattatatgagagaataatattttttagtagttaatgtttaaaataaattttttttagtaattataattgaagagtataactgaaattcttcaattaccttcaattacacagttacagtgtaattacatagtcatacgagcatgtcaaattatataattatctctaataacacataatctaattaaaccatgactttccaaacgtgatcttagtaaaaaatattaatataaaaaatgtaaatagatataatttggtgtatttaggggtttctctctataagttcttagccttgattttcttgcctgaccaaggctcgctagctctttctcggccttatggcgcgactctggtcaggtcttgttgattctcacactattttttacttcactggagttgttgttatccttctgcctaggtattctttattttcttctcgtcttatttcttcaaaggtgcgtctcggggatttgagttgctcattgaatttggattagatcttcactagtgttaatctttttagtgtgttatttttatttgatatgtttttttttattattattttcaataacgttgttgttgcaccatttcgctattgttatggtagtagaactttattcattcatgacaggagatttttgtcttgtttctttttgggacattgggaaattttcaattggcacaaagtatatttgtgttagtagcatgactatccttgttcatgttcaaatctgagagattctcaattttttattggccccatagtttataatgtgattgtttattacgattgttatcgctatgatttgtcatttggctatttcattttattctaggtcgaataatag

SEQ ID NO: 71975 - DNA, 674 bp, Cannabis sativa
gtatttttgtaattttttttccttttttgtatttttttgtttttttcccttttattaatgtagattgcttcaataatacttggttacatcttttttttttttgatgcaatacttggttacatcttatgttttgttgatatcatttttttttttttttttttgtattttaagaaagctttatttacttgaccagaagctctgatcattaattattaatttttggcaggtacaagtgctgtagttccaattgatgtagaaatattagaacaaggaaaatcatgtgaatgaatcactgctttccaatcctgaagaccttgatagctgagatactactcttttttttttttttttttttgaatgggctgagatactactcttaaattgggataatatattttaatttcatttgatttaatatatgtcatcaaataatctgacatttatatatatatatatatatatatgatcatatgaaatcctactctaattaatattttagatagaggatagtattagtagatcaaatgtttgaatagttactataatgtagtcaacaattcgatttctggaaatttccttcacatctggactgcagatggtttaatttttggcatattccattttttcactctttagattgcttcccataaccaattacaagaaggaagctgtct

SEQ ID NO: 71976 - DNA, 1574 bp, Cannabis sativa
atccccgacttggggaaacaaatgtaaattttggactagtagaagagctagaaaaagtggagattgatccagccatcccgacaacgaaactcaaaattagcaaagctctgttgcttgaaataaaattagctttaatgaaatttctaagagcgaacctagacatttttctcctagtcacatgaggacatggtcagaattgatcccactgtcatgtctcatgcccaaaatattaatccagacttttgtcccgtccagcaaaaatggagattgctagacaacgattatgcacatgcaccaaaagaagaggtagaaaggctttgcacaaataatttcataattgaagttttctacctagcttgggtgtctaacctcgttctagtgcccatgacaaacaacaaatggcgagtatgtatcgacttcaccgacctcaataaggcatgtccaaaggactatttttcactcccaagaaacgatcaactcgtggatacaacaatcgaacatgaaattttaagctttatggacacttattcagggtacaactagattagaatgcatccacctaaccaaaaacgcacaagcttccgaatatacattggtctgtactactatcaagtcatgtcgtttggtcttaagaatgctggagttacctactatattaaaatgttcagatgtataaatattttttgactgtttaagtatattggtttaatagcttcacgcatgtgaaaatagatgtttgcatgaaatatcaaaataggttgctgaagtgtgttggtgtgtttgttattagttagtgagatgtatagttagtttgttagtttattacaactaattcttgtaactaatttgttgaaccgagtatatatatactcatcgtaaaagcatgactctctaatcataaatacaatctctttctttcctctttcactatgttaatctctgtttactaaaatggtatcagaaccaagaagatcttgagctcttcgtcttcctttttcatattttttatcttctttctctattcttctctttcttcttgctatggcgaagggaggagcagcttagactcgaagcaattcgaatttagatgacaattctaaaaatgcaaatcatttgctactgatccaaatccaagatttgatgatctctctcatggagatcatccaagtgtaatgcttgtagctaaaattctcactagatctgaaaaattacaggtcgtggaagatatcaatgcttgttgctttagttgcgagaaacaaataaagtttgtggatggaagattgccacaacctgaagaagatgatgaagactgtgattcttggtgcaaatgcaatagtctgatcatttctttgattctgcgtgctgtctcagctaagatcggagatagtataatgtatctcaaaaatgcttcatcgatctgggcagagttgcaggagagctttagtcagaaaaatgctccatgaatttttgaagctaaatgtgctatgcaactctttcagtaaggatcgaacaatgttacactagactcaagtctctttaggatatgatccaggaatataggcccacacctattt

SEQ ID NO: 71977 - DNA, 1045 bp, Cannabis sativa
gtaatgtcaggccctaggataaatgagtctttgttcgagagggtagttttgagtaagaaaattactatatcgagtaaaactctttgcatcagaggagcctaagggctccaatagctcgtaattggcttttctcgtctttaagtttacagagtcccattggagttgccttcaaatgctccattacagcttttaaagaaaaaaggtttaaaggaaggaccctacattggcattgtaagcattaagaacaggtatgaaaatacataataatatatgtatgtatttatatttatatagtactctaatataatattatttgataaagctgtgattttgctggctgagacaggttggttggtctcttctttaaaataaaaaattgctaaaagggtatgccacctcgtgctcgtggcagtgtcgggtattactggtgtctaataacaaataatcctttaaaaattggagcaaagaaaaaggttcaattgatgtccaaagggtcaagtgaacaagaaaaatttgacctttctttctaggaccccattaattatgaactatgaaggagttgacttatctatctattagaatattattgtaatttcctaatgtactaattcagatgtcacatgaggatgtggtcctttcctttaagtttgaacaaaacagctggcaaaacctcatagtgtgtgtataaatatatacatatataaagatgagaactactattttactattttttttttttaaatagaagttaatgataacctgatatggagttgttataataaaattgtgttttttatatttgtttgtattaaaaattatctttaagttggttatattaaaaaaaaattatcgaaaattgaacttagagtcgtatttgtattttaaaaaatatataatttattttatcagttaataaaaaagaaagtccaatcgttaaacacaggatctgaaagagcattgttattaggtaccagtattacttaataccttctatggatagtgttccacgattggttaacgactttaaaaattattttcttaagtt

SEQ ID NO: 71978 - DNA, 1199 bp, Cannabis sativa
ttctgtttatagatttttaagggatatatctgtctttttcatttttaattaataaaattaaaattaaaattaaaataaattaagtaaggaaaggaaaaaacattctctataaaaatgggggagaacctttccctttgttttctccctaatttgtgaaagtcctagtttctccctttccaaaattttgtaaacaatggtatgggaatcaataccataccattcattctcaataccataccattcattcccattccttttaagtaaacgtagcattagggtaaaaccgttccttattccttattactgtccaataggcaataaggcaaataaaaggttagtatatttatgatgagtctctctaaaccactagacacatgtctcttgacattataagaccgatcgagtggatgaaagattatcacattcgcatgcacactttaccactttttcctttctccaacttccgaaggcttatggcaagtagacttaccaatagtgaccatttggagtctaaacgattacgtgaaccaataatgatacctgaaacctgcaattactacatgtacatagttttgttagttattaaataaaaatatattaaatttgatactaaatatatatactatattattagtataatatttttgtggtttatttaattttatcctaaaataaataaagtagtagatggtagttgataaatagatgcaaatcaaatacctttcatttttttttataatagaataaaatgctttttcttttttatatttttttagtgttttaatcattaaaataaaaatggtaaaatgtgttaactcaaaatttcgttaacattatgttcaaaaaaaaattcagttaatacaaataagacttgataattaatgctcagaatttctattgtaataaatgatttacaattcgctataaattacaatagagaagacgtacaattttatgtagttttatagttaaaatctacatactatttaagtctatattatttaagtttcttaggatgagtttacaatttggtagaatttttctaagtcgaaaatttggtcatgttattttacaatgttggctctattatttataggagtagaataacaattattttttatctaatccatacaacattatggaacatagatattgcccacatttcatatacttaattaacatgcgaaaaatatatatat

SEQ ID NO: 71979 - DNA, 959 bp, Cannabis sativa
cacagactcgtccttggccgaggagtagccactcggaacagcaacttcatgaacgcaggttcgtgtgaggcttcggcgctttgcggagtcggtgacttctgcctcttcggggtctttccgtttccctaaggttggcgaagattcctccatggctaaacaggtggaagcttttttttccctcttctaaagtttttttaaaaaaaaaattgatttagggtttatggataattgtgtaagattttagcactaacgaatgccagaaaagaaagaaattcaagaaaacacatgtattgctccgatgctgttcgaaaatgtattgggccacattgggctttaatacgaaatatggctcaaaattgtcttaaatctaacaattaagttaataaatgtctatttttataaaaaattaataaaatatctattcagttaaaaatttgataataaaattacaattataatctttgataataaaccctaactttctaccctattctcattttcttatgtccagactactcgtctctttcttctcctttagcaccaagaccatctcgcctctaccagtccgaccgccaccccttgagtattaccaccgcagatcgtcactatcgaaaaatttaccccagctttctacctcttcttcgtctctcatgtcaaggccaaaagtctcacctccttcttctctctcggcaccgacaagtctagttctgttcctctctcgcctcttagattttgcactatggtatatctttattatgtacgtactatgatatattaagaaattaaaaaaaaaaacacattaaagagtggtatattattttcaatttgtggtgtaatatttttaagtgtttggtatagttattttacacaatgttatatcgtttttatgtgtaatagtatatttaaaaaagtgaaaggtagtatattaatttaaaattgtggtatattattttaatgtg

SEQ ID NO: 71980 - DNA, 534 bp, Cannabis sativa
attattttttatggagagcatcacatcacaccaagaaattctctctttttctttcttaaagggagacactttttatattcggtagatcaaaagtaacaatgggcaattttcttttctttataggaaaaccgaaagttaatactatttattaattcaaagcatatatttcaatgaaatgttcattgttcaaactatatatttataaaataatagttataatgcttgctttagatggagaaaatgcattgtaggctgtaagctatagaataatccaaataaaatagatttttctagaatgagaaagacaaaagtacttcttccaacatttcctaatatatattatatattttcttggagtattttgttatgttatttttatatatgcatcgagtatataataggatgatggtaaggcatatacatgtcattttttatgatcttataaaaataaagaaaaataaaaaagaatagaggtgaaagggatagaaaaagtcaattattaggtaaggacaaagttatggagatcatttggtt

SEQ ID NO: 71981 - DNA, 979 bp, Cannabis sativa
aattttattaaagctagggtggtgagattttaaccagataatttaattttataaggcatgatcatccatctaatcatttcatttcatttatttggtgactcaccaaagttctcattcacgaaagatatatattaatattagaaatggaaaaataaataaataaggggtatttgtgtaattttaccctggtattcttgcaaaagtcaaggtcactccagcaagactcgtcgaccacaacatcgggtcctctatttgggtccatatacacagcaccaatcgatgatgtgaacaccacgcgcctcactttggcttccacagctgcgttgattacattcttcgttccattcacagctggttccaccatttgttcctgtaatcattcattcaaaattacaccactcatttttttccttttcctttttttatttactaaattaggtaagatttagagaatcccaaacaaatcccaaatttcaccttatccatcattaaatgtgattgagattttcctatatatattttaataatgtaaagaatggttttttgcaataaaagcaaacactgagaaagaatcaccacaattataacggaaaataacgtgccactcccactacccccaacaaatgtcatgtgtgttagttggcttgtgttgggtcccacaaaagtttcttttcccatcttttgtttttcctttattcatgctaaatcatccattatcctattattacttattaaatttatttattttaatttaagaaagaattatatattaattattgtaaataattatagggttgagttgggtgataccggatcgtctgtaacgggagaagcggtgtggaaaacgccttggcagcctttaatggcttctctaaggctctcgtaatcaagaagatcagctttgcatagaatcaatctctcgtttgctccttcaagttctctcaagtgaccattcttagggtcatctgtattattcaat

SEQ ID NO: 71982 - DNA, 1181 bp, Cannabis sativa
  modified_base (61)..(74): a, c, t, g, unknown or other
tttatgtatttattttcatcgttttagaaattcatattaggatgttaataacatacttgtnnnnnnnnnnnnnncctggtaaaatatattccaacaagccccctttttcttcttccctttgcatgagggtcgaatcccgaacaagcaaatggagttgtaccctcacaaatcatggccaaaacgttgcctagtgtaaccctttattcctgctcatcctcctccccatcaaggctagaagggagagcataacataggtcatggtcaccctagggaggaggatctgggataggcgcaagaattgaaactggaagcagagtatttgtaacgccttaagaattaggcatgctacgacaaccaataatacaacctaatctagctaaactgggattactagaaaataaaagcgggaaaatttaaactttgattacaatggaataaaaacataacttgtaatgatttaaactttacaaacaatccaaaaagacaacatgttttgggatcccataaaactttttgcaaaatattacaagtcatttatcatgccgacctaagcggtaaaatctgagaatacaaaaatataaccactgtcatacccaacccgcttggtctagtcttgcccgaaaatgtacaatccatcgccaagctcctgcactcatggctgattactaactgacttaccttttcctgcatagtagagcacctgtgagccaagcacaacaagacagtgaaatatcaatatacacaataaaacatatcacatatatattaattccattgtacttattgtctatttgacgcgtgttacgctcacacgcctatttatgtctatgtggcatagacccacgtgttacgctcacacgtctatttacaataaggccttagaatggtttatctcgattctagttatcgagtctaacctaattatgccttacctgcataattcttcatttcaatatctatagcatggcatagtattcaaaatcatttaatcactagggtaataaccctaggccatataactgctcactttagggtaataaccctaatcccggttctcacttagtcccaattataatatcaaacatgagtgccactatgcttaattctacatgctaactgttggattttgtgccctaaataaaacccatttcaacataatcatatttacttattaataaaga

SEQ ID NO: 71983 - DNA, 927 bp, Cannabis sativa
aattcaaagacagtgatgcccagaggccagtgcccagccgcagtttatgtctctacattcacaaacaatattagtacacgcgctgtgagaacgcgtgcgaataatgttccactgaatcggttttaagttagtacaagaattgagatgacgagacgattgctgttccgggttccaacgagagtaactagcattttcgttatgaacatggtatttattaaatattaaacaaatattttatgtttggtataaggataaggttattcttagttgggtttggtgtgtattttagggttgaatatccaccactatataaaccattttacagtgtacatttattattactcaagataataaaatcacaatttacttatatggtatcagatatttccctttaggagaccagatccccttttttcgggcatgtacctctttttatggatctggttggttcttcaaacggctcactggaacttcaacagctcaccttcttccatggcacgaactcgccggttcttagctcctcactgcgatcttccttctgctgctgcttccattgccggcaacgttcttgccggttccaccactactcccgtggtgtcctccgttgaagctccgatcgttcaagaaacgattcctccgtcagccgaagctccgattgagccacctgctgtggctcccaatcttcaacacgtcatcccgtctcctcctaaaaatgctcgtccttcctccgtcgttcctcctttggtcggagtcgctttcatggatgcttcggccataccttcaagatccactcatgtcgtgactgttggtaacatttctctctctcaccttggttcacacagtgctcatgatcccatttctttgcagtctccttctcatgaccgtccagccaatgaagacaacccatacttcgttggctctagtgac

SEQ ID NO: 71984 - DNA, 896 bp, Cannabis sativa
agaaaaactggccttgaagttttcacaatgcatcgactatcgactcgaaacagagagcctgaaatgaaataagttgagagttgattaaaatagagacaaaccaaaccgctaccaattgagattgagagtcaacagagcaatgattctgagttatgcagctcagctcagctgcaattaaaggggttctccaacattgacaagtcatcgggtaatagagcacaaaaacaaccaaacaatcttcacatggtgggcaccaccaaattcatcaaaaatatatagattttagtagactcattataatctagtgtaatttattcaaactgtggctctacctcataaaataccaagattcacagttatgggttagtcaattagttttgagttcaacctcttattctatacaattgattccgattttctaaactatattgttaaccccgaaaattagcgctgttaatttttgaggttagttaactaatctcggagcagttaataaaggcacattcaaagagtttacctactcagtatgtatttcgcaacgccaccatcgatactcgcaattcccgagatgcacccgtgcaattcaatgattgaccctgtggtgatccaacgccgagagtacgggcgtaggaagaagaagtcatgcatgcatgtatgtgtacatgcaagtatgtgcactcgagtgtatgcatgcgggtgagtacatgcatgggggcgcgtggttgtaggggtgcgagatgggggctcgcatgcgagccgtggtggtacaaggcgtgtgaagtgtgtgcaagtgtgactgttgtgggagttgcgagccgtgatggtgcaagcagggccggccctgaaatgtagtgggctatagggtaaaaattattttttgggcccttatttagaaa

SEQ ID NO: 71985 - DNA, 840 bp, Cannabis sativa
gtttagtcctttcatgggaagggttcagtcgacgtattccggcggctattttctgggttttccttcgattttgttgtttctttctggattgggttacgatttccagtgtttgtggggtggtcttctgcgatcatcggggtcattactggactgttcgtgcgtgttctccctgggaagactgtgcgatttcttcagccaggttttttatcgtttttgttacagtttttttctgagttttttctggacagtccgtgcgggtaagggtgtaattgatcgacgtactggtgctctcctagttatttggttttatcatcttgtttccttgggtattgctgcgattttctgggcagttttacagtgtgttgattttatttttattgtgttctctctgtttgtcacaatggacttggaattggttaataggcttgctgaagtactggtattagatgaaggtgatggtcctgtccttactttgaatcaggccggtgtggaggagggtaagaagagaatggatttgtgtcttgttggtaaagtgattgggcctaaacctgtcaacaaggagggtattgagagagccatgaaggggatttggagaattaacaatcggttccaggtggaagagctgagttcgaaaaatgttttccgttttttctttgggagtcgtgaggataggcagcgggtgtatggaggagggccatggacgattgataaacagctcatttgttttgtgaagccgatgggtttaggcgaaatatcgaagatgaattttgattttacgtcattttagatatcgatcaacaatgtccctctagcttgtatgactgaattatttgcaaggga

SEQ ID NO: 71986 - DNA, 1127 bp, Cannabis sativa
aagtttccctacaacaatgaacacgttggagtgatcagggatgaccaaaagagtgccagaagttgttataatgtctctattcgggctgtgattatggtctgggaaaaggcacctattgctcccaaaatggagattcaagcaaaagttgaagccgtccgagagagctttaaagatgaattagatccctgagttggggtagagagaatgatcaaaccaatggcagatgtagaggaggttagcatttatgacatagaccccaccagaaccataagagtgggaagaaaatcgcctccgatggtgaaagaaagcatcactgatactgtcaaaaagaatcaggatgtgttggcatggagccattctaatatgacagggatcgaccgcaacaccatttgccatgccttgaacatggaagatgtgatgcttgtccgccaaaaaagaagacccttagatctcgtaagggcagaagtaatgaaggtagaggtcaataagtttaccacgaatgacttcctccaagaagtgttgtatccggttttgttggccaaccctatcctagtccccaagactaatagcacatggagaatgtccatcgacttcgcggacctaaacaaggcatgtctgaaggactgttttccactcccgcggatagaccaaatgttagatgccacatctagatatagattattgagtttcatggatgcttaatccggctacaactagataaaaatgcatgtaatgattgcttagctttattttaagaattagtatataattagggcttgttgttagaagtaagcttttaattattatattatgattatggagatatatttaaattttaggtgtattaattatgttatatatgaaattttatgtttttcatatttttatgttggtaacagcggaatgcgacacttggcctatagagtcacatagacaaggtctagtattttggttttagatgggtaatttagttagacattgggaatgttgggaatacttggggttataattttggactattttgcccctaaatagataggttacttgtttgagaagggtaaatttgtcctttacctttttgtttgttagtgagaataattaggatttatttttactattatccctaa

SEQ ID NO: 71987 - DNA, 1655 bp, Cannabis sativa
tatttgagtgagggctttagcccacacatgggctaaagtccctccgtgcctgattgtagagctccataaaaaataaaaataggttgatttttgtagtgtagttagagtattttgagagaaaaataacaacatatatgagtttttgttgtcccattgaaaatgaacttagaaattatctttttaagtctcaatctttattttaattaataagtgtgttttagagaatataatttattgaagatggcaattttgagatctaatctaatctaagtgtaaccaacaaatgatattatcctctttgttaaaaaaatatatattatcctcaacaagtaattttattgtttaaaaaacaagtaattttattcaatgcaagagaaccaacattttcttatttttagtcccaatcaataatcatatccaaaataagatttggaaatgttaattttgacttcaaaacaaaaatacccacttgcttatttattaaacaaaaaaaaaaaaaaccacttgtttattacaagtatagtccataggtcctacactagggctaattgttttttttttttttttttctcatctaacaatttttctaaaaatagaatgatttaagttgtcggttattactctttatcttttttttttttaatttatattttcaaaaaagacacaaaacaaaacactccataatatatagcaatgttcttgcttgagttatgggattgtaaaaagtcaagaatcagaatctttaataatattaagaactactcaaactctttcactttactcttatctcattccaaccatttttcttttaatttttaatttataatttcatcactttcttttttcttacttataatttctataaattttgtttatttttgaaaaataataataatttcattatccatggatgatgctaaggctaaaccccaacaccaagaaccgccgaggttcactctcggtaagcagtcatcgatgaaacccgaaagggacgaatcggcggcggcggaggaggaggaggagctggttgaggccgccattgaccagagagtcagactaatgtacttggctaacgaaggagatatagatagtattaacgagctgcttgatgaaggtactgatgttaatttcaaggacatcgatggccgtacggctcttcatgtcgccgcttgtcagggtcgaccggatgttgttcaggctttgctcggaagaggcgccgtggtcgattctaaggatcggtggggaagcacggtaaaacccttttttttttttcttatgtctatttgaactgaagagaagctgcatttttcgttgaactatattgtaattcttgttttggagtggtgtttgcttgaaatcgaacttattgtgccaagaaagaagttgattgggtttgtaattgaaaatatgaagattgtagttcttgcaccattatagacaaagaaagaagcttggaagtctaattagaaagattttgagtattgggccattatcatatagtgtgtattgattttaggttttgttcaatagcctcttgcagatgctgttcattacaaaaatgaagatgtgatcaaacttttagaggaacatggtgcaaagcctccggtatgtctagtgttgttgttctttatttttgacaaaataaaagcttgttg

SEQ ID NO: 71988 - DNA, 685 bp, Cannabis sativa
aatatattattattattatttttggattgagactatacaagttgagattattatacattattgtgtacaaaatatataattttaattctgaaaaaaaaaattatagtttaaatcattccttattaattttgtatgataagctgtaaatgaatggtcaagagtagcggtaaattattactaatttaacagttgtaaaccttaatatgtatgaaaccaatgaatgataataatggcttgatttcaccaacgatgaactaattcaaaagcttttacgaagaaaaaaaagaagaagaagaataaaaaaaaaaaaaaaaagcttttgtgttgttggagtcttgtgttttgtcatatatgatttgttgtccgttcaaccaaaataaaattctccttggacggcaatacttggatcctcacacactcatccttgtcattttgttttatgtataatgtatgtatatacaaagaaatgtttgccttcattgtaaaagatagagcaatcacaaatggcaaatataaatacaataaaaaatagattatctggcttctacaattaaagatttgtttagctaatgaattcacttcaagattatacaaataggaaaaaaataatgcagtttatttttatatggtagaaatgaataataaaaaaaaatatgagaatgaaaaataaacaataattaaaata

SEQ ID NO: 71989 - DNA, 775 bp, Cannabis sativa
tacttaatatctgagtagaagagagagaagaatgggcgttgagagcgttagatagtctctcatctttgagtacagtttctcttgtcattaatgctgatctgggaactctgagaatcaactctcctttgctaatgtcacgcagcgccgccaaaccccttcctccggcttcgggaaaatgcgaaacgtacagagagtgacctaaacaggtcagtgggggatgggattgagtttggtaagtttctgagtctgaaattccaacctctgccgcccatttcagaaggatctcaagcttctcatccatgattaataagtaagggatataattccaaccgctgcgtgaaacagatagatattagatttgtattttatataattcgttaggactagatatcacataactaatggcgtagaaccacaatataccaatttaccaaaatatataatacgatcacattatagattcacagtcaataatattttttttaatatcagagttatcacttatgttcaaagttcgaagaaaatgaaacttgattttttaaaaaaaaagaagaagaaaaagaaagtgcaaggagaagcaaattagtcttgaaaaatattaaaacaatattagagaaaactggtgaagctacaccgagttttgatattttctggattttttttttctttttgatattctatacagaaaagatgaaatatataaataaataacatattacaattacaaaatgagggatgcttgctacaattgaacttttatgtgtaggtctagaaa

SEQ ID NO: 71990 - DNA, 2578 bp, Cannabis sativa
ctggtagaattagagacttcagataggtttttacacttctccaaagtacggattactgaatactttgctctgggcatgccagtgaggcatcctgctcggactgtggaaaagaggatcttgtcttccaatgtacatcctcaaagttggcattttaaacttgtggggcaacgccaggagattgatctcaaaagagaaaggggttccacgtgctctccacgtgctcggcacgtgctcggtccatgctcggtccaacttgagattgtttctctgtccagccatgccttggaacatattctttatttcgtctagttgtgcctgcatagctggactaagctgttcgacattttggctgatttgagtcacgtcattatcaatctgagcgagaatttgagcacgggttttgggctgcacgatcggcgtgccaagctgatcgtctaatcttgtccttttgttcagatcgtttctgagatcatgagtcgttcccagcctatcgaatacagaagcgtctggctgtctcaatgattgattggcttggttaacaggtggactggcaccgttagcctggtcgaaattatcaggtatgacttctcctgatgaattactagacaaggtctgcccacctactgcccttcccacaggcggaacctatgaccggatatttggcggctgaccatttatagtctgggaagtattcatggctggatcttcgtctgtttcacccaaagggatgacattcgggggttgctgccctacagtttggtaggctttttgtatcagcacagtagctggccgactacaattttcaatctctgcatgatgagcccttaatgcttccatctctttgtctctacaatcgacaaacatgcgcctctactctttgaacgcgagatttaccgcagcacggagttcctccttgtcatgatggagggagttagtatgatcctgcatgagtccaagagcaacacggaggttttgaatctcagtatcatctccaatggttgttcgaatgttggtagcaggcggaacggctgtgttaagaatgccctggctggatgttgaactggtattcccaatctcttgcacaccaggtgcaatttcatccacacaagttttcacaccatgacccgggtttgacggtggctcgtgattaacagctggcagaacccttctgtttattaggttctgctatgcaggatccagcgcctatggatttgccgaatcaaccatgtccctacgagtctataccaccatcgtacttgtgattaaatttagaatgaagagcaattcttgattctgctctcaatgaaagcaccaaaatgttgacctaacttttagccaacgacagtgagtctaacttagtaagcgacaagtagtttataacgattgaaatataaagaagcaatataaagacaaaggaattttatagaggttcagccccgagcaattcggtaatagcctaatccttgttatttgtattaactcaagaacaaggagaaaggttcattttcttatagcttttacaacagtatctctgaataatagttcttagacaatgtctctcaagtaaaatctttcgaccctttgcccagtgaacattcatcactatttatagggctatgagcttggagaggaagtatttcctttctcgttacaatggatataagaagaaagattgcatagtaaatatagaatacattgatcgtgggatttggacaccttgccatatctctgtaatctgatgactcacgatgcgaaagatgaattcgctaattgttggtcgatctgcgcggattgctgattgctttgcctcgagcatgcatatgatactcgaagtcgattccacgtgtcacaatcatttgatgccacgtcagagtgcaaaaattgggctaacaccttccaatctgggaagagggtcaaagacgtattgtacccctagtgatctttcttgcacaaaaacaacgtgcatgcgagagtcatcttgaatttttatgtaacaagctttggcttcctagaaggaaggataaagttgtataaaattcaagcttatactttgcttgaaaagatcagggggtggaagagtcactgggagtaaagcagacttgaagcggtccttcccttccgggaaagatggttgaaagacgtacgtcactcccaatgatcttccacacacgaggagcaggttggtgcgcatctctggagcccggggaaagtttaagaggtgcatggttacaaccctagtgttatcccaatttttgcgctctgacggggcatcacacgatggtgacacgtggattcaactctgggcacctactcgcaagacacaggccgaacaggacaccacatacgtttgctcggacgaagtcctcttaactgagcagtaagcaattcgtgcaacacaccaagactaagcaaattcagcttttgtatcgtgagtcatcaaagaaatccctataactttgggatctgattacagagatatgtcaagatatccaaatcccacgattagtgtattctttatgtactatgcaatctttctacttatatcaattgtaaccagaagggaaatacttccctccca

SEQ ID NO: 71991 - DNA, 727 bp, Cannabis sativa
gttatcacaaaacattgtgatattgtctgtcttgaatcccatttcctttgccaaacccttcagccataaagctcctttaattgccttagtagctgccatgtactcaacttatgttgaggataaagctaccaccttttgtagatttgctttctagctcacacatcctccttgcattgtgaatatgtagcctgtaatagaccttcttgtgtctatacaacctgcatagtctgagtctacatagtttgagacaccaaccactgttttatagcttttactataggtgaggcctagatcaaagagtgcctatactgtatctcataatccacttaagagcatcccaatgcttctctctagggtctgcagtgaacctactaacaatgctcattgcatatactatgtctggccttatacagaccatagcatacatcaaacttccaatcccactagcatagggtactgagtccatgagttctctatcttgttctattttgggtgcttgatccttgggcaatttgaaatgtgcagctaaggagtcgacacaggtttcgagctgtccattttaaacttttgcagtgcctttctaaggtagtttccttgtgtcaaggtcagagacttaggtctatttcttcttatttaaatgcctaggattttcttagcttttcctagggttttcatctcaaattctttgttcaagagtgacttgatttctccaatttcactcttgctt

SEQ ID NO: 71992 - DNA, 758 bp, Cannabis sativa
  modified_base (27)..(30): a, c, t, g, unknown or other
gttaaaccaagaaatgccgttagatannnncttttaatatataaagatatgcatcaaacaacaacaaatggcgacccaatcaaccactgagtttgagttcatgccactactaaagcttaattttaaggaggtaatatggttgcaagggatattattacaagaactaataaattaagttactcaaggacaaattggaacaatctattcagatagtttgtcctcaattcacaaattggaacaatctagtacttcataccatgagaagaatagaataacaaattaaaccaattaatgcagagttagttgaaattgactacttcagctcaatttagtctttttcttttatgagcttatatgttatatgtaacgtgtactgagattttgagagagagttaagcagagaaagttaaagagagagtcaagttctttgaaagtactaagcagagatttttggagaagggttgttactgcatgtccttctagttcgagtacagagcttttgatcatctctgtcaatggtgattttacaagttcaacactttcatattggattcttgatgatacatgggattgatttgatctctgtcaatgtgactgttgcagttaatatatttctcctttgttaatcttcattatttcaatcaattgctagctttttttttttattattattattatttgtacctattttgatggaattaaatcatcttaagccaaaagtaaaaaaaaaaaacacagtaaaatattgctatactaag

SEQ ID NO: 71993 - DNA, 1198 bp, Cannabis sativa
tggtattcatatgtaccttgctttctgatgcgtagaaaatatatatagctagtggctgaggatgatcccatgaactaattaataactaataaatcaaacggaaaaatatatgaaccaattatatcaaattatgattttaggagttcattaattagtacatatatattacattatatatcatttttacatatatgtggtcagttttgaattcgtgtctaagaaaaaacctagctgtacaaaataaattagttttttttattattatttttaactataaaatttgtatatagcaaccggctacataaaaaccaggagaaaccaccaaagtaatccaaatcgtaaatttaaaaaaaaaattaataaataatatataaaataaattcctctaaaaataataataataatgactttcttttatttattttgagattaattaatatggtcgaagatttttgacctatatatagatcatcactgttgtttattttctacaaacatgttgcgatatatatgagagaaaataattattattgcattacacatgtatagctctctaactattataatttactctaatattaataattaatttataaatatataatgtaaaataaattttgagaactttattctttaatttcttctctatataagaaagaccttccactatttgttacttctacaaaagcgcctaccattagtatagtaatatatataaactatactacacgtatttgtaattattgctattcataataatattgaattgaacaacaacacaaggcggtatactcctaatttaatcttttctactcctgtcatcctagtactcacatcatctttggtggcctttagctagaaagactaaaaatatcggaataaaaaagtattgaaataaaaataggaatggaacaaatttaaaatacataaaaaaaaattattaaattttttctcatttagtatattcatcaaaatagaatatgcattctactaaaataatggaaaaatgattgtgttggagtgacattctaatattttaaaatataataaaacaaaaaaataaaataaaagttatttttattctatttcattatctttaattaaacaccctttagttatttattgttttgatgtggtaacatgtaatcaatgtaataacacagaatattaaaagaaaatgtggaatgaaataaaatat

SEQ ID NO: 71994 - DNA, 3415 bp, Cannabis sativa
gcacaaggagttgcttcaagctagtggtgtaggcaatattgaaaatgtgcaagagactgagttccctgaatggtttaaaacttgagtaagcattgttgcctatcattacttataatcttgttcacactaactcttgaacttttcttaataactaacacttttcctgaattgtagattaatgaactatgattgagtaaccatggtgcagtgtcagatgagttgtatgttattgctaacttatcaaatccaataatttatttttattcttggtgcatagtgaacgatattaaatttttggtcaaagaaagggatgataattgcgaaacacaaaatagcggtgttatggtgcttgtgaagattgacaaaatttttatggcacacttgaaaaaattatggagttcacttatttaaagtactgcagtgttctcttatttatgtgtaagtggtttgacactaatgggagtagaatggatagtgatagtgttcttactagcattcgcgtcaaccaaaagtggtaccaaaatgaaccgttcatacttgcatctcaagcaaaattgatatattacattcctgatcttaagaacggtaaagactggctgattgtgaacgagtacatccctcaaaatgtctgggacttcccgaacaatgatgaggatacaccctttatacaggaaaataatttagctgaaactgagttatttgttcaacttctacagttggatgatgttgactatgttcactataatgtgcacccaactgaaattgcaaacatccatcgtgtgaattcagaggctcaacagttagatgatttcattgtcgatgatgacactgagggtctaaatcaccaagacgataattgcttaaaattagagtgtgacaaagatgataatgctgtatatgtaactgatgatgatgatgaattgtaattgtaacaatgttttagtaggaataaaaattgcatattttcttatttaatatggtttgaatatggttgtttatttaaatctgaaagagtaattggcggcaaaaccccctcaactatcaatttacttacaaaaaaccatccaacctcttattttggtggaaaaaccctccaaagtgcacttccgtttacatttttaaggtgccttcagtccaacctcgttaagtcctaattttgcccacgtggaaatgacaggtcattcaatttttggccaacgtggcaatgacaggtcatttaacaaatttaaaataaaatgtatatactgaaaataaataaaaatcataaaccaaatttattaaatcttttctcttataaaaaaaataattaacataaaaaaaaacataaaacaaacttaaaaataaaacaaacaacatgaacagaacttaaaaattaaacaggagctgtgaaaatcaaaaagaagaaggagacgaagacgaagacgaatcagaaatcaaaagaagagtgagacgaagacgaagtttggggagaacagaagaagaagaaggagatgttcgcaccagaagactaaaataaagaagaagacgaaggcaaagaataagacagtggagacgaagaggagaggaagagaaagcgagggcttgaaactgggtggaaggggttgaaatggcagttcgaaggcggaacaaggatgatgcacctcctgattatagtaagtgttcatctcaactcctcctacttttgatttctagggttttcttggagaatagtgacccaatatttttggttggtggtgggttagttgatcaagaataaaagtaggtgtggtccattagttggtatttaataaagttaaaatatttagggaatcttagcaagttgtcatgctcgtggggtacacttgcacatgggttctgtagggaatcttagcatcattgtcttttgctgaaagtgggataaaatgctaggggagttttgccactttttggaggaaagattgtgagctgaatgctcacatgtttgaactggtttgtaattctgctagggccattagaaccatagatttttcaccaattttgcaccgttgagtttagtttgaataacgtaaaaagttagctaactttaatgaacatatacatctaaatatattctaaattaaatacggataacacatctgtaaactctttcaaactttagagtctatataagtaatattattcttgttgtcctgtgaaatgccaaaaaggttctacaggtaatgaactctttagcaaattaagattattcaaagacaacatatcctttaaacacttcgatattgtctcacataattagtattattgtccttacattagatttggcttttatcatgtaacttgtgagaatggaattttcaagtgttgaaaatgattgaggtaatatatatatatatatcatatcagtgggacaccaacttagaagtaaagggattattaagttaggccttctataattcttcatgagtgtgattagtaaagtaaatgccaaatgtcttggacatgaatttggaggtattcacaagccacaagcctaacacttcaattctaccaaaaaaaacaagtattctattattcttaccagttatgaaaatgaccacagttatgaaaaggcttatatattatggcaatgtgtgttttcacaatacttgttgtttctatttattagctcctgtaaaaattggtattgtaatatattatccttgttttaattttggaggaattgttggtgtgatgatgtgagactatccaattatcgaataaagctagtaattaagacacaatatattgcataaatgcttgaatgagatacactggctaaattattattttttaatttgattgcaggtggcaatgatggtttattcacagtgaaactatttcatgggggtcaatggtttactccatatggaaatttaaggtatgagggaggggggtttacatacttcgaaaactatgaatttgaaggtttaaatagggaaaagttagaagaaatggatataggtttaaattacaaattcccttttggttttctattcaagccatataagaaacatttgaatatggggataagggttttagaggctagtgttatcttggatgacttaagagataggagatacagggaggctcaagtttatatggttatgccagaacctgttttggatctagagtggaaagaagacctcgaagctctaaggcacataccagattctcaaaaattgcataaatgcccaattgaagagcttcccccgaatacaaatttggaagttgatgttgttgttaatccaccgggaaagataagcaatgatgactacgtctttaatatgtttgttaaatggggtgatgtattagcacatggttcaactgatgaagtaaattttgcaacatgtagtcctattaatatatcatctgattctgaaaccgaatcaaaatcaga

SEQ ID NO: 71995 - DNA, 774 bp, Cannabis sativa
aataatttaaaaactataaatctacaattaaaccaagcaatatgtatctaaatcttatattactctatctcttcaaattttcttagctaatttgtattgtgtgttatacagtcatttcacttttactttccatcattttttattggatctatcattgttattttagtcaagtttaagccaatctaagagagcaaataaatcatgtaaataatgatgttacagttttggtccagcgtttcttttcatgtggtgagtttcttgattacctttcagatactaatatagtgcttattctgaaaaaaatcccaacctgaaagtatgaatgagttgcgaccaattgctttatgtaatgttatttacaagattttatcgaaagtattggctactagactcaaagggattctcacaaaggttatcttagagactcaaagcgctttcctacctgggcggcttattactgattatattttgatttcgtgtgagataatgcattatcttaaacaaaagcaaaaaggcaaacaaggattcatggcaattaagctggacatgagtaaggcgtatgatagagttgaatggggatttttggaagcaatgatgaggaagttgggtttccatgagcagcgtattcggttgattttaaagtgtgtgagttcggttgcttataagtttgtggttggggagcatgaggttgtgttgggttttgtgccctaaataaaacccattttactataatcatatttacttattaagaaagatcagaaataacattttatg

SEQ ID NO: 71996 - DNA, 1781 bp, Cannabis sativa
  modified_base (837)..(844): a, c, t, g, unknown or other
  modified_base (1555)..(1555): a, c, t, g, unknown or other
  modified_base (1641)..(1656): a, c, t, g, unknown or other
gatctaaaatcaatcaacagtcaaaaaaaaaaaaaaaagttccctactggtagggaacttttgctaggtcctaccgtagtattactctatatatatatacataatttatttatcataaaaagctatcatgtataaattcaaaactagctaagtagtcataaagttcttaatttgttttgattaattgaaagatatcaaaatgagaagaataattgaatgaaaaagcctcagaattatgcttagaaaactttgcattaattcatagaggatcactttatttatagacttaattattaaagaaacaaaaattcaattagaacaaaattagttacaaaattgagattgtaaagaataaagattaatcctaaatcaactaattaacactaattaatttgttagttctcatcccctcaaacgaaaaggggtggaaacattttaagtttgttcttgaagtagtggaacttgtctttaagaagagattttgttaaaacatctgcaatttgatcactaaaggcgcatactgaacaaaaagttcattgttaaataatttgcaggattatcaacccaagttatgagaatgttagcaagattatgttgacactcagttaacaaggatataacctaggagttaagtatattttattaaaacagtttttttaaaattttggatcatgtcgatttttggatacagcctaaaaaaaataattttaaatataattacacatcgatccagataatacttccttcataaaaatatagcttttttcttaagatttaaaacgagataaagatcttttaaaataattaaaagagagatattgagtttttactaaggannnnnnnnctgaaacaaaacttaaaacgagatatcctagctgagtaaaaatattgatttttgacaagtaagaaccccgaattaggaaaaggtttcttcaaagaaaatatggattgtcgaattatctttctaacggtgccataattgcttgaaaataatagacatcgaaagagatatcgcacttttacagaggcaatatcggaaggaaatttgaaaaaaaaaaactgtaattcgacagccagaatgaaaacataaattttttgacaccgaaataatcagaattagcaaaaaatctcttcacaaaaaatgtaaatcattaaattatctttaaatcggtacctagattactgaaaacggacctacgaggagagagatttggtagttttatgaaaggctatttctctaaaaaataaaaataaaaacacaactacgaattttgtttatattatcgttaatacccaaataaattacttcaagatttcgagttgctcagttcagaagacacaaaatactggtgttcagatatgggtggttgattgttgattccaaaacatttaagattagaactatttatttggtgacataaagaaggtgatacttttagagaaaaaaaaaaaggatacgataaatatatggctgctaggattttgaaaaaaaatatatccaatatctattctatataaagtgtgcctatgtaacagaattcttggtttatgaganatttatgggtgactttttatttatcttaaaaataaaataatatattatttaaaattaaataatttatgagaaattcatgggtcacnnnnnnnnnnnnnnnnataaaataaatcccattaaatctaaaaaaaatagggttctaggttttccttaattaccgtatttctaacctaagagttcaaattacagtattgtataaatcttcaatttgttctatttcttatat

SEQ ID NO: 71997 - DNA, 992 bp, Cannabis sativa
tgaatatcaaaacttccttgcataaaactatatatgatcaaatccaattgagaattttgtaaattcctaacatacatttttctaatcttgtattgcatttctttaagtgtaactcgattcctctacctatcaacatataattttacaggattatctatttcctcactctgaagaactcgaaattaactatgacaattctgagtacaattcattttctttttgggtttcttcagcaatcagttgtaaaatctaatacacacccccgagtgtatatatatacatatagccaatcttagagaatcccagtaaacgaattttgtaattaaatcaccaaagaacatgaatatcaaaacttccttgcatatatgatccaatccaattgagaattttgtaaactcctaacataaacttctctaatcttgtattgcatttcctaacatataattttctacgattatgaatttcctcactctgccaaactcagaaattaactaagaaaattctgatttctgagtacagttcatttttgggtttctttcaacaatcatttgtactaaaatctaatacacacacacacaccagcgcatatatatgtatagccaatcggtttctcaaatcaacgaactagaagtacacagcacactcagtactcagataatcaaacaactttgacgtagaaacagcttaaagtttcgaataccgattagataatcaaaaaatgaagaaccctaatagtgtgtttggatgaagagaaaaaaaaatttttaaaaaaaaaggaaaaaatataaaataatcataataataagaattggaaaagagggaaaaagagaataaatttaccattggaagaagagagtttgagtttgagagctccgatctggttcgtcttcaacaaaataccttttggttttcaccaacgccataaatatttatatttccacccaaaaataaaaattaatctatttaattaatttgattttttttttatttat

SEQ ID NO: 71998 - DNA, 919 bp, Cannabis sativa
gcaacttagagaagatgacacagtgttgataacattggagagatgttttagctttgcacatggttattatttgatgtttaatgcgcgttgtttatttggttgttgaaataattattagttttaatgacaagatattaaaattcataaataattaaaaaggataaggtatctaaaataatttacggattccttacctagtgtagatcagaatggtttttataatatatatttgtcttttttgaaagaagcttgttcaatgttaaaggcactaaagccatagatatctacgggccattcaaataaaactcatcactccaaagagtactgagtgcggtttttaactattttttaaaattaatctgcacatgtaattttttttaattttctaaatcgcatccgcactgtaaaattaaaaaaccacagaaactatattgcaagaattagtacagtgtgatttttacaatttttgtgatttagactatcactaaataattaaactatcactaatacaataaaacttgagcaatacttatcaaatataccacttgaaataaatatgaaaaaaaattaaatttcaataatataataattaatgggttttggttggacattcacatattagacctagataaatataaaaatttatatttttctaatgtacaggtaagatttgaatcgcatattaacaattcaaaactgtatactgcacagcaccgcacagtttaagaaaaattcaaattacgaccgtaccgtaattttttttttttttttttttaataatgcagtattgaacggtttgataaacaccacacggcgcatattttaaaaaactcgaaaagatacggtcgggttgaagtcagggacggagggactttagcccatatgtgggctaaagccctcactcaaatatatacatcaa

SEQ ID NO: 71999 - DNA, 1388 bp, Cannabis sativa
  modified_base (1336)..(1348): a, c, t, g, unknown or other
tatatatacgatcggtcggttctcagtttaatcggtcggtttgccattgatactaaaaccgaccatgttaaggcagttttaaccgaatgcggttttttagttgtcgattttttcggtgttcggatggtcggtgtattcggtttagtcgattttttagatttttttctcacccctaaccaatattagaattgactagcatcacctataattgcacacaaatactaaacacaaatttaacatatacttatgtgacaaataattttatccaatcatctccatttatgatgggtcctacttgttaaaaataatttactacccaggcccagctttgggcataggtggcctaggcctgtgactagggcccacctaatctaggggctcagaaaaatatttttttttccttttaaaattatacatattttgtttattaattttaaaaaatactatattttttctaaagaaggacctaaaaatatatattttttttttcgtatgacccactgaatttcaggctaaccctgttaccacgaaatgtgtgttaagtttgtgtataattagggatgcacacggggtagaaaattggcaggaagtgctcctcccgtccccatttccattaaggattttaatttccatttccgcttattccccattgggaatggggcgggaaatcccctaataggggcgggccgggacgggaaatcccttaataaaaaataaagtttataataaaattttaaatatataaaaatatcaaactatataaaaatttaaatattacaaaataattattattcaataaactaattattattataacacaacttaaaagtcataaaaatgatattaatatactacaaaaatgtaaatataaattataaattgtaaaatattattaaaaatataaaataaaatactaaacgagtcttaggacggggagtgtgatccctgttgcagccccatttaacatttaaaaacaaaaaataatatctgtctctgctccattctccatttaaacaggaaatgctcctctcataggacatctccgtgcagggtccatgcatcccaatgtataattgatgtgtgagcatataattactatcaacccgtaatcgaaggtgttacttcaccctttctattcaccaagcattaattttgctaaaaaaatatcaagcattaattagacattaaaaaatctcaaaatttgttaatgctaaaaagtattagtggtgtctaacataaaaaattattatattaaactatatgagacccgatacttaagtacactaatagcgataggaataggaatgaaaatgtgaataggaataggaatggaatnnnnnnnnnnnnnaaatacataaaaaaaattgataaaaaaataattaattttt

SEQ ID NO: 72000 - DNA, 1024 bp, Cannabis sativa
  modified_base (958)..(961): a, c, t, g, unknown or other
  modified_base (988)..(990): a, c, t, g, unknown or other
tttttttttttttttttcttgagagaaccttagaatagaattttgagacaaggaaaaaaattaaaaaaaaaaaaaaaatagtgggtagagagatagagagagtaagaagaattaacaatattttaataaagcttaaaaagtcgtgcactaacttttaattaattcacaaatccctattaaatgtatgattaggtaattaaataataatttactttaataatttttattgtcaaattaattacaacatagttttttgttttaattttaagcattggtattagatattgatagtgttaagaagattgagtttgggctaagatgaattagatttgtatttagtgctaccactacatgctcaataaaatattttcttttgaaatttaaattatacatttttttttaattatttttaaaattactacacattttattaataaaaagtttttttttctaatattttttaataaaaaattcaataattttatttttttttactgagagtccaataccaccagatgacatattgtgttggttaatgatatttcataataattattaattgagcattgttataatatatcagtgatatctataccattataaaataccttgcaaatagttagcagtattccataaaattattaatttaaattatgttgaacatgatacttaatttaatcagttacaatatgacatattagagggtgctagacattgttagtgtctttcaacatttctcttattaattgaagaacattgctatgaagtgttacattatgattggttattaatatttcataaaagttaataaatcaaaggatatgagcctcgatacttagttgtatcaatagcgatataacacgatgaaaggtgtttcatactaataataccttttatcatttctcttaattaaaacataggctaattagcaatatttcctcccgaactttgacatgtnnnnaatcatgccccctgaacttttttgacnnntaaaaattccccctgaactattaacattgttaaa

SEQ ID NO: 72001 - DNA, 1554 bp, Cannabis sativa
ttatatttaatctctacctttttttaagagattttttttttctgtaatgatttaagctctatatttgatgtattttttagtaactgtctaattttcctaaggcgtcccttatttatgcatatcttttggccattaaggctacgcatgaattagtcgtgcacgcacttagggtggatggtgagctaatttgaatggagatttgggtctgaatttggtcggagtccaaaatattgattaggaaaaaaaactgttgaaaaaaaatattgaaagtgacttttttttttttttttcaaaatttttctcaattaaaaaattaaaaagtgaaaacaattttataaaattagtttttgaaaaatatttttacttttgtaattaaaaaataaaataaaaaaaaaactggttaaaaagttttaataaacacacccataattaataatgtagttatcaatgtctcatctagaagaaaaatgtccaaggacattaataactacttcctagttgcttacatgtagctacttctccgattagtgaattcgagaaagaatatcttttgaccgccacccacaaaaccgtacttcagtagtcacgagccaaaatcgttacgcacgttccccccacccaccccagccattacattacaattagtcttcaaccaatctaggggagggggaccaagcccaagatgtgggaaaataaaaattcatatagaacatatcaatataaaatacagtcaatatgcttaactccaaacactactacgagtttaaaaacaatatatcttgtagaacatccaatccaatccacgtatcttttcgtataataaaagttcatagaacattcttgtatctttacgtataataattgaacattcaatccacgtgatgatgatgacaatatttacactttggttttccatatcaatcttaacactcccggacgagtgtggacacctaggaaaattatgattgattattttgtatcacggtgtgtgcttaactcatgaaacaatgtgatggcaaaaaagagagaaagaaagaacaactatgtatttttttcactgaatttattttatctttatttatttgatcatttaataattaatatcttatcctataacactcaaaaaaaaatattttatcctataaaatatttaattaaataattttttatcttaaattatttaaatgataaataatcaatacaaattcctttagctcataggcgtgtgacattattataatacttcaaaattaatttctcaattttagatttattatttattatccaataaataataattgattaaactaatcattatcttatttgtatgtgaattaaataaatattatttttcactaaaataatatcttgtctctcatcatattattcatctaaatagtattatatttaactaatatatatatatatagttttaacaaataaaactaaatagattactctctgtttgctcgagtgatcacaagtaagaaggtctggctctctacatttcaacgtcaaatggctgatcactggaatgggcgtttcaaggtcaat

SEQ ID NO: 72002 - DNA, 2679 bp, Cannabis sativa
  modified_base (331)..(348): a, c, t, g, unknown or other
  modified_base (2632)..(2632): a, c, t, g, unknown or other
cctatccactgcaacttaacatagtaataccctaaactaacagggaattaaccaagaaaatatatgaaactaatatgaatcgacaacacaaacttttcggggaacccagcgacaaatctaggtaacttattttacaggtcctgtaaaaccggttagtcggtttaccctataaaacctaaaacatctcaaaacctaaccaacttaattctgatccttaccaaaccttccagaccttcatattatacccccattgacgtattccaaacaacaaaacaactacagaagctaagaatcaaaaaacactattaaagagccaagcttgagttctaannnnnnnnnnnnnnnnnnacctaataacagcccttaataacagcttaaaaccacataattaaacataaacaagctccagaaaacaaccacaacaaacaacagtagctacagaactcaaacacccaaaatcatgcataatccttaacttgaaactcaagaaaactaaagatggagtttctaggagcttaccttggcttgcatacactatgatcttgctagaaattgctagaatttgaagaagaaaacagaatcctaactggttctatagggttcgaagaagagagagttttaggagagagagagttccttatttttctagatttgatttttgaaaaaaatatgagtaaatgacatacattttatttaactaataccaacttattaaactttcaaaaatagattaataaatcccatctaagtccactaaaagagaaaaccaatatatggcaaaaagaccaaaatgaccttgcccacactaaaaatcataaaaatcacctaagggtatttttgtgaactctaaaatctccactattcccgacattcctaatgtctaactatattgccccgctatactgaaaatactaggatgtgattctaatagccaaacaccgtgttccaatgttaccagggacaaaacatgcaaaattatgaaattccatatatgacatttaaaatgcattctgaattcaaataaaacatcgtaagttaataattcacaactaacatgccaatttcataattaaaccctaattatatgctaatttccaaattaaagctaagcgatctttaaagaaatggtgtacaaagttgtcctcaacttgcaaaaggctggcctactcttgatagagctatagtgacctgccaagacctacaggccttgacctctcaaatcttgcaggcctgggacggctagacctcccttataggtctatacgcggctaggattaacctagaaggactctatgtacaaccaaaacctgaatagcaagtcatgggctgcaaattgggccataaaatcctaatggaatggcttaataatatgtaggttcaagggcattttagtcttttgtaatattgtaagaacctatgccaatatctagggatttgaaatgtaatctagggtttatgcctcctatataaatgccttaatcctagcttagaaacctaagtcattaagcctctaaattactctaagtcagaagccctagtctctctttctttctcttgtacacgcccactagggctttctttctccctttgtacttcatctccacacacctctaagactgttcatctctctcattagagatctgcctagttgattcatgttttgtatccttatatcaaatcccacctatagtgatcttaatagtattatctctaggtatcaatataactaaaaggggagaaggccattaccaactatcatgcataaaagggtcgaacctctataactaaaacagcaaacacgtggcaatcactttttgaggtcaaaagtttggtgatttcattgagagcgtagatattgtatgtgatcaaatgccatggttaacaccagaagaacactagtcgcaccatctatgtcttcaagtctccctcgagaaccaccgaatacaaatctcgatgttcatggtccaaccacaattggaattcccacgatcacaacagatgtggtcaatcataaccccatagcaggcaccacgaacctgaccattatagttggctaggatgataaaagcatcctagtgaatctatgcaatcagcccttgcctcaaagggaggaccctccaaatgcacctccaattgaagaaagaattcttaagaggcacccccaagaacaaaaatcaggttttgtccctagtactatacaggagagacgaggctaggaatttgtgagccccatggggactttggagaataccccgagttagccagagttaaagaggtcatttgccaagctaggctaattgtagaaccatgccctgctaactgcaatgtattttctcactaaagatgaaaattccttgaagaactaagttatgatgtgctcgctcatcagagacgtgaatttttgagacggagggatgaccaagagtacatccttcgatctcactaggcagagccaaagcactgacacaaagaggccagcgatctaataaggtgattcaacttgagaactgatagaagaggcccagatctcatcaaagatccactttaaggaagacttattaatagctcaggaactaggaaagatctttccttgccaaaaggagaacatacattgtaacaccctaactaacanaggcgtattacgtgattttttaacatactgtgtagctcgttgctaat

SEQ ID NO: 72003 - DNA, 1826 bp, Cannabis sativa
ttccttccgagaaggacagttgaagatgtattgaccccaacagtcttccatgcatggtaaaaatacatgtcctcgtaagatccgtgttgaattatgctgcggactttggcttccgggaaggaaggctaaagtcgcactaaaattcaagcaattgtttcactttcaagactaaaggtgaaaaccacagtgggtgttcaatagattttaagcaatccttcccttcaggaaggaggtttgaagacgtatcgaacccccagcagtcttccacgcacggtataattgcacgtgctcatgagaaccatgttgaattatgctacaaactttggcatctgggaaataaggccgaagtcgcactaaaattcaagcaacagtttcactttcaagaacaaaggtgaaaaccacagaaggcgctcaattttctttaagaaatctttacctatgggaaggacggttgaagacgtaataaacccccagcggtcttccacgcacagtagaaatacaagtgctcgtgagaaccgtgtcgaattatgctgcgaactttggtttctaagaaggaaggctgaagttgcactaaaattcaaacaacagtttcactttcaagactgaaggtgaaaaccacagtgggcattcaatagacttcaagcaatccttccctctaggaaagaaggttgaagatgtatcgaacccccagcggtcttccacgcacaatagaaatacacgtgctcgtgagaaccatgttgaattatgctacaaaatttggcttcccggaaggaaggtcaaagttgctttaaaattcaagcaacgattgaactttcaagaccaaatgtgaaaaccatagtgggagttgaattttcttcaagcaatctttccctctgggaaggacggttgaagacgtatcaaacccctaggggccttccacacacaatataaatacacgtgctcgtgaaaacggtgttgaactatgctgcagactttggcttcttggaaagaaggctgaagtcacactaaaattcaaggaacaatttcattttcaagactaaaggtgaaaaccatagtgtgtgttcaatagactttaagtaattctacctctaggaaggaaggttgaagatgtatcgaacccccagcggtcttccatgcatggcagaaatacacgtgctcatgagaaccatgttaaattattctacggactttaccttttcggaagcaagggtgaaatcacactaaaattcaagcaacggtttcacttcaagaccaaaggtgaaaaccatagtgggcgttcaaaagacttcaaataatcattccctccgggaaggagggttgaagatgtattgagtccccagtgacctttcgtgcatagtttttacaaagctaggaagactctcctcgagaaaaatgtatggctcttaactttcaaaagcacttggccatcttgcctgtgtacatttcgagttgagcttacaactattcccaaaatccttcgcctaaacccacaatgggacgaagaatagctcccagttgagtcaaaaaagccttatctatgtgagtgaatgatggtttcaattgggataactgctttgtgtctgttgcccaccaaatgggtgctctgttggagtcttctatcaagaagcttattatgatttttagcgggagttggcaaaatgggttccatatacgtgtttattgctgcctgcgacacccttacatggatgccagaaatggtgcatcattcctacaagtaacgcctatggaatcctggcataatcgtgatgtggatcatacttttgaattggcgcggaacggtccttcttatctacgagcttagaatt

SEQ ID NO: 72004 - DNA, 930 bp, Cannabis sativa
cttcttgcatactagaaaaatttgcagtgggagattttgtaggtccttgagcatttctattaggaaactttccatgcaatttatgccctggagtttatccatgtaacctgtagcatttttccatgatgtgaccagcaactccacagtttgacacactgttttgggcttatgtggttaaacacgaccaacaaatagccctgaattggatgaagatgctgctggaagtttttcttcttaagtaactaaagtaatttctctttgcctttcttcttgaacaactaaagcaaaggctttattaatgttggggaagggatcttgcatcagaatctgggatcgtgcattactgttggattcatttaatccaattaggagctcaagaactcgatcttcatcttgatattcctgtatgaccttcattgcaccacaactacaaataggttgtgttatgaattcttgtataagatcccacaaagatttcaatcgagtaaaataggtagggacagaattcgagccttgactcagggcttgcattgatcgcttagcttcaaacaccctaggtgcattcttttgatgatatctttcttgaagtttagaccaaattctagctgcattatccagattcatgacattatctgcattttcactagaaatggcatgaagaatctaagaaatgaccaagctattgcacctgaaccaaatgacgtattcctcatcatcctccttaggttctggcaatctaccatctacgaacttaattttgtttctagctacaagagccacgatcattgatcgcctctaggggctgtaattttcacaaccagtcaagatcttggaaaatatgttgaccactaactgatctccaccagaaatgtaataagggctacaaggattatctccaggttattgattggtaagctcaagaacaaagaa

SEQ ID NO: 72005 - DNA, 1106 bp, Cannabis sativa
catcgtcctcaatctcaaaaccaccttcttcctcctcatctaattctatatgcccatactgaaattccatatcatccatgactctacttgacgaggccatctataccaaaaaacaacagaaccgagaacaaaaatcacaacacacagtaatcttctcaatacgcaacccaagcagaccccgttgtaagaaccagtcaacaaccaacgatgaaggagaagaccctcaagaaccaacgatgaaggagaagactctcaagaaccagtcaacacaatctacacttcgaacaatcccaacgacgcagagaaggagaagaccctcaagaaccaacgatgaaggagaagaccctctcaacgtcaccaagcaaccccagaaacaatcttgacgtacgcttctggaaccctaggaaaatcaacgagggaaccaataccgtggactccctgctccaccgatgaagatgaagcaaatagaaccgatcgcaagaaaccagtcgcgcgcaggccagaaaccagtcgatgccgtaaaacccgagaaaccagtcgccagaaaccagtcgccagaatctgagaaaatcgtccaaaacgcaacccaagatgctgataaatctatgatcatacgagaaaaaacctatacgttcgaatgcatgctccaccagtgaaagcacaaagacctgaacgtgaaaaaacctagccgcaagcaagccgtcaacgatgaaaccttcgagccgtcaaaaacgctgaaacctacgaacatggagagaaaatatcacacatgccagctggcaagaccggggaaaagataactttgatcatatgtaattagtaatttttaatgaatatatgatcgtttgagatacaaggatttcaatataatgcggtattttgagttatgtgcatggcgcatctctttgaatgtttactaaaataacttaacttttggtgttatataagaattagctcatttgattgaccatcatcttgattcacgatccatactaaaaacatgaatttggaatgttgattttcaagtgtatcagttaaagaaatctgtcgtataagtagttgcgtattcatgtgaattgaaaatgcaaaaaaaaaaaaaaaagaca

SEQ ID NO: 72006 - DNA, 1575 bp, Cannabis sativa
gattttcaaaattttgatttgaatttataaataacaattataggtgctcaattaataattgtacaattaaatcagattgcatgaaattggaataagagaacaagaaggaattgaataactatatcaatccgtaaagaaatttaagtggttcacataataatactaaaaaataaattagctcataaagtcattctaagcaacaaagattcaattgaaaacattaaaggttaaagataaatgagaaagaacattaattagagtcctccaatggtgtcttctacttccagccattttcctattttcaaaattattatttcccaaaaattgcaaatgatgccgcatagggtgcaatgccatgaccttttcttttgtttcccaaaatcaatttttcccactaaatagtgaatgctgtgacattgacttcaatgtttcaactttcactgagtttttctaaaacaattgcagtttaaaattttgttgtgataatttatggtattttggccataattttctaaatatatctcgaaattggaagattcaagatgtgatggaaatctgaaagaaagatctagaacttttattcacaatatttttcttagaaatgaacaaattatagttaaaaaatagcttaaagtttcagactttattttcattcacaaatagagcgtgttgaacatctaaaacttaaaaaatttcacccacggtatcttataactccaaaatttatgctaaatccgtaaaattcatcttatttagcatattttctcacatttcaaccaatatgatgtatttaactattaaaacttgaaagaagaataaaacaagcgtaagcctaaacaataacaaattaaaaatagactctggaactcataaaagtaaacctaattaacaacaaccaacacgtacgatgacaaggcttcatatgtagtaattttgacaaatgacattcttttctaaatggtgtcgactattaataggtcatctaatatgactctaaaaattttataaatatttttatgagttaaaataaaatatatatgaatcaaatagtccaataattaataagagtaattaattcacaacctctattcactacaaaatatcgtatattttaatgtctaattaaataaatagttccaaacaatgcacatcaaagatgataaattgatagtagtgaatattcaaagataatcaatagttgatcattattataaaattattaatgtgtaatgagtgaaaaatgtaggaaaaaagtatatgtgaactcactaataatgagatacacctaactcatacatgtaactttgtatatataaatgtgccctcatttatattagtatttactttgaatatatagcatttttattttaaaaattaattatagatattaacattgattcatttactttctttttctattttagggtttcatctctttttctagcggcaagtctcttctttgattttcttaccagggctttgctaaccctccttagactttggtgtggttctggtcgggtgtgagtgtttgtgtttgtacgcacaagagcctcttggtcacttctcaagcttcct

SEQ ID NO: 72007 - DNA, 679 bp, Cannabis sativa
tttttaaaattttaaatattattattttaattaataggtggtttctttttaatttataaaattttaaaactaaaaataacaaaaatactaaaaatataaatatataaagtgtgacatattaattaatccttattgtcataaatctaatgatgagatttgatgaggtgggattgaacgtaagtgaagtcttatatattctccaaacaatatgaacacatatttataaaaaaagaaaataataataataataataataatatataataagaaagaagtttctgtaataataagtggagaataagttagaaaataaaataaacagaaaagggatttagttgttttgtatttattaaggtccacacgcaaaagactctttactttatgaatatcaagagaaaagaagagaagagggttcagttgagttaattaagagaagaagagaatgaaacatattataccacatgagtattgattagccacaccagtggtacctagcaccttctcgacatgtcgcgttgcgattggctataacgatacttcttaaaagttattatattaaattatatgggatccgatacttaattagaccgatagcaatattaacacatacgaaggtgctaagcaccactgcagccctttagtcctttagtatttctctatacaacatcatcaagtccaa

SEQ ID NO: 72008 - DNA, 613 bp, Cannabis sativa
gtcctgatattgtgggattcaatgttagaggtctgttttgttggcctcaaatgcaatacacttcttgaactctccttttggaagtataccccatgagagcatctggatacaccttaccgagtcttcctttttctgggtgggataccttcccggaaccctggtaatttgggctcctctagtaattgggttgatttcctaaccggaattgtagatctactccttgattgagttagccctaagtccgtaattgaacaaccatgatttgaattcggaaatacacatgtttctcatttagaaacacgaatgattaacaattagtaattataatttattatgtttttaacaaaagatggaaagtattatttgataatgataatgggaaataaattactaatataattattttatatgatcaattatatattattatatggtcgacaaattatctcattaattgactgatttatgtaacgtgttgacacgtgtccataaggattttctagaggaaggaattaatgtttcttcgtttgggaatctgatgactaagctaattaattaaataattaatatataattttatgtaagaattgaagtaattaagtatagtacgtag

SEQ ID NO: 72009 - DNA, 897 bp, Cannabis sativa
ggcataaaacccaacagtcataaccaagatcgtatgacactggaagtacggtcggagctttctcgctgatatgactaaggcccatgataatttctcgattaccgggtacctgccctctgctcctgtgaaggttttgctggtgtagtagattgggagctgcgcctttccttgttcccgcactagtaccgaacatgcagcatatttgaacaaggaaaggtcgaggagtagggtttccccgggctcaggttttgacaggacggggggtgttgtcaagtatcttttcaacgcctccaaggctaactgacatttctcaacccaattgaacttacggtttcctctcaatagatcgtagaatggtaggctcctgtctgaaatctttgagatgaagcggcttagagcggctatctttccagttaacttttgtacgtcccttacggttcggggttggcccgtcgcctgaaaagctctagattcacctctacccctcgtcgtgttactaggtggcctaggaactttccagatccgatagcaaaggcacacttagctgggttgagtttcatcgagtgggcaaggaggatttggaaacattctcgaaggtggtcaacatggtcggagccatctttggattttaccaacatgtcatcgatgcaggcttccatagtcagacccagctgttgggcgaacattttgttcaccattcgttggtatgtagctccgacgtttttgagtccgaaaggcatgactttgtaacagtacgttcccctctcagtgatgaatgacgttttatctcagtgataatttttccaagatttatttttattttatttcaaagcattttcgaaagtaatattcttatacacttcatttttcgaattgcaatatatatttatagaaaat

SEQ ID NO: 72010 - DNA, 1459 bp, Cannabis sativa
aaagggcttgctttcactaacattgagtgaaggtgcataacttctttgaatgtcccgctgattgactactacatcatgatttgaattgtaaaatatataaaatttaaggaaatttatgggatagatccttatatgttagatttaatgcagataaatctccaagctaaaaaaataacagcaaaaatccacaagctctcaatttctgcaattccatgagtacccattttgaccattcctttagttgctttaaaaagtgctgatgagttccattcagcagtttttttgatgcctgaaccccctgctatctttggttggcatacattttttcatgtcaataaacgagcttcttgcattatgtattgacccttccagagaaaagcactacaaatagcttcaatctcatgaattaccttttttggaagcttgagaatctggcaccaataagagtgtattgttgttagaatcgaattaatgagaaaagcccttccagcaaatgaaatgttcctagtgctccaagaccaaattcttgttgtcgaaacagtgcactcatgtctcgatatttttttggtgcatatgggaacaccaagatatctgaatggtgtctattcttagaaaaacctgatgcctccatcactctagcaacatcagaatcaaccatattgctgaaataaattgtagattttgttttgttgggttgtaatcctgatgttcctgagaaaagcttcaatccttggagtaaaaggatgatgcttttgtaatcacctctgcaaaatagtagaacatcatctgcgaagctaagatgattgagcttcaaggcttcacatctctcgtgaaaagcaaaatcacctttgcttcctacttttttcataattcgggtcaagtattccatgccaataaaaaataggagaggtgataggggatcatcttgtcttaatcctctctttgattcaaagaaaccatgaagggatccatttaaaaaaaagagagaattttggagttctgacacaattcataaagaaattttcaggaaagagtagcccccttagaacctcttcaatgaaatcccactcaaccttgtcataggctttttgtaaatcaagtttgatcatgaaattagccttgggtgacttcctcccataatgtctgaccaagtcttgacagatcaatatgttatggggtacgaatcttcctttaacaaatctactgtaacgccccaatattttacgttactttacaaaataccattttaatgcataatttgaaaagatttaaaaatacttgaaatacaacagtgggttttaaaaatttaaaatacaacagagaaggatccttcatttgtaaaagaaaatatgataagcgaataattttaaataatatatttccactgtgtttagaattatcaactgcttaaaataaaactaaggcaccactgacgttctagatcgtttgcccgtccgta

SEQ ID NO: 72011 - DNA, 1423 bp, Cannabis sativa
atcaacatacttgtgagttgatctaagatcctggtaaaataatttccaacagccattactacacgaacaatgcacctggacatctttcgctggaagtctgactgctccaccaccgtctctcctggctgacgacgactgctccatcctgtgtttctccttacgtcccgatcgtagccactgtcctccgatcagttggcgttgggtcgtggctcgcatgaagactccatacagcttgacaatcatctcctccgatatctcaaacaactttggacaaagtttattagcatggctaactaaaccacagatgaagcaaaacgtaggggcatgctcatatttaaaattaacccaaaaccaatccgaattgttcaatcgacggatcttcattcggtgcttgagaggttgatcaagattgatcgtaacacgaactttaaagtattccctccacacaccaaaaaaattattctcatcgaactccacaaactttccgatataatcgccaattctctgtaacatcctttccgttctaaatccatgttaaagatcatggatttgaacccatagatcaagtcgattaagaacgatggttctcggattaacgccaaccttgagtctttcaaaaattaattgcttactttcaaacgtccatggactcccaccaatgactcttttgatatccaattcatgatagaattgaaacaaaaatctattttgttccaactccttcacataaagacccttacctggtttccacaggaaggccatcatgtgttgcatggcttgtacatcaataaccctagcattcaagaaccggccgacaagacaccaacgcacatcgtactcctcctcttcttcctccacatctaaggacagcccaccgaattcttcgatatccagagtaaccaaacacagacaaactcaagacagcaaaagacaaaatgacaaaaatcacaccatgtcaaaggagaggacaatctgttttgtatattatctcaaattaagtataacttatttctgactgtatagtcttaggcgagataaggatacacaaactattaattcctgcattgacgagagaccatcttacttatgaaaaggggctcctaattttatttttaggcttcttcttacttatgaaaatttttaaatattctcatccttcattttaaacttagcaaacaatcactaattcaaaattttttaaaactcaaaaacatgaaataacattacaatccattacatcttgaaaaataagtttttacatgcaaaatttaaatttaaagaaaattttatcgctcaaaacactcaacagatgtttaaggtggaacattttatcgagaaaaaatatcatctgaaagaaatccaacagtggtctaggtgatgattagcctattggtagtctttgtggagagagagagagagagag

SEQ ID NO: 72012 - DNA, 1094 bp, Cannabis sativa
tttttagagagtaaacgaaccgtggttggaagacatccagtactagccctccacaccaagttcttcacttttggaagaactttcaacttccaaaacttttccaaaaatcagaaaactcatcctctacccatctctcatgaatttgttataagcactcgtaataaagtataaccttgagacctctttatcccacagataatgattgatccaatgaataatattaatagacatattgagaatcatattattgtccctcaaacaaagcatcaatcaatttctcatcccatccttccccatccatcatcaacaagttatttacagtaacattcataaagtcgggatgattagagatgacataaggattatccatatccaacaaccaaggctcttctagagcgggcaatggtctgatgtaaattctttcaaatttacatgtttagcattagggaagctatggatccaggaagtacttactagagcacgaccaagacgagtctccacctaagcctcagttcctcttctcctttcctaggtgaaagggtaaagatcggaagagcggtcatacaaatcgcacaccaagagaacgccttggatcgactatatgtcaatcccggaaaccttagccacggtgcgcccagatcgactatatgtcaaccccagtgcccattagggcatcctggtgcccgagtgccgtttcgtatagatttatctccaaagtctgaaacttggttggggtatgtctctcatttatcttaggatagtggctaagcagttttcccataagagttgaaaggaactaaaactgatgcgagacagcgcacaagttgtcaacctgggcacctaacattgatgttggacctaggttgacatcctcaacatcatagttcattgtttagggtcacatggacctgttcactgaactctgtcgaagggtggcacctagaaatgtctttgttggatctcagtgcctacctaggcacccactattgtcaaccagggcatcgacacagtttccaatgcccaagtctaccacctttaatcccggtggttggccccagagttgtttacttcttgccacgtgtaaaaagtgttct

SEQ ID NO: 72013 - DNA, 704 bp, Cannabis sativa
tttgacaaaaaatcagttcaagtaccattttagaaaatacatggtttattttgttatttaacaaaacagagagtcccaattaataatttttacaaaacacagagttcaaaatattatataccctttttataattacctatcttttagtttctaattaagattaaaaaaaaaggagcatgcatgcattttagaagtggattaattaaaatatgtatataaaaaaatacttaattatttgattcaaaatactattttggaaaagctagaacttcaaaaaaatcttaatttttcaaaagtgaaattataatttgtatatagtttctaatttttttcacaaacaatacatattctaataattctaagcgttttgagtaagaaaatcattaataaacaaagaataataagtccatatttttctgtataatatatatacctttaattatcattgtggaaatattattgtgagaactcattttgtttgcttcttttctcagttccgttttaaagtgttcagtcttagtttaactactcattcatgacagcttatatatatttactattattattattattataaattaccctacatgcaagacaagcttcactacaacaataatggtttataccaacgccactattaccaacgccaaaaagtcctcattaaaaatggtactatcaataacgacacttacctgtcgttggga

SEQ ID NO: 72014 - DNA, 862 bp, Cannabis sativa
ctctttaaaaaataaattagggtaaatttaaacatggataaacttataattatttgggtgtaaatatatttttttatttattaaatttttaacaaattttcaatagattaaggttaaaattattatttttaataaaaatggatataatttagtggtcaaaatttgaaaagcaaaaatatttatttatttttatttaacatcaacatttaaacaagaagattctaataaaatagtaataataaaaacaaaaatctttaataaaatatctaactataccaactctcgtgtctacttggcaataaaatagcatcaatgccaaaaaagtgttactttgaaaagtacatttttaaattataatctttttttttttgaaaaaagaatattttatttcctcttaaagtgatcatattagaaagatacattacttgttcacaaaggcttttcgatatttctcttttaaaaattatatttaattttacattttttttaagtttaaatattatctttttatttttctattatttttatatttgaagatgatataacatatactcctatttgtatcaaaaatagtagttttcacctcaattttctacttgaattagaattatataaatataaaagattgagtgattctacaattgtattgatgcactcttggcttatttcggcatctagaaaaatttttgtgtaattttttttcatattcatatacgttatagttatttaagataacttacaaaattttgaaaaattcagaataatttacaatatagaaaataatgttgaaacagtttattttctacgcgtataatataaaatagtcacgcgtgcaacacactgtttaaacgtatttttcggc

SEQ ID NO: 72015 - DNA, 1328 bp, Cannabis sativa
tattaaggttctttctgtggttttgcatgcctaaagaactcgtggaagttctcctaatgtgttttgtatgcctgaagcttcttcttcaacgttatttttaagatcttatttacgacttctacttgcccatttgtttgtggtctggccacagctcaaaaacttttgatgattttgtgcttgacacaaaaatcagtaaattgatcactatcaatttttttttcactatcagatactattttatgtggaagtccataacgacacataatatttttaatgacgaatctagggcattcttggatgttttggtgttcatggggtgaacttccacccacttggtgatgtaatcaacaacaataatggtgaatttgactcctccttttccagatggaagtgatcctaccaacgtcaaacaacaaaaggccacagactattcatcagggttatctctgttggcgaggctcttgaaatcttggaataacgctgatattgttctcatttctaaacatattcaatacaatcctttttcatagttggccaaaagtatccttggcgaaggatctttttggacagactaggtccgaatgtatgatctccaccaaatccttcgtgtatctcatgcatgatagtgcttatttttgttctagctatgcaccttaaatagggcattgatagccttcttctgtataactttctattcatgagcacatatcttggggcttgataatgaatcttttgtgaagctactctatcatctggaagtgttccagattccaaatacttttggattggagccatccaggaagtggaatgatcaataattgttacccccagtgtttctgtgcttagagcagaaagatgggcgacggggactaattcgtactaatctctctgggtttatagctaactttgctagcatatccgcgaaggaattttgatctttgggaattttcttgacagaataatgcttaaaatgttgcaatagatctctggattttgctacgtaattagccatattctcccctttagtttgatattgtctagaaatttggttgactaccaattgtgaatcactatagagcttaatgttctaggctccaaagtctttagctaattgtaggtcagatatcattgcctcgtgttttgcttcattattggaggcttttttaatctcaaatcagagtgcactctaaagttgatgcttttgcgaagagatgagaatgatttcggctccataacttttcttgtttaatgctctgtctacatatatcttttagacttccagctttgagatgggttcttcagggttgttgtccatccctgtgcattca

SEQ ID NO: 72016 - DNA, 969 bp, Cannabis sativa
gaaactgtacgacgtcccttaaaaaataaaataataattaaaaattaaattatctagatcggacggtctagaattcgtggactgatatcaagttcacatgatgatgatgattaaggtctgtttggtttttttagtataaaaatggttttggggactgtgagaatctattctttaacccaaacaccacctttcactccaagcaatggtatttaaaaattaattaattaattaattaattaaaatatcattttaggctcttatgtaacaataagctacataataataatttgggtagcatcaaattttatattaaactatatcactcattgttatgctgattataagtcatgtttattttctatctcccatttggtgttcccctcttttggtacccaccctcacaaatttggattaagattaattaagtagggagtgagactatgtgtgtagtgtgttggctagagatcatttgaaaacggttttgtgagtgattaccaacacacttatagtttttctgatccccttattggcatagttgtggcttgtctgttagctatagagatgataacttttttcaagcacctctttgtgatgatagagagtgattctgaggcagttatcaaagcactgaagggaatacttgttttaattgggggtactggtaacaaactctctaatttattcttgggttatattttctattttatttctaaattttgtaattttacgtcacataatgttgttaaatgtgcttttgctctaaaattttgtgtattatattaccaaattattaattaatttaattaattgtggaataataatatgggtattgaaacaattgttttgtagctataaaacacaagtttgtaactgcatgataaatcaaaaaacaaacagtgcagaaaaataaaaatacaaaaaatttatacgtggtatcaacaattaatgccgagagataagtttcattag

SEQ ID NO: 72017 - DNA, 1526 bp, Cannabis sativa
gaccccacatcggagggaccacccgcaaggagctgaagcggtacgcaagggccgtgaaacacgatgaggtttgggaagttactcaactcccagctcaaaggccccgggaaaagtaaatagtgacttcgggtaataatattggtttcgcgagtggaattgaagataaaaagggggttcaagccaggctgcgtctcgtaaaaaacgacatttaccctcagatatctcttgcagaaattgcctatggcgactagcaacttcgtcttggttggtttttattatatgatccctaatctttgcatcatttacttcaagtaaggatcgaggtttctgggcttcaggtttgaatggaagagcaaatttcttgggacactctatttctaagaattctggagaacaaatttcagaaccaaattgggacattttaatagaaagagcaattccaattcctggaggaaattttgttaaaaacaaaaacttataaatatggtaaacctaagttttaactccatctattccctaaaagttaagcaaaaaataaaaaaaaattgtcaaaacccagcaaagcaaaacgatgatgcaatcagttatgactaaaaatataccaagaacgaagagaataaatacttactggttaaagaagaaccctggtgtaggggagaactctgtatctaggttcaagacgagtgacaggatgaaatctggggacgtccgagattggagatcgaatctgaggaaattcacaaaaaatatgtcaacgataatgagggcatgcaaagcttcaaaaaatcaggatggaaatttctcagaaaagcttgaactttttgaaaaggcaaaaatggtggaaaaatgggtcctttgctgttttatactttgaacttaattatcgtaggattaaagagcaaaagatccaacagatagaaatcgagggagaagtggaaaagatggctcattaatgatgtgcttcgaaaacataaactgccaaattcaaaagcatgcatttttcaaaatggattatgacgaatatacccacggtaatcagttaaaaagaacttttcattgaaaaagattttttaacgggcaattattataccaaaaattcagctatactttagaaggtgacacgtgtcaatgtcaggaaatatgaatcaacaaatatactgataattatatcattaaatgaaaatgtaataactcattaaatgcagaattaatggagtatgttcataactcgctaactatatagtattaagcaagatagtgatatacaaactatcaattcatgtattgacgagaaaccatcttgtcttggaaggcataatcctgagagagacatgaacaacgcatagcgaagcatctacctcatggtatgtaaataagtattaacgaggtgaattggttattagaacacttagcgtgtaatacacgttatagtaactaagtgtactgactcgagaacttggaggacatgattttccagtctgcaagtcctttcaaaaagcagttcttaagtttgctcagtacactgg

SEQ ID NO: 72018 - DNA, 2582 bp, Cannabis sativa
  modified_base (459)..(469): a, c, t, g, unknown or other
  modified_base (586)..(586): a, c, t, g, unknown or other
  modified_base (2119)..(2127): a, c, t, g, unknown or other
caagcataacactatctatttatatgaatttttttagagttaggtttaaattatatgaaattaaaaaagataaataaatggctaaaaatacacttaagtggctgaccatacaatgggtcccactagttgcaattttgcaattttattcaataattcatctttttttttttcactaatgtcatattttctaatttcaatcctttagatgtcaaaactatatatatatatatatatatttgataattatagttacttatcaaataaaatttctattgaacttttttgttaattagacctttcagtctcttaattaatgaataaaccctaaaatttcttttcttcacaattaagccctttcttagtgaaaattcataaatataaggcatagtctaatttagaattataattgatgaattaaaaccaattaactgagtctacaagtagtattatctcaactannnnnnnnnnnatgagcctatataatcaagcttccaattagtatagatctagaatttaccaagtaaattccataacttattaattcttcctgactccactataaatttagaattgcactcttaattanatagaacactctatatgttccaagatatagatacgctattagttatccattattatcagctgacattgtactttactttggagtataatataaaaatgttaaaattgttttacaaaaataaaaatccacaaaatgcaaagcaaataaataaaagttgagacaaacaaaaatacaaattagaaagatagtgttattcaatcattacatttttatcacaaacaaaagtaaaattaaagctacaaagaggaatcactgtcatttccatcattcaccaagttctggttttcatcctcaataagttcaactagtaaatcatcaatttcttcagtaacataatcttcatcaagttcaaatttttccgtctcaacatccattgattggacgttaggttcaacatttacagcttgttcattggattgtaaaatcaactccccgagatcaaccatcaacacaaaatttgatgagttcgaataatgtacgacatcaacatttgtctcgtcttcatggttgtcaatgtcccaaatttgtcgatagttaacatcttcaacaacattccaatcacgatctctaagtggatcttgaagatagaaaacttgtttagcttgattagcaagtatgtacgactcatcttgataccaaatttggtatatttatactggttatattattttcaatgattattttcttttttattggattagtgttataccacttacattcaaacaatgtcaccgtatatgcaccagtatacgatatggttattacatcttcaaatgtgtcgtaataattaaacccttcagtccaacaacactaactcctctattttgtgtgtttcgcttttcatctctttcggtcgcaataaatcgaacaccattcactatacaacccttagaaggttgtttaataatctgagccgaatgctaaagcgagcaattcatcaccattttgtaaggagctaagtttgtgcaatgcatatatctaaatacataaactgtattaatatgacatgaaaatatattttcgaaataaaagtttaaaatgctctcattgtaccgtcttataaaactacgggcgaaaagttcttctatgcaaaacattggggttactattaggatattcttgtctgattttctccaaatgttcactgttaaatgtgatagcgtcaaggtacgatagagaaagagagagaagaaaataggggtgttcatcaaaccgctcaaatcgctcgtaccgtaaaaaaaaatgcagtttggaattttttgtggtgcgctcgcggtttgaatttttcttaactcgcgcaatgtggtgcggtttgtagttttcaattgttaatatgcagttcaaaccgcaccgcaccacacattataaaaatatcaatttttatatttatttaggtccgatatgtgaatgtccaacccaaagcctactaattattgtattattaaaacttaattttttttcatatttattttcaagccttattgtatttttgattagtgtagctcaagctttgttgtatttgtgatagtttannnnnnnnngatagtccaaaccgcaaaaactgtaccacaccgcactattttttgcggtgcggtttgcgcaattttgtagtttcgcggtgcaggtacggtttaggaaattaaaaaaattgcatgtgcgaattggtttgaaaaaattatcaaaaattgcaccacccgcaccgcaaacacccatagaagaaaaacttaatatttaagaaagtttatcattgagagataacaaacttactctatagaagcttgtatttctggagaattgtcattttattgctataattattttctggttttccatacttctgtcatctctgttttttcctttgatcattgtttgtgatttgttaaatcttgtcattgctaattgttcaattgcttaaagtttagttgatttgattctaaaattttagttgtaattttcccacatcaacataattagtaagtaggccacaatgatttac

SEQ ID NO: 72019 - DNA, 2166 bp, Cannabis sativa
  modified_base (1733)..(1734): a, c, t, g, unknown or other
aaaaaaaaaaaaaaaatcaacccttactatataaagataaatgatattttaaaaattattaaagaaatatatatttttttaaaggataaatagcagcgtaagtacttaaagttttgagtttgtaataggcataaattcaataatttttttagtgacataagtatctaatgtttaactgtaatttttctctattttcattagtacaaactccgttttaaatttattaaaagaagatttaaaagtaactgatacaacatatttctgtccagaccaaataatttagaatatgggtcttatatgtgccctatttaagacaataacagagtctatatttatgaaactggaggaaaattaaagttttataaacattgggtacttataccactaaaaaaaatcattgaatttatgctacttacaaactcaaaatttgagtacttatactactatttacgtttttttaaaaagttttttttatttgggtccctaaaatgggtgggccctaattaagtgcgggcctagcccatcttagcttaggaccgacccagtgacaccttataaaatagttactgatatattataaattataatacttaatattaattatgtcatgaaatgaagcatcttttaggtataatttcatgttaattatattcaaatatactataaattgtattatgcaatacatatatgtatatataaagtctatttttatatattggtgcatgtattatatatatatatacgtaccacatgcaatattataaccttgttgcctaagcaaccgaaagcaaagagcatcagcataaaggttattatcaccaaaatcaattagattttgataattattatgaaattgctccaaattttgttcaatttcattttcaaaataataagacaaccccaatcgttgaatatcatcaatatattcaagtgtctccaaagggttttccaaaggatgaagaccatgaagtaatttattcttcacttgttccttcatctcaataatcttctcataactctctttgttattattctccatagtttcctgaacaaacacagttgaagaagatataaatcaataatggagactatatatatattttaaatttatgtattaattatctaaaaataagacatgcattaagggaaaaaaaaatcaaaaatattattttttatgttttatttacaattttacgatcaaaagatttttatttacagtagtacgtttttaaagttttaaaattaaaatatatatatatatgcttttttttaacaaaaaataagaaaataattaaaaattaacaatagaaatcaacatgcacgataactataaataaattataactaaaaacaatcagaaaaataacatcatgacaactatataatacatttataaattaataaattataaaacataaaaaaaaaaaacaatttattatgtttactaaagtacatagatttgtaaatataacagttttttttttttttttaaaaaaaaaaaaaaacccttatgtgtttaacatattttgtaattttttttaaaaaacttttggtctattatgtaaaaaatttaaggaaaaaaaaaacataccataagagatgagtgatgacttgaagcatgagacatgaaataatcaccccaaatggttggagtaaactttggcatattagggcgtttttcatcaattgtagcttcgcaaggagacatttttactactactattattattatnnttattattattattatttccaaatgaacaaacataggccaacatatatatagttgatattttgtggacacggttaggtataataattaattaatataatagtttgatagaaacaatataatacaatccacttgaaaatataggacaacatatatatatatatagttgtattatatgtactatatacgtggaactcagttttcacatgcttatagtagtgtgaatatgcaatttccacatgcttatatataatagtgtgaatatgcaatttccacatgcttagtgataatatgcaattttcacatgcaggggcggacctacatgtaagtgaggtagtaagtgaggtaggacagtttatgtaaagaccgtttagtttaaatttagaaattagcaaataattaggatttaattataaaaattatttatggatatt

SEQ ID NO: 72020 - DNA, 1630 bp, Cannabis sativa
caaatgtgaggggtattatggggataaaggaaatatagtcatatatgggctatggtaaaacatttaggtttagggaaaaaatattagggtttattatgcatagaatttcaaattcccctttttaaagcccatacatttagaatgtatgtttaaagagcccatattttattgtttgtagtttctgtaggttattttagtcattttatgttttcaaatttttgtatcagtttcttttttacataaccgtttttttgggctacacaggtcatcttcttgcacaacttttgtctttatttccaacttctgagatgttttacttactgtctttgggctcagactgagcaactcagaagaaatggggaaggatttgtctgggctattagtaatatctttggaggtacaccaaagctcatcagcagcaaaatcatcacttgtaaggatatttagtcagatggctaccattatgcataaaatatatgagaaaaagcaagaaaaaacagatgaaaatgagggtaaataaatgctatgaatggaagtgtagcagaaaatttatcaacacatacacttgggagggtaaataaatgctatgaatggaagtgtaggagaaaacaaatgtctttttttaaccttttttttttttattttgagtatgatttgtgttggtattaggtataaactttttttttttgaatgaaatcagcaatttattcataaagatcctccaaaactaaggaagaaacaaacacaggaagagtattcaaacaaaaagtactatctgcctcaaaatgagaagattgcgctaacatgtgcgctaccttgttagcagatcgcttgacaaaattcaaggaaaaagaatttaaactattaataatagccttacaatcatctagaacacagccataagtagagaccatgtttttattattattcaaatccgctactgctgtaaggcaatctgattcaagaatcacgtccgcccaattattgtccttaatccaacttagcgcttctttgatgctcattgcttcgactaaaagtggttcaaaaacaccatccctgctaccgcgcttagctttcaccaccattccaagtgagtcccgagctacacatccatacccaaaacgcctactatccaagaacactgctccatcaacattaactttaattcgagggtacaccggttttgtccaacgctcaatctcaacctgcctaggcacaaggttggtaactacagaaagtttttgagcattaatccattcctcaaagctgagtttagcaaatagagtaacttcattaatagtcggctgcttctccttccaaaccagctggtttctgtgatgccaaattgaccagcacagcatgaccgcttcaacaacttcagcctcctgccattgttgtagacctgcatcaaaccagctgggaaaaaccatagcagcagtgccaactgttgctacccgagaaacactccagcagttatgtgcaaatggacaacgaacaagaatgtgaaggatagtttcatgagctccttgttgctatattttttaaacgctacgcaagtatacgcaatcaagtagtaaatctcacacaggtgaggtcgatcccacagggaattggattaagtaccactaaa

SEQ ID NO: 72021 - DNA, 623 bp, Cannabis sativa
aatattcaaatttttataaaggttgtaaatttgataataaattaagttaaaattctcttttcatactctctttttgtgattttatctgactttcgtttttgtagatcaggtctatctctcttaaatttaattaggtttttgctagggtagttttctcgaggttgaaacagtttagaatatcgttacttatgtgtagaattattcacaatcgatatgttactaattagtattttatatttttcaatgtagaggatgatattagtcttgggtttatgctcttcttttgtaatcggccggcgtgttttaggatttgtttggtcaattttcttgtgagatatgtgcgattacatttttgctttacttgtaagaaaaattgtccctttaaacctttgaatgaatgtatattttccctttttaaaagaaaatatacaaaattagattttgtgcttgtgtccatttttttatacaaaatatatattttgcatatttcgagaaacgaaagctattgcacaagccaaaaaatcgtcatcaaagacaaaggtgataacatagacaatatcaagtagaagaatacaatgaatatttgaagtcatggcattcctaaaacaactaacaatatctca

SEQ ID NO: 72022 - DNA, 639 bp, Cannabis sativa
aaaactacatgtaaacataaatgaattctaatctttcattgacaacaaatctgattagattgaaatgagttttatttagggcatgaaatcccaacacaaagtgccacgactatccatctagaattcttctcttatctcccttcacaggcaaaagtgactagaaagagaccatcggaatgctcagagatcactactgggaatcgacactgtgaagtccaaacttgggaaagggttttcataaggggcggctaaaatggcgaatggtgaaaagtctcaacaaaaggctaatggtgggggtagagtcatcagtgacatcttgaagggtgaaaacatcagtttcttcagcggtaagggaaagtggttgagaagacattagtgacatactatccatagtagcaaggacacagaagttggaacaggaaatgaaaagaaatgaaagagaaggagacacctagagttacagcttcatacgatccttaaatagaaaaaacctccaacttttgggaatccttctaacgctgcccttagccatagccttcttaccataggaagtagggatcatgatgaggaaagtttctctagcttcatgatgaccacctcttcggatcgccgccaaaatttcaaggagattgggatctt

SEQ ID NO: 72023 - DNA, 1074 bp, Cannabis sativa
tataaatagggatgcatatttttcgcacggagatggtcctggacccgcccctaatgggggaattccctgcctaaatggggaatgaggacggagattactttttgttcccaaatgttaaacggagcggggacggggatcacactccccgcaccgatgggacccgtttaatattttatcttatatttttattaatatattataattatgtttgtattttttttagtatattagtatattttttttatgaattttatgttgggttttggataataattaatttattaaataataattaatgtgtaatattttaattttttatgtagtttaatatttttgtatattaaaatttttattataaactttatttttttattatgagatttcttgtcccgtcctcactcccattaggggattctctgctccatccccgatgaaaaataaacgaggataaagattaaaatccttaacggggatggagatgggggagtactccctgcaaactacccaccccgtgtgcatccctaattataaattaatagactattatttagtttaaaatatatattatttattaagttaaaatatatgtaagatgtattgaattataccattttctcaactcattgcaatattgctaagaaactttgacttattaataaataaatcatttaccaattgtttttactttgttgttataaatctacaaataaaacaaagagattattttataaatacataaaaataataaaaatatataaaaaatacaaaattagagttgtataaaattttaaatatttatttatattttttatgatttaatttacggaaaatatgatctttttatatatatttatgatgtactcttactaatttattgttgatttattattaattttttgttatttttatatttttttattttatttttatattatttttatgtagtattcttgttttgttgttttcatgttaactttatagaacaatgtaaaaaagaagaaaaaaaaaaaaaaatctttgaatgtaaatatgtaaattttttttttacataaaatagtattttataaaatggaa

SEQ ID NO: 72024 - DNA, 864 bp, Cannabis sativa
cctcctaatatgggtaaccaaccacagtttgacaaccaaattcgatctccacaatttagtactattgtaactgttcattcatctggctcatacaattttgctgctctgtcagaacagtttcaaaagtttattgcttctcaaccaaatgccatgtatgtctcttctttggtaggtcaaccacccacttgcacgtcaggtatgccaccttccacatgagttttggactcatgtgtttgccatgtatgtctcttctttgtcacttctaaatgtttatcatattcctagtctttcattgaatcttttatatgttggtcaattgtgtgattctggttattcagtatcttttcttctacttcttgtcatgtgcaggatcgacaacctcagaagctaattgggaccagccgtagacggggggattatatgttttggatgactcgaggttattagtatttgcagcgcctagtgtaaatttgtcatttttttttttatttttctccttcatcttctaatttttatttgtggcactctcaccttggtcatgcttcagagtctcgtataaaatttttagcttctaaaggaactttaagaaatttgcaactccatgatatttctgattataatggatgtaaacttataaaattttgtgctttacctttcgattaaagtacatcttgttctgttgcaccctttgatttagtacactactctagtgtgtggggactctctcatgttgttacaaaaaagagttctcgatactatatctcttttattgacgattacactcatttttgttgagtttttcttataaaacatcgttatgaattttatagtatttatgatcgtttttgagcttatgtcaaaact

SEQ ID NO: 72025 - DNA, 909 bp, Cannabis sativa
tccaagttctataaaagggatcctttcccatcgagctcaaaatccaaaaattcggtatgtgctactaatggagattcagagaaagaaaagagaaaaccagaattgagagtgagagagatgtgtgcctcctgtaattgaagcatagcttcattcgagtgtttatgaactgtacttgacagctcttgtttctggtcgtggagtaggcagcataacaggttgttattcctgttcgaaccatgtaaaatctatctccaattttctgcttttatgtttgtttaattcactttaattgctacagcatttactcctcatttctgtgcttattcctatctctgttttgtgtttgttttctatgttcttggttgagttttcttcaatagatgggttatggtcaagctgtggagatgagagaataatagtgtttacaactaattacaagggcaagcttgaccctgccctgttgagaccaggccgaatggacatgaatatatcaacatgtcttactgcacaccatctgggtttaagactcttgcttttaactatcttcagatgaaaaatcaccatttatttggaaaagttgagttgatcaagaaggttgaggtgaaccctgctgaggttgcagaggatattatgagaagcgatgacgcgaatgtatagttctacctagactcattgaaactctccaaaagaagaagatgaagcttggtgagcaagtcaaaggaaaaccagaagaaaaaagaagatgggcattgaaactgtcaaggacaataacaagggagttaggagaaatcaaagaaaaagagtagtaagaagaaaaggtccactttcagatgagttaggaccagtttagcaagtgttttaaaacagcttttactttgagatgtgtattacttgatgtatccttttttg

SEQ ID NO: 72026 - DNA, 940 bp, Cannabis sativa
  modified_base (27)..(30): a, c, t, g, unknown or other
aaacgtgattaactgctaatttccaannnnaactaagcggtctttacatgaaccttgctgtcattgaaaagaagtttagtgcctcaaagttttacattggagaacaaagttagctatgctggatcagtgtgggataaacttgtgttgccaaaacataggtttatttattggcaagttattaatagccagctgcttacccgtgacattctaaaaatatttttgccaattctgattgtcaattgtcatgtttgtgacgaaacagaggaaacacataaccatgccttttttgattgtcccttctccaaacaggtggctgtcaaagttaatgcttagctcgggctaatacactggcctacctctgtcaaagaccgctgctctaggtgctctataactcagcaaagcctccaaaacagagtgataaatgttgtgattgctactactttgtttatacaacctaacttatgctaccccttgtaatctaagcaaagctgtgagaaacttggtgatgctgaaagtgttatgtttaggccccttcaaagagagtagaaagacaaaatatttacttaatgttgtaatgaattggtagtttgcgactgctactatttcttgcagggcgagtgctttgttgttggtagctactggtttttcccagctatggttgtattgttcagttttttgaataaaaatcctcttgttcaaaaaaaaaaaaactaagtgtaaaagttggatcggctcgaagaacaagtatgcgagatgaccatctcactatgagaagacttcctatagcttcatccaactaataggagcgaggctcataaccttggcaattcagaagatttccttacacccgtgatcaatgtaagacatacattgtcgacctcggtaagaagaatggtcccaactcgctattgggatcactataatcaagtttctgtcgaga

SEQ ID NO: 72027 - DNA, 941 bp, Cannabis sativa
  modified_base (877)..(895): a, c, t, g, unknown or other
gcctttttgattagtaatcatgtttaggggattagggtttcgtaagtaacttcggtagcgtgcctaaatatttagggcgttacacgatgggtctcccttctgttcataatcactttcaagagattaacaaatctatttgaggaagctctccttagaaaggtggaggcattcttgcctagtctcggacagtcacctacgaatccaagggcaaattctctacgcggtcggggcctcatgccaaacaaggtgcgattcaacccttgcatccctactttaagaagatggtaaatgactacaagctccatcttgttgaaacttattttaccacgatctagatttactaacaagtatgtttgattatattctataatctaacaccctaaacatgaatttcctaaaacaatgaaataaacacatataaagttctagaaaaccttacattggtggcaacagaatattatggttccttctgtttagatctttaatccttgttcttttttgtcgtagagttataacaagatctgaacctggatctccttcaggtgttggaattcttcacaatcttcaacactatgattgagtactgacttgatatgagtgagcatgaactctttcactatggtttgaaattgatgaagagagaaagagatggatttcgaattctatagaaggaggtctcaatttaattgtctaacaaagttagaaaactagcttcttaggttatgagaatgagagccatcttattccttgtataggatttcaactagggttaggatttaaattatatggaataaaaaagataaaatgatggctcaattatgcttaagtagtcggcctcacttcaattaataaataaaccctaaaacctcttttcttnnnnnnnnnnnnnnnnnnnagtgaaaattcataaataaaatatagtctaatttagaattctaatt

SEQ ID NO: 72028 - DNA, 1230 bp, Cannabis sativa
ctccaccctcgacatgaactcgtcattcacaaacttatcttgaagggtcatgaagtcacgagctctaacggctgggtcgatcacaattttcttccccttgtcctaagcaggcctaacctgcttcttaaacgagtcagctgcgggagtcgccacaacaatactcttcctcttttgagggataatgggagaagtcgtcacagttccagttttgggtttacggttgagaaatggagcttttttcaacaaagtcatgtttgcgaagacaaaaacaataagataagtataaatttgttatgttatattgcgaatatatgcgatgatttacttgatgttggtctagaagtttgtttggatagacgcttgtctattctctcctttttcttctcaaatggctccttgtacactggctcctgatgaaggttggcgtcctcaaggattaggttatgttctcgcaacttcaatgttgtgcacagcaatcgccagtcgtgatcttgaacaggaaggctaccaaggacttcggcaacttctttgcagactggatccagaacaggtcgagccggtccatctgcgatcaatgagaaacaaatattaacgacttcataagataacataaatataaactaagtattgggaagtgtgacgtactaggtcgacgattgaaatctgtcctaatccctggtactctgaacacataaaaccacttagatttcaaatcccccatattggaaaccatgccttctaccctgttaatttcaaaagtggcccacttgctgaagcaatagaagccattgccatggcccacactttttatatcataaaaatagttgaagtcctccatcaggggctcccttcaggcatactccatattcatcgcataaaaccctaatgctatccggtagctatttgtggttagttgaaagggagaaacgtcgtatcgtttgaggatagcgataataaagggatgaaaaggtatcgacaacccacatcgaagaatgggtattgagacaaccacatcctctgtggggattatcgcgggattggtaaagggaagatgtggcctctgggaggtgcgaggacacatggtactaagtcgcagcaaattcaacctcgtaaacgtattgaggtcagatttgctaactcgcgagactagatcctcgcatgagaagggttcgttcagctgaatttgtcccgcttccctcggcatcctcctcttcccctgactcgcggtca

SEQ ID NO: 72029 - DNA, 783 bp, Cannabis sativa
ttttaaatttaagggttatgggggcaaaaaggtcattttaagggtaggatttctagttttgtttttagtgcttttgactgaatgaatattagataatttaagttatatttatatttaatttttagaaagaaagatttattaagaataacctagagaaagactaagtcaacatcactcaccttcacctttcttccctcttgttcgaaccctagaaaacagccactagcaaggatttttcaccagcttctccctcaagtatttggaagatttggctaagctttggagttgtctaattgttggggtaagttttcacactttattattgagttttcttaagttataagtgtaattttgagttagatttttatgaattcgggtctgtggtgtagatggagtttaaagcttgattttaggtctgaattaggtttgtttaagtgtgattgaatgattttttttggggttgttaagcatgaattaggtaagttgagtttaagaactcaaagttcactcaagtatggtaattttattattttattatatttctgagttttggatgtttggatatattgttgttatggtatgagactgttctggaaggtttcattaggattggaggagatttggttcagttttggagcaaaaaccaaggtttcccgtttctgcagtaggggaaacaggcgaaccggtttcacaagcacagtgaaaccagttaaccggttttgtcagtaggggaaaacctagttttaggcttcaaaatcgattttgttcgggttgtttcccaga

SEQ ID NO: 72030 - DNA, 925 bp, Cannabis sativa
  modified_base (897)..(899): a, c, t, g, unknown or other
tggtgaacctcgccttagcctcctgtaacataaagtccatacacatagacataggagcctcgaacgccttcaccacacaaaggttgtcactttggaaaatgacttttttcaatcccaactcgttcactttttccactgccaaacaaaccgcttgagcttcagcaagctttggaagtgtcactctactttcttgagagaaaatagaaataatgtttcctagatcatcacgaattacaacagaaagcataaacccagctgaaaagactgccacatccgaattgcaacaaacccaattcgaaggtggcagactccactcagtgattacttgaactgtcttcgaagaaccataatatgatcattgatcttctgccgaatagaatttgttatctgcattatatccatgtccttctctcatgaactctgcgatttctttctctccacactgattccacgatacacaggcaagtaaccatgaaatcataaaatgctacgttaggtggaagatttgggcccttccagaatccatcaagccattgcttccaattggttgcagtcacaagttcagttcgaatgccccatccaatactgaaccaaatagctttgacaaaattgcatttccaaaatagatggaaagaattttcagaagcttctctacatagaaggcaggttcccgtaatgccatctaagaaaggagccagcttatctttagtgggaaaaatatctcggaggagctgccaccaaacaaatttcagtcttgtgtgtaatggcgagttccagataagtttccaaaaatcactatcttcattaaccattgattccccttttagaattcgacaagctgaacttatactgaattcgccattcggctcacccaaccaatgttgggttttatgcccnnnataaaactctttacaatctgattagt

SEQ ID NO: 72031 - DNA, 938 bp, Cannabis sativa
ttttttttttgagaatgaacctgattccattataacaatcgaacaagtacaagatacaattatgagtggaaagatgagttcctccataaagcttcctgctctaatcctaaagctgtcctagctaaacaatgggcaacattatttgcccctcttgggatgtagctaagagaaaccttagggaagtaagagagcaagcttttaatttcagtaacaaaaggattaagatgcaaattatgagtgctattattacaaatataatcaaccgaaaccttgcaatctgatacaacactatctggttaaaaggaatgatcatgacaccaagaaagagccaaatggagtgcttgtgcttccattaacaaaggtgtagttatgccacttttaggtgaggctagattcagaagaacatcccctgttttggaatggatagtcatgccataccccattttgagaagctgtgcatcttgtgcagtatcaacataaagccgatagttgaagtttgaagcagctgtgcgacgtgcggcggttaacggtcaatcttcatgaacctgtggagatatgatggtcttctggttgcagcccgagtattgctcgaggtagtttgtggccttgcaaagaacctgttctgggggaaaggtgagtccagcatgtaaccaactgttcctgcagttccagatcttccataacaaacaaacaaagagaaggtaatgtccagcaacaaattcattggcagcaatatataataagtctatacaattaagtgcagagtgtttagaaatgaaatcattaaagttagttaatttccataccttctgggcagtggggcatctgaagagagcgggctctagggtctcattatgatagtgacaccgactacgatggggggaacagatggtttttctattgaacaggttgtggctagtagggaggatatcatgaca

SEQ ID NO: 72032 - DNA, 2789 bp, Cannabis sativa
atggactatgttgaattttaactataaaaccacgtaaaaatgtggtgtgatctttgcattattcttcttatttttattttctattatttctgtgctaatcctatcacaaaaataagcttatatcgttaacgaaaaatctacgttaacagtttggtgctttcattgagagcgtacgtgaaaaaagcttagaaaaaaccctcctaactaaaagaaaaatctttctccatggtatataacagagaaaatgttgatactcatcctgaagagactactcgtcatcttggaaaagagccaacgggctcacagaggcctcctagctcacagacaacacggtccacactctcaagaaggattcaacatgaaggtggccgaaacccaaaaaatacacgttcgacacattcaagaaggacccatcatgaaggcggccaaaacccaaaaacggggaataaggaacccaacataagtgttggtggtgctcaaccgatggaatatgatgatgatggtgcctatgatcccacgagatacgtgtcagttgtcgagttggaaaatcgccatctcaaatgccgcctggaggaggccaattgacgaaacactaggttggaatgggaggcagccacggctagggtggcacaagaaaacaacacacaaaaccaacctgatgttggagtgaggagaccacaaggcagacctcgtagtttgcgaaccaagaggcaggagacggctcaagagaattctcaggaagaacaagttagggaaactgagggtcttcctgagaatgaacaaccaaatgatcaaccggagccttctcacgaaaatgagaacagaaggtgacccgggaccagtgaacaagaaatccctcgtgagaatgaggggaatcttaggactcaacctaggacaggtgggctgccaccgaggcatcgccaacacccttctcgaaccaacagggaaggggcacatacaaaccccactagggggcatacaacgacccgtacctaaaggagaaggccaggacgtgacaaggcgagtgccagctcgggatgcacaagaacccacagtcaatcaacacgcggaggggaaagaactcatcgcaatactgagcgagagagtacaggcacaattataattgaaagttactcaaggaagagatctatgagtaggacgaggtccatgagtagggcaaggtctgttagtaactataaccagttgcaactggatctctgtaatcacttgaataagaaaaaacctgacctttgccaacaactcagtcaaaagtaagaggatcctatccaattgcgaattgatgagttggaggacaaattcagaaggtattaagtcagggaatatggaaagctgtctagatacgactccgatgaggaactcgagcctttccatccatgaatactgaattccctaagagattcaagaaccatcacatctcgtcatatgatgggacaacagatctggtctcgcatttaaataattttaatactatcatgcaagccagcaatgttacgaacaatctacgctttattttgttccccacttcactatttggagcagcgagcagctggttcaaaaaatttacccatcattcaatcacctcttgggaacagttgtctaaggacttcaaaaaaaagtttcaggcagcaagcgataggcgaccttaggcgtcctcactcactaacacaaagcagcagtcgggcaagaatcttaaggcctacttaagttgttttaacacagctgctgcgagggtgagaaatctggaccatagtacccagcttactgctcttcacgcagggatcacgactgatccctccactattggaggcgagctatgggatgacctgcaaggtcacctagtgaaaaacatcagtgagttcaatgaaagagctcaagtattggttcgaaaagaggaagcaagaaaagagatgaagttgttaaagactggctcgggaggtaaactcagcactgtctcaacgagcaccgtctcaaccaaagctgaaaatctaggagcctctagtttaaagaggaaagataactgtaaagactgcttagtttaatttgaaaattagcagataattaagatttaattattaaaattatttataaatatttaaataattatttatgttgttatatttgaattctgaatgtatttttatgtcatatagtgaaatttcataattttgcattttcagtgtccggcaacatggaacgtggcgtatggctcagtagaatcacaatctattattttagtatagtgggacagtttatttagacattaggaatgtcgggattagtcgggaatttagagttttcccaaaataccctttgtactgcttttaggttatattattgtgtgagggcaaaaaggtcattttgctatatgtgccttgtcatttatggattttatttaaaagtttataaatctgattttagttatatattgctgagttttaagtatagaaaaacctatttttgtcactcattttacaaaaaaataaagaaaaaggaaaaaatttcaaaaccacccatttactctctagctctctctctttcggccctctttgagcagcaaggacttgggatttttcttggttattcaagctgttttctcaagattttagtaaggtcaattcttggtaagctttttggtaacttgttcttgatttcttgagttgtaagaaaaagcaaatttttgcatgtgttgggattttagttgctgctgttattgttgatgtttgttagttgattcagtagttaaatcatgattgtttaagtgtattcaa

SEQ ID NO: 72033 - DNA, 648 bp, Cannabis sativa
tcagatcttttgaaaataccaaaagaaaagacatcaaactcacttaattacagtatttccatttgttaccttcatcaacagttgtcgttggcttgaccaccaataaattctcctttcgagtcataaaatcaccaacagtatacaccttactcattgactaaatccaaaaaaaaaactaatcaaaaaaagaaaacgacgaaaacaattaaaggtgaagaaggcgaggacataccggggaagaattgacggcatgagcaccgaaggaaacagccatcggggggagaaaaggacgatgtgaggcattgaaacgacgtcgtgtgactgtgaggagattagtcttgaaaggtgaaggtaacaatggttgagattgagaatgagagtgaagaagaagcggagtgtggttagtgagaaagtagatggcgttggagttggaagccataacctccataatatcaatggtcttattattattattattattttaatagatcaaagacgaaatcagtgtctgtgatctgagactctgtttatattattaaaataaagagagagaaagagaatatatattaagaatgaatctgtggaagaatatattgaattaataattaattaataaataatatataaatagaaacagagggaagaatg

SEQ ID NO: 72034 - DNA, 1095 bp, Cannabis sativa
attctatacttaaaaagttctatatgtacgaattttggtcaactaacttgtgtgataagttatttcacaaaaatgatatctaacatttttacattaaattttaagatcacatatcatttaactaattaagagaaaaaaattaaaatttttgaaatcagataaatgagtagaaagtaatgcgcattttagagctgaaaaagtggctttttgccactgccctaattttggtttactgtttttcacagaaatgggaaaccgtttaaaaaatggcaaactgttttttcctagtattcctttttaaaaagcatgataacgactataaagtgttagtttttgttcctacactatataaactcgtttttcactcaaaataaaatgttggttataccaaacatattcaagtgattttaagaacccccaagttgtaactccaacaaaacacttttcacacactttgagccaaatttcgtatttattttttctaagtgtccttgctaatcactgtaggttcttcattgtatcatcatacttctacagtgagttttcttgtacttctagacacattttcaaattgtaattgaggttgtcacccgtattgcaaacaacccagttagagtgagattggcactacaacaatctgaggaagaggtggatagtccttggcattgaaaaactattgtaagagatttcaaaaacaccttggtaaaatattcccaatgtacgtaagggttagttaagcccgttaacttggctcgatagtggaactcaaggatataggtggctttgttctaccgaaccttgtaaaaattgagagtttgcaatttcttacctttaaaccctttactttacaagcttgattatttgctctctctatttgcttgtcatactatttgcatttatttatttaatttaattaattgcataatcttgagttaacaaatcattggatcttcaagagccgtagaataaatgatgatttgcattatttgggagtttagatgaaactgctaaagatatttcaactgaaaagaagcaagggaatcttggcttcaaaaatctaagcgaacttagacctgtaaacttgatttgaaatca

SEQ ID NO: 72035 - DNA, 600 bp, Cannabis sativa
ggacccaaacccgaacccggacctgaacatcgatctcgaccaggaccctagactcgaatcccaaaccccggatccaaaccctgatcccaacctagacccttgacccgaaccccgaccctgaacctgttctcggacttcggcgcagaactcggacccagactggcatggaccctggaccctggaccccagaccccaaaccctgaaccccgaacgccaaactccaaccctataactggacccaaatctagactcgtaactgagcccgaactcagacttcagactggactaaaataaaatcaacaaattaaaataaaaataaacttcacaggaaacacttttattttttattttaaaattaaaaaacaaaatgagttatagaacatattttagttgttcaaaaataaaaattttacttttatttttgtattaaaaaatttaaaaacaaaaatattactaaatactaccttaataaattgagattcatgattcaaaatagaaatcaatactctctcatttttattcacgcttgtagtaaaaatatcaatcacctatcaataatactaattcaatactttctaatttaaattatacatagtactt

SEQ ID NO: 72036 - DNA, 642 bp, Cannabis sativa
tggtgtgtagggggagactttaatggtaaccagaagagtgggggagaaattgaacagcagctcgtgtattaagagtatgaagctttttgatggcctgatccgagagttacagctaattgatcccaagcttgaaaacgggtgcttcacttggtcgaacttcagagcaattcctatttgttgcagattggatagatttcttttcactaacaaatggaacgtcttttatccgtttgtgagacaagaaatgttggttaggttagtttcagaccatagccctgtgttaattgattcaaaccctcccaagtggggccctggaccgttccggtttgataatcaatggctcgaacacattatgttctctaagtgttttgaaagttggtggaagcaggaagttacaactgggtggccaggcacaaagttcatgaaaaaactgaaaataacccaatggaaggtgaagtagtggagtaaatccacatttggacaaaataagatcacaaagaacgcgctggaaggaaggttgggggtactagacagattagaaagaacatcctcttggaatcaaattctgatcgaagaaaggaggaaattgaaagaggaatggtagcggctgagttttgaggaagagagaagtatttggttgaa

SEQ ID NO: 72037 - DNA, 1396 bp, Cannabis sativa
  modified_base (31)..(38): a, c, t, g, unknown or other
tttcataattaaacataaacaactgctaatnnnnnnnntaactaagcgggctttacaggacacatggattctaaatcagaattgaaagcccacctgtggttccaaagaagataatttgggccaagccagagtgatacaaggccttctaggaaggtaccttagctccacgaccagatgaacttccgctaatgacaatccatatttgaaagcacttctagtatcgtaattccggagggctagatagtgtgttcctataagacaagttcgatttccctttttattcaaatgtacagagtatagaattaaatgctcctcaaatcttgacaaaaaatcgtatcaatccaaaaagggaaactacccgacatggagatcaagcaattgattgtccataattataggacacggtattgacaattcaaccatatctaatctgcctagcaatgcagatcatttccttcaagagctggacctaacgagaatagccatacttatgtatcttttatgtaaactccccattagagggaaagaaagaaaactaagtataattctcttaacactataaatacctaataaagcttgaagtttatagtatcaaatggaaaatgattggtgtatctgggtattatgagtttggaaggataaacttctgaactcaaaagagacattttggcaggaaggaagtaatccattctgaaaatggatttcactaaagaagccagaggtttacaaaaaatgacaagcttgaactccttttatacacgaagtccagtgacaagaaagccaaagactgacaaatctaacggttggaagttgtgcaaaatataaataggcgattcataatgactctcgaaaccgtacaaccgccagaattaaaggattcattttttccaagaaaagaacatgatgaaaatgccctctgaaattattaaaaagctcttttttactaaaaaagaactttttaaggggcaattgttatacccaacattcggctggaggacacgtgtcaagataaagggaatatgaatcagtgaaatatctttttatggaataactcattaattacgtaagtatcagagtatgcagaatactcaaaaatctgaataagattgactcgtggactatgtagaattttaactacaaaaccacgtaaaaaaccctgtgttcatattttatttttctatagcttttatttttttctgtgatgaattatcatcatgaggctcaatttggttaacgaaaatttgcgttaacactttgaatttcaaaaaaaaaatttgaaatggcgggtttgcattataccatgtatttccagatgaattccaattaatcatacataattgccccttaagtaatttttaaagaataaaactttgtaattacttaatataaatgattc

SEQ ID NO: 72038 - DNA, 842 bp, Cannabis sativa
aacatgttttttataaatatttttactttcttaattttaaaaataaaaaattgataaaaaaagtattagcagtgttactttaatatctttttattatttatcttttgattaattttgtattgttttgtttttagtttctaattactcgttgagcgctgcatgttgtagcacaatgatttgccaatcgctggaggaaaagtggaacatattttaaactggaatttgtttggctgttaggattatctattattaaaacaatttaaactatatgtgattatgaatgaattttatttttattaatcagtttttactgttgataaatatatatatatatataataagaatgtatatgttgcgtataaactcttccttttgagctgcttacaaaagaagatgaaaaaattgaaatattatcattgagccatgtggcaacttttgtataacaccttaaggtttatttcttgatttttttgtcatttagtttattgaaattactgattgtagaccatttaagtttctccttattaattaattcgagtgataaaaataagtctatcttaagaagcataaagtaaaaagataaacaaaataagtataggatatgaagggacatgcaagtccttaaaaaagtatgtaataaattttttaagagtattgatcgatatactcgtactcgataaataaattgctttcaaaataaggttgatttaatctaaatacaaactttcaatatttttaataatgattttatacgaaagaattaaataatgatttaatctaaatacaaactttcaatatttgtaataatagttgatttttaaattatttaaaattatataaaa

SEQ ID NO: 72039 - DNA, 575 bp, Cannabis sativa
gagggagatataaaataaaaaagtcttaggacgtaaggggccaagaaaaaatatgagaaaaacccattatgtacaaataaaaaaaagaatcccaaaatatacaaaaatagactgtttgtgagaaagatcaaagagtgttaattctcagatccatttacatggattaaggatataacacgtttgggtcaaaaaagtttggttccggctgtgagagattccttttatttttatttgaagatttataggcttcttgtttctccaaacccttggttaatcaaacacaaaaaatattttaaattattgaaagtgctagaaaaaactaaatgataatgatcaggatgacacaaaaatggtgctcgccgcgaatggtagtgaaatggtgactgcaattgttagaatttcaaactagtaacaaatcttagaaagattggaagcgcaagaagaaaaattggtagcttaaggagtactagcccagcaaaaagaacacgtaaggaacatcgaagaagaaaaccaccagacgaaggtaatcctagaagggtacactgccctctgctgtctgaagataggactgacca

SEQ ID NO: 72040 - DNA, 750 bp, Cannabis sativa
aatatgtatttattatgaggggggtttatttatgatttattttttttgagtttgcaggctgtggattatggagttcataagctttgggagtacaacaatgttggggtatggcatttctaaaccattttgtgcaacttatgtttaatagaaagcatgatattgctctatatcaatcacattcattgtctcattcttctttgtgaaatcatggtatttaatgtttgtgaacttttgaaatcatgattgaataacctgtggtgtattggaaatcatggtatttaatatttgcattactcgctcaatataagtgttcattccaagctgtgagacatcatttcggtattgctttacgcattaggcatactgttactgcaaaatttaattctcattctgtgatgcaatgtaattttggggatatcttaggaggggaatgactagaaagcagttttaaccgggagatttttgactgaatatggttttttgttagtatctatgactttttggattgttaattttgatttgaatctgtattgtgtctgttgatgcagaaacgatatgaagatattccagttttggggcaaaggccgacagacgaatgaattgcctaatctcttgactttttcttaattttcattccatctggacaaagcatgcaatattgtgcactttgtagttataccaattttcacaataattagttggtgcataatgcattaaacttatctcttaatgattgttacattgaactgg

SEQ ID NO: 72041 - DNA, 1486 bp, Cannabis sativa
tttttttatggatttttatatacatatagattttcacttgttttctttttcaacaaaaaatgttgattttacatagaatagaaaaacgtcaatataatattattttgaaacaaccaaaaaacaacattgtataattgtaaaaacaaattatgttattttcccatagcagcaacctcaaaaccatattttttccgaaaataacaaaaagaaataacactctgtacttttgtaaaaaatattaaaaaaaatcataaaaacttttaagaaaaaaaacagcaaatttggaaaaatgtaaaaattatgttatttttgtatatttatgaaataattccctttttaaacacagttttgatgtgcctacaatatattgatagaagttgtacatatatatggaacatgtcttcttaagtaactgaagttagtctaataatttattcaaattaaacatataaacattagttttaggaatacagataccatatatattttgaaattttatcattgatcataatttatacatgaagtatataaatatatatataaacgattacacatgaagagaatgtttgaaattaacaagttgtgaaggttacaacactactttacaaaataatacaatgaaaaatatcaaaaaagaaatgaaataaagaaagaggctcaaacaaagttctaatatatttgtcatatataaaagctacttcttctttcactcaacaatagagttctaaaaattatttatcaagccctacgtacatatgtgctcccctcagcctactgtgcactaaggatgagcatattattacaaagttttcttatattatattatgtcaacttataccaagtgagaaacattatgggtctacatttagagttctcgatcactttttttgaatttcaaatgtatcaaccacttaaactagctcaagaatgcgtgtatctttggaaatcctgaaagtcccaaattatgtaatataatatataaacacttaaatagaaaaagaaaattcaaatgctattaactccttaattaggagttttatgggattaactaatgagataatttgcaagttatttggggtattgggacgagcactcaccaaactatcaaagagctaagccacttatgtcatttttcaatgttggtcacaagtcaccaaaatgcttcaaaataatcttctcctattgttatttggtaacatccaagcagttattggaagtccaaattgtcaacaactacataaaacaaagggaaattttcacttttatagattttaaggtaaaaatttacaaaagtttgagtttttttaaaaaatttactttatggaaaaaattcaaaaaaaaaaaggttaagaaaatatgggaaagacaaataagtaactacctatcctaaatagtaaccgattgtagttttttgaatttttctcatagaataatttttgtgataggaaaaaaaaaactatacttaagataagatgtgtaactctca

SEQ ID NO: 72042 - DNA, 719 bp, Cannabis sativa
caaaattaatgaaatgaagttgtagcaaatcgatggcatagtaagcaatttacgaggtattgtattgtatcaataacaaacgatatcacaaagaaaagcaatacaaaggaaaattacagaaattacgcctaaaaagaaaattcaggaaagaactacatatcacacatgtaccgtaccatagagagagagagagagagagagagtgatgattgaggatcccggagagagaagataggcggcggtaggtggcggagggggtagggttccgttggggtagtgagaaagagagatattatgtttggtttgggtgaatcgacagagaaggagacaaaggcaacagggttttgggttttgggcctttttccatttgggctcaattctatttgggcttgggcttgtgcttgggttagaatttagggattatttcgtatgtaccaaaaaatgggcaaaaagtgtatattttcatggattttaagttttcttttttaacatttgtacggattttcagtttttctttttaaaaaaatacagaatgttgtgtttcgttgtttttactttgcagctatgaaaaaacaaggtgaaaggattgtttttttatgaaagacaaaaagtgaaaaacttttaaaatgtaaacatgtagaaagaaaaaatccaattttaagtgcatatattttccttaaatttattttggatttttgttatgagaatactaaccctat

SEQ ID NO: 72043 - DNA, 1618 bp, Cannabis sativa
  modified_base (1462)..(1463): a, c, t, g, unknown or other
taaatttgattatattgaaatatgctttatttaaggtacaaaaccaaacactcaataggtttgtttccaagtctacaaacaaatgtatcccattcttcaacatcttacacgaaaataagaaattcgaatggcctggggaatgtgaagaggccctctaaaaactaaaagaacgtttgaccaaggctctaattttatctaagctggtggagggagagtcgttatacctatatttggcagtgtctaatcatgtcataagtgctgtcttagttcgagaagaaagaagggtccaattgccattatattacataagcgaaagactgctaggcacagagtctagatatccaatgatagaaaaactgtccttttacttgctaataacttctcaaaaattgaggccctactttcaagttcatgtcatcaaggtattaaccaatcatcccctccaccagttgctacaaaaataggattcatttggtagactactaaaatgggccatgaaacttagccagtttgacatctagtatcaaccccgagtttcaatcaagggggaggctttagctgactttgtggttgagtgttctagaatgaatgatcaccaaaatgagccaatcctagaattactagtttggaaggtctatgttgatggagcatcaaacgaaaagggggtcggagcatgaatcattctaatttctttgcaaggacatcaactccaaagttctctctgctttgagtttccctcctctaacaacgaagcagaacacaaattgatggctagcctacaattggctaaagaagtaaggacccagagtattaaagtgtctagtgacactttgttagtggtaaaccaaatatttggacaatactaagctaatggtgagaaaatggctgctaatgtgatacggtcaagagtatttttgcaaagcttcaaaagtcacaacatttgccaagtcccctgggacggaaaccacacttctagaccaagcctttcaaaaaagattcttcatcaagggtacttctggccaacgatgaagagcattgaatacgtccagaaatgtgaacaatgtcaacactatgaaaaggttctgcatgcatcaccaatagaaattactttgatgagcagtccctcacctttcacagtatggggacttgacctagtaggatctcttccaactggaaaaaggggagtaaattatattatagttattgtaaactacttcaccaaatgggtagaagcagaacctatgaacacggtcacctccaaaaaggccttggactttgtaattagaaacatcgtgtgtcgttttagacgtccacataaaattatataagataatgggaagcagtttgacagtgtgcatttcatgggtttttgttttcaacgcagaattataaaaagcttctcaatcgtggccagactacatgtaaatggtcaagtggaagccaaaataataataataataannataataataataataataaatcttgcactattagattggtaattaaattttaataatcttagcattgaatttgtgacaaattttacaatgtagtaattaattgaatctgtgatatatttatttatttattcaaaaaaaatatatttatttattta

SEQ ID NO: 72044 - DNA, 1280 bp, Cannabis sativa
aaaattacaaaaatacggcaacacgaaaaaaatttattttaactattatataactatactttgcttttcagggtgataaaaactctaccaaaaaacatgaccctcaaggtcagaaaactcatcctcccaaatgttacaggaatttttacactcattgtaatgtgcttggccatacagtgaaaagatgctacaagatccataggtaccctcctagatacaagttaaacaagccaaaggaggtcactaccaactaactccaaggctgcaacgataccaatgtcaatcctgatgagactaatgcctagtttcctcaactcactatgttcactatcaaaaacttttgaatttacttgccaattaacaatttggtatgaccatcacggatcctagcacttcagagggtacaacaagtattatcttatctcataattctgtgtcatcttcaaatgaatcttggattatagattcaggtgcaactaaacacatatgcaataatattacgttatttcaattcttatgccctttagctactactcaacttattctacctaataataaacctttacttgtctaccaaagtagttcaattgttgtccttaatcaattgttgcttggtgatgtactatttgtgtcgaacttcaaatttaatatgtgagttgcttaacatgacagtaagcatatctctgtcaaattctttactaatgatttttatatccagggcaaactcaacaaaaatgtgattggtagaggaagaattaaggatggactatacatgttggacctcaatccatttgttgctcatgtgttgatcgtctcttttgaattttggcatacaagattaagacacttatctcagaaacatttagctattcttagtaatagcctccactgtaatgtagattctttgcacaaataatctccttgttatatttgtgttatagtcaaacaaagaaaattatgttttcctaagaacaatacttttgctcaaaataaatttgatttgaaagaaaacaccagcatcttttaaattttgcaagagctctttttttttcaatctaaagtctccatcatattttggacaaaatgcataattacaaccccttttatcatcaatagaactcctactcttaagcttgacaacaagacaccctatgaaatgctatttggaatttctcctaattatgaacatttaagaaattttggatgtctcatttttgcaacatagagcttgtgcctgtgtttttatgggatattctcaaggtgtaaaaggatataaattg

SEQ ID NO: 72045 - DNA, 637 bp, Cannabis sativa
gctgattcgcttgccattgctggctccccagtggatgatcaagatctggtgctacaagtcttgaatggccttgggcctgagttcgatcccgtagtctctggaatcacttcaagaagtgatgtcctcaccattgaagaagttcaagctcttcttctttctcatgaaagtaggattgaacaccacgttgccatgagtgatttatcttccaagctgcaggccaatttaacctttggcaatggaagatctggaggtgttcgtccatatgcccaccccaactctggcaattcccacaacaactcatcctctactggtcgtggcaggggttttcccaagtactctaatcaacgagtaatttgccaagtgtgtatgcgcattggtcacactgcagccatctgtcattatcgatttgataaaaattggactactcccaaaccaggtacctctgtcaatcgtgcatttcttactgatcttgaatttgactgtgatccccaggcttattccaccaccatggtccaagattttggcgaagatagcttctggtatgtcgattcaggtgctaccactcatgttacaaatgacaaggccaatctcgacacctccactcctttcacagggacagatgccttagccattggag

SEQ ID NO: 72046 - DNA, 732 bp, Cannabis sativa
  modified_base (49)..(49): a, c, t, g, unknown or other
aggcggtgtgggattgcacagcttactcggtgtttccccttacggatcncgggactactgactgtcacaccaagagatgtcaatagaagtcaaagagaggacatatcctataaagatgaagacgatgaacaatgtcatcctcatagtcgcgcccatcgaaggacactaaaggtatgcaatactaacactatttcctcttctttaagatcttacagtcgtaactcctagcatagatacttctttaggttcaattttcacacgactaagagttaggtaccatgtccacagaggagatctgggagatcagttgaatgatcgcacaatccccccacctgaaaaccataggaacaccacaggcagggagcccaatgaaccccgaacaggcaatcaaagtatctctcccttgggacaacctaaagaggtaatcaataatattttcaacacaatttctgcacttgtcaatgctgttgctacacctaccaacacagttgatgtacctgtcaatgtcgttgcacccatcaacaacttggtcattctccctaacgtcacaacaacgactaatgtagcacctggaaggtttgatcaagagagcttgttgagagctctgaggatggtcgagcaacaaagaaaactcgtttacaaattgcacaaaacgtcaccattcactgcttaagtgcgacgtgctcagcttccaaagggtttcgcctttccaaattcctcaagtacaaatgt

SEQ ID NO: 72047 - DNA, 1062 bp, Cannabis sativa
ggaaccatggtttaggtagtttagccgccaaaaattcggtttttgaagttaagtattacaaaatgtaaaattcaggtagtttagtcgtcaatatctctaaaaattgacatatagatttgtgcatatcttaattttttttggataaggtaaatttgcaattaaaatgtaagaaattccattaaatatataggccgagagaattgggctgttattatttttgtttgggccatctaattcaatgcaaccgtcaccctcgatttgaaatcaaatagaacgctgtttccgtctctgctctctgtgtattattaagagctttcacttctcccctctcttccattgagattattacatttattttgtgatcatcgtgaatcttaatcctccatttggacggcaagagaagcccaaccggagatgtctccaccaacgaatgcggtccgtactatctctcaggaggcgtttgacgagcttgtgaaggagaacatggacgaccttgggatggacccagctgagtcccttcaagatgccatcgaaactcttaccctccagggtgttgatctctcaggtccggtctcacatctaaaaactctcgtattttcctcattttcctgggaaaatatgttgaacctctggtttctctgctttcccgcaacttttcaacatccacacttaccccatttctttacgtttcagatctatagcaaaaatatttagttagaaggtttttgtttatctgtgtttgtatggcagggattgtcacttgcgtactaggagagggtggtgtttgttactctgtgttttagatctcttgtccttctttctttttctttctctttgcgtttagcttgtggtgttggttttgtggagatggtggtttgtggtgttgtgcgggtatagatgaaaaaggtggctggaggtcgagtttcgtggttgttcgctaggccttgtgatgttgcagctccgtggggatggacggaggtgctggtgggcggagtggagtcttgctgctggattctcaaattggggggaaatggcggtagtgatggtgatgaagcttcagat

SEQ ID NO: 72048 - DNA, 566 bp, Cannabis sativa
tattttcccatgatcataaaaatggtggtcctttacgtcatgacattcatatgaatttatttcgctccactttggacgattgtttttggaatgaattaccttatataggggatgattttacttgggcaaaaaataaaaaagaaaacaacaacattaaaggagagacttgattagtgttttgttaataatatgtgggtggatcaacttaagtcacctacagttacacatttagactactatggttcagatcatagagccattttagttgatgttagcttcacaattcaggttcagtaggagatcaaaattttgttttgaacagatttggttaaaagaggttgaatgcactgagattatttcttctagttgacagtttgataatgaggacgatcctttaatttctcttataatgtgtttggatcgttgtgctaacaatttacattagtgggacattaagaaatttgggtgtaacgccctaaataattaggcacgctacccaagttacttacaaaaccctaatcccctaaacgggattgctaatcaaaaaggtgcagaatttaaacttt

SEQ ID NO: 72049 - DNA, 1378 bp, Cannabis sativa
tctcaatatgcttggtgtgttcatgaaaaattaagttgtgagaaatctaaatggcactttgatcgtcatagtacacacgagtgggacaagagtgaatgacactcatatctgcaagtaaccatctcagccaaacaatatttttagtagtagacgccatgacacaatactcaacttctgtagaggattgagaaacaacagattatttcttgctcttccaagaaataagagaatctcccaaaaagatagagaaactagtgacgaattttcgctggtgggatcacgaccatgatcaacatcataggaagctcgcaactctagagaagaggtagaaggtagtagtaggctctgaaagatggtaccccgacaacatcgtagaatgcaaagaacaatagcccaatgaacaatagttggagaagtaacaaactaactaataatatgaacaacatatgcaatgtctagatgagtaataatgagataaaccaaaatgccaacaatggtgtagtgtcctactcaaaggaacgctacatttcctgattacaatttactaatctcgttaatcggagtctataagctaagtaatttaaaataaataataaacttaattaaataaataacttgaaattatcaacatattttactttaaaccgaaagaatttaaagttacatatatgggataccgtaaaattattttaaaaatattacaagttattcttgtacaagcccaacctaaaccgacaaaatagaatttctacacaattccctgctggacccaacccttgtgttccagcttggccagaatatgtacaagtcatcctcaaagccccaggggagttggatgacccgacactgctttacctttgcctgcacaagtacttgtgagtcaaggcccaacaagagagaaaataatacagtatgataattataataataattacacttcatatagtatgccaccgcgtataaattgtgccactgcactttatatcacattattcgatacaataatgttagtataattaatgtctatgtagcatagatctacgtgttgcactcacaagactcttttacatttaaggccttaccagggtttgtatcagttatagtcaccgagtttaacttgattattccttacacacataattctactcacatattcaattaacaaattattgcatactaataacaatacacacttagggtaataaccctaggtcacgacttcacaataataagtgaatatcatataattgtgccatcacactatattccatgtgcttagttttctatcttacttaatttccaatgtatgtggaaaaatcccaatctactggtgattctgaccaagcatcggtaatcctagttgttggaaattatttta

SEQ ID NO: 72050 - DNA, 1333 bp, Cannabis sativa
atttgagttacaactttcaagacaggcattaaataccttagacatcgaagaaacatctgaacgattcacgtcggatcaaagatgacaactagacacgcgtcacctatccaaacagcttcttggtcgaataagtccacgtgcaaccgagaagatcccacgctaacttgaggtaaaaatgttatttaccgaataagtccacgtgcaaccaagaagaacccacgctaacttggggtaaaaatattatctaaatttcggtcctatggcgtggcatccatctaggtgacacatgtaatatatttcaaaacctaggcaaataattttactcttagtaagttgtacaggtggttatgatgttcgaagtcacacagagaaggtgggatgtccgaacagatcattgatagacatccgaccagcttccatgacacagatttctcacttacactgaccaggggatgcaaggtagtaattttttagatatatcttgcatattccaagcttgcaactcacgacacaatccctatgggacaaatttatgtcttcaaagaataaaggcaatcaggctaagtttcacattttcttcattgtaattatggaaacaaattagtttctcattttatttcttattaatttagggaaactaatttcatgtaattaatctctataaatagtggtctcatctcactattcagggacacgaaagtattcacacagagaacactcaagagagaaaccttgattcaagaataaattactcagagattattgtaagaactttcgagaaagaataaatcattcttgttcttacaagtcaatataacaaaaagaggagtgggctattaccagctataaggggtcgaacctctataaaatcttgtgttttctttattttatattatttactttctgttatttaattattatcaattgcttcaatttaatccactgttgttggctaaaagcgaggtcaacaatggaggtcttagaaaatagaattcaaggatttttggaagtttgagaatccttggagaaagatcaacataggaggagaagaagaaatttctcgaaaaaaaagaaaaatgacgccgaaaagggaaaaaagaaaaaaatctaccttggagatgaagaacacttaaaggcttgatgaagataaaattataaggagcttttctaaaggcttgggtgtgggcaatttaaagtggaagtgttaaatattgaatggaaattctcttatttataagtaagttcattctactaattctatagctattgagagtcttttaaatttaaaacttcaaggaagaggaaaatgataagtaaaggtggcgtttggtaa

SEQ ID NO: 72051 - DNA, 1272 bp, Cannabis sativa
cgataaagacagcgctcttgggaggcaaccaagtgttttatttactatatttttgagacttttattattgttttagtttgttatttatttgtttttagcattttaaattttttgtaaattttcagacgttatttttagttgaactatgcaaatcgtgaaaaattggaaagaaaaataatttttcaggccataaaagccagtgcccgcgaccatcaggtttcatggtcgtgaccctttttcatggttgcgactatggtcgcgacttgggggttctacagaacccaggaaaattttgaggtttagtagtcgcgagaacccaggaaaattttgaggttcagtagtcgcgacccttttccatggtcgtgaccatggtcgcgactaaagggcttaccaaaagccctgaaatttttttcatgaagctagagggttggtcgcgaccagcttacgggctgagacctaaaattgcctttaaaagccccattttgtctcaaatatcccaaaccctaaaatcattttttttccacctgagttttccttcttctcagccaaaaaccaaatatttttcaccattcatcaaatttcttcacccattcatcaattcttccatccaaatcatcttaaaacacaatttctctcatcaatcctccatttccttcaaaaatcacaccaaaaaccaccacttctcaccaaaatccaagaatacacttctcatcatcttcaacctcaatcttttcaaggagattcaacaatggaggtggattagcggcattctcaatcaggaagtatcattcttttcattattgaagtgattgattgaatttccacaagattgactggaatatttaagaatttttggattgattggaatatttgaggatttttggattaattggaatattatcatttgagtattgtggattgtggattgttattggcattactgtgttattttggtgaaatttgaattttccgaaatcaagaaatattaggggaggtgctgtccaatttttccgagaactttttttttgaaaaaatggtgtttgtgttcatactggccccccaaaagaacaagggttagtgaagagggtggttcatcatccaacccacaaccttcttttgatagaactcggtttgtgagtgaagtggctcaacaacgcttccttaggcttaagagtaggccttatattgaagatcaggggattgagttccctgatgctccattgagacgtcaacgtcggtttgaaacaacctgaggtcaaattgaaaggatga

SEQ ID NO: 72052 - DNA, 1192 bp, Cannabis sativa
agtagtagttgaaaacttctcaagtagtgttgtctaacgatacaaacaatcagttgctttgaatgatttatccttcttttctagttatttgaacggtatccgatacaaattacaacacttgagaaaattatccaagaaaagtgaacaagaaacaacatataacattacacattcaacctaagttctcatctcttctcttctctctgttaatgccaaaaaaagggaaaacccaataaaacagaacagttaataagaaaactaaaagagagaaagaaaaagaatagtgaagcgttcgagcaaaaaaacaaaaaaacaaaaacactgctgattctggtatatagtggagcagtactataaagagaccaaaaaccctcaagttgtgcaaaaataaaaacacaagcagtttttaaattaagaaatttctataaagaatgggagtagatgaaacaaccaactgaattaacaattccagtaagctaggagaatagaaaaagttctgaattcagtaaaataaaaagtaaaatccaaaaagaaagacaattagtagataataataataaagagaagaaatagagagaattaggatttagagttggttggggataaattaataatacctgcatacaggtctcatcccagtcgtggccaaatcggatgatgacgagacgctcttcctcggcgaggatggcctgatctacggcccatccagagtgcaaatgtggaagcaagtacgacatctctctctctcagtattaaactattaattaacaactgagaccaattagtttctggaaaattctatgttggggtgcacccgggtctacgtacggataagattgggaaatttgacgcatattgttggttaaaattaataaccataggtttaggctaattttgatgtataccctaatatcaacatttgctagtttctctctatttttcttttgctcctctctctctctctctctttttcctatcacaggttctcactgaaatacccaccgagactccactaaagaatccaagactgtgaccatcgccaccatccgaccgagacctcgccaatcccttcctcaactgcgaatggagagaccactgccattaacagagaccaaaaacacagaccaagaatgaagagaacacgaacaaagacattctctgtaattttgtggtttttttttttttttttcat

SEQ ID NO: 72053 - DNA, 965 bp, Cannabis sativa
ttggtaatgttgttgttttacttaattgcattacaattgtaataataatatttttatagagtattaaatttatataaattgtgatatttattttttatatatttttatgttaatacattattgaaaattaggtgtgtaattagatttctaattaaaaaatcgatccaatttaattgaattagattagattttgaggtctaattaaattagataaaatgatgattttctaaatcaaattataaattaaattggatcagataataagaaaatatttgattgaattagatgctcagccctaattgctgctaaaggaaaacaaatgctacaaacccaaaacttacctcaccatagccaatttagacttagagcttaccactgctaatcctaagtggacaattaatgctatgaagttgaaaacaatgctcttaaaagtaacaatatttggattctagttcctaaaccacttgatgttcaaatcataagcaacaaatagatattcagaatcaaatataatgcagatgacaccccgatctgtggcaaaagattttcaatagactcctaacatagaattctttgagacatacaactctattgtcaagccttacaccatcaaggtcattttcattctagcagtcatttacaattgaaaaattcaacaaattaacataaacaataatttttaaaatggagagcattaagaagaatcataaggacttgttgtatgttcatttcactttattttttttcaatttttatctctttatttttatgttaaatatgtgctagaaacactcaaaaaaaaaatatatatatattttaatgaaatataatataaaaatattattaattaatggatataaaaaagattattcctcatattatccccaatcttccaatcatgtttacaggctcaataagacaattcatggtctcaaagaatatcctaaagcttggtatgacaagtt

SEQ ID NO: 72054 - DNA, 1051 bp, Cannabis sativa
cactgtgaagaccaactggtaagtagtaattatatgttgataattttgtttgaacaacttcattttcataacagagcttagaagtttgtagcttctggtttgttgcagtagtgtaggaaaagttcgttcttctctgaacaaaatagtggtattttcggcagtcgtaccaaatatttgttaatagttgcatttaaatgccaattcaatttttctgacgacaataatatcgaatatttgcaaaatattaacactgtaccgattcataagagaaggtgcaagttcctgtccccccaatataaaaagaaggctaatttgctccctaaatttgtgtacaaaatcgtgccctcaaacttttcaggccattaagaatttctcccgaactacctagattattatatttaagaacttttctccaatttcattcaatttgacaatcagatgtctgacgtggatgaaagttcaggagacacaatttgttatattttaaagttcgggggcgcgatttgatacatatcaaagttcggagaacttgatttggtacatggacaatctttactttaataaaattgaatacaattgaacagaagtcgttgaattcaataatctcaaatctcaatagttcgggaaaaatttttatcgacttgagaagtttgagagcatgatttggtacatgtgaaatttcggaagtaaaaattctaattagtctaaaaaaacatggacaaattcattttttagtagaaataattctaattctttgctaatagttgcatttaattgcctatttaattttttatatttttataaattaaaatttactttatgcattttttgtttaaattggaatatttacagctataatactaaattaagtttccttaaatataaattaaatattaataagtatgtaattgaaaggtgaaatttgaccaaaattaagaatcatattgctgtcaataataataagttgggtattttttttatttatttatttaagcgtttatatattacacaatgcataacttggtacttgaactcaggacctccaacacac

SEQ ID NO: 72055 - DNA, 1544 bp, Cannabis sativa
ctaaccaaatcccaaagggcttagctgaccccaacattgatcagttttaggcagtactcaaattttctttttggaacaactttggttaagatgtctaaggggttatctatggtaccaatcttagaaatactgacaactcctttctccacaatccctcttattaaacgaagctgtatatcaatatgctttgtccttttatggtgcatttggtttttctcagttgaatagaaccttggttatcattgtgatcaccttctattcaatcctgagttcttcaatcaaaccaatcatctaaagagcttcttttatggcttatgtaagggccatatattcaaattctattgtagacaaagcaactgctttctgtaagtttgctttctagttaacagcagtcccaaacatgataaaaccaattagggattttctagtatcaatacaaccaacacagtcaaaattcacatgaccaatgactatgtcttgatctatctgctccttgcatcttccaaacactagtcttttgtgttagttttgtggtactaaatcagatacgtggcgaaagaatttatttagatttttattgtaccacatctaaggatcttcatatatacatatattaaatctaaataaaaaaaaaaatagaaatatttagttgttgaagtgaatcagggcatccttgagtctttttgtaagttatatccttaaaatagtgacatcaaactcacacattaatcttctagatttaccaccgcacacaaaaattagtgtgggctaatagaatataacttttctttttataatgtgttcttgagtttatctcaacacatgagcaataacttttctttttataagtgagtaatgattttattaaccttttcaagttttttaaattgtacgtatgtgtagatttagaattatatcaatatattaatttaaactaataaactaataataaatatttaattaactaagatttttattattttaaatatttcaataaatatctgtaaccgattctattatagatatttattttgaattagatattaaggtttgaatttaatatctaataactcattgagagaatatctcaactacttgagagaatatctcaactactataaatatttgtaactactttttaaatttaaataaatatttatcttttgaattcattaatcaatctaaaaataaattcagtgggacccatcttatctccataggcgcttatcactgtgtcttaacacagtgactgacgccaccattatcttaacctgaaaatggtgatatcttttcctaagaaacactttttctttaccataatttatttaaacaataaatttaaaaacaaattattcattacaaaataaataattactattttgggaatttaaaatagattttttgaacatcattatatagcctttatccatctcattgacaatgttgcaaggtagcgatccgaggatatggacctataatactaagctccaaaaaattacattatttattgaatctcatctaccaaataattttatttattaatt

SEQ ID NO: 72056 - DNA, 1390 bp, Cannabis sativa
ttagtcaaaaataaaaggttgtaaaatattatagattttaaaataatcataaacaataatgatgaaaaattaataatttatacttcaaccaatttctctataatgtaaaagaatgccatataaacacccaaaacacaatgacaataatattttctgtgaaattacctttctttcttttatatgtattatataaaaaacttcatatcagtcaatttaagtagagaatgttgttggtacattcatgatttggtttttctaggcacgttgagggtttgaaattttttgttgagaaaattctcgatggagatatggtttttggtattttagtctttttttccttttaaaaaaaaattatatattaagccgttgtctttttcaaatcacatatactcgagtactctatattaaaacaaattaataatatagcaaatatgaattataatcacaatggtatctacaatcatataaatgaatatctctaacaaaatttaattatataatagatataaaaaaaaaaataaactatataaatgtacataacttacataaattggatgaaaaaataaaacttatggttgatgaaggtgaattcatcaattaaagcaaggcttggtataattaagtggtagagttttttcttcttggaaagtggaagtatatataaattagttttttgataaataaatgcttcacttttatgttatcaattattacatgaaatttttaaaagtaaatattatagttatatatgttgtttaaaaaataagaaaaaagaaaattgaaaaaataaatataaagaaattttaaactaaaataaattaaaaaatatgaaagaattaaaaagtgaataaatagaaaaaaaaaataaagtaattttatcaaataaaaaataaagaaaatgaaagaattaaaaagacatcatataaagctaaataaaacaattttagagtgagacattatttcctcatatctctatactttatatttatagatatttataatatgtattatatagatatctctacttcctcataatatatttaatacatacatatataaaaaagacatagaatattattaaatttgtatatctctggatacattaatatgtatgcatgggattattataatcactacatacctggtcataattaatatgatatatatatataaatcataattattaattttggataaaatttcaaaattcatagatatatattaaaatatgaaaatcagatttttcatttttaattatttgcagattattacatttgtaattaatatgtctgctatatatatagatcgactttgaatatttataggtatatatggaaaaagatatcaagatgtgtaaatataaatatataatttactcaaatgttgaaat

SEQ ID NO: 72057 - DNA, 595 bp, Cannabis sativa
tgttaaagaaaagaattatctgaaagtgtttctcattaacattcaataagagaggagtacagtatatatagatacagacattaatagaattgactaatctaccctctaactataatagacataactaccataacagccacagcagtcataaccaacataaccgatatacaagggacataacaataaacagctagaatataggaaacagagtatcagtgtgatcctatattcttaacaatcttatcattatatcaattttgaatattaggctaaaataatttgagggtcacaaaaaactaaaacacgccaccaccatttatacaattttgtcccttgtccaccccctattgccacttctggccaccacttaaggtatatatgtatatattatattttatatgttattaatatatataggacaattttactatattttctctaaaaataaagacttcatgggtgagggcgggcattgatgatcttatgctaaagcaacgtatcacttaaggagtttgggatttggaacgatcagatacactagattatctcctacccctcctttaataatatctttgacattttatttattcatttt

SEQ ID NO: 72058 - DNA, 1634 bp, Cannabis sativa
  modified_base (1546)..(1560): a, c, t, g, unknown or other
attttatattactaactttttttttttttttcgaaatggacgccctgagcgacgggggcctaaggcagccgctttctttatctcacctcaggaccgaccctctaccaatgcactctctatttgtttcgacatttagggaaaaaaaattagtttaatttttttcatgatcgtctacattattatttaagacatcttgtaaattttgaaaaattttgaaaattttattacgttgaaaatagggtttaaatagtctattttacacgtgtacaataaattgtttaaattttatttttagcatattaatttttttaaaatctcttaaaattttatacaatatcttaaataattacacgactataaaaaaaaattaaatttaaaaaattatccatcataaaatatccaacaatatatttataatttatgtatgcagcattatatatgcatgtgcaatatgactataccaatgtattttcttttggattttatgatcaaaactttgtattttttatcttttataatttctgttttttcgtcgtgtactaataatataattgatggtcaattcttcacaagtttcattattgaagtttttttgtattgttttgcttttattttctagctacatatatacaaagaaacaagtaatcatttctttacaatgataatgatatttttttatcttaaagtgtctgtttcaaatttctattttggaaaatatattttttttgattgttaaatattctaaataaatagtctttaaaattaatttattttaattggtaatagtcctaactttaaaggtaatataaacttaagatttttataagttcgtcgatcctcattttaacaaatccgttacttgcttccaaaaataccaggcatgtgttaatattaaattgcgacataaatttttttaaaaaatcaatttggtgcatataaagtctccaagctcaaaaaactatcatagtccccaaattcgaaattcttattagtccataagtactgaatttatctgttcaatttgttgctcccaaaaatatcacaagttgatatttaaaattataaacttatatatcttttacttagttggttttcaaggattttgggatgagtttttttgaaatttatgccgtaatttttcttaattgaaatctatccaaacaaaagaaaaattacaaagaaaaaaaacattgattaatatacatttttaaatatctctatagagatcgttgctcattcgagaatattaaaaggttatttagcataataatataaaatgttacatatattttaatttaatagctattataaaaataaaaataaattactaaactaatagtaaaatactatctcatagtttttgacactaggtatgtgcttagaactcacctaaaaaaaaaaaatctcccttttaaaattacgcattattttttgttgaatttgaaaaatatcacattttacttaaaaaagggtctccaaaaatattttttttatggcttactaaattttaggatcgaccctggtcttataattaattagtaatttnnnnnnnnnnnnnnnaaagtaaaataagtaggacccgatattgagctacaccaatagcgatacatgtcacaagagtgttaagcatcata

SEQ ID NO: 72059 - DNA, 692 bp, Cannabis sativa
ataccaaaagaattataataatattattcaaattatgtacggacaccgatgaaaaagtataattttcttaagaaaacaaaagtatatatatataatatattgtatatatacttactgtctggatgattgtttgagactgaaatgaccaaagttgggaagagcagaaatgcaaacacctcaactgctaatttatccattagctttgtcaaaaaaattcttcttctttagagcagcattatgtgtagtgattaatattccttattctgtttatgattataatctaattgaattatgtatactatgtggaagaaaagtctttctaattacttaagagctaaattatttccacaaacgatccaatcaagaccttgggtcatattcaatgtgtaaaacgttgctatcttattaataacacagaatttgcaagtggtgttactgttaatataatatttatgatttttatttattttttattttttttaacaaataatgaaaataatgtgttttatatatacactctatttaaaagtgatattactgttaatatatagatgataataatgaatctttattttttttttaaacaaatgataataatttttatttatatacaagtaaatgtgtaatatctattctatataaagtgtgcttatataatagaatttttggtttttgagaaattcatgggtgac

SEQ ID NO: 72060 - DNA, 979 bp, Cannabis sativa
atcaaggataattaaatcaccatccagatcatcattgatatccccattcatgctcatttctcttgcctcataatggatagccgttccattggaattaatggaaaatttaccattatttctgcctaactctactccttgattgcctccatcaaatcccacagatcgtggggtatcaatcttcctgccttgattgaagccgccattaatgccccctgatgttgagcccttccccgacggttcaccctgagcacagtcaccggaatcttctcctctagccatgaaactttgtcgaagccacttcgcaccaatcgtgtgttgtctccttcgtggcatggcttttaactccaagctatacggtttcttgatcaaatgtggtggagtatcaaaaagttttggacagaatttttcagagtgtccaagaatgccacatatgaagcagaacgttggaaggtcttcgtatttgaaattggtgtagcacatttctcctcctttcttctcaagcttcattcttcgcttcaaagggagatccactcgaacagaaactcggacccggagatagtcgcgccacattcccagaaaattatttttatctgcctctacgaacgtaccaacatagttaccaatatccttaaccacctttgcagacatgaaaccagttgacataccatgtaattgtatccaaaaatccagagtgtttggtaccacagatcttggtatttcaccctccttgagccttgaaaaaattagtggaactctgtcaaaagtccaagggctgccctccaccactctttcaatgccgatcgtatgatagaattgaaatagatacaaattctcatctaattcctttacaaacatacctctcccaggacgccacaacgaagccattttgtgttgcatagccatgaaatccaaagaacgttcagtaagaaatctacccactaagcaccaacgatcatcgaactccgtcaaatctttgtca

SEQ ID NO: 72061 - DNA, 1395 bp, Cannabis sativa
  modified_base (27)..(32): a, c, t, g, unknown or other
gttaaaccaagaaatgccgttagatannnnnntttaatatataaagatatatcttatcatatcatataaatggttattaaaaggtattttgttgttctttaatcaacagattgttgtgtatttgaacaaaattttcaaatttaaaagttaagtttaactaaattatacatcaatatatatggaaagcacaaaagggaggtaggtgtcatcttatagttttttattattttgtatttgtttgaaaatcaaagtacacgtaatctcacattatataaaaacttcatataggttataaataatattcttactacattaattatttttctttgtttaaaaagtattatcttttatggataattgattaatatcttacttaataaattttttttattttttatttttcatctaataaatatttatatattttttaagtagttatttatcgtgtactaattttttttttaataataatattttttatatatttataaaaataattttatttaaggaactttatttttactattctatatttttatatttttttattttcatctaataaatatttatatatttttacaattatttatttatcttttaataattacctgttttaataattttatcctaaattttatccacctgacgtgacatgtccacgtaagcaaagatagagtacatgtgccatgtggaatacaaccttgcttgtagcaagacaaggtcttcgtacaagatatggcaaaactttcaagcaacaaccgaaaggagtgaagcgagccatcaaggagttgaacaaacatgtcttgtcggccaaactcagcttgtatggcaagccaagatctggacacaagctggccggccaaaaggtgacttttagactaagggagctttcgttcaaccaagaaaacctgacctctataaggaaacagtgtacaaagttgtcctccacttgccaaaggctggcctccatatctaaaagctggcctcctcttggtagagttatagtgacatgcaagatcttggaaggcacatgacctgctaggtcctggcaggagcatgactgaccagacctcgacctacacaacttgcatggtcggtcagaccatatcctgcagtgcatggctgaccagacctcccctgtagatgtatgggcagccaggattgacctggcacgactctatgtacagactgatacatggacaacaactaccgttgaattgggcccttaacagcccagccaattgcctactttctaggggcaatttagtcttttatatttaatcaatttaatacgtaaatatctattgattttagttgtaaattagggtttaggctttcatatataaaggccttaacactaacctaaaaaaggctaagtctaattctagcctccaa

SEQ ID NO: 72062 - DNA, 1004 bp, Cannabis sativa
gcggatggtatagccaagaatgctagaatttctagtgctcatgatgttctgtatcaaggggagggagtaccccctgttattcccgtccttttttctaattaatgaactttggtgttctttcaaaaaaaaaaaattgcatttttatgaataagtacatagcaattacatggaagatgaagttatcactatctaacatttctcttgatagtgatataaaaaatgagaaataaatgagaaatgataagcactgtcatatcgttagaattttaatatatttagttctatatattttaattaattttaaaaatattaaagtactatagtttaatctaaaagtaaataataagatagaaaattgaatttttttacttaattaaaaaatatatatttttatattaatatcaaaaatgtatttatatacaaaatattaaagttaatttttttttttcaagtcaatagaataactccagcaaaactaagagatttttttttattaaataaaaaaattaagcttaaaaattcaaattttcttaatattgcccattattttttaatacaagtttgtttaaattagcaaaataaattattagagtttactaaaatattattaattatttcttaggtgaaatggaaacttacgttttttcttcttaagaaatacaattgatgttttccagaatgtataaagttttactttttaaaatataaagtttggacaattgaatattacaaatttaattaatgatcttgagcttaattaattaaattttaggttaatgatcttgagatgcatgacgtagacatataatatattagattattaagggctcgtttggaagccgtattatgtcgtattgtattgtattgaattatattttatgtaatattttatacgtaaaattatatgtagtattaatttttatagacatctaaatagataatattggataatacttaggtagagtcactgttagaaataatagagagattacaatggaagaata

SEQ ID NO: 72063 - DNA, 956 bp, Cannabis sativa
tcagtcgatggtgtctagatggtttttgggttcacgacggtggaggtagcccatcaaggctatgttgagcaaaaatgagagagacgagcaagagagagggtcggggttttggggatttagggttctcgaactagagggaaacagatctgtgattcgtttggggtaagggtggtcgaatatggtggctccattctcacgagatggtggttaggtcatgtgtgttgggttgtcgtcggagcagcgagatcgaaaaagaagggagataggagcggaggatgggaggtgttgcttttcacacagagtagggaggccaagagggatagaggaaggtgtttgttgtaaccagatctaggtttgggatgttgggtttgttagggaaggaggacgaagaaagagaagaagaaaaataaaataaaataaaaaaataagaagaagaagaaaaagaagaaaatatttttttttatttcaaattacttttaaaatttttaattaatttttataataaaaaactagttaaaattgtgtggacaaatgaaaacatgacacatgtacaattgtgtacacatagacttaccaacttggcatttaactttttgaaacttaacagaagggtaaatttgctaacgatttactaattttaaaggttttattactaaaatttaagtttgaggggttcagtgttagaaagtgtgtagtttgagtagtttaaccgtcaatatcttttttttatatatatatataagagtattgttattttagcatctaaagagcatctacaaccatactctctaaacacactctttatctaaaataagaagtgagagttgaaaaaattagttacaaccatacaaaaaatgactctctataatagagaatggatagagagctctctaattatttttgttaaacttttgcaacagtattttaatcaaaattactattactttttattattt

SEQ ID NO: 72064 - DNA, 1363 bp, Cannabis sativa
atcggttcggttcaattggattggattggatgatgcccacccctatttatatatactgttatttagaaaaatgatgtagcatgacaagttggcatcaacatgatatcaacacgtctgattctgggcataaacgggttagttttgtgcttaaagcctacttagcccataggacaaaaaaaaatctctttttaaaattatacatatttttttattaattttagagtctaaaaatatttttttttatgacccactaaatttcaaaaccgaccatcatactggtcgacctattatgaataattaccttgctcatgttgcttgaagttaatatgtactatatagacaaaatattaaataataataataataaaaaagaaatagttttcagtgtagtagtagaaagtgttgttgtaaattttagaaaatttgtattctagtcgtcatattttaagaaataacatttttgaattatatgataatgcaattatcaaattttatgattggtttatcataatatttattaatttatttattaaaaaaattgaattattaaatttttataattaatttaatttgaaccaaaatttagagtgcaagatcaacaatgctacattaattagttaaaaaaaattgcatgaaaccgaaagatcaatttgtttattttatttctctccacaaatattataagagactcaatgcatgaaagctacaaaatccactaattaagatcattaatggctctgcatgcaattttgatatgagaaaagcaataccatatacataaaataatgcaatgaatttataaaatattatttcaaaatacattttatatatatatacctctccacaagctcaatctatttaacaatgttttaatttttatttgagaaatattataagggtgcatatataagtataataataatattacacaatttagatcaatgtcatcataagattagtggtactcaactaccaacctttttcttttcttcatatattattgtaactagactatcctcacttggcaccacttgaatcaccatgacaaagacatataaatatatatataatatatacataaatatgtatgttatacatgtacacaatcattcaaatagtggatttcttttttttttttgaaaacattaaaatagtggaattgattttacaggagtattacattcactatcgttagtaaggatgcacaccggacaaaaaaattagtggggaatgctccttctatttttattcccgttaagaattttaatctctattttcgcttattcctcatcgagaatgaagcagagaatcccttaatgggagcagaaacaggacgggaaatctcctataaaaaaataaaatt

SEQ ID NO: 72065 - DNA, 1139 bp, Cannabis sativa
ttttaagagtacaactgctgaattgtttttttttttttttgacatgcatgttacttaattatgaccatttactgtagaaatggatgacattttttttttatttggaataatttgcattttctattttacaccatcactaatggttgcattattttgttatatatttttttacaatttagtgtaaaatttagaatatttttatttttacactttaaagtatattttttacagaaattcacgtagcaatccacgtagcaacactaatagagtaacttaaattgtaactaaaatttacataacaacccacataaaaactagcgtagcaactaccggagcaaccaaaccataaatttaaaaacaaaaattaaaaatgtatataagataattttcttaaaatttattacttttagtataacaaatctaattattcaacactaaatattacatcaaaatataacacccaataaatatattattgcttaaaaattttacattttctattatttacattcatagtcatttataattaatttataatataattttacatattgtcaacaaataattaatgattatattttaaaacaaaataaaaaaagagttgggatgaaaaaaaaaagttataaattaatttggtgtagattctaaatctaacactattaattgtaagaaatttagtacacattactttggtgcataattttttggcgcaaggattaaaattacacacgattaacgatgtagcaatctataatcggtggtagaaccttctcgaaccagaataacacatcgtctaaccaaaaggtacgctttgccaaaccatgagctgtagaattcttatcacgagtcacatgagacaaaactactcctatcctcaaatagcatcctaattcattaaagaacatctttcctttattaatagttgctaccaaaaataacgaatctaaaaaaatatttctaattgagattctgcacaaataagctcaattgagtctaactaatggtgccgaagttttaaaaaattgtaatacctaaatattactttaaaacaaaacaacatcgggaaacacaaaaataacaagatataagcgtaaaataagagtaaatagtgtgacgatttcatgacactacaaaaaatt

SEQ ID NO: 72066 - DNA, 998 bp, Cannabis sativa
  modified_base (959)..(972): a, c, t, g, unknown or other
gtaaattatatatatgttagatttcattttgttcataataaaatgtaaagggtaaatattattttgaaccttatactttataaaaattatagattggattttctttttgtaaaatgataaattggactttgtatttctaaaataatactaaatagtactcttaagtaattttctacacctgtttatgttaaaaattatcttcaagttagttatattttaaaaaaaaattatcagaaattaaactcagggtcctatttgcactatttaaaaaatacaagatcttttttgtcatttacaaaatagagagtccaatcgataatttttacaaaatacatgatccaaaataatatttatgataaaatgtattggtaaatatcacttaaatctctctctatatttttgttcattaatttgtaaacaatatgaatgatgcattgttatgtgtctttccaaattctttgatgtttatctaaaataattatgttttaatttattgctttataataagtataaatactaacttgtatcttcaatccatcatcaccaatccatataaagtccggaaccctagcaagatgttttttgaaatagtctccatttggatcttcaacccaacaagccagcatacataaaacctgttttaaattagaagtgtgagtaactttataaagtatacgagaattcttaggtattgtgagaaataataactcaatttttttatatgatagtatacagttgtacactatacttgtagtatttggctaatattctgaaaatagattgttacatgtatgtttaatatgttcttttataagaatggaaaatatactatttgaactctaattttaacatttattcacattattgtattgtaaatctcttaaaatactaaaaacagttgcatggtagtgacatttttatagcatataagcagggacagacccattaagattgatgtnnnnnnnnnnnnnnccccactaataaaaatattgcctttt

SEQ ID NO: 72067 - DNA, 680 bp, Cannabis sativa
acatcattgttgaaaattttgtcagttaccatgaaaatcattgacaatgatattgaacatagaatccacagacaacagcctatgcctattctgatgaaaaaccacattcttgaaatgccatattatgaagacaagacgcgtcaaaaatcacaaaattcttacctcactacttcgatatctgtattatctcctaaagaaagaggtttgagaatccacaccagaatatacattcagagctcaaattgaaggttcaataatttggacataaaccactacctcttagaagatcatggtatagcatttatatgctatgatattggaccggccgaagctcaatttagacctctatattgtaattttatggaaaatttaagtcaataaaatattcatatacaattaagtatctatattaatctggttgttactcattgcgtacttatgagatgaactaatctttacagataaaaaaatctttattaattttatttttttataaaaaaaaaaattaatactctaaagagtaaattaatatgttgataatatgtaaatatttatttttacaataaatggttagaggagtgataccgtcaacctcctgttataatctcttagtcaacctccacgcccgaaaatacatgtcgaaatatttttttcaaatttttttcacgggagtgttcgtt

SEQ ID NO: 72068 - DNA, 1103 bp, Cannabis sativa
  modified_base (34)..(34): a, c, t, g, unknown or other
atatatttgaattatattttatttgataattatntataattattaaattaaaattggtttttaaataattagatgagattagtagtaaaatttaaaaaaaagacttgttgtttcattcagttgaaattaagtggaaattagtagtaaaatcagccatgagagtgatttaagcccaattggcttttgattttaagcccatttcatctaacctaaccctactgtgaaggctaaatatataaaaagagatgagagctttgtcataagatgattctaagtgatacgaccctagaaagaaaagctctctagcttctttttcaatttcgatattctatagtttttttctcctcctaaatttattccattattaaattgagtgcttgcccacacaattcaaaggagttttttaaactttgtggaagactatgtagaagaaggtatttatcaggttaaagaaagctatccaggttcagtacttggtgatactctgctactgaaaagacttgagggttagagtaatgaatagaattagtcattatattcctctgccatttttgtgagtaatcttaaactctaagttgtttacttatcgttttaagtatttcatattttaaaatgttagattatattgttcataatcaacataaatgttagtaaattaagattctggtaaaataagttccaaacactagtatcaaagccatggtaattatatacttttatgagaaatatgtattaaaatgacttgattgctttttcatgtgatttggatggttcatgttgtgtttatgtgagtttgataaattttatgtgaaattacatgtaattctatgaaaaataattttattttacatattttgtgattaaaattattttagaattaaatttggttgaattttaagcatgtacggattttatagatctaaaattaggccaaaattgacccaaaaacacgaagttaggcattgatgggcgtggaatctcgaacctggccgagaaaagtcggtctaagaggcccttctgtgcgcacatctcattccaattgcctcgtcctagggtgcatcatccctggtgcaagcccctgtccgcgcgcgcccaccctacca

SEQ ID NO: 72069 - DNA, 603 bp, Cannabis sativa
ggatgtggtgcatggggatattctttgggtttgtctataggttctgaatgaagttataccgctacatcaagtgcatgagatgctcattactcttatacccaagattgacaaatcttgcaaagtggaacaatatagacctccgacctcatgtaatgtggtctagaaaattatgtccaaatgcctggcaaataggctttggttgagtttaaaggaggtgattttgaagacctaaagtgctttcattaaggggagactgatatatgataatgcgattattggatttgaagggatgttctgtatggggaagaacaggtttgggaataggaaaaagatggctcttaaattggacatgtctaaggcttatgatagggtagaatggggatttgtagaaatggtgatgcataagttggggtatgatgagagatagatttagaagattatgaactgtatcaagtccgtgtctttctactttttgattaatagtgaggtgaagggaagggtttctcctagtagagggctgagacaaggcgacccactatctccttttctctttcttttatgtggggaggcgctctcttctatgactagagatgtgaaggaaaa

SEQ ID NO: 72070 - DNA, 2474 bp, Cannabis sativa
aaaaacttagtacaattgaagatataaattttatataaaataaaaattattaaaatagagtgtctttagaaatttttggagtgtagataaaatttctcttattttaattttttaacttttttcattaactaataaagtaaatgactaatatacccacctaaatacaacataaacactcaaccccaatccccacctttaagaccatttttcttcttctcttcttcatttcttcatctctccttctcttctttattttttcacctcaaccaataagcttaataataagctcaaccattatattttcttctcttcacctcaccatttcttcttaagatttttttccataaacctatctccatattttctcattaaatctgtcatctactccctaaaaatccctaaaaataaaatcttaatttgtagtcaatccaatctccataaataaaactaagatattcttttactttaatcatcattctggtaagttttattatatatattctctaatttatataaatatatcatattatatatatacccacataacataatacatattcttttttttttattaacaatacatatccatattcatgagcatcattctctacttcaattagtgtaaaacaaagagaatataaattgagattttgttcattcttttttgtgttaaattgaaagctaagttttggcttggttggattttggttctctaattcatgtatttttttttcttattttatgaagaaatcccattttatttgttttgttatctaaatttaaataaatacactactatattaatatcacattattttatgaattatgaattaacagttaaaattaaagattatattgtgttttcttaggcaagagtgatatttttctcagttttgcactaattggctcttatgcatatttactgatgattttcatttttaggttatgcaattgctcagtcactcaaactcaactctaacatactatattttggtaattcaatgtcacgaaataaaataccaagtattatagatccaaaacaaccaatccaacgacagttgattttgaacgaaccaactcctcccacatgtacaacaacaactcaatcaaataatgaggtaaatgggtagaacttcaccaaatatgtttgagaaagtctgtttgatatattatatagcttgattggtgttagtagagctcaaacataaatggtcgagattataattaaaatgttagtataaatctcgactgcttttagtagagctcgaccaatgtagtctcaaaagtcttgaaatgttagtgtagagctcgaccattcatggtcgagatgtagtctctaaattctagtaatgttagtataaagctcaactgtcttcagttgagctcaacctcttgtgggtaaagcttgactattatgtttgtactcgattgatataatattttctcttattatttaaatcaatcaatggaaagtttcgaagaacaatcagaaacaaatggagaagaaaaattagaatcaagtggataagaaaaaacagaatcagatggagaataacaagctgaatctaatggagatgaacaagtaaaatctgatggagaagagcaagaagaatctgatggagaagaacaattagagccttcatcagtgtcacgagacaaaacacatctggttttttttttaaatttgttcactttatttaattattatttctcttatgttattcagatagtagaaatattatatataatttattgcaggtggaaaagatttctcgattagtgcctatattaatggaaaatgaacattttgagtgcaaaataagtataaaaagtcagacggatgagataacaaggcacattaatgatgtactaaagaatgacccgactcacttaaaattgttcaaagaatcttcgttcggtcactttcttgataattccgactactatagacattttagccaagtgatgtggctattgctcgtgtgagaagcagattgttacagagattcaaagatgtggtgtgttgtgaatgggataccaatctaattctcattgatagagtatgcattaatatgtagactgaaatactcaaagtaccttaaaaggtgggaatctcaagctgagtcaaaatcattcaaagatagacatgttcgtaaaagaccttcatgcatcaccattgacgacttaaagaacaaattaaaacaattacctattttaggagatagcgcaatgccttcacaatccatgaacatataaacgattacttgatgttccataaaattcaacgtaagtatatttataagtctattcatacatgctttcttagtcaatatttattgtaaatatatatgtattattaattttaaaattttcttataacagtggagattgtgcggtgtatgcaattaagttcactgagttcgacatggttggtcttagctttgaaagcctatcagatgatagaatgacattct

SEQ ID NO: 72071 - DNA, 702 bp, Cannabis sativa
tttaaagttttgttcaagatcacgagcctccttctgctaagctatcatattttattgaggattctggggcttgggatttaaataatcttaaaacctattttgataactacctggttgatgagattttggatgttcctatctctagattaagggataaagatgagcttatttgagccaaggagaattctagtctatttagtgtttagtcagcatatcaccttgctttatcaggaagggaccttacctcttcctcatcctttcaaacctcaaaatcctttctgtccaagatttggcattctagggtgccccctaaagttaagcattttatctggagggtggtgtctaacactattcctgtggtcgaggtgctttctcagtggcatataatttcttcttctttgtgtcccttatgtaatcttcactctaaaatggtttcacatgctttactcaattgcactagggctagaaaagcttggaaggcatcaaagtttgttagtttttacaattctcataagcattttggcattttgcattatatacagaatatattaactaatctagataacccttctattgatattttgctctgtttcttatgggctttatggaatcaggagaataatatattttttaatcgattgactatggatccttcaaaaaattttgcttggtgtaactgttttttgctaaagtatttggata

SEQ ID NO: 72072 - DNA, 821 bp, Cannabis sativa
aacaaaattttaaaaacaaaaaatctacttttatttttttgtttttaaaattgaaaaacaaaagtgttaccaaacgccaccttagtttttgttatttttataatcagattatgttggcaatcataaacaatttgttatttctagcaagtatttttatatggttattgtttttattttgtaactactttttgttttttagtcgctatattcattttaacacatgaaaacatctcaatatcaacctaattacaaccttttttttaatcaacgaaccttgcatttaaacacttttatgtgaatttttttgttatttgaatatttataatgttaatattcatttactgtattaataacatttgaacatcaacttaattacaacttgcttttaattgatcatgcaaacatttaatcatttaactgtaatatttatgtcatttgtatattaatgatcataatatccattctctctcaacaatatgtctggaaaactttcaccaaataaaaagtttcagttaaaaataacgaaaccacaaatgaaaatactatgtatatttatctaaatgtttcagtatagtttttttctagttgctgaatagttgtttgttcttttatgctgtaattcttctgcacgtttttttgttgtgccccttttgtcaacactttccacacttgttttgcttttttgtttcccaagctgccgtcattcttcttttcctcggtcttcctgatttgtttttttcttttggaggcaacactatgacgtgttcaaaaaattctggtagatcccattctctaaggtttccaactgggtatactgtttc

SEQ ID NO: 72073 - DNA, 1313 bp, Cannabis sativa
  modified_base (1137)..(1137): a, c, t, g, unknown or other
  modified_base (1245)..(1251): a, c, t, g, unknown or other
atcggatcggatggtaaaatttaacatccaatatataattagatcggatctagataggcctaaaaatattagatttgatccaatgaacacccctacttttgcttgtgtcaatccgaatagttgacaaaagtcacttttaccgacactatatattctaaaaagcactgacaaagcctgacaaaagcactcgggaatgataaatctttatacaattttttttttacctttgataattattttttagtatcattgagttaattaaaggtttggtgttttcaaaatattattagaaataatctcatattattaatgcgtagaaaaattataccatatatgtacgatgaatgagatatttctctcattgacgattggttttgagatggaaacgatgcaccttaatcttaaattctaacatggtatcagagcaattaaaagcttctacttctcaacctttaacctccattgggaccgttcgactaatgtctgctagtttttaatgttagcgtcttcaatttctcaatttggccttgtgtgattcgttgtggtctcttaaaggtcgttcattatagagaaatttacactttttattgtttttgcctattttctttcgtttttactgttatacgataatatttactttttactgccattttttatttcgtatattgtcgtgtactatattttgtataaaaaaaaattgtcctatttttgtaacatgtgacatctcaagttattatcatatccatttatattattttttaagtgttgtaaaggtgtgatttaatttgtgttgtcactttaatgtttgttttcttttttctttttaattttcttttaattaaaattgatgatgaaaaagtgatactctaaatattaaatatctgttcattttagtttaatctcacttctccattattctctcttcatgttcatcattgtaacaccctactagtttaggcgtgttaacgtgttttttttttaatttaacttaatttaattgtgcagctcgttactaatcaatgagtttattgaaaatcgtgataaattaactttatttaattatttataaatactaaaataacataaatatataaaatcgggatcccgttcataaaatatttacaaaagtttcacagngcatattgtcgcctagcgactgtaaaatatgtccagctgtcccaaagagcgtacgctccaggccaaactgtcccaacatgtacaagctgttggaattattttaccagnnnnnnnatttactaacaagtatgttgttaacatcctaaatacttctaaaacaatatgaaataaacaca

SEQ ID NO: 72074 - DNA, 1139 bp, Cannabis sativa
taaaccacacttttcataaactaaatgattagtaataataagtttgtaaaagcaaacacgtggcatccctgtgagtcagggtgttacaagaggtgtgtaaaaagtgaaaagaaagccttcgatatcaatttatactttaagaagaaattagaccttttcaaaatcgatggccgggatctcttttacaaacgcatcatttgatccaatggttggggagttgaaagaactgaaaagcatttatttgccatgatttgccttgagtccaacaaacactaaagaagcttcttttcaaattatcctactgtcaattttacctttttctgacagatgcgccccaacacgcatgtaagaaattgaccagcgcatttaatatgctgcataattgccacgttggtaagccctaacgttccatctgcccttaataaattagagctcaccaaaaagatgcgtccacaacactaatagttagcacgtgtcaaaggtcaatttcatggaagagaccacaagctctccgaattcaaagagtcccagaagcttgggggtaaatgttatccgtgtttttgagcaggagacacgtggcataattagagaagaagatttgttaaccactcaaattaacaaagatgaccattaaggttctttgtgaagatgccttgttaatctaggaggagttttacgaatacttgatggggagagccattcccagccaagtagcatcttcgagatgcggaagaaccatatttgtccccaactccaagaagtcttggaacacagtttggctgcctgatttccatataaggacttctacggactggtcacaaatcttaactactacaccaagacaaatggccacgttagcttcatattgaaattgacctacaaatatggttatacctttttataaaacaggatcaaatcttgtcccccatgccagtcatggtagtgtgtgtacgtaccttaagacatgccttttgcccaccaaattgtctagagagtaatttgtaaaggagaaacctttgaacaatacgtgtccctaatccatacggtactagttactacccctatacaccacacgatgaagaaagttctccaaggtcagacagtcatatctacaattgtatttgttgggttttgtgccc

SEQ ID NO: 72075 - DNA, 1347 bp, Cannabis sativa
cgaagcttcatccaattgcccgtctacgcaaatggagtgagcaagtcagttaaatttttggttgtggactgcccctaagcctataacgccatccttggctggccgtggatccatgcgatgaaggcagttgcatcgtcctaccatcaagtgatcaagttcccttgcaagggcgaagtaagagagattcgaggggatcggctaggggcccgcgagtgttacacctcctctttgaggagtaaaaacaagttatagcaattaatcaactcctcgaccccagaaaaagagcagtcacacgcggttgaggagttacgggaggtacctatacacctgaaggacccaacaaaaacaacctacattggcatgggactagaagagaccgggagaatcaaattatatgactgttaagggagtattttcaagtatttgcatgggaacactcaggcatgcctgggatggacccgaccataattactcacaaactaaatgtaaacccaaattacatttcagttaagcaaaagaggaggaaaatggggatagatcgaaacaaggcgataaatgacgaagtcacaaagatgctcgaaaacgataccatcgaggaagtacagtaccctacctagcttgccaacccggtagttgttcccaaaaagaatggaaagtggagagtgtgtatagatttcactgatttaaataaagcctgcctgaaagatagttttccgttaccacatatcgacatgataatcgacgctaccgcaggacacgaattgatgagcttcatggacgctttctcatgctacaaccaaataatgatgcaccctcctgaccgagataagacatcattcattaccgagaggggaacatactgttacaaggtaatgctcttcagactcaaaaatgtcggagctacgtaccagcgaatggtgaataaaatgttcgcccaacagttgggtctgactatggaagcctacatcgacaacatgttggtaaagtctaaggacggctctgaccacgttgaccaccttcgggaatgtttccagatcctccttgcccactcaatgaaactcaacccagccaagtgtgcctttgctgtcggatcaggaaagttcttaggccacctggtaacacgacgagaggtagaggtaaatccagatcaagtagaagcctttcaagcgacgatcaaaccccgaaccgtgaaggacatacagaagctaaccgaaaaaatagccgctctaagccgcttcatgtcaaagctctcaaacatgagcctaccgttctacgatctactaagaggaaatcgaaagttcaactgggatgagaaatgtcagctagccttggaggcgttgaaaagat

SEQ ID NO: 72076 - DNA, 676 bp, Cannabis sativa
aattttgctccctatactataatctctaccctaccctattgtacttctatattttttacattgttttgaatttatccaaactattataatttataactacacaaaaattttgccttctatttaaaatttgtaggatacgattatttagtagtagtaattagggctacacataaatggtgccctgcccacttgcccaacctcaaaaaaatgggttgaacaacccaacccaaccaagttatgacctaaatggcttagattcttagaatgttcatgggacaaccttattagatcaaaacgagttaagcctaaattaatccaacccaactaggccaaacaacataatgtatgtttttgtatggttattttcttgggatttttttctataatatgcaattaaggagatcaatttatattttactcttgaaaagaaaaataaacaaaaatagaaaagaaaactttttatttttaaaaatacgaagtcaaaaaaaatcatgggagcaactcctctttcttcgtgatccagtcgaaccacacccatctcaaatctccacgattttcattcaaaacccaaaaaatttagctccaacaaaatgtagatctcaaccaaaaaataatctaattctaaaaaatccaaatacaaaaggtaaaacacgaaaaaaaaaataagaacacagag

SEQ ID NO: 72077 - DNA, 709 bp, Cannabis sativa
caagccatatcgagacgtaaaaccttcaacaaaacactagttgcttcaagattaatcgtagatgctacacctttctttgagaaaaccggaagagggagagaactcggcggtggcgaagctatacataccgtcgaccctgtgtagaacagaaaagttcgtgtaggttcttgagatcggattcgagtttgaatcgtcacaggttctgggccaagcaaacccgccgactcaggattggttagtctgtagtgttccttccgaggaggactcgcgtctacagttgacttcgttgttgtcttagtcatcgtcgtaaccttttctttaaattcctcgccgcgtttcaagatcttgatttgacccgtgaagaagcttccgacgtgatgaggcttttcgaccgtggatttggtagccggaggggaggtggtgccgtcggaaagaggagggatcctttttcggcgattggcctgaggacggttgttgttgggacggttgttagggtttcgagtatagtatcccatgattcttgagaagagagagagagagagagagagagaagagagaaagataaagagagagggagagagagagagagagatgaaatatggtgtaagagaaggaaagagaaggtttatgtatttttatagggaaaaaagcttccataataatttcatacatatccctttccgtatcaaacattatattaattaattaa

SEQ ID NO: 72078 - DNA, 1215 bp, Cannabis sativa
  modified_base (926)..(928): a, c, t, g, unknown or other
taacaaccttaatagttcagggggaatttttaatggccaaaaaagttcaaggggcatgatttagtacatgtcaaagttcgaggagaaaaattgcaaattagccaattttaaaatataaccataatttcaaaatataaaataactaattttaaaattcaaacttcaaaatatcatcaatgaataataatctgttaaaaaaatattattaattttaaaaaaaattgaaatttaggtttaaatattaaaaaaaaatattttatttagatattttagggtttaaaattcaaaaaattcaaaattggtgaaaaaatcaccaaaatttcagatttctggtgcataacacctagctaccgataaggaaggttgttggcagccatctatgcgcgcacatgaggaaatctttagcctcccaagccaagaaatctcagcattggcagcatcaggtggggtgcgaatcgtgtttgaaggagggttcacgccgagcttcagacgagaaattgtccaagatccgtgcgcatcctagcaccttgtctgagtgactagtgcatgcggtgctcgacattgcgacaccatatggacccaattttcaaaacaccatattattgggaatattttaccaagatctagatttacgaacaagtatgttgattaacatcctaaatatgaatatctctaaaacaataaaattaaacacataagagttttagaaaaccttacattgattgtagtagaatataatgactccttccgctcacatctctaacccttgttcctttctgtcactaagtattatcaagatctgagcctgaatctctttctctccttcgggtttggttaccattgtcttacacactatgattaagtacttgacttgctatatgtgggcatgacactcttatactaagggttcgaatatggtgaagaannntgaaggaggtgaaatcactatagaaggaactctctcatctactagttgtgtgatagagaaaactaaatttgatttggttcaaggcatcaagtggatgagtgagagcatcatgttccttttataatgtttcaactaggacttagagctgaattatatggattaaaaaagaataaaatattgggcaaaaattatactaaggccggccatcaataggaccattctctagttacaattttgtcactttatttcaaccacttattattctttcaataataccatattttcca

SEQ ID NO: 72079 - DNA, 962 bp, Cannabis sativa
aatgcatatttcaaacccactaaccaaagctcttcttctgaactatttttcaaaggagtactgatagtctcatctcaactattttttgatttaattgctttaacactgatcagagaacatgaataaaactacagcttataaccatagaaaagaaaaacacaaacggagagacatcaaaaaattatgaaaagggaaaaattctgtgtggaaatagatgaaagctgcattaaagttagagtgccattgttccggaaccaatccacattggcagcctcaaaaccgtacctgtaagtgcagtctcaggtggtaatgaagccgagttcgaaacccaacggcctatacgcagcagcccagaaaagagattcctcctctccgatcagttagcaaaggaggttgataatctttctagggtaccggttgtgagttagtgacagaagaaagccaaagggccgaaagtggcgatggagagagaagttgaactatgagatttagaagccctaactggctttggatttcctatcatagttgggcttgtatattgggcttaaataatacaacattgggtttttataaaaatattgattttgagtaaagatttacatttatactgccacacggtaaaaattatatttttactgttggcttattttttttcttttatattgtaaacactagaaaaaacgaggcctccattgaaagggtgaaatctggaagaccaaacaaaaaagaggatggaagttggttgagaaaagaaacaacatagcaaatacaacaaaatgtagggagctagggcacaataagagaacatacaagatgaggcatcaaaaataaaaggaagcagaccaactaaaaaaaatgtgaaacaacacgaaggaaaactgaacatatattaattggagcatatgatactaaagaaaataacttacatacaaatttcattatattcctattactattaaaaa

SEQ ID NO: 72080 - DNA, 1044 bp, Cannabis sativa
tcatggcgttggaagctgagggaatgttgattataataaattgtgccatctgaattctagtggttggattttctccaacattgtatctaacataccccatgggtgtgatgtcttggccaaagagaccgtgcatcacttgattgtaagacgccaagctagtgagttggagccttatcttttcatgtgttaattttgaaaagaatattgagggaggctccattgtccaccatatatcttactgcagtcatattcccatttatgcggtaaagactagggggtcgttgtgcgagaaactgtcttgggcaggtctcctattttaagaaagagatcgtgggttctctaagctttggttgcttagagccttgttcttcgcctgccaagaagttacttttgggctcatgacggagtgtccaagcatagcactctttggctttgttggtctcgtatgcaatatggggtccaccattgtcgaccgttaagtgtcttgccatctgaggtttgggcaaagttggtggtacctgcctgtagcgtagccaaagatggtggccaaccttcggagatggaggctagccttttgtggtagaggacagcctttggaggtagaggccaaaattaggaggtgtaggctagccttctatgatggaggccagccttcggaggtggagtccaaacttcagagatggaggccagccttctacgatggaggccaaccttcggagggaaaggccaaacttctaagatggaggccagccttctgtgatggaggctagcctactggacttcctattgctgactcgccctactgggacgtttggtcatgccttgttttgggagatttgatagaagagttaagcatatacacttctcctccttcttccttggacttcatggcataaagggattttttgaatttccctctcttgccattatgttggtcagagccatcgttgttgcgcttgcctccaccattctcattatttgagaattaatagagatcgtgtgcactggtcgatatgttggacagtgtttggggcgctatgaagc

SEQ ID NO: 72081 - DNA, 1068 bp, Cannabis sativa
aaaataaaaaagtgaaagaagtggtttttattggaaattaattaataatgggtagcattatccaagtatgggaaggagaaaaggataagggagagagagaaaaaaaattaaaaaaaaaaagaaaagaaaaggagaaatctacctgactgactgattgactgactggtttgtatttgtttggaagtgacgtgtcgtcgtcctattgtacaattttgggaaagcaatacgtgacagctgtacacgcggcaaagctaccgtaatacgacaaaactctaatctttctagttctattgtggcggctctcatcatactaaaatgacatgtgaatattatttatttcactttcacacatgtatttttttgcttttaattttttttttcccacttattattattattactacacactttttttttgacaatttacttatttattacactagcaaaagtaaaattatgtttgcattccataaaattataattatattcaaacaaaatatagttacagatataactttttataaaataaccataagcattttaaaaattttcttttatttattaatttattttttaataagtatactcactactaaaagaaaaacttattgttaaaatcttttaaatacatcaataaaaaaaagctattcattaaaaacttttaaacactataatcattctttatttttcctcgatcatcttttatgaaaccacttgcttaaatctttcatatatggatgcttgtaaataattacacacagtcaataacaaaattctattttttttttaattattgtcttgaattcgagcaatctgaaacctactaatatcatattattttgaccactcaaacaaatttaataacaaaaatgaaagtagatacaaaaagaaatctcactcataggccaaaagtaagatctgggatacataggggtgttcattggattacatccgatgtctttgaacccatccgatccaatccaattatttattgaatattggattttgccatccgatccaatccaattaaattgagtcatccgttccgatccgatccaatggatatat

SEQ ID NO: 72082 - DNA, 986 bp, Cannabis sativa
  modified_base (27)..(37): a, c, t, g, unknown or other
ttatatataatttttttttctacatannnnnnnnnnnaaaattaaatattttttatacatacattttttttttctttgaatttgttattttattcattgtaatgtgttagagacataaaataattataatttattttattttgttgctagttatttttttttcatacatattacataatttaatattaaaaagtaactaatctaaaagaattgattcaatctgcacttttgtagtttggatcgaatcggatttaagttattgtgaggattgaattgaatccaaaaaatgaaatctgcattttgtgcagatcggatgcactatgagtaaaatagtactgattagattggatgaacaccccttactatttacataaaatagttgcattttaattctttattaagcttccattttcaagggagattgattgtgtaaccaaaatagtgactcaaactcaaagtacttgcttttgtttagttttacattttggatggtttttagatgattaattgtaatgaccgtcaaattagatataaattttttaataattagaatcatgataaaatatagattattatgtaatttatatgcataacttaattaaaacttgtttatagagaaatagacaagtatgtgattagtaaattatattatgggtgtgtggtatttatatgttataatatgatttatgttaaaattattgataacagtaaaattttgtgaattggcgaaaaattacaatgatatatttttagcggttagtggtatcatgctacattcataattatttgataagattttggtggtgttatgttagtaatattaaattttggtatcatctagtttatataaataataaaagaatacttctaattgagtattatccatgaataattaattttaattttaaaaatattaaacaaaagataaaattttttgtataacatataacatcataaaagaatccatatcaaaaaaaaaaaaaaaa

SEQ ID NO: 72083 - DNA, 585 bp, Cannabis sativa
ttcacatgccattttgaagggtgaacataatttctagcaaatgagtacttccccaaggaatctggaaaaggaaattgagatctttaacaagtatgctagaagaaatgtaagtgttaccctcacggcccagtaacactacctccacaaatgagcacaaacctaacttgtacacgtcttccagattctcgcagtgtaagaaagaacctctcctaaagtacttccttcttcacactttcataccagttgaaatatttgttgatcaaccggtctgaccccgagcaggaacccttctcctcttctgttggccccaatgtgaagttcaagcctgtaatgagtggagactcaactactctaaatctgaccttgttccggccaatgtaaaaccgtatttctcctgccttctcaacatcaacctttattttatgtagcattacttggtgaaaaacactgacaaaaatgtgagaggtccgaccttccaaaattcaccaaaagggcttgcattttccttgtcaatctatttatattcctcaaattgcgtcttgatcttcccaaatacaccgctacctctgttggaaatattttacc

SEQ ID NO: 72084 - DNA, 1056 bp, Cannabis sativa
agagagagagagagagttgagaaagagagagagaaatgatttttcatgtatcttccaattttaaatgaaaatgatttaaagtttgctttatctctttaataactttcagcttaaaaataaataacaaaaatcagattataattaaaatcaaatccactaacagacaaaaacctaaatgggcaaaatgacaattttcccttcccccacaaaacaacaaaaagtgcacttaggggtattttgggaaattcttaaatctcgactattcttgacattcccaatgtctaaactatttttccactatactaaaaatactaagatgtgattctaatagccaaacactgcgttccaatgttaccagacacaaaacatggaaaaatatgaattttctatatatgacataaaaatgcattctgaattcaaataaatcatcataaataattaattcaataataataaataattttcataattaaaaccctaattatctgctaatttccagattaaagctaagggatctttacagaaataaagactaaatttaaaatatagcaagaaataaataatatgtatttatatttaacagaaatataattactaatattaatatatgtgtataatgaaagacaaaattacaaatttagaaataaataattgtatatataattaataatatatactttattatataatatatataataataaataataatataatataatataataataaaataataacgtattaataaattatatatatccgttcgtaaaaactattagtaattataataataatattaataatatatataaatttatatatatgtatatgtaaattttacttcactactaaaaaatgtaatataatatgtacaatataataactcgtagaggaattataccaacctggattaaagtagtttctcttcttgcagttctacagcaacgacgtcagaaatttgttgtgaccaaaagtggtacgttttacatttatcaactcgtaagcgcatgaatctttattgtggtgtatagattgtgaagaacgaggtcgaac

SEQ ID NO: 72085 - DNA, 1057 bp, Cannabis sativa
tgtaagttgggacaagaccccttatttcagcaaatagtcttttaatttgcaatccaaatactcaccaccatgatttgatagaagtattttttaatgatttacctagctacttttcaggcatagctttaaagtctttgaactttccaaaagtttcagacttcttgatcattaggtaagtatgaccatatcttgaataattgtcaatgaaagtgacaaaatattcataacaactttgagcttaaatattaataggtttgcacacaccagtgtgtacaagctgaagtagttcttaggctctattacttttttgcaaaaaaaggtcttgtagctatctttccttctatacaagattcacataccaatagtttcaactattctctcaaaggaccaccctttgttgaccagtttattctgtgtaagccaatatttcctaaacgtagatgccataaatacgtttcatcattataagaaacctttatctttttattttgttgaggcaatcctactctaaatagttcattaattaaaattaatttctcacatggcttgagcacacaaagtccgttactctattttgcaaaaaaataggggtacaattcttggaaataataatctcattattaataaaaccaatattgaaaatttttttatgcaaaagagacaaagaaataatgttcctggtacattcaggaataaaataaatattgttcaatagcaaagatttattattaaattttaaatggactcttccaacgtacatggaaaacacttctgctccattccccatgcacatagccaccttccgatcggctagctctcttgatgattcaagtatttgtatagaagaacaaatataattagtggctccaggatcaacgatccttaaggatttatcatcctccaagtttgcttcaagaacaaataaattgcatttacctttcttaacctcagagagatacctgttacagtttctcttccaatgtcccattacgccataatggaaattcttaccttttgcctttttttctttggacttaggactgactttgttcttatt

SEQ ID NO: 72086 - DNA, 969 bp, Cannabis sativa
tactattttagaaaatacagggttcattttatcatttaacaaaacacaaggtccaatctgtaacttttgtaaaatacagggtccaaaatggtatttaccctattatatctcatgtatttaaatgtttacatacatatgaaaagaaacagatattacaatttataacctttcaaagagctgtgagagtaaagtaggcattgccaagaaattagttaatgttatttcagaaaaatctaaagttcaccaaatctcagcttaatcattgtttcactctaatgtttcatctcaacttcttgtggatcgtcttttcgacatccaagctttcgctgattcagattggggcacatgtccaaacaaaagatgttctattattggattctgcattaagaaatttttcttaatcagtctctcttttcatggaaatcaaaaaaacgatcaactgtttcaagatcatctgcagaggctgaatatcgttccttagctaataacacttgtgaaatactttggctacacaatattctctgagactttggcatctcaatatctcaaccaactatcctctactgtgacaaccaagctgcaatacatatatccgagaatgctatcttcaacaaacatactaagcatattgacatcgattgttatattgttcgagaacaagtcaccaaaatcaaatcatgaccaaggccgttttccttactcagttcaagaacttattgttcaagatgagtgttactaatctctacaactcatcttgagggagagtcttagagatattagtttggtagcttggaggtttatcattttcaatcctcattaataataataatatataatatggtatatcatattaacaatatctctaagtatagcttactatatttaaattaccaacaaatcagatcagaatataaaagctctatatgtctaggaaatatatttacaaactttttctatgtatttctacaa

SEQ ID NO: 72087 - DNA, 865 bp, Cannabis sativa
cctcagcctttcgacttcgcctttcagtgcttgggcatgctccttgcccatcaactacatcttttgctgaacaagtgggatgcttggatcaatttttagtgcatgggttatcacgaagaggtcgaatcttactatgtctccatgtgaccatgcaaaaaggtccaagtttgcctttagatattctatcaagattgacttgatttttggggcaaaatctttactgatcttcagtcttcttattgggaaagtgggatcgacctcaacttcttccaactcttctagaggtccaaagcttcctacaggatccccaaagcgaggatctatatctgtgtccccaccttaggctagacttcattgccccttgctgggctcatcttctggacttttggcaaacatcttctccttctctgccttggataagatcgagttgtagcggtgacgggaagactactcgtctcccttcaggcatgccactccatgccgtattgggaatttaaggcataaatggtagatagacgtcaccgccttcaggtcattgagggtcagtcgaccaatcatggcatgaaaagctgagggaacatcaatcacgacgaatcgtaccattagtgttctgatggttggattttttacaactctgacgggtaatctgatatacccaacatatgcgatgccttggccaaagaagccatacatcacatggttgcaaggcgccaggtctttgagttggagccccatattttcatatgttcttttgaaaataacgttggaggacgatttgtcgtccaccatacatcttgccacaataatatttccaatttgcatagtaatgacaactaccacgtgcaattgtagagaggcgcaacaa

SEQ ID NO: 72088 - DNA, 969 bp, Cannabis sativa
aaaaaaaaaatacaattttaagtactttgtgtaaatttttttttaaaaaaaaaaaaaaaaacaaaccatcaattactctttccctcttagccatggtcttgcctaatttctctctcttcacccattttctttcttagtttctctctcttaaacattttgtcagttgtttctctttctcgcccctttttccattcattttctctctttggcattattattatatttgatcatcagaacctttttcttttgttcttgttcatatgtggtttcagccatttttttcggtttgcctttttcttttgtcgtcggtgagggttggtctcagttgtgcattgcggtggtgtgttgctttaaaagcaagtatttaatgtttaacctcgattttagctaacgatattctgagtcacttaagtgattaatgaacaataataattgaacaatgttgaacaataagaacacagagttgttatagaggttcggccccgtgatagtggtaatagcctacttcccttttgcttgtattacttgtgagaaaagaagcaataagtttttgacctctcttgaaaacttacaatttttacaacataagagctctcttgaataattgatttcggacccctgaatagtgaaatggttccactatttatagagaagaactacatcaattaggtttcccaaagcaaataagaaataaaataggaaacttgtttactttcctaaaacaaataacactaaaagggaaactaggaaggtttctcttatttttttttttgtcggtgtgaatctattccacgaaattaagaaagtggtcgagatttgaatgcttgaacatttatggaaagtatctctgaggatcttcttatgttgaactactctgcttgaaagactcggcattcttggatgatatggatctgtgcagacaatcacgcaaaggttctgcccgaataatccatgttgaagatgtaacct

SEQ ID NO: 72089 - DNA, 1012 bp, Cannabis sativa
tttcctttcattcaactatttgactgctagtatgctacaactaaattcagtagccttattagcatttttactacatttcactttaggattgtagggttagtgcgcacaaacactagtatatatagtgtttcctcgtttcctgtatctatttttgatccctatgtttcatttccaaacttttggttgtactttgataaaattcacccttttgtggtgctatttagagtagtaactgaatttttaacccgccattttatgtcaggctggtgagggcttttgtcgtaggtattctgtaccactcgatgcattgtatagaaaggtcgatggtaagtctatgcagacgattcataagtacttggttttaaatctaactgatgtgtacttgtttaaaaaaagctctttaaaaaaccttgaatgtatactatacctacatttaatacctgaacattagtttatctaatactatatgcttgtcgagccagacttgataatggattctgattgttgtctattgcaggaaaaacagaatacctttatgctcgtattacggagtcttcaagacatgctgtggaggtttaaatgcttttccttttgtatgttctgctgctaaaattggattcctgtttgagctcagaagtttttctttaaactcattgaaatattaccaaattaggcgttattgatcattagaattgtctgaatttttgagtttcgaacctaatgattggtgactttctaacacttaatatccactacaatattcggtttcctgtaataactatgttctttcacatcttatttgctcatgataacaaaattacacaccttaagaataagaactgaaagaccactttagtctagatgagctaatcaagtggttgggtgtgcattgtgtataagaggtctggggttcaaaccccagctgggcaattaacaaaataggtaattactaatggttaaataaagggctgaaaaccaatgcagaaaactttaaagggcattattctgcttg

SEQ ID NO: 72090 - DNA, 1315 bp, Cannabis sativa
catctcattcattttaagactttgctatgtgtggaaaaagaaagataaaattgtgttgagaaaaaaatttatgatgacaaaattgtagaatgatgcactataaaatgaaaagcctcataaaattgccaaactaagtatatatttatgtatagatatagatattatatgacaaaagggctcacacagctgaatgcgatccttagctagaaatttttgagaaatccaaagtgaataaattttctagtggaggagatataaggaattgaagcttatttataggagttgttaataattttttatattattattaaatcaaaataatcaaaatgtatgagacctgatgttcgagtattgttattagatactttaaaatgtaaaatattatatctatatagcacgttgtgagcggttagtagttatgtattatttaataaatcaaaatgtacaagacaccatattaaaatacaccaatagtaatatgctatctcttattaacatttttctattaaaatacattaataacaatataagaaatgctaaatgtacgtgtcaatatcgttattcgtccaactaagtatcaggtcctatataatttaatatataataactttagcgagtatcgctaaccaatcgcaacgcgatatgtcgagaatgtgctagacacactggtgcctaatatatagcaatgctctaacaatatatatcgatcactcctttgttctacgcatgacatttctttaaaaaagtaaactcattgatttttgtttagtttttaggcgtgatgcttcacctcagccattcccactccaacaagcttattatcatctaatttactcatgaaaggcacgattaatttgtttttttgtattatatattctctttgtcagccaattctacttataattttatcaattaaatttggttcaatataaaatacagctaccatgagtgtttataaaattatatataacttttgtacaagtttggtcaatttatttccttttgggaacagtatatttatgcttagaaatcaaatattaaaataaatcaagttaaaataattttttaaatttagttatatgtattaatttttatttttttttttgaaaatcttgttattctcttatattcttttatgttgattttgatattttttttttattttcacatatatattataatagatgtggtatttatccaaaaaaattgcactactacaatgttagcctttagaggcagttttttcaaccccatttataaaaagggaagctaaagggtgtgaaaatacccgctatgttcgaaattgacatttaga

SEQ ID NO: 72091 - DNA, 504 bp, Cannabis sativa
taaaataatttccaacacaattattatcctaaattttgtccacatgacgtggcatgtccacgtaagccaaaattgagaacgcgttaatacaaccttgtcaatagtcggacaaagtgtccttacaaggcatggaaaagccgttaagcaacaagtaaaaggagttaagcaagccatcaagaagctacacaaccatgtttgaccgaccaaagggagtacgtaggcagaccaaaagaagcttgtatggatgaccagggtttgagcacaagttggtcagccaaaggatgattgtcagaccaaaaaaggcttgttcgaccaaggaaacctgacctttgcggggaggaaagaaagtttgtacaaaaaggctgctggccaacacttgccaaagctggtaggcacttggcctgccagaccctagcaggcacttggccagctagaccctgacagacactaatgtgcagcgtgcaggctggcaggcacttgctgtgcagcatgcaggctggcagg

SEQ ID NO: 72092 - DNA, 654 bp, Cannabis sativa
ccaaaaatttatattacatcctaaatcatttattctctatttttatctccatatcatttacataggtatataaataaattaaaagagacttcaataaaagaaagaaagtggtggaatgagaaaaaaaaaagagtaaaaaaaaattaattcaatataactcaataaataattgtacagtaccatattaagtaattataaattttttttacataggataatatatggagaaatagtttaattctctttaaaataattttagaatagttgatgcaatgtatgaactatttgagtatttttagctatatatttagaataattattaattttatcttgtaatttttcgataatatttattttattccttaaaatatacggcttgttaagaatttcttttgaacttttacatttacagatttttagtccttctattaggttctgtctcataattttgtttaaataatgatgtgtctttgtaaattagcaactttcctccttaaacattgacaactatcaaatcgtacccccttaaaactaaaatgagaaagatttaatattttttaggacatcttaaaatattcatttagatcttaaaaaaaatcatttacaatggttaagaaaattaaaaaaagaaattaaaattttaaactaattaag

SEQ ID NO: 72093 - DNA, 805 bp, Cannabis sativa
ttagggcatgatcataattgttgattgacctggccaacgatactttctgagtggtaactttctagattattaataaattattttcagattaataaataaatcacataaaaactcttatgctctattaattttttacgattttttttacaaaaaataaaatcaattccaacaatccatcatcaaccaaacattcctaataaacatcatcatccattcatatacaccttacacatatatatacatataaaatacaaaaaaatcatataaaatttaatatatatacgtaacaaaattagtacgaatactatttgttaattttgtggcactaaatcaggtatgctgtaaaaatatttaatataattatcatcgcaccacatcttaggatctccacatgcatacgtattaaatcagaaaatgaaatagatgaacaagaaagttaccacttaatgaagtatcaagtatccttgcaatcttttcgtaagttgcattaatgatactcacactgtagtatatatagatttagatttatattagtatttaaataataactaataatataatattaaaagtttaattaaataagatatttattttatttttatttttttgaataaaaatcataagatttattaattaataaattcgttcaaaataatagagcacacttcagagaaacagtcctccagctgaagcacatgacctgtagagaaacatgagtcacttgccaagcaatgagccaacttatttgcatatcgttttacaaaacacaaatcaataaaagataaagccaaaagtaaatttcgaa

SEQ ID NO: 72094 - DNA, 1720 bp, Cannabis sativa
aattaggttggactaaactaatatttattatgtatgttgtattattaagttttaaattatgtttttttatatttatttttctttttaatgaaatcaacttaagtggtagttaaatggattggatggatccaatctaatccaatagaaaatcagtcaatgcattcaatggttggaactgatccaatccaatacgtccattgaatcgaatcggattggatgactcaattcaattggattggatcggatgacaaaattcaatatccaataaataattggattggatcggttgggtccaaatttattggatgtgatctaataaacactcctagttttactaacgtggggagtgtccatctaccatatcgtacccccgaactttatcatgtaccaaatcacacccctaaattttcatttacgtcaaacttatgttagtaaaattaaataaaagtctttaaatcaaacaatctcgtttaaggaaatttttaaatttaaattttactaattgtttaaattttattttaggtatactaaataaatacaagtttgtaagatttaggactctctctctctaaccttcatgtttcaaacaatttctcaagagatcacttattttaaaattaccacaaatcaagtatatttaaggatgcatattgataatataggtagtactatcaatcaatttaaattttcttcaagtgtatagtctcatacctaggactactttctctaaaaatattaaaaatttcatactatttttgtaatttttttttttaaaaaaaaaaattatcccttctttatataggttttttttaggttaaggttaagatgaactagaaaaaagaccaatgggctcataatctattctatggccttttatttttaccacttaatttcaacttaatgaaataataaacctttttttaaatttttctatttattagatctaattatttaaatatcaattttaataaaataattataaaaatacatatattttaaatatatttattagttaaatcgacaaaaattcttaattaatccacttaaacctcctttttaccaaacaaaaaaataaaaattcatttaaaactcccctttgcctataaataacataattaagtaagttccaaagtttgttatatatattaataagtttcagaaaattataataaagaaaatgtattgaaccaacaattattatcatgacatagttctaaaagaattattaattgctcaaaaataataatcaaatttatgacttggttaacagtggttgggagacttaagactcgagattaagcgttgcaaataaaacaggtttatttgtaatgtctttgttgttaggttaatgcaatcataaagcacataaaaaaaatcgaaaaagaaatgtatatacattttaattagttacacaatatatttatttgtaaaggttaacttagattggtttaggttgattgtaatgtgttattagtaatttctaaagagtgtgaatcactataaatatgtgattgttaggctattgtgagacataaaatgagtaaatataactttggttcaattggagtttggcactgattcgaagagtgcattttaacagatttatcttgtctcgaagaagacaattatctactataatgagagattaaggggggtcattgtttattgtatagtaatatgttgatcaatgaattcttacttacaaaaaaggaaaaactaa

SEQ ID NO: 72095 - DNA, 892 bp, Cannabis sativa
cttctcaaaggattgtcaaatctgctcttgattcatgtaatatcaaaatcagtaataaaaactcactttcagtttgttcagcatgttgcttaggcaagattcataaattaccctttcccaaatcatcccttacagtgtatactgaacctttgcaacttgttgttgctgacctatggggtcctgacaaaactccatctgtcgatgggtacagatactatattcaattcattgatgcattttctagattcacttggctatacttactaaagaacaagtctgatgctttaagaacttttacacagtttaaagccgaatctgaattacaattgggaaagcaaatcaaatgcttacaaactgactgggggggtgagtttcgtcccttttctgatctactaaaacaatttggcattgtgcacaggcacccgtgccctactacacatgaacaaaacggtttagtagagaggaaacataggcatgtggtagaaaatggcctaactctactcgctcatgccactatgcctcttaagtattgggatgaagcctttcgaacggctgtgtatctctcaaatcgtctcccaactcctgtcctaaaccatgtctcaccaatagaaactctattctctatagcacctgactacacaatgttaaaaacatttggttgcaaatgttttcctaacattcgtccatataacaaacacaaattacagttcaggtcttccccttgtactttcataggatacagcctcaaccataagggatacaaatgtttagatatctcgggtcgtgtctatatttccagggatgtcatcttcgatgaaacatcctttcctttctcaacacttcccaaacttgacactgattcctatgactatacagacttcttcacatctgc

SEQ ID NO: 72096 - DNA, 1271 bp, Cannabis sativa
ttttcaatcacaaactaatgaaatcctaaacatttccaaaatggccaataaaagtcgacaaggattatgtgagttcaattgatgcatgtaattacaattattatcttgtctctttaaatgacacccaaagaaaattttaagtggtgttgttttgagttttgagtagcttaagaatttgtggaaaaagttatgataaaaggtaatatgaaactatataggacctacaaaaaagttacacactctcatctaaaaaaaattaaccaaaacatagtgtatactacacattcctagttatctatttcctacgtactccctacaccaagctaccccttagtattttttggttccaaaatatatattagctaccaatttttatactaaacatatacatgcttagctcaaaaattaacattgtattatttgttctctttttaatatattttaagaaatgaaaatgggaggcaatggcgaaaatagtagacttgagcgagcaccacacaccgcgccaccattcaccctaagccaactcaagaaagccattccaccccattgcttcaaccgctctcttctccactccttctcttatcttcttcaagatcttttcttcgcgtctttgttctactacgtagcaacctcttacttccacctccctcacccgctcccatacttagcttggccattttattggatcttccaagacatcattttttgtggtgtttgggtccttggtcatgactgtggtcaccactctttcagtgaccaccaatgggtggatgacatggttggttttgtcattcactccgcgattctcttctcatatttttctttcaagtatagtcaccgtcgccatcattcaaatactggctccatcaaatgtttgttccaatccccaattaatctcaaataacatggctctacaaatactacttgggcaatccactagggagagtcctaaaactttctattatatttatccttggttttcctttgtacttaggttttaatctaatcattattatccttactcttcactctacttaaatagcgaaaggcttcatatatattgatatcagattttggtgttttaatcaccacattggtgttatacaaacttggctccaccaaagggttgagttgggttgtgttcatgtatgggatgccattgttgataaagtgtagcatccttgtatatagtgatcgcatacttgaatcatactcaccttgcattgcctcactatgactcgtccgagtgggattggttgaaaggagca

SEQ ID NO: 72097 - DNA, 851 bp, Cannabis sativa
attgggcatggacagtataaaagaaataaaaaatgggcttggacaataaaaatataaagtttaccgtgtcacaatatttttaaaaacatttagtaaaaaaacagtatttttgtaagtttccctaaaaaaatgtaccaatttgtgtaaaaactaaaaatctcttacttctattgtagcagactagcagcccatagagcccagcccactaagcaaggaataccaataccactcgcactcgttttcctcctcattctctcccaacaattctctctcttcagaactctctgtctcagccgcactctcccttctccctctctctctccgtcactctctttctcccacttctccgtttgcttttgccgccaccgccgccgagaagctccaaggctttcatcaagttgctgtgctgctccacaattattgcaagaccagcatgtatataactgtacgtcattacaaaatttaactatatatcttcgcaatttgatcattctatgatatattcagctcttagaagctataatcgtttgctttcacgtgtttgatcttaaattttgttcataagttagtcattattttgttatggagatctattgtttaaatatatctctatataaaattttgtccaaataatgtttcgtgaagttttcttatttactgctttgccaagttttctagacagaaattgattttagtttgttcaggttaatctataaaagataggaataaaagatattgctagattccataaagttagtcgttaggctgcaatacaagatagataaaatatcacttcttgtaattgtgttatacatactaataatattattttagttaagatcatttggact

SEQ ID NO: 72098 - DNA, 1795 bp, Cannabis sativa
tctactaagtatggtttgttcttgtgatactaattagttattctcttttgaaagcataacatgtatatttctcatttgtgatgaattttgattaagttgttttctttagaataccttatatttattgtacatattttattttgttttatattattttcagattttcaaaaataataaataaaagagagggaagcgttggtgacttggcttgtgggctaagaaaattttgtgttttgtttggtaagtttctacatttaatctaaattgatttattatgatctgtttccttttaaagtttgatatcatattcattgtattttgtctttgatcttgaaagattttcttaaattggctatttttggaaaatatcttggtaattctagttttcttttattttttttaaatagtaattttaaggaaaaagaatggggtgattattgcttgttcgtgggctggtggtttttcaattttgaatttggtttctttttttgctccactctcccatgtttatcaaacccaatttttactttcatttattcccaccacctacccgattcctatttccttgtgttcttgttctttgtttctcattcttctttcagaaattcatggctaagactaagaacctagggcatccgaggaaaatggtggaatccgaccaagccccctcaaatgctcatcctgatgctccaatcttgctgcctgctgctgcaactgcatcaaatccaggagattcatcgctttctcagcgtgaatctcagcccgtgaagcccaagcaagttgctaggaaatctgtgcgtcctcacaaattttgtacttcatcatcttcatcatcgaaaggttctcctcctcgtgctactgaatcgccccttgttgcatcaaggaagggtgttgcttcatctacaccaacaggtccatcctcacgcacccgtgcccagcaagcttctctcgagaaggaactttgcactaaacgaagcgatgacagacccatccctgctgccaagaagctgaagatgaatcccccttcagtttcttcgagttctgaagaagaagaaccaatggagatggcctctgatgattctgagaccaaatctgagtctctccactttgcaaaagagattcctgacaactttggagactcctctgacagtgaggaaactgaactcgaacccgagccatctttgaccaaatctgctcctgcaccttctcgtgcatcctcagcagccaaagcttctgctgctgctaaaggcaagcagcctatgaagagttcatctcctggtaatatctctccatctcaagctgttaattccagattttattatcgagataatgagcgtgattggaatctttatgctacttaaaaatttgaaagtgagaggaattatgatttgcatgctcatagggtatatggtattgttaaatttgttcaacaccatcaatgggaaaatactctcactggttttgaagggtatattgaaaatattgtcaaagaattttatgccaatttgactaatgacatgcttgatgagaattctgatttttttggtaaagtctatgttcgagggcattggttttctatgtctatggatcgccatctgatgctcactgaacttgctggtgcacgggttgaatggaaatctgggcagagtcttcgaattacacatctcacctatgctcatgcatctctcatgaagttttctcttagcaattggctcccgaattccaacaaaatcttggtgtctcaagatttggcatcctttctttttcgtatcacctcgggggcatccatggatct

SEQ ID NO: 72099 - DNA, 1012 bp, Cannabis sativa
aaaaaaaaaaactatttttgaagtgtaataaaaaaatcgtttaactaacaatttcagttagatagccacattcaatataagatatatatataagtcatgcccatatatgtggttgtgttttgtaagttaaatttgttgaccttgcttttagctaataatattgagtctttaaaacgatgcagttataaattatagtaataataataataaaataaaataattgtattacttctaagattatcaagatcacaaggagttgatagagttagtttctcaacaatcatatgaaagcttacaagtatctcgataacataagtgctctctcgaaaatatgatgaacttgaatgatcttttgataataaaatgactccattatttataggtaatatagagtgaatattacttaaaagaataaaaaataaatggaaaattaaatactaaatccccaaaatctctcgattgtgcaaaattaatctcataaatgtagggatttaatcatgctgaaaatgataaaatatttaagaaaaatatcttaaagaatctaaattcaccgcatctttctagacggaggatcttgcttaggggtgagcaaaaaatccaagaaaccgaccaaaccgagtaaaccgactgtccgaacactgaaaaaacaaggcaaggcttgtggcaaaaggattccatcaacaagcaggatttgactttacaaagactttagtccggttgtgaaaccggttacaataagggtggttctcactttggctttaaatttaatgcaaggatggagtgtaaggaaacttgatgtgaataatgtttttttaaatggagagttgcaagaggaggtatacatgactcaaccacccggttttgaagttctcggtcaagaacacttggtgtgtaagttgaacaaagctttatgtggccttaagcaagctcctagggcatggtttgacaagcttcaacagtgcttactgtcctttgggtttgtttcctaaaagtctgatcattccttgtttat

SEQ ID NO: 72100 - DNA, 612 bp, Cannabis sativa
gtatttatgtcgcaatttatttacccatgttttttttttttttgataattttgtaatggaacatatcatttctattcgtgattcttttagtaattcttggcttaatggggccataattgagcaaattttatcttcaatactcacaatttattcattattgtaaaggagataacaaaagtattgtggtggtacttaaaattttacaaacatggataagtggaggactgagagaaactgaaaaatggacaatggttagagacaaagaagaggaaatatattattttattaatttagtaaattattgtttatgtttaaaatattattaaagaaaaaataagacataatttaatgtactttaaatattagttatttgatacacctatttatttattacacttagatgtattatcaatggctatagaaatgtataactatatatacaaaacaataattcttacggccataaatatataaatcctatataaatacatatatatatatatatgtatatattttttttttttgataaatcaaggatatgtattgcacaaactaactttacaatctaagagcaccccaaaaaagaggcctcaatctatacagatttttttt

SEQ ID NO: 72101 - DNA, 1011 bp, Cannabis sativa
cattgggccacagagtcgttgtgacatagttcttaaataaatacactttgatttcttctcttttttcacacacagagtcatatatgggaatgtcaagattgatttatatgaaattttgatataaattcatttttagggattttgtccccatttttgtatgtagaggatatgaaaatatattttaaatgagattattctagaaatacacaaaacaataaaaaattacaataatacgattttacaaagttttaaacattttaaaaataattttaaaaattttatttacaaaatatatgtttttatatttttttttatgttgtacttttgtggtatcccaaaaattgctcaagtgacacgtgatgtccaattaagtagctggtcgggataagttcacctaagtgttgctcgactcgacagattagcatagtccgacctaagtgttacaagtaaatttagcgcaccatgtcattgcctgatacttaaaaaattaaaaaattgaaaaaattaagtagaaaaaaaaaaagataattttcaagtaattttagaacgttatgtcaccgtctaaaacttctcctttatatatataagatacttctataggacaaaacaagaatacctaccataaaattgttctatatatatattgatatatataagacaaaacaagggtacctaccataaaaattttctatatatattgatatattaatagagcattgctattgggcactaatggtgcttaaaacccttaagacgtgtcgccttgcgattggctagcgatactccctaaaaactattatattaaactatatagaacccgatacttaattagaccaatagcgatattgatacgtaggaaagtgcttggcaccactaatactttttagcatttctcatattaatataatacgacatgataacttatgaacttgagggtcatgtcctttgacatgttattttctctctactgtagagtgtcgttttgatcagtaaaagtcttgttattttgtt

SEQ ID NO: 72102 - DNA, 913 bp, Cannabis sativa
acaccaatagcagtatgacaccgaacagtactagactagtacttttcagccattctcgccataataatatgcgtgtgacataaaatagtgttgtgcactaacttagcaatgtatggatgagttagcaatgtatgtatgagggattatatggtgggtggcgtgccttctgtgcctaccgatagcatctcgattttcttgtaaagaatatgattttttatttttttaaataggtttttttgttacctaaacgttgacatgtattaaattatattttttaaaattttttagcagttaaaaatttcatctgaattattcaaaaattattagatttaaggatttttgtaaaattacattcaattttactaattcttttatgtactaaatcatactctacaaactttgatatctaccaaatcatacccttccaactttcacatatattaaattatatcttctgaactttcatcatgttagacttcttttactaaaattggacaaaagtctttaaatccaataattttaatatttcaagaagatttttaatgactttaaaattcaaggattataatttgatatatgtcaatgtttagaagcaaaaacatttttcttcttttgtatgacaaagtatattctaattattttgtaacttccactatttttaagaataacttagggtaccaaaaacaaatttcaacacaactttttacacacgcctataaaaacgtcttcaaaaacaacctattttgtgtctttagcaccataatttatttaaaatttcttaaaaataactagatcataaataatcatatatatatatataaaaaattaagattatatatgccaaaaaatacaaaaatagtttttatttttttaaatccaaaatagtttattttgaagcttttttttttttttt

SEQ ID NO: 72103 - DNA, 1246 bp, Cannabis sativa
accccggacccggacccggaccttggatctcggacccagaccccggactcagactcgggactcgaacccggacccggaccctagacccaaacccggacccggttccggatcccgcacccgcacccggatccggtctcggaacacgacccgaactcggaccctggacccggactcgaactcggatcccgagatcccgacccgaatcccgacttggaccccggaccttgacccggacttggaccttgaacccagacccgaacccgggaccctgacccagaccccggccccgatcccagacctggacccggacctggaccccgaaaccgaacccagacccggacctggactcagacccgggacccgaacccgaacccagaccctggacccgatcccggacctcggacccggtactcaggacccggacccgtagttggtgttgggatcgagtgtattaaaaatatattataattttacccaatcaattaatacaagtcaataccaaatattgtattgtattatataatactaatacaatacaacaaaatccaacacaatacaatacattagaatacggcgtaccaaacaagtcctttgggtacttaattatgctgctatttaccttaattaatatgtacttaaattgtatccaaatttattttttgttggtaaaatatttaaaattaatttttagttacaccatagttacatgttaatttttttgttaaatattgacagaacgattgattaaaaataatatttgcagaaaaattacctgctatacttaaagggaaacttacaaatatactgaattttgacttaatctttacaaaaatactgccacacggtaaaaataacttttatactgccttgggactttttttttttttcttttatactgtaaacatcaaaaataaaaaacgagatctccatcttccacacccgcagataaaaccactacaacaacaccagaacatgcagaaaataaccattaaatctgtttagatgaagcagaaacattaaaaccattaatattggggttgtcatggttttttaatatttttttttgtgttgttccactattgttttgtatgtttaacaaatattggttttaaattacacatgttaaattaatcactgaatatttatttgtggtaaccagaatgaaagaatcatggacaataatagtcttacctctattaaagttgtgaaatctagaagaccaaaaaaaaaaaagtattgaagctgg

SEQ ID NO: 72104 - DNA, 1735 bp, Cannabis sativa
agatttaagatcctggtaaaataaattccaacagtattaccaatagaggtgctaccaacaatactgtcctcagtagagactctgctcaaatcctttaacatttcattacaatatgggcgatatttatattgaagacattattattagtggggccttttttttaataaactctgaagctcttaatcatgttgctctgttataataacataattgatattatttacaccagattatacttttcttattttatattttcttttttggtcaggtgtaatattctaatggatgagtcaccccctaaagattcttttttttttttgaatattcttatgtgtattgatacttatttccctactagaaatagaaagagatatctcggtaccctttgtactgattttcattttctatagcaataatactaatatttcttacttggtatctcagttttaggcctacaccaaaagaaagatgttgactcatggtcagacaccaagcagagatgaagataggaaacctataggaaatcactcagtaccattataaactcctctggataggaatgttgtgaatactattgtacaacaaagagtttttttaggaaactcacccagacctatcttctcaaatgcacattttggtggcactctaacttaatctttttccttaaagcttgattggaataattgcactcagtgaagaattatggtctctacaattaatagaggacatatgctttatggttttataaatgaaccaaaccatgtcctacagaggttacaactaacaatatggtgaacctaatttgggggttcagatcaacccagaatatgaggaatggcttgtgtgtcaccaactgctaatgggggttggctatatggttcagtgtctgaaactatagcaacatatgtaatgggttgtgctacttcagcagccttgtggaaatctcttgggactctctatgaagctcattcaaaatcaaaagctaatggaattgggctcaaattattaactgttcgaaatagaactatgacaatggtggaatatctcagaatgaagagatcttgtgttaatagtcttcaataggcaagtgaaccttatccgcaaggtcagcttgtgtttaatgtcaatttaggtcttgatgcaaaatatcttaccataatagtctaaatgtcaagtgaaccttatccgcaaggtcagcttgtgtttaatgtcaatttaggtcttgatgcaaaatatcttaccataatagtctaaatccaagctgatgctgcaagagaaactgtcacatgacaacaactaaagaaaattcttctcaactttgacaatacatttaattgagaggttgagcagtgttggttctagctcaaagggaactcatgcaagtggctcaaatatggtccctctgccaatcatgccaacaaaggacctgcgaatccaagatccaagaggaagccaaatttctctcccaactacaatgccaacaatgctagacatcaaaaaattaaaaggatgtggtacatattttttttaatatttctttattaattttgtactattttcacatcaaactttacttgacatgataaatgtacaatgtccatctttcctagaggtggccacattttatttttaaagtaatttatactgatacattatattgcacgagtatggccttttccaaaaaaataattaataaatcaaagaaaacatgtatcacctagttaataggtttttt

SEQ ID NO: 72105 - DNA, 824 bp, Cannabis sativa
tccgaacaatattgaagatatttacaaaaatgccactgtatacaaactaagcatcagcatgccacctgcatgcaccacaacatgcgccacgaattggccaacttgtgggcatctcttagcttgtaacgtgtcatcatagactgcacgtaacactgggcactgtagactgagggtgggggagctgggcgttgtaggttgggtgctggtggagctgggtgctgtagggggagatgggtgcatgcctttgctcctccttgtaccaacaaatccccttgggtgtattttgggatttatacttggcgaacttttgagcataacagtaatgactccaaaaattaaacttagtaatttttcggggtcaacgtatgttaaaagttatgctaattttttcacaaaatatactatgagccacattttacacaataatatatatcacttttttatttacttttgccacttattagtgtaataattaactttctatattttatttgtataattaatatgatttttatatactttttcaataaaaatttaatactttatgtactctcttacacttttctatcagacaaaataatttagaatattaaatatttttgtctcttgaactttttacactatcaagttgtgctgtatagtatacagttcgttaataataccttttaaaatataactttacagtaacgtatttcttccatcatattctatttaattttattatgaaatgagtgacacggtagatgttagttgataaatgaatgcaaattacatacctttaaacctgtttacttgattacaaaaactaaaaatataaatataaa

SEQ ID NO: 72106 - DNA, 1364 bp, Cannabis sativa
tataatgtgcaataatctttttttctttaatattaggaggagaaattggaacttgaggcaatataaactgcaatgtttagaaaaagaacttgacataaaaaccatatgtattattataaagggaaaaaaatataccaaagctctctactttgcaaaaggaaaaaataaataaaaacttgaactttatatattttgaatgaatatgaaggtataaaaatagagtatagaaaagtattaaataaaaggaaagtagagatattctgttattctctagtaggtagagtaattttatactcaaacttgaaaggaggagagtattttgagtcccacagtctatgctaaaatcaattctttctttgaagtttaattttggttagtgatgagtggggattgagtggacaagaaaagcaactagcaccaatataattgtttaaattgatgtctcaaataatatgcaactttttaaaattatgttttttttttttttttcaactaatattaaatttctagaaagtcctcttgtgagggttgtgtaggtgaaggcaaatagaggagaaggaagtgaaggctattagggttttttttttcaaaattattttttttactttttaaaaatatttaatgattttttaatttataatattattatttattttttaatatttttaatgagaccgaggagtaatttttttttcttctaaaaaatggtctttttataatttatttttaaaaataatatttggaataataaaatcgtaccacgtgtattgtatatactatgttcacgtagactatctatcttggcagttaattattaaaaatagttaaaaaattttaaaatatgtattagatattataatacaatttactcttttttaagtgaaccgcatcataatcataatataataagaaaagatcattacaatctctttctcaattttgtgttcgaaaacacatatagaaatatatattttttttctaattttgtttatcacggtatacattataaattacaacatcaacttgattattattattaatattattatttattaggtttttgttttcattgatacaaatgttaatgatttattattacaagtgtaagtattgggagaacaaaacaaagaacaaccttgtccattcacaaacaatggataaaccgagtacaacggtggaaacacatacgcatacatatacataataataattccaaatggctaactttgatatcgacccaacacttttattttctttttcttatttttaaatgaaagaaaaaagcaaagctataaagttgtggaaaaaaataaaataaaaaaacatgtgcttcttcccacgaagaattctaacttatctttagt

SEQ ID NO: 72107 - DNA, 1144 bp, Cannabis sativa
ggactcgagacccaaacgaggacccgagacacaaatcggacctaggcccgaacccgggacccagacctaaacctagactcggaactcaaacgggacctagaaccctgacttggacccggacctgaacacgagactctgacctagacccagaccccgacccaaacccgagacctgagacccaaactcagacccaagatctgggacccataacttaggacccgaactgagacccgaaccgagtcccaaaatcagactcggacctagacccagatctcgaactcgaacctcgacccgggatcaagactcagacctaggacctaaacccaaacccgagactgagatccagacccgggactaggacccaaacctgagatcgagacctggacccgaacccaaactcagactcgaaccctgaacccgaacccgaacctagacctaggacccgaacccggacccaggactcggacaagactcgagacccagacttggaaccaaccttagagctaaattattctcagcaaaatggaatgcgtcgtagatttttgcattcatcttctattgaggattagagcacgagaattttcatatcatcaaccccaacgatcgtgagttttacgctggaggaagaaggtgtgaacttggattttaacacagaagttaactcgttgattaccctagcctcccgttccgtgaaaggtgcgatcgacttccctagccgaacccagcaacgatcagtttgatttccccacttttgacatcaggtatgttacttttttcacctgtagattattttttctaggtttgcaaatcattttgtatgttcggtctagtaagcaatttagggtttttgatttgtgtgactgtaatcactagaaaatgtaggcaccacaaattgtggtattttttgaatttagggtttgttggaattgagcattttgcagtagttatgttggaattatgtttcccttgcctaaaatccttctagttttgggctctttattagtctccgtcgtgttttctctctatgtcgttcttaactccttatctggaataaatgactcccgagagtattcatttctgtacaattagtctagtttggacctctccaagtagttaatgggggaggactgttgggttttatgcc

SEQ ID NO: 72108 - DNA, 1338 bp, Cannabis sativa
ttttttttaaaattattcctaaaaaatatttaaaatttaaaaaataattaaattacccgttatatatatatatatatttttttccttttcttgttctttctctctagaattatcgagatgtcttcttcttctcctcccactctcacaattcttctaaaaccaaaaccatatgtccatctgattaaaaaaagttttaaactttaccatttgattatacacatacaataccaatgaatatgtatatatatctaatgattaattatgtatatataagagtttcttctcaaatcccactttgagaattatatagacctcacatcctccatggttggatttccttatgttatctcatttttcacactgtgacgtgacaatatgaactggtaacacatatatgttattatttatgcttgacatgagaaatgctctgaacagactttgagtaatatatctgcacgaacaaaatctacctgaccgagcagagcaaaggtagatgatctgaacaacaaatgaagtcattttttcgagctgtgcatcaagacttaagtacttcagttttgatatcgtgaagctcaagtacaaaagcaatccgtacaattatgggatcgtatcaaagggatatggcaagctgtccgaatccctcatttcatgtactttaaatatgtaatgtatgttcttaccaattatagatattgtaaacaaaaggaaaacctttcctcatacatttagctctatatatagttgattctatcctcactgtaaaaagggtggaaagaattgctttagagagatctaagagaaaatactcagagatttcatcgtgagagctttgagagaggaaacaccgtaatttttattctcaagtcaatacaatctaagtggagtaggctattaacgaactaaaggggccgaacctctttaaaatcttgtgttctttgttgcttacctatttctgctctggcttaattacatttcttatcgcttattaattgactcactattgttggctaaacgtgaggtcaatattttggtgcttttattgagagcaaaaatccaagtttgctctttgccttaagttttatcagacacacaaaatggtgtgcaaactcgcagaggcgtggttgaccagagtgatccactgctgatagatcctactttgcaaattcttagaaatacaagggtcccaccaagaacccatcctgagcagccaaatacgcagcaacccactgtaggtcaaggtgtgacatctcctatggctgggattacaccaggtgtgcaagagactaggaataccagttcggtagccgatcagagcactccctgttgggttttatgccc

SEQ ID NO: 72109 - DNA, 862 bp, Cannabis sativa
aaaaaaaaaaaaaacatttggtttttatgacaattatataagaaacttttttttaaggaaagaaaaaacattttcataatctaattcattttcttcttcatttgaatgagctaatttggatgagctttctatattttcatagcatattccaatttgataattacctattaattcaatacaaagaaacctaagaaaaataaatacaaataatttgatccttacagtcgcaagatgcaaatttagaacctacttcacggtttttaattaatccaatattgtgtgattcaattttaattactctataaatacttatatgttgcaatattaataataagaaaattttacataataaactaaaaatttgaagaaaaaaattacaaaaatacatcaacacgaaaaaaaaaattgattttttttatttacaaaaatacttttttagtaaaaaaataattgctcgttttttaattattttatagtttatttataattgtattatagttgtcatgatgtcataatttatctggttgttttttgttattttatagttgttgtgaggttgctttctcgttattttttagttttatttttactttttgctgaataaagtgtatttttataattaaaaatattaagtgatattgtaaataaacataaaaaaaaagagtacttttaaaaattcttctaataataaactaggaattttaatttttttttataatttttaagatataaatttgtaaaagtgtgttgtttttaaatatatatattttatggaatattttataaataaaaaattacaaagtatacaaaaaaaaacaatataaaaggaaaatttgattttttatgcttacatttcgttaaa

SEQ ID NO: 72110 - DNA, 1055 bp, Cannabis sativa
ctaatgctccttatataggtttgagcttacaaaagatctagtttaaaataaactaatatcccttaaaatgtggagatattatccctttttcagatatttaattatacaaaaatgaccccttaattactcttaaagaataggtagatatttggagttgaacccatatttttgtgggttgttagagtggcttcgcagctgagaatgagttgtggtccgtctagggtgaaggctataaaaacatcgatcatttaagctttgttctggctgttactgcagaggttggttggcctaccccttgtctaaggctagtttgcacatgcttttccttggccggtcaggggtggtccgaccagaccctctgggtttgccagtttattgtatcttcattcttgttcaagcattctgtcccttcatcaaatggtaagctatgcatgatgacttggttcacctattcacaggttgtactccacgtggcatcaatcttgcctatgtggacatgccacgtcatgtgggtaaaaattggtataacagaacataataacatgaacaagagttcatgattacttaagatttagaccgatatactattcatcatttttataatatgaattaggtctttatagtaaacgacatgtttgataaggacaacttaattacatattcgtccatgttatatacaacatcttcacatagatgtcatactacatcagtaatctgaatcgagattacttgcattgaataacaggcatcaatgaaccacactaacaattattgattaaagataccaaaattttaatatgttgctgattgttttatttatggctaagtgattttaattctgcatacaaaataagtcacaacctcatgtattaataaggaattttctaatatttatatatattatttaatattaaatattaataatttaacaataaagtatatatgaaaatattcaactattatttataaatagagatgtatttacaggctttttagagcataaaccctaacatgagggtatttgtgtagttttggacttgccccaaaacttctct

SEQ ID NO: 72111 - DNA, 944 bp, Cannabis sativa
ctagccttttccgtatgagcgaaggtgaattagatatagtattgcaagaatcaatgttgctttatgaaaatctggttataagagaaaatgaagaacaggttaatgaagaggaatttacttttgaagaggttgaaagggaagcagaagcacaaaatattgagttatatccttgccctatttgtcaagggaggtttacttcattagagattgtgagtaaacaccgcacagtgcataagcattttaagcgcagacgcatgtgaagattgtttcacttgagatatgcactttaacacaatgcgatcgaggaatattatagtattttctatctttttattactcttgaaactaagttttccgttttgtaatttgtttggatagattcctgtgctgttcttgaaaaaacaaaaaccttcaaacattgttgagcttgtcagtcaatcactcaatttatactgtgtattcatctccagcaagaaaatatttgcaggtggacaactacttttttttgtcatttagttacaaatgtatacaagtttttcattttttctttttgttagattttttttataggatacaaatttcactctttttttcctggattccaatccctaaaatatgaatagatccgatccaatctaaaaaataatatgtctaaaatattgaataatcataaattaaattaataaatctatatgaaataggatagaatcgaggttagatcaattggactgaaattaattagattagatgataaacatttaatacataaataaattgaatttagataggcctaaaaatattgaatgtggtccagaccactctagttattactctctatttgtaattgtctaggtcccttttgtgtctattctatataaagtgtgtctatataactgaaattcttggtttatgacaaattcatggtgactttttatttttattta

SEQ ID NO: 72112 - DNA, 748 bp, Cannabis sativa
  modified_base (485)..(491): a, c, t, g, unknown or other
cattcattttcaacattcatgtccccatacataagctcaaaataggagagctgaaaggaaacatagacacatagttgagatgggtttaactttactagctcagaatagtatgcctctcaaattttgggttgaaactttttaaatctctatttatctaataaacatacttttaacacttgttttagacaataaatctccctttgaaataccttttcacaaataacaaaattataataacctaatgacttttggtgttgcatgttattcatgtataagaccctaccaaagtcacaagttctagtttcactcattgaggtgtgtatgattcctatagaggaaatgtctaagtactacaagcatggtgtatattcctagaaatattgtattcaatgaaaaagaatgaaagcaagaaatacaattaagaacgacaaataagcatctactttttgataaaccaccatgagcttaccttggagttaagcatnnnnnnnttggggtaatctcaagatggaaaattttctggggagtcatcttagaaagcgtatgagtgaggacaaagtacgctagaaagatgcatattaggatacaaaattagtaattattccagagattatcaagaggaatggatgtgttaataagtagaaatttacaaggtattgagaggagtatatagtagtggatggaaataagaagtgctcttcttgaatatctatcagaaatgaatacttaacttgttactaagttaagt

SEQ ID NO: 72113 - DNA, 697 bp, Cannabis sativa
tacacttgcgtgtgcaaaatatcgcaacaatatacatgtacaatgacaatccctctactagcttcaataatacgagagctttagccaaatgttctttcaacctttggaaggcttcttcacattcaacgatccattcgaatttttcgcttctgcgtaagatgttgaaatatagaatgcatttatctatagccttagacacaaatttgctgagagcaattacaattaaactttgtacatctttatgtttccttggggaggacatgtctattagagcctgaattgtccctagattgccttcgattcctcggaagctggcgataaaacctaggaattttcttgaagaaactccaaatgtacacttctttgtgtttagcttcatgccatatttctaaatgatcgagaaggcttcttttagattatctttgtgcgccccaatagtcttggacttgactaacatgtcatccacatatacttccatatcttttttcccaaaacatccttcaacatttttgtgaccaaccgttgatgggtggcccttgcattcttcagtctgaatggcatgactaagtagcaatacacacctttgtctatttggaagctagtgtgctcttgatctgccacatgcatcttgttttggttatatccagagtaggcgtctatgaaattgagcaactaatattcggacgtagcatccacc

SEQ ID NO: 72114 - DNA, 884 bp, Cannabis sativa
aaatcgaagatgaagaccaagctatcattgttctgaattctcttctcacataaaactatgaacactttgtggatgccatgatgtatggtaaacaatttttgacacttgaagaggttcaaaatgctctaatgtcaaaagaattaaagagaaaatcagaaaaaaaggacaacaacaatgttgatggactgtttgtttgaggaaagaattccaagaaagcgaacaaggaacacacagggcaaagaaagaaccaagacaagtcagactcaaaattcaaaagaaaatgctttgtctacaacaagatcactcatcttaggaaagactgtcatatcttcaagaattacaaccagaaactgtcatcatgattcggtctctaattgtgatagtgatggatatggaagtgcagaggtattggtagtgtctaaaaatggcttaagaactagttgggtactcgattctgggtgctcctttcacatttgtcaagaatagtctcagttcagttattataagaagattaatggaggcactatcaagcttggtgacaacaggtcatgtcccataactggcataggcactatcaaactacaattaaaaggtggaggaactacagaattgaagcatgttaggcatgttccagagataaaaaagaacatgatttatgtggctatgttggatcaagagggctattctgtaagaattgaaaatggtgtgatgaaagttgtcaagggctccatgctaatgatgaaggttccaaagaaaagggaatctacattctacttggaaatactatgattgatgaggcaaatgtagcagaaaatgaatggaaaaacaagacaaaaatttggcacaagagactggggcacatcagcaatggtggactcaaaatt

SEQ ID NO: 72115 - DNA, 1485 bp, Cannabis sativa
actgtagcgtgccttagcattagggcattacattgtatacttgtgagagtaagcaaagcagtttgtagatcaattgttgaagcaggtggagcttcagaattttgctactgagaagtgaaagcttggttctaaaactgaggttgatgccctggattatttgtccaaccattattaaatgagttgaagaaggatttgttgaatttcctctgaaaattggctatggcttgcacttgagcaggagtggccacaacatctttagttgtagcacactcgtcaaaagtgtgtggtcctccacaaatctcacacccaattgaggcttgaacaactttagcagattcaattgtcttctacaattgcttagtgagagtagttacctgggctatcaaagcagcaatggcatccaattcatgaataccacctttcttctttctagttgctctttcatcaaaccattggtgattgttcattgccatgtcttcaattaattcaaaagcggcagttgcacttttgttcatgaatgtgtttctagatgcagcatcaatagtggtcttggtagtaggatataaatcattataaaagtttttgaaccaccatgcactgcttcataccatggtgagggcatcttctcaatagatctttaaattgctccaaagcttcatacaaagacttaccattattctgacaaaagttatttatttctcccctcaatttagcagcttttgaatgagggaaaaatttaaataagaacttttgagtcaaatcttgccaagaaaaaattgaattttgttgtagagaattctgccagctttttgctctttccttagggagaatggaaaaagccttagtttgatagcatcatcactcactccattgtatttaaaagtgccacaaagctccagaaaattagccgagtgtgagaatcttcagaaggcaatccactaaattggagaatggactgcaccatatgtaaaatagttggcttgatctcaaagttgttggcctccactactggtggtcttatacagttatgtactctcgtcaaagtagggagtacatagtctctcaggctcctttcaacattagggtgagtctggtctccttgcataactctaggaattagatcattccctccattatgtgccattttctatgatttttttgcttctctcttgttcttttggttttgcttgcaggatttctcaatctcaggatccaaaggaacagggctctttgcacctcttttactgcgcatataataaatccacctgagataggcaaaaatctcaacaaaataggttagaaacaagagaaaaaaatactaaattagaataaaaattaactaaacttatattgataaattcaatcccccacaacaacgccaaaaactttgttcggtaaaatttgacacccaagtatatgcaatcgaaataagtaatataatgataaataaagtatcgttctcacgaggattgattatcaattacc

SEQ ID NO: 72116 - DNA, 1354 bp, Cannabis sativa
aagtacaatccaaacccagggacacaccaacaaattgtcctgttacttcaaaaacaggaagaatattatccaaacctaaacgtctttctaattacatttgcaataccactgcttaccctattaattaatattcttcttataataggttaacacaagactttcgagcagcgatcctcgctgcccattcgctcgtcaaaccccccagctataaaattgcagtcaaagaccccatatggaaaaaagccatggacatagaaacagatgctcttgaaactaacaatacttggattgttgtcactcctcctgacatatactatgccattggctgtaagtgggtatatagaattaaatataatgttgatggtgctattgaaaaattaaaagctcaattggtagccaatggctacaatcaaaaggaaggtattgattactttcacgccttttcccatgtgcaaagtttaataccttaaaattactacttgctatatattgcattcattaaaaattgatctctgtaccaacttgttattaacaatgcctttcttcatggcgatttacatgaaaatgtctacatgtcactctccaagggatataaacctaaaggacatattcctccaaatactgtatgtaaactaaacaaaagtctctatggctggaataagcctctagaaaatggtttaccgaactcagcaactaccttttattcactggttttactatctctttttgattatcccacatcgttcactaaaaacaacaaaggtgtttttcttgaccttttaatatatgtcatgacattgtggttacttcaaataatgatgctgctattatttcattaaacaacaatataaatcagttttccagcttaaggatcttggccttttatgatttttcctaggcttggaaattggtcaccctcccttcgaaattctcgcatcccaacgaccattcaccctataactttttacagacacgtgttctttaggagcttctactacttctacacaaatggaacccatcattcatctctcctccgatgttggggaaccaatagaaaacccaaaaatatatcgcaacatcattggtaaactcatttacttaaccattactcgccctgatacttcttttgctattaataaaataagtcagtgtttatctaatccaagagctccccatcttgttgcagctcatagaattttacaatatctttacaacacttcttgcctagggctttcttttcactcaacatcttctattaacttatctacttatgctaaaactaatatttccaatacagactttcatctaaagatttttttagatgttgattggctttttgtagtgacactccaat

SEQ ID NO: 72117 - DNA, 1030 bp, Cannabis sativa
  modified_base (1001)..(1003): a, c, t, g, unknown or other
aaccacattaaatacctgaaaagattcattgagttgatagtgagctacaaacagcatccaaataattcttttcaagtgcacagatgtcttgtaagcatttagtcaaacagattgtaggcgtaatgagttgaactacgctgataagcattaccaaaacgtgtccaagtccaacatgtctaataagcatttaatcaaacacattgggaacatgtatgaagaagtagagataagaaccttggtggccaaagtaacctcctcctggcgctcaagttcagtgagaacagcaatcaaatcaagcttcaaaagcctaaaaacatgggtcttgataaacttgtcaagcttctcttcgtcatccttgaaccttttcaatcccaatatcacaaaaagcgcttctttcccaataagcttcttgcctctccaaaggggtcccctgggccttccgtcatggtatagtctaaaacaggaaatgggttcccgagaatcgatttgaaatgctgaaactttcgattttatgggcaatagggtctccttaatcggtgtatagtgcataactcggaataatcctgaaaccaagattgaaatttttgatcttgaaaatgctcgactagccattagagttctgatagaaaggactgagtagcttaaaagcttcgttagatggtgtcagtgttcccggctgttatgtctttggtctttcttgtcttgtcagtgttaacatgggattaggaaagttggtacttcggaaccaaacctacacaacccagctttttcaccaaatcaaaatcttaaaagacgctaatttttttttttaacaactagggatgcacgcaggaatactacgtgtgtgcttttattaattaatttataattaatctatcatgttaaaaaaagtgtggttcaattgtttttggattaaactaaaacattacctttcatttaaaatagggtttttttttttcataaatgtacaacaaaaataaaataattacaaaaaatgtgcnnnaaaaaattattttaaaaatttatacat

SEQ ID NO: 72118 - DNA, 817 bp, Cannabis sativa
taaataatcatcttaaaagctagaatttttcttttttttaatagtagtgtatgttgttgtttcctgaaattttcaaaaacggaataaaaataataagaacagaagaataaacaattgaaagagaatgtatagaagtgacatagttttttgcgtagttgggacgttaactaatcttactctacgagtcagttttattcagtaagttgtttacttgtaaatgctttaggagatacacaggaagtatatatgcatgtttgcctgagcaaagtacctaagagagttcaactcttaatccatgcaagattagcggagtatttataatagttgtagaattacattagagttttcctttttccctctaacagtatatttttggactttctcatgaagttcagcccatgaagagtataatctactgactaggtgaattggagttaagttgatcgaattaacattgcgcccgataatataatagtgggtggttatttatttttaaagtaggttgctttcattcttttatgtaatatttataaaatcataattaatattaaattaagtttcttttagaattgttaaaactattattagtcttaaatattttttttagtgtcatatcactattgatatatttaagtatcaaattttatataacttaaaatataattaaaaaaaggataattacattatgcacaattttttgtaaaaaaattacatttttacttttacagaatttttttacatttttacagttttccataaaaacaacacgaaaacaataagaaaaatacttaaaagtaacatctaaataacatcaaaa

SEQ ID NO: 72119 - DNA, 669 bp, Cannabis sativa
ctattggacccttatcggacaccatcaaacaagacgaaaaaaaccaaattccagaaatcgcagaaaactcgaagaataaccattttcacgcaaaaagtagcaacttacagatcgaacatcaaaacaacattataaacttaacaccattttcaattttgtcagtttcgattctaaccgtgtttaacaagatagtttgaatggtttttttttttcaatttttatatttcatgcttagccctaagcgtactaactatatagctatagggaactcaaacttatgtataatggtccattcttctcgtgataattaaagtatgaggagaaagccatcagcatatgccacacactaatgtcttaaattaatttggaattctttttctttcttccttttaatgaattattatcatcaaacatgttggccattattggctatttctgtctttttccactcattaacattttggtcagttgtaatgaaatgacctcgcaaactatttattaagaaactacaaaaataaatcttcaaaaaaaaaaaaaaagaaactacaaaaatcatgcaagaccacttttaattaaaaagtaaactatagacattgtgaacaacaatgcagctaacaaatacacttactcattttctttgttacttttactatataaaatatcaacagc

SEQ ID NO: 72120 - DNA, 1359 bp, Cannabis sativa
ttagttcagggtcctatttgtacctttttggaaaatataatgtccattttatcatttaacaaaataaatggtctaatttacaacttttacaaaacatagagtcaaaaatgatatttattctattattatttaacatatgttaagtaattaactttttttactctaagacaaaataataataaaaaataaaatgcaataatattttttattggcaatcttttttactttaacgataaatatttattaaaagatgtaaaacaatatatccatatcattaatcattctttaaagcatcttcgttaatgatgaagatacttttagagtactcccaactagtgttataaatacaggttggattttttgacataacttgaaattgatatgagcccaaaaagtacgagcacgaccaaacacgaaaaaatatatgtttaggcacgacaccacacaatgttacaaactggcacgacacgataagaacaatatgtgtttaagcttgacacgacacgagaaatatgagcttaaacacgacaagaatgcatgacaagacgtaaatacaaataatctattctaagagcgcagcatgttaaatcttatgttttataatagtaatattaataatttaaatctttattattaaatattcaaatttcaataattgaatttcttatataatttgatgcaaaattatataaaaaataattgaaactgtaaaaaatacattattttagtatttatcttatcaagtgtaaaaataaaatgtgaaaaattagagtaaaaatttgagcttgtataaaacgagtcggcctgagcaaaaacacgacatgaattcgagtacgatgcgaatcagagtacatcactacacgacccctattttcttatgacacagcacaacacggcctgtattttttccacggcatgacacaatataactcgtattttgttatagtacagcacaatctgatttgtattttcttatagcacaacactacatagtacatacttataggacgacatgtatttacaacactactcccaactactacttttttctataaatatttcaaatacatcaccgaattcctattttatttattttaaggtaaactttttcattacatctttcactaatttctgttaatcctttctttatattttattttttaatatattttactcattttaaatatataatattaatatatacataaatactgaaaaataagttaattttaaaaaactaataaaataagtttaaagcaattaataatgttgctccacatgtaaaatagcactattcatagttctaaaaatttaagtaaaatagaacatcaattgtatgtcatatttttataaatttgt

SEQ ID NO: 72121 - DNA, 1645 bp, Cannabis sativa
ctgactcaaaaaagagattagttgctggtaatgtgcagtgagatcaggtggaggattagtgagagtttggccagtttcattgcatgaaagatgagcagtagaaccagagacagtactggtctgattagcctgaggaggttgtttggatttgtctgacttgttcttgtcaccatagccagggggaaatccatggagaaagtaacatttgtcaacaagatgaccagccttgtgacaatgagagcaagaaggcctgggtttcttgcttcttggttgattaggtggctgagtagcagcagtagccataggaggcaaagtagaaccaagggttctttggcgctcttcttgaataaccatagcaaaaactttggaaatagaaggtataggttcaagatgaaggatttgagctcttaccgagttgtaggattcgttgagtccagtgaggaattgaaggacctgatccatattttagaattcttggaggcgttgaagagcaccacaagtgaaatttgcagatggttgaaattccttcaattcatcccatagagacttgagttttgtgaagtaagaactgatggactgatctccttgctgcagactatgaagttcggccttgagctggaaaatgcgtgggccatttccttcattgaatcgatcgacaagatcattccacatatcagatgcaaggttaaagaacatgatgctttgtgcgatttgtggagaaaccgagtgaaggagccatgacatgaccatgttgttgcatctggtccaggcacaaaaggatagatctgtgggatctggtttgggaagactgccatcaaggaaggcagtcttgtttttggcagcaaaagccatggtgattgctctacgccaggattgaaaattagatcctgtgagaagagtagatacaagcagaagacctggatgatctcctgtgctcaagaaataaggactggaaggatcctcatgagcaggtcgatctctggtttctgtgttggcttaaggagtaggagcagagtgaatctcaggattgggaatgggatcagacgaagtgtcgccattctcatcgttgacagagctccttgtgttgtgtttggccattgatgcgtgaagaagaagatgatcttagagaaagatcagagaagaagatgaaagcggaagcgaatgtatcaatctgataccatattagctgtgagaattaaagagcagagtgaatcgtttattctcatttattgaattgaataagagatacagaatatatatagagcaaagctcttgatacaaagggaaagaaaacaaaactctggtataacagaataacagaattgatgcaaaggaaaagaacacgtgcctaattacactaacaacctaactgaaataacaatcaagctaaggatcctaatacaagtcaaggcgaatagtctatgcataagtaaacttctaatttgtcttaccaatcaatctacatcccagcagccaacttctttaccatgaacgacaatttgattcaacttcaaagatgcaattgcagtcccacttggaaactatcacatatagcatgcatgaagtttaacatgcaacgaagagaatttttgaggcaaagacaacgacactagtagcatcatgcaccacattactcacaatagcg

SEQ ID NO: 72122 - DNA, 1667 bp, Cannabis sativa
taatattatttttcttaaaaaaaagaaagattaggatccatttgtcttttatgaaaactattgattttttttgttcttagatgaagattcaagctatttttctcgctaaatataaaatactacaaaatatatctatgcttcgtccaattaatattttaaactatacgttttgtaaaatgaaacttaaggtaccctgaatgtaattttaaatcaatgtctttaatcctaatcctaaaattttctcttccctaactctagtgattttggtttgatttctaatataatcctaacattaaaagagttcgacgaatatcagactcatgctatcgttttgttttattttaaaaatataaggtgttaattatcatttaacaaaataaaaaaatcgtcgctattaattgtggggtcatggtctctctgtacaagtgaggcgatttcatatcgtgcgacccctgagcctcctatggaggactctgagccgatttttcgtttgtctctgactaggctctcctccaacggtctttttcagtcctcttggtggcccaattttgtcttggcataagctaaatctcatctcttcgtacaagtgtgatttcaaaatcacctgagatggggtaggcttttccaatggtgttggtgggtctagtgtggcagcgggcactagccagggttggtgtctagttcgtgggttggtttctttcagagattcaagatgggtgtgcctttgttgttcctcccaaattttagagctttctttgctagttttagactcattcatgtgtcttagggctttgttcccttcttccattagtgaagttgtgcaacgttagaacatgttggttgtgcctttcatccgctactgatggctcttgtggtctgctttgtctttgtgagcttccttcattgcgaggatgtgcctattcagtgcactaaaatacaaaaattatgaaaatttctctgtggtttggacaggaagggcttaaccctagttccttaattattgtgagatttctctcttggaattgtcagggtttgggaaatccctgcatagttaagtattggttttgtggtactaaatcaggtacgcagtggaaaataattatttttattatcatcctaccacatccttaggatcaccacatgtatatatatattaaatattaaataaatagacgaaaagaataatttagctctcgaagaaaatcaaggtatctttctttattttttcttgtaagttgtatcctcgggatggtgatgaagaactcagattgtgatcttttgaatcttccaccacacacaaggattagtgtgggctaataggataaactgtacattgaatttttatttttttctcaacatatgagcatgaactctatgagtgatggtgatggaaaaggtttaatctgattagccctttttagatttccttaaaacttatacgtatataattttagatttatacgatatataaagtagaaacctattgacctcagatttggccaactaacagcggagtcgtattaacactgatgcttgccacatgttacaacaattagaagtagaaaataaaagaacacaaggatttttatagaggttcgaccctcttagttagcaggtaatgacctacttcccttatagttgtattgataccgagagattatcctatt

SEQ ID NO: 72123 - DNA, 764 bp, Cannabis sativa
caacaaaaaatgttatttctgatctttattaattagtaaatttgattatatttaaaagggttttatttagggcacaaaacccaatagtaaggtccttgaccagtcgggttaactcgtcaaaccgagcctggattgctggatctatgactgcttgtggttgaacagtattaatgctagcattcgcttggtttctttgaactggctcaattggtttactatgttggaactgccattgtccctatatcagttgagggcatccccaaggtctctaccccctcaggggcctacacgttcaaaaacttacacagttcttgggcttccttctgcattttgagtgtcagcccttccatcgaccaggggttgtacttggtcatatcaccccttcgtctgtctttgccccagaaccttcccagaaggtgaaaatcgaggacccgccattacattcactaaggaagacgagaagaacgtgagataccctacatcaatcagctggtcataacaattcaactcaccaataagaggatcaagagagtgttaatagacaatgggagctcggtaaatatcatttataaggaaactctaaagaaaatggggctcgaaaaggccaagttaagaccgtgtatggtgaacctttgcggattcaccagggatagcatcgctagccttggaataaccgagctcgaattaactttagacgaggcacctttagctgctactgttatgcaagactttttggttgtcgacgtgcattcggcttacaacat

SEQ ID NO: 72124 - DNA, 925 bp, Cannabis sativa
tcttctagtgattatgttaaattctttaggcaggaaattatgccccaatctccctttttacttgtttttcaataaatgctaacactttatcttgtctcgtagaaatgaatttcgagcctcttgtccaaaaaaagggaaagaagaggctggccatctcggagaccccttcggacgtcgaggtggacccctaaagagggccacgaagactacggctaacaagaagcgagcctcccagaatgctaatctcgaggtccctgaaatagagacccaggatcaatccctcctccggcccatgcaagtaccgatgagcctactcccaaagcgacccaagcttctgcctcctcgagccaagccctcgaaactttggctatcgaggttggaaaaattggcccagagtacactgcagagtttggcgcaatatgctggcgtcatttcaagtctttcctcccccatgaatgggatttaatcaatcatggggatctgggggaatgctcacaaggagtttatctcatacctctcagtaaatttccttatctttcttttctcactcctgtttttttatccttcaaaatacttatgtattttttttgttggtttccagacatctttcatttcttttgtcgcctagcgacgaggcatggataagatcaagtatctggagggtgaggtccagaacttgataggcagcgcgaggttgtggctaagcaatggaatgatgcccaattggagattactcaccttactaaagatatcgaggggtgaagaagaatcttgaagctaccaagaaggaggcaaaggacaagaccgatgcatgcgagaagctccaagggaaacttgatgcagccaaggtaacacttgatgggaaagaggccaaaaccattgaacgatgcaacgtcgttggcctccattgttgggttttatgccc

SEQ ID NO: 72125 - DNA, 790 bp, Cannabis sativa
  modified_base (736)..(744): a, c, t, g, unknown or other
gaatagccatggtgacactcctcacaattgataacaatataagatttcattttttgaaatataaaccattttcttccttttttgtaaaaatatacaacttttttttttgttttacattaatacctgagtttgtgtatttagattggttgttggcttcattagtttgtttcaattgcaaaaatacaaatgactcgtgttgctgctcatcatcgagacctgagtttcatcttcttttttaggaaaaggtgaacatttttttccactttaggattatatatgcttatcattttctggtttttggtttctataatgaatatgatcataaatttttcaacaaaatactctctatttacttggaaagtgtagaggcattccatgttttgaggtatgattttttttcacatgaatttggtcctttattttttgtttttttttttcatgtataaagcacctaaaattaaaaagttaattaaaatttttgttcactaaattttgacataactaaatcatattctttaaacttttaagaccgttaaaattttttattgaattattgaaattgttgaatttaagaattttgttcaattttagtaaggaaaatctaacatgaattaaagtttagaaggtatgatgtacatatcaaagtttgaagggtatgatttggttcatatcaaagcctaatgaacataatttagtacatggataatcaccgaatcagtaaaattgaatgaaattnnnnnnnnntccttaaattcaacaatctcaatatttcagaaagaatttttaacgg

SEQ ID NO: 72126 - DNA, 898 bp, Cannabis sativa
ttaatacctattatattttgtaacattattattatgatcactattcctcaacaacaaagtgtcacacatatcaatactatctatttatttcatttatttaaatcaaatagaacttaccatttatatatatatagtcttggccgaatctacatggcccaagacttgggtcattatgccacttactagtatatattttaaacactcaaaataccatagttcaattttaccaatatataactatgtttatcttcaaaataagataataataacaacaacaacaataataataactcattttcatgttattttaaaaacaaacacaaaccttatctaactcttaaaaatactctatttaggaagtaaacttattctatgaaatcattatttccacatcaaaatttctaaactagcataatataaaaataataactaaatattttggttattagctttgcctttattacttgaagatgatgctaaaaaatgatacaattatggacaataacagaattgaatggaatcttgctcctacccaaaaatcaggttcactcaagagacatgagttatgaactctcatgctctttacaacaataatcactctcagctcacactaagttcacccactaatgaatcaccaaaatggtctttatatatataggctgatcgatacaaagagtacaagaacccaacaaacttaacagaattaactaactaattcaactactaaacctgtccaaaaatagtcacttgcactagcgtataaactccacaatttctttattttgttttttgtataattgagctttcaaaataacttattttatatactcgcgacatatgaaacaggcttcaatgaaatttgtttttttttttaaaaaaagaaaatgtgaaaggttct

SEQ ID NO: 72127 - DNA, 956 bp, Cannabis sativa
ggagaaacgtctctgtcaaaatctctacatttaatttgtttagacatctctatacctacactaatttattatttctctattttgtcatcatttttttttttggtattgttgttcccaaaacaaataaatatattcataatgattataaatcttatgtaaagattgaaggaagaagagatcaaaaccataaataacaataaccaatgaatgtacaactaaaatctaataattttccccatatataattatatatgaaaaaaaaaaactttctctcaagatctcaagttcaaaattcttagaagataaatggtaaaatgcattttactattttttttagatatcgttataaatgtaattaaataccctaaggcaaacaatgcagcttctcttatgataattttaaagcttattatattttaaaattatttagctagtttaattaatgtattttaagtaggtaaagtgtagatatgtttgaatacatatacatactgtagtagttatagtaagttaaataatgtctatatatatatacagatattgaatatgcgcatgccatatatatataaatatatatagttgattgtcttgtggacagctacaactgcaactgttgttgtgtgtttgcaaatgttagtatccaaggcaaatcagaaaaaagaaaaacataatatttggaccctacacaacacacccacaacacacggatatatattatcacttaccttccctacttccacatctaaatcaatcacacattattattttgaattttcaagtgttcaatataaggtactatatatacttaataatttacctctgatttgtaatattctccatcatatatattagctagtaaattaaactatgagatttgatatgaaattatactaaacttattagataccactatagctattatattaaaatgtagatttgattatgaatttttcttt

SEQ ID NO: 72128 - DNA, 1334 bp, Cannabis sativa
  modified_base (766)..(771): a, c, t, g, unknown or other
gtaaattttgttaaatttgtagtgcggagtcatcaatgaagcatgggacacagaataataatatgaaaaacgagcatccgtactgagtaatttgtaatgaaaaaaagaccatatttttattggttttggtctaattccataattacagtcgactttcacatatacatatacatatatatatatgatgtactctcttttggaaattttggtagctatatcagtcatgatgagagtatatatgtatgtatgtatgttttttttggtggggtttgatcgactgtaataattagttatagggagacaattttgttttgtttttgatttctgggacatctttgattttttcgtattgtttaggttgttttccttttttttttctgctttgcttgaataataatacacataaaatagccctagcgtatatatgttgttgttgttgttctgaagaaatgctgaagagaattattggtgtcaaacaaatttataacaaatcaatttaaattgagatcatatatgaaacttgcgacgaaattatttgtatcaatatatcatgttgttgagtgttacactgtaaatactttaattttaactttgagttgttgataaatattaagttgaatttttaacgtaataatctctaagctataatatactttattaaatttaaatatttatctttaattaaaaatggcgtttggttgggaggaatgaaaatatagaaataggaatgggaatgggaatatgaataggaatggaatggaataannnnnnaaatgtataaaaaaaattgataaaaaaatcattaatttttttttcttgttacattggaatggtcattcctttctttttaaaatggaatagcaattccactaaaatggtggaaagagcattccattgatatggaataaaaattgcttccactatctgtataggtgcggatcggatatgatcacttgcccgcaagggatatggctctgatgccatgttgtgaatcatgggattccatctcaaaacaaattagcaatgagtggagtagcccatattcttatatatggctcaattctctactatttatttcatgtgggacaatgtcaacaataagcactttcgttagatatgcattggtaaataagtgatgataattcaattctattgcctccactatattttctatgaaaacaaaaaacattatttcatactctatcctgagttgtataatattgaataatttctatctttgcgtccaccccaaatccctatgcatgtctatcttttcttcatctcataacaattgtatccattaattagtcaattaaaaccattcaaaaaaataa

SEQ ID NO: 72129 - DNA, 652 bp, Cannabis sativa
aaaagtgtcgccttataaatagttagtgatatataatagtattaaattaaattatgtaagatctaatatttaattggacttctccatttaacatttctaaattatatatctaaaccaagaaaaggaaaataaagttgaaagccaaaaaagaaaatgtaatttaagcactgttctcatttgttcatacaggtgtctaaaatgtaatccttttagtgctaaatatattttttttacttaattaaattttaaaaaataaaataaatgaatattgcactgcttttagggaattgaaaattttgactacatagaagagtaaatggttattaaggtaatgattaggtattgaaaaatggccctgagatacaaaaagcacacaaataacaaataagatgatcacagtaaaaaaaaataaactatttaatcatatcagcaaaaaaaaaaaaaaaaaaaaaaaaatgattttcaccttcttattactttgaatacaagagtgactaaacccattgcatatttactgtttccaccttattcaggattactaatcttgaaaattaccttaatacatcattaaaataatcgaaaattcttttttattttttttaaaagaaagaaatctataataatatgatcaacaattttattgacatattta

SEQ ID NO: 72130 - DNA, 815 bp, Cannabis sativa
  modified_base (777)..(787): a, c, t, g, unknown or other
cccctaccacgaaggtcttgaggcaagaacagccagatctcagcaactagtagtcaggggggccgaccagggatctcaggctctacaatgcccccacttggacaacttttggccgaccagcctcatggtggtacacccctggcagatcagcagggtgaacttcctgttagaaaataaaatgagtcacccctgctcctcaccactacttatcatgctctgccacctactagataagtcactccttgtgtggtccttctctgcaacaaattccttccctttaccattagaatatttcatgggatgctgatttggtggtccccatgtaattgtgtaatgattgtttgataattgtatgagttgtacatttttagaatattcttagtaataccttccatttataaatacaaatcgtgcgaaccgtaattgtgtgtgctcagcttttcaatcattgagcatttatttgttggaattattacataaaaaatataaattgacattttatttacaaaaatacctccataaggtaaagacaatatttataccttatatgtgatttaaattaccgaaataccacttacataatcagacgatgcttgcagggtggttgctacgtggttgcatcagacgaatcagacgatggttgcagggtggttgctaggtggttggctgaaggttgcatcagacgaaggtttcaatcaaatgaaagtttctaggttgttgctgggtggttggctgaaggttgcattagacgaaggttgttggaattattttaccagnnnnnnnnnnntactaacaagtatgttgtttaaacatcc

SEQ ID NO: 72131 - DNA, 1131 bp, Cannabis sativa
cagtaaccaaacccaaacctaaagcctaagtatactaaattttttcaataaattttgagatatactaaattatactcaattattgacatgtaagatttaaagatatttacaaaaatggaaatatacatgttaaaattcgagtgactgtgaatggtttggttagacctcagaggggcttacgtcagcgtgatccgccttatctttttttgatctattctgaaggactttcggctttacttcgaatggaagagagtttaagcaatcttaaaggtttatctatatctcggggtgccccatcggttactcatcttttgtttgccgatgatagcttgttattttgtcaagctcaggactcttcctgtcaagctattaggcgggtgttggatgtgtataatcgcgcttcaggacaacttctcaacactgacaaaatggttatgtctttctctccaaatgcgaatgcggatttgaaagctagttttcacaacgtgttgggtatgcccatttgtgatcttcatgaaaagtatcttggccttccgtcttatgctggtagagaaaaatctgaactttttagtaatatcaaagaccgaatatggaagctcttaaactcttggcatgcaaaactcttctccattggtggtcgggaagttcttcttaaagcagtggtgcaatctattcctacttatgcgatgagttgtttcagtttacctaagaagttttgcaaacagcttgaagccatgatggcaaatttctggtggggttctaccacaaataagtcaaaaattcattggaagaaatggagcatgttgtgtcaatctaaagatgagggaggtttgggttttcgatctttccttcactttaatcaagctttactagcgaaacagtcttggggaattttagaggacccttactctttgttggctcaagttttaaaagctcgctactttaagaatggagactttctcagtgcttcaaaaggtactcttccgtctcttacttggcaaagtatatgtgatggacaagatcttcttgttaaaggacttcgttggaagattgggtttggaaataaagtaaaatgcgcttcagatccttggttgccgggtaatactacgtttctgccatatacttatcaag

SEQ ID NO: 72132 - DNA, 1200 bp, Cannabis sativa
agatgacattagagaaccaaaatggaatttatgaggcatgtttattattatataaatgccttaaataaaatatttgattttggaaatctatacatacatcatttatcgggtggctatggccccctaactttttagaaaaagaaaagaagtatagataagatataaattaaattattttacttattagaaaaatgagataattttcttattactaagcctaataataaattataaaattgaaattgaaaatatctcaaacccattagttcatttaaattagttatctattttataataaaaagtgacaaaaaaatgaataatataattttaatttggaagagtacttttgtataatatatatttatatgtgtctttatagtgtctaacactataccgatgtggcgggttacaagtgattagtaatttttcatattatttatcaaatcaaaatacttgactttatattattttacaccaatagcagcatgctactttttgtagtactggacactataaggtgtccctcagtatttgttattattttatatgcgttgtataaaactaattattttcttaaattaaattgttaaaatactacatactaaaccaaaattaagtggaaatgcactttatttggtctctccttgtttcgtcgtctagttctagcactgtttttagcatttttctcttttgtatagagtagtattataagacatcagtgattttgagcaccatttagaagtaatgtcttgctattgattagtgatatttcataaaaattattgtattaaattatttatatgatactatcttattaaaaataattatactgacactcaatatttaaataagaatatatggaggattagttaacaaccaataaccatgccataaaaaatcagaaaagtgtggacacatgtctctgcagctttaattgatatcacatgttgcttgacaaaaatgacttttgataacaaatataaagcattttcaattgaaaacatgcaatgcaatgacctaaaaatttgtactataaaccgtgaaagctcactaagattcctacaaattattgttcagtgcacttaaactttgcctctaattatgcagggaatgaggcatatatattttttcaggactcaaaaatttaaaaataaaaaataaaaatttcagtggccaaacctataattaaaaaaaaaaaaa

SEQ ID NO: 72133 - DNA, 1535 bp, Cannabis sativa
  modified_base (1393)..(1396): a, c, t, g, unknown or other
acatatatatacccaaatttatttaaataaccaattataatagcacaaatattactttaataaaacaaatcattcgtatgatcatacattcacatacaatctaaataagaaaaaatagaaaaaaccttaaacttcacataaaactaatatttacgtgcctcagcacgtataactcctacctagtagaagtagaaacgcaaataaatgcataaggacattcatgtaaatataaatttgaatgaaagaaatacaaaattaatactaagaaaagtgattcgaaaaaataaatatagaagtaaaacgattttgccataaaaaatagagataaattggtagaaagagagtaagggagagtgactgataaagaaataaaatttggaataggttgattaatatacattaaacaatgtcatacaaggaaaatagagaggaatcgtagagagagatgaagagaaggaagagtgtggcttgtctataaaagatatataataataaaatttgagttattgagaattgagatttaaaatataattaacttgatatatatatatatatatatatatacattaaatatatttggttaaggatattttagatagttttctaaaatcaattacgcctaacaaatatattttattgataaataaataaatattttagtagtttttttaattaattaatcaataaaattatttttttaattttttttaattaattaagctataaaaattaaaaaaaatgagagaattaaggagagaataattagaagtgtttggagtgattttatagtgccacgtcaccgcctcatacttctcctttaaatatatactaggcaatatagccgcccttcgtgcggttagttttaaatatttcatttcgtgttatagtttaaatattttattttatattattgagttattattaataagtaaagtcttataaaattttgaaataataaaataaaaatcaaaatttaaaatttttctcatagtatttaaagtttagatttatttatagaataatttttacaaaaatagaataattgattttataatttaaataaatatgagatcagtataaattatttaaatatttttaatagatttttattgtgagatttaaataattatcataaataattttaattaatatatttaagttttttttttttttgtagatatttaagtttttttgtttaattattaatttatttatatggacctcacaaaatttaattaattttatggtgatcatttttatagtttgttatatatataaagacattattatataaatattgtttttctttctttctttttttttttttttttctgtttagatagatctttagaaaaaatcagcccacgttgttatataataataataataatannnntaataataataataaaataatttgtttttaaaaaatatcacccatgttatagagtttatttttataaggtaatactattttagactattttacaaaagttacactctcttttttatcaaatgataaaatagacactcta

SEQ ID NO: 72134 - DNA, 1714 bp, Cannabis sativa
  modified_base (71)..(72): a, c, t, g, unknown or other
  modified_base (353)..(355): a, c, t, g, unknown or other
ttcttatatagatgtatactttatcaatacgagacttagaaaatgtattaattacaatttagaggttattnntatttataactggcccaaattgggacttacttcttttataacaaattaaatgttattcttgaatagagtattcttagatagatgttctactgtacataaatatatataatatgatagtatacatttagagtgtcaatagagcgggtcaaatctaattcggctaggggtgtttattggatcacatctaatatttttaagtctatccagatctgatccaattatatattagatgttagattttaccatccaatccgattcaattaatttcagtcatccaatcnnnccaacatccattggatgttagattggatcagttctatccgttagatgtatttcatatttatttattggtttaatttggatttattcaatattttagacctagtattttttggattggatcagatccatccaatattttagatccagtatgtattggattggattggaaccatccaatccaagagaaaaagaaaaattttaatgttaatttttatatatatatattttacgtataataatataaaatctaattactcctccaaactaaatgaaaatactaattagttcgattgaatgttggatatattggatttttgaacatcccatccaacatccaatccgatccaattggatattcaaaaataacattcaatccgatcccatcacaattggatatccaatgtttggtggtcgattacaattagatcggtcggttgtcattggattggataatttatgcacacccctaaatccggctatgattcgaccttatctgaatcatgtaatgatccgtcccgtcctgtctcgatagaccagttactcagatcggaacagattcaacctgccttatacagatcggatttgatccggcccaactcttttttttttttttaaaaaaataataattttatatttaaatttataattttttttttcttaaatctattttttaagaactaataatgtatcatttttttcttatgtatttttattttatttgccaaaatcaacaaaaaaaatcaaattcttatcacataaaaatgtaattttgctgtagaaaaatcaaaaaaattaccaaatttttaaaatcctaccaatattatcatcagtaataatgtagtataatgattacatgaaataaaaaaaatttatgaaattaactataaactttttatatgtagtcctagtcttcaagatttactgtttacggttcctgtaaaaaaataaatatgttagagcaatttgcggcaaaactctcttatattttaatttttatacacttaactcccttattttttttttgtggcaaaatctcctaaatttattttttttgcaaatttaacacgtcagttaaatattactgttaaatatcaactggatgaccactgtatacacctttgtaaatgtaacagtaaaacctcgaaatcgatacagtagtaacccagttagtatttaacagtaatatctaactgacactttaaatttgcaaagaaaaataaatgtaaggggattttaccaaaaaaaaaattaaatatataaaaattaaaatataagatagttttttcacaaattcaattctgttataaaataatataaaataatataaagtagatgaaaagaaagaagaagaagatgaaga

SEQ ID NO: 72135 - DNA, 1162 bp, Cannabis sativa
gataggctacttgacctaccctctccagcatctcaaagggaccaataaagctaaggcttaattttcctttctttctaaatctctaaatccccttcattggtgacacttgaaggaagacaaagtctccatcctggaactcaatatccctaggcttcagattagcatagcttttctacctactttgtgaggtaagcatacaagttcgaatcttctcaataaccttactagttctttggactgctttagatccaagatatcttcgttcactgacttcatcccaatgaataggtgaccgacacttccttccatacaacatccgtatggtgtcatatcaatagtactctgataactattgttatacgaaaactcaatcaacggtaggtacttgttccaagaaccttagaaatccaatacacatgcctgtagcatatccttcagtatctgaatagccctctcaaattgaccatcagtttgaggatcaaaagctatactaaaatttaatttagtacctattcctcactgtaaactttcccacaacttggacgtaaactttggatctcaatctgagataatcaactttagagcaccatgaagtcgaattatctccttgacatataaattagtgtactaatccactgtatacataatcagtaatggtaaaaagtgcgctaaatttatatatcagtctactatcacccaaatagaatcataaaaccatgttttctttggtagaccaaccacaaaatccatggttatatccactcatttccactcaggaatcttctgaggttgaagtaatcccgctggtctctgatgctctgccttaacttgctgacaagttagacattgtcacatgtattcaactgtatcacctttcatacttggccaccagtacaattctttcacatcttgatacattttggttattcacgggtgtaacgagtatggtgtggtatgaaattcatccagaatctctttcttgataccttcatctactggaacacaaactctatctttatacctcaaaatccacttgatgaaattgagaaatcctttgttgatccaaacttctcttttttactcttttaacactggatcactttgttgggctgtcttaattctttctagtaagtcagactgtaacataatgttagctaatttc

SEQ ID NO: 72136 - DNA, 579 bp, Cannabis sativa
agaatttgtggatgtgtttttctaggtcatgtatttatagttatatacatatacacatacgtatagtgccttttagtcgtaaataatataaagtaaaagtacatataattataaacgataactggaagagtgccacaacaatatataaataataaatgtttatacatgaaaacgttttaaaaggtcatgtagcaattataatgtagtcttgacctttggtgccgtctcttatctactccgtcgaccgacacatattaaagaaacattaagagcatggtatagtattaattcttagaatttaatttatcgagtaaatttctgtctcttatctaaaagatgatactatcctagccaatgtgaagactatgagcttatgtaaacaagttcttaataagtagatttgaaatttaacgaatatttttttttttattaattcttcttaattccactatagattcgaaattacactcccgattacatcaaacactctattctgcaagaatagatgcactatattttttttttgatttaagcgtttatatattacaaccatgttttacctgggactcgaacccaaga

SEQ ID NO: 72137 - DNA, 1367 bp, Cannabis sativa
  modified_base (380)..(383): a, c, t, g, unknown or other
  modified_base (615)..(618): a, c, t, g, unknown or other
  modified_base (704)..(724): a, c, t, g, unknown or other
  modified_base (1320)..(1321): a, c, t, g, unknown or other
ttttttgtttcattctgaaaatattttaactggaaagtagacgaaaaattaataaatttaggcttttaccgaaattaatttggattttttatgaattggttataattttttaaagtttgaaaaccaaaatatctcaagggtgcacatccgcgcgcgaatggggacacgatgtgcggctcgctcgaaaaaaaccccttcacctgaccgtgtctcctcgcccatgaaggctgcatgtagcctcctatctcgaccaaaccctccattctgtgcgtgcaggggtatgcaatgcatacccctgtgccccaattttatttttgtgataactttttattaaaaaatcatttttcattgaaataaaattcaaattttggtagaatttnnnntagaatctgaattttcaattaaaaatctaattatcagaataaaattaatttttattaacttttaattaattaaaattattttagatattagtagcctttgaatttgaaaatttgattttttaacaaactagccttatggttaattttaaaatttttgatttttttttattttaattataagatcagatattacttattttattataaaaatatgaaatgatcttattttgannnnaaaatattaataaaatttagaaataatttacttaatgtttcaaatttgctaaccatgtatgagatttttaaaatttgttatttttnnnnnnnnnnnnnnnnnnnnnaattataagattagaaaaatatttattttaatattttatcttattagatatttattttaattaaaataaaattttggcaaaacaacataaaattttgaaaagtttgataatttttgtttgaatagaaattttagggtttctaaccacaaaattttcaaacttaggatatttttttatttaattatataataaaattgataatatcctaaccatcaaatatcttattttaaaattgtttattcttgttatatttaattcattaaattatgagattaagaatataatattagaaatatctaaattttgaattaaagatattaaattatattatcttattagatatttaattaatttaaattatttaaataaactgaaaatttaaaaattggttagatatttgaatttcagttagaatttaggatatttaggagatttgttagattttaaatattctctaacaacctaaattttaaattctagttaagatatattttaaatattttaattttaaaataaaaatatcttaacctattgttacatgtttgtaatgcttgattatttatttatttattcaatttttttttttacaaacctannatttatttgatctaaattgctataattaacttgttgacagatccaa

SEQ ID NO: 72138 - DNA, 1282 bp, Cannabis sativa
  modified_base (1138)..(1138): a, c, t, g, unknown or other
  modified_base (1245)..(1249): a, c, t, g, unknown or other
tgaagcaagactttcctttactgtaaaagaaaaattacacttactgctcacgattttgaaggtacaaaaatgaaaattcatggacttattgaagatctaattaaggtaattgtctagtgagttgtggtcttgttcagaccgtttgtgagctatcaatacagtatatattgattataaatataccttatagcagctagaccatgcatgtgtttcatacactttgtattgtattcataccttaagcaaagagtgtctttgttctgtagagaagagagtgttcgtctcttactttgtttatatgtatattgtattgtcttgagtttgtatacaagttaggaaaagaagaagaagaacagtgcatgctaccttcgggagaaggttttacaagctttcaggagattgctttttaaatcttccctcaggaggaagcaagcactcttcaaggagatcgaaggaagttcgagcacttgaagtttcagcaagattcgattagaaggtagaatacatcaagcttactagttttattattctgcgtttaattaaaaaataaactggaatatttaaatacaaaattttaaatgacttacgaagtaattatactagagcacaaacacagaatcaaaaacaatactccaaagaatcacaaagaagaaggtaacgaattaaagcagtaaagcaaaaaagataacactaggtttaacgagttcgagcattctgtaatgctttatgttacggtcaaaatagcagtagtcatatctttattgataatagtgttttcaaggatacatgaatcctttcaaactagaaattacaagatggactttctctctctcgtttaaactctctctaaacttacacaaacacgattttctctcaagctttcaatggactaatttaccatagatttcaaatgtgatagctatgtatagaattttcatagttgctaaaactagctctaattctgtcgtggctaattaatgttgtcttaaattctcggagtcggtgccaacaacatattgttggaatatattttaccatgatctagatttactaacaagtatgttcgttaacatcctaaataagaatttctaaaacagtaaatcttaaaagcatataatgttggattttgtgccctaantaaaactcatttcaatataatttttttcactaatttataaaagataagaaatcattctttgttgcatggttcacaagatttatttcatgattatgtttaatgtttannnnntattaagtccagaacatatataaaaatatatat

SEQ ID NO: 72139 - DNA, 783 bp, Cannabis sativa
attttataagatattttaaataattatgatgtagacgattatgaaaaaaatgagattataaaattctgctaaatactaacacagttaagattatatcagtaaatatttttttttcattttgcattagaatggtaaaattgtagttttaacgtacacaattttttttttacaataataaagggcctaattataaactttggcacaagactctcaaaatacttgggttagtccttcgtgctattcgattatagacatgatatttctgttttttcataaatttttgttaattattattttatttatttttctaaattttacttaagagtagataataatagaaaaaattatataagcatacatttagatgggatgacgggcgactttgaatctataccataatatcattattagaacacaattttcgttaacgattgtttaaatataattgataaaagtaagatatatgattataatttacaacttttgacaagaattacgtgcctatgacatatcttgcacgcatagtaatataataaagagtaacttgcaacataaatacttaagtttaattctcagttgcagatgaatacttaggtttaattttccaatgataataatatttaagttatatttttaaaaaatttcgtagctacctaaccgttcagtgcgaacacattatttacgtgtcattttttattgatatatttaaataaatttttaaataaaagttaagaatttaataatttagaccaatcaggcacatcactactgacttcacactta

SEQ ID NO: 72140 - DNA, 862 bp, Cannabis sativa
agaaaatctggaaggagcgcaacagcagaattcaccatggaactgaaactcctatgcctactgttctgtttcatactaaccaaagactcttggagatgctcaatatccactccccggagatcactacgaaccaatgtgttttgcagccccccctggttggacactttgtaacaccgatatcgtaattggggatacaatgtctgctggggctgccatttttaggaatgaccaaggcatagtgtcgcatattttcactaagcgcttctcttactcagaatctctaccaggggaagttgctgcattggcttggggtgctgaatcagctcataggatgaccatttctaatgttgtcttcctaagtgactcagtcgaagctgttaattcagtttgttgtaagattgtgcagggccgacccacctcacttcaccataatatacaagacttggtcaggatatttcaagacactgctaatcaacttggcctctgggaggtctcttggatccctcggaggaacaatggtgtggcgcatacggtagccaagtgggcactcgatacaaaccagtttgggtttattgatctgtccaattttgacagttccctgcttcactcttgagcagatggctgttggtttcttttcctttgttgtcttttgtttttcttaggcttgctaatcttgttatcttaggttcttccctgttttctgttttgttcgttggtatttggagtctagcttcatgctattctggtttttttgttttcagtttcgaactttgttcaagtgggttgtttttgttgtttgaggcttatcatcagccaagtaattaaaaaaaaaaaaaaaattttaagagtaatttgcggcaaa

SEQ ID NO: 72141 - DNA, 599 bp, Cannabis sativa
cttggttggttcactctgtctcccgtgagattgcacagagtataatatattttgatcttgctagacatatgtggcaagatcttgcagaaagatttaatgagggtaatggccctcaaatctttcagctgcaaactcaactcacctgtttgcagcaaggtgatcaatctgtcacctcctattttaccaaactaaaattaatttgggacgaattaaaagaattccaatccaacactacatgcacttgcggtgcaatgaaaattttcttgattattacaatcaaaatcaagttttacagttcttgattagattaaatgagtcatatacttccgttcgtgctcaaattctcctcaacgaaccaattctaaatttttcgagggtgtttgccctaattgttcaagaaaaacgtcaaaggactcttggttcttcagattcacacaattttgcttcttctatgcgtccttcctcttccactaatcctctaagattcaagaaacctcggccttaattatggtaaacctggacattatgtcgacaaatgctatttcatccatggcttttgtaatgaccgctctagtaatttggattagtaagggcgatta

SEQ ID NO: 72142 - DNA, 1602 bp, Cannabis sativa
caaaagttattgacaaaagcatcaaccaatttagaacctttcatgttggtttcaagtaaggctccaacaccaattttctttattctacaaacttcaaccactgcctcttgcttcttagagctattgaggcccctaacgttccaactaagaatgttattactatccataaacaagtagattagtaactatctcagttttctcactgccttgttgtgtatgaaaaacctcaaaagtattagacctagaagcattaccttcttcgccattcggcataaaaataggtttcttcctggtttggatagttttggtgtttgccattccccactgccaactttctttgctctacctcgaatagcaattacttctccctctgacttctctgtctttttaatctcctctccagtagcggttgaactcgagtccaccatcttgttctcctcagttgtgcctacatcaatagaatcagcatctatagttaaagcttctctagtgtctagcttttttcctttttccttgccagcattatgactattattaccttccttttttgatccctctgcagcctttgacatttttctacggtgtgccatcctatcaccataaccattacaagctttgcagcgagtagctagccattcatagtccactgcttgttcagaaagtctcccatgttcatccgtataatggatgattcttgggggtttatcagtaatatccatctccacaagcaccctagcaagcttcatcatttatttttccttcataactttatcagtcattaaaggttttccaatcatgcttaccaaagcactaaggcatttcttcccttagtaatggagatgaagacgaatccataacggaatcgatttaaccaaacgcacaatagttaaatcagttgtccatggtctcaccacaaccggcttcctatcaaactgaagcacaccctcttccaggaccagatcacttgtggtttcatcattgaatttaacaatggtgaatcccccattcattcgaacaacttgagaaattccaagatgcccttatttacgttttatgaatccttcaaacaccgaaagagtagggtttgcacatagtaccatatacacaactgttgtattcaagttctcggcttgcaatttagcctcttctacatcagtctgggctattttgattccttctttaataagcggtttcgataggtcaaagtagtctctcgaaaaaaaagcttaccttctgtgaatttcttctagctttgctgtgctttttcatgaaaatcagcctgctccacctgatctgccctaattttcttctcctctcgatcttcatttttatcaaatttttcccagtcgaatccacttccacttcaagaagatcttcaggcggaattgcctgagaaattaagtctagagcattaggatttccattcgattcaatcttgttctcatcatcttggattgaagggggttctgcaatgttcaatctcacaacatgcttttgaatcgtgcgctttttctttgccatggaagagagagagcagaccacacatgccttttctttatcttgtcttgtccctttatttgtgcaagttttaaccttttccta

SEQ ID NO: 72143 - DNA, 1057 bp, Cannabis sativa
agaaaacttgatagttcttgaactcattctaggaaaatcatagaaaatttaggtttaggaatgcaaaatcttgactattcttaacgatgttgctcgattataactgcgttttgattttgattccacggtattcacattcacttacctattcagggcttagtgaaaatcaacccttaattcgtgattttgaaattctgtattgtgaacctcaataccatgcaaaatttctatttttgattccttgatcggacttggtcggtataatcgatcagttttttgttcattatccctgccaaatactcatcttgtgtcctaccttttgtagatgaaccctagtgagttttgggaaagtgaacatcgtatcgaccatgatcttcttcaacttctgtacgaggatcatcctcgtctttgtgccaatccatcctcatctagtgacggtctctaattcaagctttaaagattgggagataagtagcaaacatacaccttccctagatccaaagtgcaataccatttttaccccgaatagatcgaaggtcaaggctacggacatttttatctgggagcttagaaaggggtggaggtgatatttaccatccaactggacatatattgtccattcagacacagttgataccttacctgtaggccgtccaaatcctactgctgcaggtatgcccatcgctacatttgccgtgactattgccagacataccactcgggctctgtccaggaataggatgatggcacacactaaacaaatagtgcgaaagtcttctctaactgacccacacgtagctcggcttgccacaatgccgagtgcgaagcaggctcgacctgctattgaggaggaagacgttgagggggacgctgaagtccaagagatggaggatcagggcgaggtctgtcctgatactccttctgaagatgaaaaggaaggtgctagtaggaggttgcccttttgtggcttcaatgaggatggacaacctgttgggttttatgccctaaataaaactatatttcaatgtaatccattttattcaatatcaataaagaa

SEQ ID NO: 72144 - DNA, 599 bp, Cannabis sativa
atcctcttattttaaattattagccgttgtattaatatttgaaagatgtgagacatttctatttatatataatagctagagacagaattttgaggccgaaaatattaatttagttatcctaaaataataacaaatgacaacctaataaagcattacaatttaaaaagtttaatcaaaataaaaatcaaataaatcataataagcaaatatgtcactgtattacaaaaatacagataacaaatataaatatatattaagttaaattgaataaaaaaagtataaagataagtgtggagcaaattataaaataataattatacatgtaagcatgtatgtagatgaattggttcaatattattttgtacttgcttaaaaaatattatttttgtactaataaatatataattaagtagtacatgtaataggaatataaggcttaaataattattaattgacattagatggtgatttaaggaaagtaattttaattgatggcaataataataataatgaattcttaccatgaggaaataatcttgtacaagaatagcatataaagtccaaattccaccattaagaaattggaaaaatgataaaag

SEQ ID NO: 72145 - DNA, 1168 bp, Cannabis sativa
gtggcgtccctgttggacagggcgttacaacggttgagcatccttgggctcctgctagtgtcttcaagaaaattggtgctactcgagtggctctacttcagtggaataagactcaattcggtaatctggattgggtaattaaagatttggagcagaaacttgatcgtctccagaagttacctgctggaggtcgggactggaaggaggaaagtgatattcatcagttattgaacgagtctttgactaggaaggcaatttattggaaacaaagggcgagaattgattggatcaagaatggtgataaatgttctaaattcttcttcctctcggctgctattagagaagacgaaatgccattgaaagcattatagatagaaacaatgtctggattaatgaccgggagtcaattgggcgtgagttcatcgagtttttcaaaggtatcttcttggggtcgggtcctgggcaagctttggactgcagaaatctttttccggctagactttcccaggaggaccaagatgggacttctctctgcccttctcgtgatgaaatcaggaggacgttatttgctatgaataaccacaaggctcctaggccggatggaatgtcagttctctttttcaagcactactgggagtctgtgggtgatgccttctgtgatgcagtagccgacttttttgagtctggtaagatgcatagaggtataaactcgactaatgtggtccttataccaaagattcagaacccgaaatgacctaatcatttcagacctattgctctgtgtaatgtgatgtacaaggttatttccaagatagttgctaacagactaaagcctatcctcccttctttgatatgccctacttaagcggcttttgtcccggggaggaatatccaggataacaacgtgatcgtacaggagattatccactcttttaacaggaagacaggcaaggagggttattttgcaataaagattgatcttgtaaaaacttatgataggttaaactgggaagccattaatcaagtgcttgagtggtatggttttccccaaaagtttcgtaattgggtcacccagtgcatctccaccacctctcttaatgtgtgcctgaatggaggaatggtggacaagattatgccctcttgtggacttcgccaaggggatcctctt

SEQ ID NO: 72146 - DNA, 1709 bp, Cannabis sativa
  modified_base (1659)..(1670): a, c, t, g, unknown or other
ctgcaaattatgatagattgagagctttgggtgtattgcctatgctcacatcaagcaagataaattggaactaagggccagaaaatgtgtctttcttgggtatccagaaggtgtgaaggggtacaaattgtggagcatagagagtggaaatcatcaaaagtttttcataagtagagatgttgtatttgaagaagacaaagtgtacagggatacactggaagcgaattcaaacaccaaacttaagaaagatgatagtaaccagtttgaggtggaacttgtgaagggcttgacaccaaacaaccaagaattgaccccaggtacaactactgaaactgagttggaagtagaagatgaaggtggagaagtgactcgtcaagaagaattggaattggaagaggatgaggatccaagcatcctgcaataccagttcatcagggatagaaccagaagagcacataaggctcccaagagattcggatttgcagatatcattcactatgcattcacagtgtatgaattctgtgagaatgagcccagaacttacaaagaagcaatggagtcaaaggaaagaatcaaatggaatggtgcaatgaaggatgagatcaggtctttaataaaaaataagacctggatactgatcataaggccttctgatagaaagataataggctacaaatgggtatatataagtacaaggaagagatcccaagggttgaggaagcaaggtacaaggctaggttggttgccaaaggtttcacacataaggaaggagtggatttttcatgagattttttcacatgtagtgaagcacacttcaatcataatgattctagcaaaggtagcaatccaagaccttaaacttgagcaaatggatgttaaaacaaccttcttgcatggggaattagaggaggagattcttatgaagcaatcagagggttttgaggttgagggaaaggaggaccatgtgtgttttcttaagaagtccttatatggactaaagcaatcactaagataatggtacaggaggtttgatgactatatgatcaaatcaagtttcaaaaggtgtgcatatgacaattgtgtttacatcaagagttctaaggtaaaggtaactatttacctattaatgtatgttgatgatatgttgattgtaggcaagtacatgggagacatcaacaaggtaaaccagatgctatgcaccgaatttgaaatgaaaatcttgggccagccaagaaaatccttggaattgagatctacagagatagaaagatcagagaactagctctatctcaggcagggtacatctcaaagctgttaactaggtttggttttcaagatgccaaacctgttagcacaccattagctcaacatttcaaactatccaatatgcaagcaccctcaatagaagaagaaaccaagtatatggagaaggtaccatacacaaacttggtagggagtatcatgtatgtcatgatttgcaccaggccagatctatgctatgcaatgagtatggttagtaggtttatgcaaaacccagggattgagcattggaaggctgtcaagtggatgatgaagtatctaaagggaacatctactctgggcctaaggtatcatttgttggaatatgttttactaggatctagatttactaccatgtannnnnnnnnnnntcctaaatatgaatctctaaaacaatataaataaacaca

SEQ ID NO: 72147 - DNA, 724 bp, Cannabis sativa
aaattttttttctgaatgccgaaataagttaagggtgcatcaatacatccttttaaggaggtgcattgtagaatcacccaataatatataacaattgttttagcaaaattaatttggatgatattatttctagagagaaaaaaaaaacacgtataataagatttatagtggcgactggcgagtagaacacagctcttcatgtattagtccaaataatacataaataaataaataaatagttaataagagcgctggctatggcttcaccaacatccgtcagcgccgttgtcgctcctccgtcattctccgcttccctccgccgcagaatcaaaattcccgccacattcctccgctcaccctcttccgccttctattttggtccaacttttcccactgcctcctattccacccacacttcaggtaaagcttccaatccaagctttcatttttaatttcttcccactctttcctgtttggttgcttagaaaatagttcagatgaaaagaaaaaaagaaaaacaaaaattaagcctttggacatcttcccagtgttcttctagtggtgttactttttgtttggattgaaaattttcttgtagtggcagttggggatcataattggaacagaaggggactagtatttactgccacactgccatttcttattcctctgtatgaatccttggatagtgtttctgtaaaagcagcagagtaagttttatttt

SEQ ID NO: 72148 - DNA, 880 bp, Cannabis sativa
gaagaatctaggtaccattactggactgtatgtagaggaggagtgattcaagtactgttttgtctcacttggcgcatgtaggagggggtttactttctattatcctgtgataagtatcaacgacacattcttaaagatgaagtatggtgacgtaatgttagttattttggcatacgatgcaaacaattgtttctgattgcttttagaatagttgacaatgataataataactcttggacatatatcttgcaaaagttaagggaagcaattgggtggttgagaacttagtatttgtgttagatatacatcaaatcataaaccatgttatagcacttgttttacccaaaacatgccactctgcctattattacgatattgttatgaacatgaacgccaagttcaagattaatgcatgtcacaagcaaatatggattgtagcttactcgtggtcaaagactgattgtgatagacagtttgagaagcttagacagatagatcctacttttattgcatatgttgagattataaagtttgaaaatgggctcgtccttattgtttatgtgatcgttacagcataatgaccaacaacgttgtcgaaaacttccatagtgtgatagaagaatttatgaaatatcaaataactactttggttgaatttatcaggttcgtattgcaaacttggttcgttgattgccttgaaaaggcagacaaatatgcaattcctttagcgacccttatttgaaaatgatttggcaagacaacataatggcgcgaggttcaaaagcctccaacgaaatagaatcattttgtttcacgttggtggggtcctactgatgaaagaggaggtgatgtgaacctagttgaaaggccatgaacatgc

SEQ ID NO: 72149 - DNA, 2335 bp, Cannabis sativa
tattattagaaagatcaagagattcgagctttttcagttttgaaaattggtctaattgcacgacaccactcatattatttgaggaaagaatcaaagaagaaagattggcttgctgaaaaattgacgttggaaagaagccttgtaagttattatcatataaataaagagacaccaaggaattgtgttggaattcctgaatgctaccactgaattcattggaacttagatctaaatattgtaaagatggaagggaatatatccaagaaggtattgtcccgttaagctgattatcaaatagatccaggaatgttaaatgcaatggaggagaacctactaactgatgttttgaaaagacacacgagaatggattttttgttgagttactacaaatttctggaatttcaccgatgaaattattgcttgaaagatctaagtggattagctgctgtttatttaaaatggatgaccatgggaagaaaccacctaaacaattataagaaaggtctaaggaggtgatttgtgtgcaattgtcaagaaatgtgggtgatagttgtacggaattgaatttggattgagaaagagatataacttgtaaatacttgaactttctacaaaggtaaggatctatcacaactccagtgtaagaaagattcaacactttaagtgggctgctccaattatattgtggaaaagaaacagtgagatttgtgttgtaactcaaatcgagttgttgaaggtttggcgaactgagaacattttgtggaagtttcccttgcaaattagtttcactaagatgaagagatatcaaagaagttgagagattcataaaggaatcaggtgaagtagaagacatatcaacaccactaagaaacaactctctaagatttgttagatttgcaacaatggttttccaactagattgtctctagtttcaaaccagaaattcccagtcaagtcaagtgtaagcaagttggacaagtaagacaattggagagggacttggccactgaaaccagagagagaaaggtcaaggtgaaccatatttgaaaacttaccaaattcagatgaaattgttgaaggataaaaatcattccaagatagaataagagattggagattcgagagagagaaaagagtgttgttggagtgaagaatgccttgaagaccactgcatttgaggtcaagacgtatgacgtggcctgtgatgtcatcgcacgtgactccactccatctgcagcaatccttgctctttgtatcccatgaaattgtattgttaggaatgctaattccataatattccatacaatgtagtgtatcattgaagagggtgaaagagtttttaaagtggagcaaagaagagaattcatggggatggcacaatggagaagacgaagaagaagaagtaagaaagaagagaatgaagattagagagtacagacccatcatttttagactgagcttaattagcagataatattaagctgtatgtgatgagtgtgtgctattgcttcatcgatatttataggcactaaacggaggaatattaagctatatgcgatgacttaattccatttatgacatatacttgacttttcatttatgacatattaagctatatgtgctattgcttcatttaatttttatttttacttttctctcaataaaaatgacattaaaatatctctttaattttttttttttgaaaaaaaaaaattataaaaattttctagcttcacttgtaattattttagttaaaattatattattgttatctattttttaaaatgatatcaatttgatatgccgaaaacatatatctttttgctattaccatagaaaatgaccaaagtaataaataaattattagttttttttttcaatttgattaaccaaattttaaataaaaaaaaaatagatgtgtcaattgattaataaattactctagtttctcagtccctcagcattttgttttgaaatggtgttttaaaaggctattctctaaaaaaaaagtatcatatctaaaaattttcatagtattctaaaaaaattaattttattgaaccattttgatatggttctaaaaaaagaaaaaaaaaataaaaagtgatatttgtaatattttaatttcttttctaattaatataaaaaataaaaagtgatatttgtaatattttgatagtagataaatatttttttttttaaaaaaaaataatataataataacaagacaaagagtaagtgtaatatccagtttaaaatagtatttaatttttttgtttggatattaattgtgcgaggataattatctcatttatttgtgttgttagtaagttga

SEQ ID NO: 72150 - DNA, 1258 bp, Cannabis sativa
aaaggtgaatggatatattacatatacaaaataagattttttttttttatgcacaaaaggagatcacctggtgcagatacttttcccattctttcagtagcttagataatcttaagggccacgctctcaatcttggcaagattctctcttaccttattgtagatatagtcttgttttgcgacacctaccagctccaaaaattgaggctacagtttatcagcaagtcaataaactcgttaacaaataaaatgaaagaaaattctaattatccttgtgtcaacacgatgatcaagaagtttcttttgattcttcacttggtatgagatttgctaaaagttgggaatcttctaacaataatgagatattatctgttattattattggttatcagaatgatatttttagggatttcgagaaaaaatgtgatgataagttgtttttcgccgtgcttttgatggaagtttctttgtgttctcttaatcttcttccttcgaggttgatcagcactgaagaggtttcgagtttagttgaacatgtcaaaaaactgataaggaaagagttgaagagattatgaaggagttgtatttgttgatggatggaattttatatacacgtttgcttggatctcacggcaatgcagcttcaaaggaataaattgttcttacgtattgataatgtttggagcagtactcttattcattaattaattttgataatcatgtaattagttcttcaaattttcttggttaatttaattccaacactggtgatgatcatgatgattaaataataagagtgtttcacttaattttccttttttttttcatttttttaatgtatatttttcagttttcttgatcatattaatgcatgcatgcatgtatgtactatagatatataaagaaaaggtagacataatataatgattatttaacattaattaatttttttaaagcctctctatctattgtaatttttttttaaaaaaaaattatttttaacactataaattattcaaaatttttaaaaaaatgtgaccctaaatacaataacatatatatatatatttgatcatcaaaaaaatttagaaattcttctcaatatccaactagtaaattaaaggtctactagaacatccgtactattatatatatatatatatttctttctttctttctttttttaatatgcatttcatttcataatttggttttctagggctcgtttggaacgtcgtattagatcgtattatattgta

SEQ ID NO: 72151 - DNA, 786 bp, Cannabis sativa
tcaaaatatagttaccctaatgtttatatataagaaacgtgtggtacattggagaaatataaggaaagctttcaaaatttaaaatcaagacatgatacatgtacaatactttttgaaacaatttaatttaaatactacttagtacacgtgacatcaaggtttaagaagcactcaaaccacacaacaactagcgaccaataataataactactcctctagtctaagtggaccgagtataatgaagtgagagagtggagttcgagttcaagtttgaagtatatattatcactatgtacataggaaatcggagttatggttcccttttgaccaagtatgggagaaaaagatttgaatttaggtattttatttagtatttaattaagttaactatagtaagctaaatgagaggcacgtaattagtgattttagttaaactttgaggctataaataggagctatcattctcacatttcttcattgactaaaagccaaatagctatccactatactctctcttgcccttcttctatactgaagttattttattttatcttttatagccaatcacttgtttttgcaagagccaagatagccatacacaccatcataattactacaatctttaaacaccaacgtcctctcttaaacatcaccatcattctcccatacgtatatacatctccttcatcatatcgacatcaccatcactactatttttacattcaagttttagtgctcaactagatctcattggaagctaagtattcatagaaagagtgtgaatag

SEQ ID NO: 72152 - DNA, 1075 bp, Cannabis sativa
acgattttttgttacaatttaggtgtagcgctagttgcaatagaagtttctatgtagaattccgtaaaaatacaaaaaaaaactgttatgaagtgtaaaaataaaaaaaattccttataaatataagactccctaagaaaagaattctttatttgtttgattatcaattaatttttacttcatttttttgtttttgtttgattgctttataaatgtcaatttaataaaataatttggtggaattattcttatcaaaatctgaaaggaaatgttattttgatgcatgtatagccgaatctcattatttgtaggctttgcgccaaaaacaggacattttcactgtcaaaattcttgaaaaaaaaattacttttaatacaaacagatagttcaactttaattttttttgacaatttaattgtcaaaatattatttaatttattataaatatttaatgtgaattaaatattattttcttgtgtgatttcgattttgtagctctaaaattttcataaaatagaaaaaattcttttcatagaaagtttgattaaatgagttatttttggaaaaattaacttactttttgctagttgctcttttcatttttgttataaatatagtagattgtataatcaggtattaaagtccaaatcgtgatattgaatttatttgaaaagtttctcgatttttcactgtagattgtaattttgtcgctaaaaatcaagacttattttgaaaaagttttgtacagctgtaaaaacttgctgtgactgtctctaagatttctatatattataaataggacctagggagtaaccaaatatttttttatcttctagtctcatattttcatatcttagttttgtgagaagagtgttttttttttttttttgtaaaaacttagagtgttcaactaggttttggttttcttataattatctcttgttgttcataaaatagattgaagagaagctttcaacaagtatggctcttcgggacaagactttttactacaagaatgtcaggtggcaaaattcatgaatttcgccagcatgagtttgttgggtttcatgcccta

SEQ ID NO: 72153 - DNA, 869 bp, Cannabis sativa
atattgattgcaataatcaataaaggtatatgagaaagtttagaaaaaagaataggaagacttagtcattgacttcataaaatgaatatttgagttattatatttagatttgaattttgatgtgattgaattcaaataatataataaagtagtaataattagatatcatttattcttcgagaatatagtgattgatatctacaatgaataattgctaaatatgaacttagtaatacatatatatagaaattggggatattgttaaagtattaaataaacaatccaaaatgatattcaaagtatgaaatacaagttttaaatattattattgtttaattgtcgaaatttagggatacttgtacaatgagattaaataagtaataaatttcaaatcataaattaagaacagtcttaattaaaatgatcaaagacggtgaacaataagtgtgtctaatttagtgagagcattaagtataccgaggtgaatccatttgaaagagttattagaatttaagattaaagggagaaaattaatcgaagaatatatattatagtatcgtttcaaaaacgagaaataaatattcttattaattatgtaatcttaaattaaagaagcacttaaatgtgacaaggatgtgaaatgaaacggattattccaaatatttaacatgattagctatggaatctattgacttcattaataaaattaattagatatgactaatagagggttctagattaatcaatttcaaaattaagtgtgaatagacatatatttaatattgagaatattaaatgattaatcaaacagaatgaacttgaaagaaataaaagaatgaacaaactaaatatactagaattaaattctg

SEQ ID NO: 72154 - DNA, 690 bp, Cannabis sativa
agatcgacgatccaacttttgcattttctccatcaaaaatggggaaataggtatttttcagggaataaataacacttcctgggtgtcagaggcaaggcatagtgcccaggttgacatcttgtcaacttggaccaattctggtgaagtttttcgagagctcttccaagcttctctattttcaaaaaagattaagattcaaatatttttggggaccaaacagaactttcgaagggccataactggggcccagcacgcaggttgacatattgtcaacctgtgctatttccaatgaagttctcgaaaaatatgttctaggaatttttcctgtcataaaaaataatgaggattcaagaaaactcagggagaaaactagaaacccgagcccttcgaaatagggcccaacacctaggttgacttggtgctgggcctaacgcccggttaacaatcaacctagtgcgctactgtcgattgctcaaatgccaaagctgattcgaccgatgaatccagaatggcaaaatatagggtaggaaatcacgccctcaagttcaagaacctaagaagtatcaaaaccagatcctgggagcttaggaatgagtacccaacgcccgggttgacaaatggcctgatgcttatccaaatctgatgttgtttcgatcgtctgtctagtttttcacaataactaagatctat

SEQ ID NO: 72155 - DNA, 1248 bp, Cannabis sativa
taattacttaataactatttcattattgtcaatctagcgaacgggtgtggcttagaagtctagtccaaatttttgagtcaacaataatcatatcatcaacatacatggaaagcagaatacgacctacagatgtgcacttgacaaataaagttgaatcatgatcacttgaaacaaaaccaagagacaaaacaacaatatagaacttctgaaaccctgcttggggaacttatttaagaccatacaatactttttatagcttgcaaacctcgccttgcttatgaggaacgtcagaaggaggaaccatgtagacttcctcatgtaagtcgccatttagaaaggcattcttaatatccatttgagatatagtccattggcgaactgatgccactactataagagtacgaacagtagttatttttgcaacaatagttatataggccaactaacctaaaaaataaagtataataaccccaaataattatttaacagtaatttcttcgcttgttatattgactacatgttcggcattgtgctctattcaatacatatttatgaagatgtagtcattggaagatattatagacatgatgtagcgtggacagtattttaaaataaattaagcttcctaaatcacgtggctttgaagttatctaacctctcatatcttcacagatggcacaacaaatttcgcacactgttatcctagctttgcagtttccgtgggtgtcttgtttcgaggaaaacctgttgctgcttctgtggtacaaactacaaattaattggattaagattattttgttgatgtcatttgcaatgttgcttagttgttagcttgctttggatctaactacttgattttgttatgacaggtagtctgccttttttttgtcacttacatgacacttcccatattcagcactaaactgatattaaaattaataaacattaatgatcctaatagataaattttgttctttgagatttatttgtctttcccttatctgaaataactacgggcatgttcgctagctttataactttgtaacaatttcttatcagaatcgctctgtaacatgagctcctatctacaaaaatggtgatctgtcatctaggtggacatagtataaattctgtttgagctgattgaaaaaaaaaataaaaatggtaggttatgctactgtctccctgcattagtgtaggattcttattgtctcacaagataatattttctttaattatctccttgtc

SEQ ID NO: 72156 - DNA, 760 bp, Cannabis sativa
actcgtagcaatttaccgaatactaagcttaatttttttctaccgttctgttacagttgttttttttcacaacacgatcacaactgttttttcttaaaggacaattatactaaattagcccttaataatgaaaagaattattaattattaaaaaaaatatatattaaaaattatgacaaatttgtcaatactaataaaaattatgataaatttgtcaatactactttttcttggaatgaaaatagaggctaaaatcggccactacaacgttcttgatagtaagaggaagagtgctatcagaaaaatgacaatttgaccatagacacacattgcgagtatgacaataaataatatcattagcagaacatttgataaaataaacttaaacatagataatagaatttaataaagatttgcaatcgtcaataagaatattaaaaataaaagagaaagaaaataaattttgaatcgcttgaaccaccaaaagagaattataccctaggcttcttgtttaatccaactaagtgcttctttaaatgcgaacaacttcagcaacagaaaccttatcaaaaaaaaaaacttcagcaacagaaagaagaacacttctataccaaaactgagtgaaagctcttaacacacgatctagctttacaagtttgatttgctttaaatatagctccattcatgttaattttgattggaaaatttgattttctatacttacatatacctaatattttatttctaaactaatacatat

SEQ ID NO: 72157 - DNA, 803 bp, Cannabis sativa
cctaaaacttaccttagtcatttcagacgatggtcgtgggttaggatgaactggtttaggcgcacatcattggtgagatgcaagggggtttttggtgaaaattcgagaccgtcgttttaattgagcgaagagagcaagaaagaaaggaaggagagattgagtgatacacagaggcggaggggaatggggtcatgccacatgaccccactcaactctcaagaaattatttttttgcataattttgttttatatattttcattttcgcccccacaaaatatttttttaaaaaaatttttgccatcatatattttcatttttacttttgtaaatttataatttttttatctcacatattttaatatttattgaagaaaaaaattattttcattttcattcacatatttatttatgtccctaaaagtttatatttttctttcttacaaaaataattttttttctttataagttacttttgcaaaaaaaaaaaaaaaaacttttgcccccactaacatttacggatagctctgccactggtgactggagtgattttcaaaatgggaaaaataattttgggtattataaaaagttgacatattctaacaatattaacaatcttaaatttagtgtatcaatttaccccatatgtatgcatcattagtcaactttcccttatataaatgctaatagtcttattagttaattttcgtctctgaaattatatgtgaatatttttttttaaatttttttaatagtgatattcgctataattacaacatcaatcctgttaatttttaaaaaattt

SEQ ID NO: 72158 - DNA, 916 bp, Cannabis sativa
tatttttggaggttggggacttatctgtatcaaactgaactttttgaggacttttgccgtaaatttctcttttggataaaatttgaaggataatttcataattttttttataagagtatttttgggtagtattttttttaatatgtatttcgactagaagagtttttttttttttataattatttaagattgttaataaatttttaaaaaattaggagtaaaatttaatattaaaataaaaattaaaataaaaattaaaatactttattacatgcgacaaaaaattaaactgaaaaatttttttgacacggtaaactatttagaattctcaaaattaatttacatgttatcttgtatagccgaattatgaaaaaattaaactgatgaattttttttatgttaaaataaatagaagaatctaccataacaaccttttaaaagtgtgtactacaatttcttaaaatttttgtgctttataacaaatctagctccttggaagccttggtggggggtctacgttgtttgtttatttataatatttttttatttaacttaatataaaaaaataaattaaaaaaatttacgtgtaattcgtcccattaaaaagaaaaaaaaaaaattatccaattggaattggttattgaatttggtcggaaatcacgttgggtgatattcctcataatgagttgtgtaattacccgccatggtcttcttagtttcgttcaataaattctacgtttcaatcaaaaaaaaaataaaaaataaaaaattataagagatatgagctgagctacaaaagactttattattattattatttaatgttataaacacagtcttttattaagtagttattattatataattagatattagatatattatttgagaagatgaagatgaaggcagcttggtc

SEQ ID NO: 72159 - DNA, 551 bp, Cannabis sativa
aaaggaagaagagagaaggagaacaatgatcatattgtggaagagaaagttatttactgaataatgaattatgtagagttacttcatgtgtttgattatagtttatgctaatagaaactgttttgatgatgccttagtaaactcaagagttgttgatttctcttggtttccaatccgggtggaaattcgtgttatcttgtgatattcgtgttcgattgacatgttttacttgtcaattttaaccagattcatttatatttcgtatcaagaaatcttaattttaaccaatcagctatgttctcatgtcgatctgttgtgtttgcctgtcgactatatttatattacaatacatgttgatcaacatggtatcgtatatttaatttttacaaatataatttaccacaaatgattaatccaatgaataaaatttttaatatcaaatataaatgggcttttttacaaaaatactaaattttgggggtaagatttatatttatattgccacgcggcaaaatttacaaaaatattgccctgatcttttttttttttct

SEQ ID NO: 72160 - DNA, 978 bp, Cannabis sativa
aacttttagtacacatattttatttatgatattgttatttattattttttaaagattgatttattaataattattaatgttattttactgttttttacaatttgcatcataaaatattattgtgtattagagcatgtaaatattgtaattaatgtatagcatttgttgattattttaccttagcacaatatttaaatcttatattgatctcaaatttatattttacatataattaatctaattctacaatttttttttattattactgatttcaattagtacttgtgaacccacttgaaaatataaataattaaaattaatttataaataatttatgtaacttcatacaagaaaaataaattaaattagagcttttttttttttgagagaaaattaaattagagctttgatcacaaacatttcatctcatctatatatggatttgggtaattacacacttacccttctttggacccatgaaatttattatttcatatcaccattacatattgttgtatctgcaccataattacattaactattaatcaagtaataataaatttaatttacggaggatttcaaaaataataataattaggactatcttaaaaatttaaaaacaaccaacaaaattacgtttttacaaatttttaattttttctgttttacatttttatggattttttatttttttacaaattgttatttttgggctgttctaagaaaaactattatttgcacgttttcacattgtaaaaatataatatagcattacggcaacatgaaaataacattatttttcctctaaaaaaatcataaatcttgtaaaactgtaaagaaaaaagtccgtaaaaatatatatataattttaaatactttaccatctcaaacatagagttgatcttgcccttcatattctatgttggtggtcagattttgcgcatttggagtgcaatgatttgttgcactcgagtctgg

SEQ ID NO: 72161 - DNA, 1983 bp, Cannabis sativa
  modified_base (662)..(669): a, c, t, g, unknown or other
acaaggcttctatccatagcaactggtattagaggaaacttgtggaaataaaagatgaaatggtgaaagtgatggatcctagtcaattcactgcgaagacatatcatatcacaacagagtataaaaagctacacaattctcaggagagagtccactggagtaagcaggtttgatctaaacttaatagccccaaacacaacttcatactatggttggctgtctaggatagacttaaaataatagctagactacataaactaaacattacaaaggtagatacttgttgcttctgcagcgaccaagaagaaaatgcttctcatcttttctttggctgtagaataactggaagctgtctgcaactagttaaagaaataagttcaggagaatggtttattctgcagccatagttggtctattatactttatttggctgtaaagaaataccaagatctggcaaacaaatttagaatcgaggcaattacctatataggagcttatgtggcaaatcaagactagaattacatgtatatgctaaggaaagttgaacaagaagatagaatttggtttgaacatttgtaaatactgttatgtatagattaattcttgcttccttagaaaaaggagagctttggttgtaaatattgacttagaaagatataacnnnnnnnntatgatatcttatctaatgtcaatattggtccagtttgatgtatactccatacaaccgatactagcatactttttcaatacctggaaaggacatatcatttatccaaggtgtaactttattgttgattatcatgtcagtgtaaatccagtgtactgacaaatcatgagactaaactttgaaacatataatcatgataattttcaactatgtagacaacactataatcatgaataactatatcttcagcatttaatagaatttatacattaaacatataatcatgaaagtaatcatgtgaaccatgcaatataaaataatttatgttcatttattaattagtaaatttgattataataaaattgagttttatttagggcataaaattccaacacacccaactatatgtaaagataaactagtacaactgttttaaaaaaataacatatttattatttttttttcaaaaattatttatgtagagctataagagtgaatctgtaaacgaatgcaaggatgagaaggaaagctttttttttttttctttttttagagcggtcaaggaagttttagttaaaacggtggcagtctttaccaggttatgcaataagagtatactacctttagaaattagccatgatatggagtaaatgatgtccaagttctagtggaggtcattgaacaattctggaacaggtatctattggatatcctgagacttgttgtgtaggcacaaaagagtgggtggtatgaattttcaaaaaaaagactttaatcttactttttttgagaaacaagggagcagacttttcacatgaccagatttgttggccaccaaagtttttaaagcacggtacctcccaaaaggaaattatcttataatactaaacttgggaaaatccaactttgtttagtgtagcatttggtaggcccaacatttggtgcacaatgagattcgccgatgcattggagatgggagttgtgttgatgttttgggtgaaccatggcttcctgataataacaattcactgattatttataatcttccaaattcgctaaatgctatagttagttattttttggtacttggtgggggagttgggacgagaagttaattgctcatgctaagcattctgttatagttaacacgagatgttgataaatatatgttttgtatactgttaaaagtgcatatactattcttcaacgaattaatggcaagtggaaattgtgggtgcttcttatttagggagtgtttgcgaaaattgaagctgcctccaaaagtggaaaacttgatgtgatgtgttggtataagg

SEQ ID NO: 72162 - DNA, 539 bp, Cannabis sativa
agagaattgagtcatatataagaacatgggctacactcattgccaattagttttgagatagaatttcatgattctcaacatatgttataaaattttttgttttaatcttgttgtttattaattacaatatatatcctatatgcaattgcttgttctctttattaaagagaaacatattgaagaggatagacgccttgtacaccaaataaatttgttaactgaaccttttttctttcacagtaataactaaaaagtggattgtgtgatgtgttttttaccatgattatatataattcagattcatatacatatgtaatatatatatgacttaaaagtacattaatttcatccttcattccaattttaagttttctgcaattttcttctgtacacataagtttgtgttcgtgttttagttttctctatcattccattgtcttattttatactttagatattgccctttttttactacttcgaccgggttgatcaaattttccatttaccctagaatctgtcattgtctttatttatgttac

SEQ ID NO: 72163 - DNA, 692 bp, Cannabis sativa
ttaatactgtccaacagagcttcatccatctttgtgttagcacgcgcaaacaggatcctgtcatcagcaaacataagatatagaaataaatatgccatgtataatgcctttattcgctgcctaaggatcaacttcgaaaacacatcatgacaaaggagaaacaagaatggagaaaggggatctccttgttggaggccccactttggaaagaattttttctgaggaactccgtttattaatactgaatacgagaccgtgcgaacacactccataatcaaactccagacttgactagcgaacctattacctcataggacttcttcgaggaaattccattcgattctatcataggccttgagcataccaagtttaatcgccataatccctccctttcatttctttttctttattgtatggattagtcttgagttaaaatagatgattctacaatcaatcttcctgggacgaaggccgattggaaaggggatatcaacttatcaataatcgtcctcagtctagtagtaatgatctttgaaatgatcttgaaagcaaagttacacaaactaatcggtctaaatttgttaatagtgcaagcattctcttctttggggatcaaacaaataaatgtataattaagctagcgctccagaacccccaaagaaaagaacgtttgcaccatttgagtcacctcc

SEQ ID NO: 72164 - DNA, 1929 bp, Cannabis sativa
taattgaatacaaactaaactagtgaagatggtcacatattttgaaggaattaactgcactttagcttggtgtgttcaaatttacactttgtatatcagtttatcatcaattaactacattacaaataagaacattgctaagtatcacttagagtttattgtttttcgattggttagcgatattttttaaaagttatcatatcaaattatataagacttgatatttaattagaccaataatgagatgacacattgaaaagtactaagcactattgttgctttttaagatatttctacaaattattagtaaataacaaatattgacaatagataatgttgttggacaaaaatagacaacatttaaaaaaagtgagtattcaatttatacaagaacactaataagtaaaactgagtattcacttagattggtgaatactcaaagaaaaacagtgattaataaaatgtacacaaaaaatacatcaaagatagattgtaattagttttatttaagttggatcactccattatatagaaaataagtgatccttcaatttacataattggtcagacaagatcattatatcatttattatacttaattgggataaaatacgtatataaaataaatgacaacaacttcgaccgttcatatttaatattcaaacaagtgcaattattgaagttgcacattggtcgatcatattccgagtaacacatgaactcacaagttcgttggagttactcgcatattgggtcttcagaccattcgggaacgcataaaccactcgggcttttatagatgtgcaaacctagtattttatggaatagaaagcctgcgactataccgatcgcgtattgggtatttatgtaatgactgttagttttgtggtattaaatcaggtacgcgaagaaagtatttatttagattatcattgtaccacaatcaaagatctctatatgtacatatattaaatctaaaattaaaagatgaaaggaaatatttacctcttgaagcgaatcagggtatcctcgaattttttcgtaagttgtatcctagaaatagtgacgtcaaactcacaccttgatcttccaccacacacaaaaattagtgtgggcaaataggatatagctatataatgtgttcttgagtttatctcaacatatgagcattaattttttttttctctaagtgaataatgatgtgattaaactttttagggtttttaaattatacgtatatagagatttaggatgataccgtatattaatttaaactaataaaataataataaagtgttaactaaaagaaatatttattatttcaaatattaaaagaataatatttaaatatttagataaatatatgtaaccaattctgttatagataattattttgaatttaaatatttagtttaaactaaatatctaataattgattgaggaaatctctcaactacttaagataatatctcaatcaccataaatatctgtaatcacttattaaattcaaatctatataaatatttatcttttattaattaatccaaaaataaatctaatgggacccatcttatcttctaagcgcctattaatgtgtcctaacataatgactgatgtcgccattgtcttaaccagataatggtgatgtgtttgtctggacaacactttgtctttttcctaatttatttaaataataatttttaaaaaatatttattacaaaataaataattactaatttggcaatttaaaatagatttttccaaacatcattatatagctttatccatcttttgatagtgttgtaaggtagtgatccggggaccatggacttataatactaagctctaataaatgagattatttattaaatctcatcaactaaataatattaattattaattccatgattactccactataaatatgaa

SEQ ID NO: 72165 - DNA, 944 bp, Cannabis sativa
gttcaagtgtttgggtgaaaagcttgcaaaattataaagttagatacaatcgatcaattttttatagctcatatatgtgcacaaattgacaattcaaaatacccagaaatataattttagtcaacactacatttacttgaaagggaaatgaaaacaatttttatgtgaacaaaatcaattttaacagaagcagcttgtaatctttgagaaactgtgaaaatttctatctgtcttttgatttaatgtgcaaactaaaccttccttcatgaaaaccaagactcgtaaaagtgaaaaacctatgaaaacagcaaatagaagacctcttgtccttgggattacgagtcctcctaaattctacttccagaattcgaaatagcatcagtgaaagctttggcaaaggtgatacagctagctcccgaaaaaaggtatggggaacagtaagaaagattgactggttggtatcaaaataactcccaaagtagtctaaaaatagccaaaatcttctgagttaaagggatcaatagaacaaatacattgatgccaaaggatccagcagtttataaagaacatcctaggaatgactaggcacacttatttgaaaccatgagaacaatttacctacagtgaatcagtcccatggattttcaagattcagaattctctcaacaactttacctgaaaaatgtcggcgaataagaattttccaatcaactggggagtgtatccgatgatagtctccaggcttcaaatatattacacagtaaaaaagacccctcatcggactgcaatatatataacataaacattgaaataatgtattccactaaatttcattcaggaaaaaaaaaacagtggtctcaccatccaaaggaaagactgaatgaaaggatgaaccacatattaccgtgatagcacagggccccagactttgggagaagccaatg

SEQ ID NO: 72166 - DNA, 1504 bp, Cannabis sativa
acctagtgtagtaacaacaccaagattctctttccaagctttgcctttttggcaaaattatttcagccaggacttttattgctagggatgtggaagttgcttgctctagcctatggaatactcgagttcgtgtggagcctactaatggtgttcttgctggtgcaaactgctttcggttcatttttgagtctggtgtggtgtgcaaaaggatccttgagcatggcctgtggtgtgttaaaggagatatgttggcacttctctcgtggtcctctggcttcggtgccagtacaccttcgttcaactcgatccgtttttggatccaaattcacctgctgcctcatgactactattcgaaaactaatgccaacatgctgggggcattggcgggcaaagtgataaagattgatcttgaggaatccaaaccagttacctggaagaagtggattcgggttttggtagaggtggacgtcaacagaccgctttgttgcggttgctacttcaagaccataaatggagtcaataggtggattcaattaaaatatgagaagctgggagttttttgcttcaaatgtggattactgggtcaccagcgtagtgagtgctcgctactttctcctgttacggttctcaatgagaagggagttccttttccgttattcggaccatggctgaacaccctctccaagtacgaatgttgtttctctgttaaacgtacggatgttgctgctgggaagataaaggagaagacatccggggccttggttgtgggcggagctcctgctgaccgcgaacttgatggcggcacggtggtagtgtgccaggtgaaaggtctgactccgctgctggagaaaggtgcgattcctccgaccatgggagcgggtccgttaacccgtgcagaagcctcgagatctatgcggcgccggtcttcgaggggacagagaggaagtatggtacgatcggcgtggcgtccgaaggtggctggcgtcgagatggcgactggtcttcatttgggtgttcactccttttcacctaaactgtacgatgaaaagccgtctgcacattttccatttaaagaacccattttgaatttagagggggggtgatgaggagaatacggatgaagggctgaggtgtcatgtgaatagagacaaaaggttgacccctttggttgaccatgtggcacataaagaagtggggccggcccaattcaactcttttttcaaatctggtgggcctcctaagttgtttcacaatgggccgattggtccaagtcttgggctgagagttaataccacctttaattctaatggccatttattttctgggccctctgaaattggtgacggaagtgggcttaagtccattcaaaggaagattggtgggccaggtacgtttggtgatgggccggttaataacaacgatttattatcttcacccgtgactatttttgccaaggaaaaagaagagaacaacatcactgctacatcagttttgggccaagaat

SEQ ID NO: 72167 - DNA, 946 bp, Cannabis sativa
aagctgtccattagtaaacaggagtaagcaaaggctagtaattaagcctgttaaaatattcacaacaacaccatctgcaatatatttgacaaatgataaccataaaatcacctacataaatctccaccccatttatacacaatacagtgataatctatcttaataattttgtagaaccatctaaattaaattcccacacatcataagtgtctgatcttcaccccacctttagaatggttagatccttcagtgtaggttttgttaaagttgacttgcaataatcaaaaaatacactgtgacacatgcaacccaagcactaaaagaatagattgagccgaaactaaaatgcattaaacgtcgtttaatataattgctagccacaaaatagctttgtccatgacctgttttaaaataacagctagagttcctattagaatatcatttactagtataacttaaaagagtgatgggatagagatacctctagtttattaggagaatttgttttgctctcttgaaagtttgtagaaggatttgtctctttgcatttttctgctggagtagcaatttctccaaattcctcctttacaaggatctctgatgttgatccatccaattttacgtccgagacaatgacttgctgaggctgcttcttatggaaggaaaaacatcaggtattgacagattgagaatattcaaaaatttatatatatatgtatgtatgtatatatcaacattgagatttgaacagacaatgaatatagaacctttaaggtacagaaagcataggaaaagtaataaatggtaatattaacaagcatatattgtcttcaaaaaatacgtgtgtgtgtgtgtgttagctttgtgaaaaataaaacaattaaacaaacaacaacagcccacaaaaacatatggatataacataaagccaaattaataaaaataa

SEQ ID NO: 72168 - DNA, 1290 bp, Cannabis sativa
agctagttggcagggaaaccatatacataaaggaccaatccagactaagaaaacaacaaatcccatctcttatgatttacaacatttgatgctgacttgttaaaataaaataaaatgaaaaccatattattgtttttttttttttttttttttagaaagagaattttattagaaccaaagaaaaaacaacctacaccacagcaggatgattagccttacaaaaattggctaaccaatccagacaaggatggttgaaaaactgtgtgtttttgttaacttaacatttcctagctaacaaattagcacactcattattggttctttttacataaatgatatttacattgtgaaaaattgtccagcacattgtgtatcttatgaagaagattactttcagcagagagatgatgaccctggttgttgatctcttccaccagcatcctgcaatcagtttgaacttcaatctggtttgttgcatcagctggaggattcttcaaagtttccaaaatcgcccaagcctcagccatctttgctgagcagatactattcatgtaaatctgaccagcagagaggatttggccatcagccttatgccaaatgaagccgagccccacaccagcaactttgtcgataacagctgcatcatagttgacacaaatgcagccattaggaggagggatccactgcttctaattgatggtgagacctgcctcttggtgaacaacatcattttcagctttgagaacattcagataggcagagaaaatccagtttatcagttgctgaccattcatgcttgggagttgcttccatttcctgtttcgattttctcatatagcccacatcactttaatagtatcttcaaactcatacctgttagttgtctgctcaatggccattaaaacatcaaacatagttccttcccctaaacttgaacagtttttgtaccaagaacagagtttccaaatgtttctaactttatcacaactccatattattgttatttctaaataaattttcattgaacaaaaagggtttttttttttttttttaattttatttttacactttaaaccagttttttttttttttacatttttacgaaattttacataaaaatccctattacaactagtgttgcaacctaaattgcatcaaaaaatcgtatagaaacctctattgcaactagcgctgcaagtactttagaaacccaaaccgtaaatttgaaaaaataatatatgaggtaattatcgaaaaaaaaaacacctctcttagttgaaatttattata

SEQ ID NO: 72169 - DNA, 981 bp, Cannabis sativa
aattatttacccatgtacagagccccacaatttgacaataagaaaagattagatatatttacctaacgtatagaaaataacactaattaaagtccatatcaaatcatcaattttggataataactactcacatacaaaattttataatgataacctgtataagtgaaaagaaacaaagaggattagaaaccatgcatctaataataagccaatgagatactcttatctctcctacttatgactaagtagcaagtattgtatctgatgacagtgttgaagaaaagttcattagccaaatctgttttcatatgctcaaatatgtacactaataagctccagtgtacagaaagagacaagaaagatcactatcagtccatttggtttcctaacattcttgaagaagaccaagtgggatatgctgattttttaaccaaaacttgaaatatgagctaatgtggtcggaatcctaattaatccaatctcaaacttcatgaaaatggttcgaaatttacaaaccctttatgctatgtatgttcaacataaagtatacaccttcgttaaacaacatggctcatgaggaaattgaacccagaacaagttctctattaattgaccaagtattacattatcaaaattgaactagaaggcagtggctaatgtggacagaactagtgaaataaagaattttatttttgacactgtaaattatttagaatttttaaaaaatttacaaaaaaaaaaataaaaatattccagcatataatttcgagcgttaagattgactaaaaaattgtaataagagattgtaattagcaattttctttgtaataaaatgtactttacatatacaatacttgcattatataatttttaaataaattgttgaaattaacttgagagtcataaacataaccaaaaaagtctcaagtttgaattttcctactaatgtaaaaaaaaaaaaaaaaaagaattattaaaggg

SEQ ID NO: 72170 - DNA, 1087 bp, Cannabis sativa
tcatcggcagtgtgggtgccctttcctcgagtcatggaggtttgagtgtagcccggacaaaagcaattggcgctcaaccctttcccctcgtaccgctttgctaatatctttgtgtaagcattcattgctagcttagacacagcgtagtccgtccacagatccggccaccctcggctcctccactgccccctcttcacatcttctagaaacaatctcaccattccatccacctcctcttctgtcacatcatctttctccaaaatctttcttatagtagggtttttcaatttctgaacatgccaataaataaaacaacagtataaatgttgagctcatatatattcaataacagtatgtatgttaaatacatcatgcatatataatttagttgcttacgttagttgagccaagtcttgaagaaatgttaagtaaacgaaaagtgttgggagaagagagacaaaacaaggggaagagggcctcagtcagtaacttggctccgtagaaattggttttaattactgtctcagcatgctctactgagttctctccgatgtcgttgaaagatactgctgcattgttcacctatatatatatacacacatatctcatgataggtttttttggtaattggataaatgttatgttataagtcacaagtgagtgttgaaaatataatcacataataattgatttcaatgaatgaataaatattggtggagaaacatatataataataattattataattgggatgggaagacttcactttttggcttgaaattaatataataaaagtaataaggaagcaacacaaacaaacatacaatatgaataaagttggaagtgatgtcaactttgagctataattatgttatgttatttatataatatttaatttttgttttcttaatggcgtctaatcttaaaataataatatatgaagagactaaatatattattttaagcatacacttgacaattttttaaacatgcaccctcgtgcgtgcatgaacttagctaagctacctatatttttcatcatataattatttatatgttatctcgtgaaattactagactctatagt

SEQ ID NO: 72171 - DNA, 1267 bp, Cannabis sativa
aaagggacactaacggtcaagtcagtaacgtagcttgaagtgagtagactagaaataagattgttatcccaaattttgcataggtgacacgtattgcttataattggacttgggctgagtatatctctctattgatccatccagatcaagtcagagccaaattgagtagagtttaatccttcaacaattatcatccggacagatttcaaatctcatagtaatctgagtaaaagcatgctgaacaagtgccgtttatcggcagtggtactcgatgagtaagaatttttagagatattttacttaaatgtctccataattatagctcatttaaaattcttattttcatgggattgatatgataaatagagtaaatcatgggattctgtattcgaatctctctaattatttcctattaatttatgataaatgaaatttataaatttcctataaatagtgagacaatattactattcagagatcttttttcgcattcaaagatagtagtcactctgtagaaataattgtacacttttgagaattattgtgaaactcacttggtcgtactttgtgatcttgataatttttcataagtaatacaacaaaaaagaagtaagttattatcgttataaaaggatgaatctctataaatactgtgtgttatttattgttcttattttattattatttaccctattgttattattgttttaaaaatttcgttggctaaaagtgagaccaacaaaataaaaagacttagctattatctttgtcaaaaattgaatttgaggttataatgttaaaaaaataagagtttagagttgaatgggtgtaatgggtaaagtgtaatatgcagaaggtgtgaggtgatttttctttgagaaggaccaatcccttaaataagattcactttcagatctagagcgaaatcattttacttataagactaggtcatggagtgaggatcgtagaccgattctcaattatagagtgctctatatttgagataagttccacgtagcatatttgaattcgataatgataatgagcttgcgtatttactatttaggacttaggcttaatttcgtaaatttataaactggtaaactaaaaatgtgttcttggcactattatttgccactataatattgtacagagattctttctaaaagaaataaaaaactaaaaaatttgtgaaaaataataaaaaaaaaataaagacttaattgctattattatttatagcactcaaaatttattatttcctttt

SEQ ID NO: 72172 - DNA, 1230 bp, Cannabis sativa
tatcaacatcatccgcaacagtaggaacgacatcattattatgatcatcgccaacattgttcatagaactcagcatctttatacgtcggtggagttgctccaaataagagctctgaaccaataaatgttgctgatgatcatgatttttattttccaaacgaagcttagggatatggacaagtttctccacagccagtcgtagagtgagactctgtccatcaccgtacttcaacttggtctgaaccacactgttgatggactcagagaccatcctcgccatcttgtcaaaccaaacacgttttatcatgggtcgacagcgctgatcttgttttttaaaatacatgttatccaaggtgaatgggatttccacagttgagaacattttgcaaactagtgccagtaatgactcctctgttgattcatataattcatctatggggtatacaaaatggacagtggaattgtggttaacgacagtgtgatgattattatggtaatggtacttctggatggtgttgaactctatcgtgagtaaatcatcattataatcatacacatctgggtctgcctccacagttatttccatgtataccaaaactttagagtttagtttagtacccatactttaattgattatagtcttatacgtacctacgtccgatcgagaactgctatgactagctatgggtgggtagtgtgagtacttaattataaagattatttatctatacgaatatatagattattaaattggtcatatataattctaatttggttaggaattaatatgataattactcaacctcattaaaaaaagtttgaaaattatattttatataataaataatatctttttttttaataaaacatattccgattataatatggatcaatcatattcctaatgaaattagaattaatattattctatcatctgccctatatatatataggtagggatacactaattaagaacgaatatttaagaaacctatattacgagagataacacacacgtagtaaatatggataatcaaccattctctcaagtttttatttacgcaaaatttaatagtggttttgaagaaaataatccatcaccatcaccattaatgaaggtggagttgaaagtgatccaaatgtactattcagataccgatcacagcgacaccttcatctcatacaactccactcaccgattccaacaccaaattgatcacctattccaag

SEQ ID NO: 72173 - DNA, 1102 bp, Cannabis sativa
ttttaagttaagtattaagagtatgtaagtttacttcttacaatgatcatgtttattgataatatatatggtatgcatgcatatatagtaccacaaaagacaccttttacaatgggtggctatatatatatataaaaatatatgtatatatataggaggtattacctttacttctgaaataggattcaacaattgatgatgttcctctttcattttgttgtaacgctcaataacagatttcatgctataaaaaagaatacaagcaacttcattagatttgatcacaattaaggaattaacttcaacttttaatattaatatataaatcctaaacatcatactacaaaaaatcttatttttagtcgtaatcaaatttgtgatatcgtttaaaagtaaaaaagttgtgactaattataaattgtcattcatacgttgtgactgaaaaatctatggctaaaagtattgagacaagctgagtatatttagtttggaggaatgaaaatacaattaaaataagaatgaaaggaaatagaaataaaaatagcaatggaaatagaaatagaaatagagtgaaatatatagaaattgaaataaaatttaaaattgaaaaaaaaaaatatatatattaatttttttcatcttaacatgttcttccttttttaattcaaaataaaaaaaaaaaaatcactcaatcacaatggtggaaatcgttagattgaagtacattttaatattttaaatgcaacaatataaggaaaatcaattctttccgtttctgttctttttcatttcattattacctctctccaaccaattcatgcaacaataaattatagatttagaataattaataatatgattgaatcatgaatctcttgagtaatgaatagatcgagttttgtgattagttcgagtaactgatcatctttttataaataatatatagagtattacacatctttccatttcaagtgaaattcttggattgtattttttttgataaataagtgatcaaagataattctccttcaagaatgaaaattttgataaatggatctttatctttccacaattgcagttgatcatatattatataatttca

SEQ ID NO: 72174 - DNA, 532 bp, Cannabis sativa
  modified_base (49)..(55): a, c, t, g, unknown or other
ttattatccacgtgtcattttattcttggtatatttaaattaatttttnnnnnnnaataaaaatttaatgacctagaccaatcaagaactgccgcgtgcccattaactcaatagctaaatacttacggaagttttagaaatataaattagatatttttatcgttaaaaattaaatttatgtatttatataaaattaaaaattaaatttaaatatttatgctacaaattataaattaaataatttaacataataaaattacaaattaaataatttaacttaatatttaatttacataatatgtatatatgtacttcctacaataatatgtgatatatttgtgtatacatttatgtgagacattaattgcagagaaaaaccctaaattcagaagtgacaaaccccacaaaaccttgtccctagaacggccgacccaacacaatttagtgggagacaatttataaaaaataaaaaataaaaaaccttacccacaaattaaaactctttcttttaactttattataaatatatata

SEQ ID NO: 72175 - DNA, 961 bp, Cannabis sativa
gtaccatccattgcacggaaaatcccctcaaagtctgatctttgataaggtagcaacagattcagtgctgcttttctctgctcggttgtaactgccattatcatctttctcacagcctttattctctcatctgaagcaaagaactgaagcatccaaagagtgaaccaccatattataaaaataagcatataatttaatagctctagttttgatagaatacaaagaactgaattcagatatccatcaaacacttctcataaacatattaccatgtgttctgtcctgcaaagtccaattccttcggcaccattgtttcttgctgctagtgcatcttcaggggtatcagcatttgccataacctattgtaacaacaaaatgtaccaatttagtaaaaagattttgaacaagctctacaaagttaaggttccctaatcaaaacaaatgttgcaccttgagatgccttatttgatcagcccaagacatgaaagtctccaagtcactgctcatagctggcggagaaagtggctgctttcctaatatcacttcacctgtggatccattaagtgaaatccactctccttcgttgattacttgtcccccaattataagtacctgccattattaataattgaggtgccttttttaattagtaattttcctctgtttgaaagacggctagagtgcaaaaaaataataacagcattgaaaatttaccctctctgcatcgtttactcggatatcagagcaaccagaaacacaacactttccccatccccgggctacaacagctgcatgagatgtcatcccacctcttgctgttaagatcccagcagccgcatgcataccaccaacgtcttctgggctagtttctgttcttacctacaatgcaagcatagtcttacaagagtttataactaaggaaagattattaaaacaagagcaaaacagacattatggtaaa

SEQ ID NO: 72176 - DNA, 738 bp, Cannabis sativa
ggccaaatatttcaaaaatagtagctttctccaagcctctattggacactctccttcttactgctggcccagcattttgtggggcagggatcttctaaataagggtctaatttggaaagtgggggatggtcaatctatttccatcacttgctataattggattcctaactccagccacatcttttttaaggataattcttcttctcttgaagataagggttcttttttcatcaaggaggatggtacttgggactctcttacactccacaattattatccacaagatttagtggactccatcctcaaagtgtctattgattctactagtcaggactgtctcatttgggttaatagtccttcaggtttattgactgtaaactctgcttatcacttagcaaattctacctcttctcaaccattgtcctcttctccgatcacacattcaaaccctggtggaaggcagtttggtcctccttggttcctcccaagatcaagcacttcatttggacggctttccacaacattctcccctccaacctcaacctccactctcgtaaagtcctcgatagcccttactgctctttatgccccaaccgaattgaatccaactctcattccctagttcattgctccagagcaggtaagtattggaaacaaactcgctttagaacttttttcaataataataaatttagtgacattaaagattttatgctaaaaggttttgaaagttttcaa

SEQ ID NO: 72177 - DNA, 1011 bp, Cannabis sativa
  modified_base (64)..(69): a, c, t, g, unknown or other
taatatgagaggaaagaataaaggtgtacaaactaggctacttgaaatgaatcctagagcattnnnnnntccttgtgcttgtcattctctaaatctttagttttcgatatagctcattgttgtcccaaggttggatctttttttggtgtgatacaacgaatatactcattatttttagcttctacaaaaagatgaaaagtacttagaggtcatgtacttggtctcactgttaagccattatcagaaacacgttgaaaaagtcgtgttgacagtgttaaagcaataagattccaagctccacaaataaaagaagctttacattacttggcagaaagcaatgaagatgtcaaaacaaaaagtgatgctgaaaatttagcaacatataatattgaatcttgagttcttagtgagcatggttatttggtcgatttgttgtttgctgttaatactgctaacaagatcctacaaaataaagatatgcaaattgatgttgctatcaaagagttaaagattctactttcatttcttcaaaagtatagagaaactggttttgagaatgctttcactaaagctactgagattgcaagtatgatggaagttgaacctgtgtttattgaaaaataaaaagtttacaggaaaaagcagtttgatgaagtgacaatgaggggttgacacaatcagcaatggagtcatttaaaattgatcattttttttacataacgatcaagctatttcatcatttaaaactaggtatgcatactttcatggtgctttatttaaaattatatttcacttcctaccataataactaataaaaataattattgttcaactaggttcgaacaattttaaaattttaaggagaattgtagactattgtttgattttgagaaattaaagtctgcagatgatgatactttgaagaatttttgtattaattttacaaacttaatgaagcatggtgagatttcagaccttgacaatgatgacctataccaagagttatatatg

SEQ ID NO: 72178 - DNA, 1240 bp, Cannabis sativa
ccaaaacaaataggaataggagtccatcaattcatcccttttaaggggtgtaatgtagaatttacttatattttttttataaaaaagttaaaacctagaaagaagggtaaaaatagaaattgaaggaatataggggttttcttgcgaaaccttcccctaatcagatttatataaagaccgaaagagtgtataatatctcagaattgggaacgaaagacgaaagaagctgagaatttaattacataaccctcctttttctctctctattttctcagtcgccattcgccgagcattccttttctcgttctttcaatttttgggttgatcagtaagtcattattctacttctcctattttttcaattttgccctaagtaagttgttattgtcatatgtatgtacacactcttcaaatttcaggtttattgtccttgcaaacggattgattcggattaaatatcattcatgaattggttctcttttctttatgttattgttgttgacagcattcagtgtttaatttcctgtgaaaaaaagatgagacatttaggaaaatataatatatatatatatgtgtataattatttatatttaaatagaatgatgtgaatccatgtcctgttgttgttgttgtttttcttttcttttatcccatcttttcaggaccatatagaaacctatttgcactttgaatcaaattgtgatgtcattgattcattaatttggtttgtttcagtcaaataaacatacttgtttttgaattttaagcgtagttctgttgttattttgtctccattcattgggtgaatcaatatttcagctactctgtttttagtgttttttaacttatcttattggattagtaattttctttttaattgatgttgatttcttttggtgtcttaggcaaatagaaaggccttttgttattgtttaagcttacttattccccagcttaaaagattggtgaagaagatgcctagagatctctcaaggtcacgatcaccttctaggcgaaggcgttcaccgtcaccaattggacatagggtgaatagccgaagaagcagaagagatagaagcagatctccatattcctcctattctcgtagcaggtgatcccgtttatattctttcattgttgtactaactaattttgtaaagacttaaagaacaaatgaagattcacatattgatgatgcgttttgacattgtgttctgagtaactatctcttgtacggaac

SEQ ID NO: 72179 - DNA, 1021 bp, Cannabis sativa
gatatcttaaattcagaatttccttaggaatttaagaacccacatgtctcgccgtacgatgggaccacgacccagttgctcatctgaacaactttatttggttaaaaatacatcttatttcaagcaaagattcatcaaaaatgaagtaaacaaaatgtggcgcatagtacgttatttaggggcacaattagctagtcttgatacccccaagtgagctaatatgtgtggatatctccaccttcctggtcatgacttgtttaaaacgtagcttgcggcctaaaaaatgtaaagggtaaacataaaatactgatattctcattatatgatgctagaaagccatttttctaaaagttaattacatagactgtttacataaaactactccagagtgtgtcacttcccgttatcttctgcctactggtaatattggcgcaaatggtccgcattccaagcattggggaccctccatccatccatctattttagccaaaaagttccctttcccacctttttgagtatctcgtaggagccttccagtttgggccaagtacccccactcccgattcctacgaagccaggaagaccctttgtaggacaagataactaatatcaaagatagtgagattgaatataaactggagaataatacattaaaattcgtgagtatggataaactccaagtccatttgcacagtttttttaaaagcatgggttcattgcccaatacatatgcctattgaacccaaattatggtgtgtgacaggtttaagaaactaagaattgttggacatggggtggagtctgcataacatactataaattttcttaaattcttatcggttgatattcttcaattggagtgtatatatcaaatcgtgttctaaataaagttatttttccaacttattttgagttgtgatacggttgaaactgactttatgacatgtacacattttagaaatacccgtatacagttagagtacaattgtcaaaggaaagaacttggcccaaataccataaa

SEQ ID NO: 72180 - DNA, 1759 bp, Cannabis sativa
  modified_base (1109)..(1123): a, c, t, g, unknown or other
  modified_base (1172)..(1183): a, c, t, g, unknown or other
  modified_base (1360)..(1362): a, c, t, g, unknown or other
aaacctcttatttttcactcttaacttcttaaaaaatttctacacaaggtttgacagcaataacagtgcgtaaaaatatacactatgcccaaattttatacacataaaggtttgagagaattaattgaccatattcaaataaatgcttgttttttttggattaatgaggatattgacttctgaggtggcaaattttcctcccttttaggagaaaaaaagtggctgagaaaaaagaaaagaaaataaatagttgtatgagtaatagccagcacattagttcatcccctgaggacaaggtgtgctgtgatgggttgggttggttagtttgaaatgcaagagaaaaagtagttacttaagtctcagttgggtatagaatagatcactggtgagaattttgccaacggttttgctgacaatgagtgagacttggaaaacgatatactagctagccagattagtccacttcattttatttgtggcttcagatttcgtcacagactcacaaacaacttgtggatcatagaatttgattactacagtattagttgaatcataaggaaaagttaaaactgtacgaacagtgtttgtgaattggctgaataaatgtattgtcagataagaacaaaattattctgcaactacacaactaattattaaggggaccaataatatattgttagtttttgttctcttagaaaaagagtatcacgatgttatttaggaatctattaatatgaggtaatttcaagcttagctgaacaaataaaaaactttaatatcattaatttctgtatttcattttttaaaataatcaccaaaattcaattttctgaaggtgtgtttagaaagccaccttgcaaatgtatgagtgtagttgaggtaattactcaattgcatatagttacatggtttttgaaggtagttttttttttttgctatatgaggttttcttaaggtagttgagaggtgcaattacactcaaatttttatacccttgtaattgcatagttaaatgactaactattttgtcaaaccataaaagattatactaatttgagtaaatactattttggaccctgtattttacaaaagttatcaattggaccctnnnnnnnnnnnnnnnacaaaatagaccctgtattttttaaaatggtataaataggaccctgaannnnnnnnnnnncaaaataaaatttaattataatccgatctaaaatgttatgacaaaattatttatattttctgtatctgttcgtattaggaattgttttcaagctgattatattaaaaaaaaagttgttaaaaattaagatcagggtcctatttttattattttggaaaatacagggttcattttgtnnnttaacaaaacacaaggtccaatcgataacttttgcaaaacacaagatccaaaatagtatttaccctactaaattactattttatatacaaatacattatgcattttaaaatatagcatgtagtgtaactatgtgtatgtttactaccctaataattatgcatcaattctgtggaagtgattgcctcaatgttatcagggctatgatatctatgatatctatgcttgtgacagtagttttgatgataatattattgatggggatatcaaataatttctatatttttgctatgttggttcttattattttgtattgtataattatttttaagatattttattatttattttttttcgtaaatttttgacattttatatttaaagatttttttttttttt

SEQ ID NO: 72181 - DNA, 802 bp, Cannabis sativa
gaatcaacactaaatccacacataggacaattagaatgaagaagcacaacccatttttgaagacccgccgaagttggaagaatgtcatgaaagcctcgccaaatacaaattaaaactttttcggtaaattaagcttccataaccttttctaccatactgaaaaaaaatccttagatggagaaacagtaaatgattcctcttgtgaagccagaaaatattcactcttaattgaacatgaatcatcttttgtatagtgctataaccacgcatcatccttggaaaacttgaaaataggtatggacccagtacattgttgatcaacttcattgaatagagtttgtaataaagatatattccatcctgtcctagattcctcaataagatctttcaccaacaaattgggatgagttgtaaggggagaagtaggcaaaaatgagtatagacggggcagccaagggtccttaaatactaaaatagaatcacatgctcccactttcttctgtaaccctttaataagaagttatcgtccccaaatgatactgccccagatataacttggtgatctgccaactaaaagcacatggaataatatgaaaatattagagattagttcattagagacttaataattatatttatacctctccttcataactaaacaataaaaaatacttatcaataaaaattacgtaaccatttaaaaaacacctgaagcatccaaaaaagaagtatgaagatagtatttggctctgtaaattttggttggcaacgaatcagggcaggtaagaattcaccaagcttg

SEQ ID NO: 72182 - DNA, 865 bp, Cannabis sativa
tcgcccttgaccatttaagctaccctctctttagaaagaaaaaggatgtcattctaaaaatttgcatggatgatatgttatggtattgatgttattcatttttttaataaaaaaattgaagtaaaaaaattattgtagctaaaaattaaggtatatataaaataatattgtgtaagattataatataatatttttaaaaagtgatatacattagagtgtttttaaaagtaagagtgctaaaaataatatagaataaataaaataaaatattatattttaaataatatgtaaatttttaatatctttaaagaatgttatgcttttaggtgtaaaggattaaacaatatcatctaatttccctattttttagcacatatcaattttttttttcttgttttgttatttggagaaggaaaaaattggagaagtgttttaatattgtacagacaagtattaacatttatgttttacacttgtcccacatgcctaaggtccccaccaatctacggttaccaaataataataaaaaataaaaaaaagtataaatccttttttgtccaattacaaaataattttgataaaatgaaataaaatacatatgtacataacttatataagtgtgatatatatcaatgctattttttaaaaaaaaattaatatcaattctactttagctacgaggattcttcatgtttcacgagactagaaaaaactgtccttttatattattatactaagaagagtattgactatcttcaaaaaaaaaaaaaagaaaaaagaagagtattgatttaacatacatacgatgatgaaattatatatggtcaacgtttgtaaaacccattctctcaaaaaaaaaaaaaaa

SEQ ID NO: 72183 - DNA, 842 bp, Cannabis sativa
gagaagatgacaatcttctttgtaaacaacacatcctcaactcattctaaaataggctctataacttatacactgataccaaagatgccaaagaaattcaagatcaccttgaaaagaagttcaacatcaaggaggaaggtaccaagaaatttttaatttctcaatattttgatttaaaatttcttgatggtaaacctcttttaccccaaatttatgagttgctagtagttgttaaaaattaaaagtgctcaaaattaaacttcttgaggcatttcaagttagtacaatagtggcaaaattatcaccatcttgaaagaattataggaagagaatccttcataaaaataaggattattctttgaaagaaatccaaaaacatattcgaaatgaggaggaatcaatatgtaatgatgagcttgtggaggggtctaatggagagacttccaaagtaaatgtatcttataaagttcataataagaacaagggtaataactaaaggagtaacaccttgggtccaaagtctaatcctaaccaattcaaaggttgaaaagatccatattttaagtgtggaaaaaataaacaatatacaaagaattgtaagcataaaaaagactttaaaagacccaaagttaatactatcgaggaggatatcattgctactcttagtgaggtgaattttatgagagagaaagtgaagggatggtggtatgatacatgtgcttgttgggttttttatcttaaaagtaagtaattaatgaataaaattttagagaatatatgaaatacaattataagataaatgatatattaattataagagtataattattaaatatctgaaa

SEQ ID NO: 72184 - DNA, 1487 bp, Cannabis sativa
cttttgttgatcattcctattaagaagtggactggagtagatcgcccatcatgcacaattctatttctctccctccatatatgttcgaagattattgccgccccttctagaagttgattgaaattgcgtataggccgcctattttcctccttatagaaccataggagccattcatcccagcaaagggtactgttagcatcaactcgaaccccccagttgcatccaaaccaaagcgaccttgcaacattgcatctccaaaaaaggtggatactgttctcgttttcaacattgcatagagggcatttggtatcagtaagagcaatgaatggacttagtttctctttggtgggaaggaagttggaaagaattttccaccacatcatcttaagcctagagtggatattactcccccatattattctccatttcctttcagtttcagagctagcatcataattcttaagcaccctatatgccgatttgaccgagaattggccatttgattcaagtagccagagccatgaatcactcgatggactgatagggagggagatattgaggatttcccttgcgtcttcctgttggaaccatcttctgatcatatccgaattccattggttattgcaaataaaattacttactagacttactccatctgtatttgttacccgaggtgttggttgtctgttgatccctggcacccatttgtcgaaccaaatggaagtggacaatccatccccaatttttcggcaaaggcctttttggagttcctcacgagcacgtaggatggccttccaaaggattgtgtctgaaggcttggcttccatgtcaagaaagttgtgatgctttatgtatttttcctgcataagttggcaccatagcccactctcctccgtcaatactttccaagcccacttcatgaggaaagccttgttcatcgtctccgttgcccgaaagccaaggcctccccctagttttggtctacaaagccgctcccaggaaactgtatgcattttccttttgtcttccgtgtcaccccaccagaaatctcggagtagtttatcaatcttgttagctgttgttgttggaattacatccgaagaggccacataattagatagactcgagcccacagctttaatcaagcaagtctttcccgcactagagagcagtttcattttccacccttgtatccgcttcagaacacggtccactaggaattgagtatcttctgttcttttaatcgatctaaacaatggtagacccaagtaggttgctttaccattcattctctgcatccctagtatttgtgtgattgactgggccttcctgcttgaaactcctctagagaagaaaaccgtcgagtttttggagattgatggattgccccgagcatttgcaatagtagttaaggcaattcatgaacccccttgcctctctagttgtggcttgaccgaaaaggattatatcgtccgcgaacattaggt

SEQ ID NO: 72185 - DNA, 838 bp, Cannabis sativa
  modified_base (745)..(750): a, c, t, g, unknown or other
tcaaacaacaaatcaaaataaaaacaactacaaaaacaatcagatctggcccccaatcaagaacttgctctatactctcgaagagtcactgctccatgcgaaaagagcggtggaatcatgagtagcatttagcacccttaaatggttgagaaggaccgagttgaaacccttgaataacagagaatagtcttctaatcggactcctttccattaatatcaatctgaaaccaaaacattaaaatccacaaatacaaaaaatataaaaagttatgacaaagaataggggatatgtagaaagaagaacgaagagatggatagtcatgaagcttatctcgtttcaatgttaaagaacctcatcctgaatgtttggccaccgaagacgagagagcaaacagaggatttagagttttgggactctgaggtttcgagatatccttcatctggtggtgaagcccattcaaaggttaggataaaggttggagatcgatgggtgggttcttgatgcgtaacacagagagaggtagaagagaaagaggggcggctgagagagttagacaaattattagggtttcattttcttttttccttatatattcatttattaaatgatttttatttttttgagcttttaaaaaaatatattttatttgttgaaaagtgtctcaatagtcaatactgatatatattttttattaaaataaaaaggtgtatggtgacactctacgcgtgtgagtaaatgtgtttnnnnnnacgttatgcgcgtcgctaaagccatgtgaatcacgtggctttagcgacgcgcacaacatgtgggtaaatacgtttgctcacacgcgcg

SEQ ID NO: 72186 - DNA, 999 bp, Cannabis sativa
tctctcatcttttctcacatcattttcgctctccctatttttctctcaccactttctctctcatccttttgtccatcatttcctctcccactaatttctcacattatttctctgtcatcactttctcacattattttatctcccattacttactctctcaaggtcaaggtctggggccggggtctagattaggattagagctggggttggggtcggggccgaggtccaggatttagggtcggggttcatgttccgaggccaggttgggattaggcatctaggttagggtctgaggtctagggtttgaggtttggatctgggatccatgtttggggctcagtctggaacttattttaccaggatattaatttactaacatgtttgttgattataaacaatatactctaacatcctaaaatataaaattcataaaatgataataaacaccttaaagattaggattacttacaaaaatagtagcataatataatgactcctttaattcagtactcttacccttgaatcatttctgtagtagagtatcaccaagtactgaacctggattacttccttaatataacaacaatttcttttgcagagtcttccacacagatctatgtattaccttgaattgtgtggccaattactcaatactataagacccaaaaatttgagagtgaaagagagaaagagaactcaaaattactttagagaaaagaaggctttttccgatttagtttttgttattttggcagacaaacactgttatgtgttacaaagccttaacattccttttatatggtcactttcagggttaaagtaagaatagaatgggctttaggaaaagataatgactctcaaaatcaatcccttgtccgaaaccctccataggcccaaatagatttgtgttttgccatatttatttcatttaatgaaactttccatctttttctaaggtgctatttttctattctaattatttaaatgctaatttaattt

SEQ ID NO: 72187 - DNA, 944 bp, Cannabis sativa
cttatataagtcactttgtttatagtgactcatattctgactcggtatatctttagctagacaattaacttgttgattgaaaattcttctgcattgacgattatcatagtgtgaattagatcactctctaaaaaacaaatatactattttctaaaaaaattccaaccacaacaaaataaattatactaaaaagtattaacttattattatattattttcttttattattttagcactaaatttttgattctagcccaaaatatataatttgattataaaaataaaaagaaattcagtggtttattacccactattattcgagggacattgtagagtcccatagaattaagataaattttgcagtttgattggagcattttacgaaaaaaaatcacattacatataacattttgtcgctggattagagatggccttaagtctatattttttgtatcgtgccctaattcatatttttttatgtcgtattcaaacccattttatattgtaagttaatattgtttcaattttaactatacttcaaatcatgtgatttacacataaatactctatttaaatataattttttatatattaaatcattttaacatttttaaaaatttacaaatgtaaaatataagaaaataatacatgagtacactcattttaagacaatacatcataaaatttcctattatattttggcgcacattttatgactcgaataatatgggatatgcacttaaattgtatatatttataacatattattagagaacattgtcccacatagattaatgtaaaagtattgagccatatataagaacatgagctactctactcatcaccaattggttttgagatggaaccccacgattctcatcgtggtatcagagccatatctctagcgggctttcgatacacaactatccagaaagttagccaac

SEQ ID NO: 72188 - DNA, 1033 bp, Cannabis sativa
ttgagtttagagtatgatttgactatattatgtggtcttcaagcactgcctcttcgtccaattgtctaaatttgcttaagattatgtcagctgacttattttaaatagttgaatattatatatataaccctactgacttatgactataagcaaatcacatgaagcttttttctagtaatcactacaagaataaatcacagcacatcttcttcagctttagattatatattaattaattttggctataattagtagcgggcatgtgtttctgacttgagattttttatctttcagttagatccctatcataattattcaattatccaatcactatattatgtgtttgtgtttgttaattcttttccttttttcgtttttattggtagcatagacaatagaataacatgtgtgtcttctaattaatttcattggctagtagcaatagtagtagtcacatggcttatctcaaagcaacacaataagcacttggccccatcaagtataaccattcctgttgaagattccttcatagacaatgataccttttgatggaattttatttgggttttgaggaaatgtcaatgcattttttcttttcactcttcaagttcttctacacgaaaaagcttctgaagggaacacactttgggtcaagtctccagtcattacttttgaagctttgccctggtcttttacttctataagtttgtgcgttctgttccactagttactagaaatcaaattacttacattagagttttattaactgttttgaatggataccattatttgcatgaaactttgggtttgaaattcccgaacataaatacattagtttctggtttgaccgagtttattatcaaaacttcatagaccaacataatcaatcgcccatgtttgagcttaattaattaattagtattaaaaatctctccaatcactcttgtgctcatctttttgtcatttgtgttcaaacatcaattattggctccatttgatttactctattttatattttttgataggctttggc

SEQ ID NO: 72189 - DNA, 960 bp, Cannabis sativa
  modified_base (497)..(505): a, c, t, g, unknown or other
tccatagccattttttctttaaaattaagtttcattagtaaatacactactgtgtgccagaactatcacttatcaaatttaaagaataatttaagttcatcacttagcaataccttgctacagaacgaaactcaaaggttagagtaattgaacaaaaagagtcattatttctacaacaactaatgtgaaaattctaattttttttttatgggtttagttattgttttataaattttatattttagaatgtgaaattataagtaaattaaaatctgataaaacaagaaccaacaataaatgcctccacgtgcataatatatacatgagtaaagtgagtaaatgatttaataggaagaaaaacgtagtcatgtcacaactacagaagtgtcattatttaatactttccgaaaacattgttcttgcttaaaatataaaaaattttacactaaaaatataaaatacatattttattactaaaatactaccacacggttaannnnnnnnntttactcttcaactttattttattacaattttaccacgtacacacatttcatgcatgcatcactacatgtcaatagactatgacctctatcaatcaatcatccatcatttccttctctttttctcttctttttccttttattttctatttttttttagtttttttttttaaaaaaaaatatcaacctccatagttgaactctttcttctccatgatcccaactccattttttctcttctttttgttcttcaaattttttttcaactcccattaaccgaatcccataatcgttttctatccttttatttttctcttaatccatatataaatatagttgtaactcgttattcatcaactccttcttctgttcaaaagaaaagctttaaaatgggattgaaatttttagctaatagaacaatggtaaacgacctgttgttgaggaggatgactctgat

SEQ ID NO: 72190 - DNA, 883 bp, Cannabis sativa
gccccacctcaacttaaatcctagatccgccactggttggcagacatgtcaaatttaacttagagatggagatggttcaatctcctcctatttatttagttggggtgaagttttccttctacatgattattaaaattgtgagctatggttatggttatagcaagattgtgaatgttgctatgtatgacaagaactgttatgcactgtgtaatactattatgaaatgatgaatattgttaggcattgctagaaactattatgtattgtttaataatgttatgaaatattgaatactattatgtattgctagaaattgttgtttcattgtttaatactattatgaaatgttgaataatgatgtgtattgctggaatctgctatgtattatttaatactgctatggaatgttgaatacgactatgaattattaaaagtgtaatttgtggcgaaacttttttatgttttaatttttatatacttaatccttttatttttatttttttttgacaaaatcccccttatgttttagttttaatacacttaacccccttatctttttttttttttgggaaaactctttatgttttagttttaatacacttaacccccttatcttttattttggtggcaaaatccccttaagtttatttttctttacaaatttaatgttttagttagatattaccgttaaatactaactggattaccattgtatcaacttcgaggttttaccgttacatatacacaggtgtatacattgatcatccagttgatatttaacggtaatatttaactggcgtatcaaatttgtaaagaaaaagaaacatatgagggttttgccacaaaaaaaagataaaggggttaagtgtataaacattgaaac

SEQ ID NO: 72191 - DNA, 1894 bp, Cannabis sativa
tttttaaaaaaaaaattcaatatataattttagacaaacgaaaattaattaaaaaattgtaataagtaacactactcaacaaacatttaatacaacataaatattcatatatatacatctttcaatttagttttattaactatactaatttcggacttcttcattcaaaagattattcattgcatttttactctctagtaaaaacacaattaatgtacatatatatatatatcctaaaaaggaaattacataagaactcatctcactaataaatgcagggaacccaacatacatgtacaataattaatagtgcgattttccttaaatgttataagaatcctcaagttgatagataatacttacttaattagtagtacgtacgtagccatatttaggtaattaaaaaaaaattaacattaattgtaaacttaaaataaagaacatcatcagtagcacgagttatccaatgatattttttttttttttaaaataattatccaatgatattaattccttacatattatgattatttccaatgcataatatataatttgtgttgaatctattgttgggtttggctcaaaagtcaatttgtcttgaagttgcaaagatatgattcaactttaaagagttttagaacttactgtttaccacatttatcaagaagcatgttctctcttttattatatttggttggaaaatgaactacctcatttattacatatagttttttttttttatttaagtgtttatatattataaccatgttttatctgggactcgaactcagaacctccaacacacacccacctatggccatttgagctagtctcaagtgatttttttattacatatggttggtagttgaagttttccttctataaatattgagcacttaaaagagtattgtatcttaatgaaaagcgggtacacttttcttaggacttcattacctaaactgagaagaagagcactatgtgctttagtttcaatctccttcttcttcttctcatcttcaatttccttaagagttaagactctcttcattaattgtttatgaaattccattgtggacaagcaatgccttcatcttgaccctccataatccgaaatcatttgttccattgaacttgtcaatctcaaatcttgttgcagccatcttcttgatgtcttcaaatctaaatcttaatcatgagttaatcccttgctctaacaccacttgttgtgatcgattatcacctttaacaatcaagtttgaatgctcaaagatgagctgcacatggacaacatcaacaagaagaaatgcaacagcaaaaaccagctagacaaagagattgaacgatgtttgattttattgatgaatggaattcattacattgagagagaaagagagaattaaatctgtacaaagttgtatttgagatgaattgaactctatctatttataccattcgaactaaaaacagaaaggtataacttgtaactaaccaagacagttaattaggggtgtgcagaaaatcatccattctaattacaaccgaccgatccagtcccaatcgattcaatagaatcggatatccaattataattagatcgaatctgatgtaaattttgaaaattcaatcgaatcggatcggttgttggataggacattcgatccgatggataaccgaccaaaccgatccaattatcatccaattatatttatgtatttttaaaatatatttatatatttaaaaatatatattaattgatttaatatacatgtaacacatgagattaaaaaaaccttagatctaaaatattaattctcatcttcctaaacgcttataaaattatcaatgcatattgaataaattttatttttattggttttattatgagatcatgaga

SEQ ID NO: 72192 - DNA, 861 bp, Cannabis sativa
ttctggatcgtgataccggcggaaacgcggctccgggaggcggcgttggttctagccgttgaattggacctcaaggttagatgtttggaaggggaaagtccatagcggaagatggtgagttttggggcaataatcgaatgcgagattgtgtccatgaatggaagatcacaagcacagccaccggtaatgttgaggctttgatcgaagagaataatagccttggtggtggtgaccgtacaagctgaaagtgctgactttgtgtttcaatatttatataaagagagagaaataaagaaagaacctttttccaactgggactcttagaacagtctactgtttcctttttctaatagaattaggcttcattcattattgccgttgccggcttttttatcttatttttcaaagaaataatacttttaaaactttgaattatgttttttctttgtagaaaagaatattctattggattggaataaggggtttattaaaaaatacttttttttatttatcaattaactaaatttatctttaattttatatttaattgaaagatacctttttttatatgtattgtacctcaaaataccttaacataagggagtcagtatattgaggtgacaggagtaaaatcggtaaaatattttaaaaaagaggtaaaaatgataaattttaaaaaagagagtaaaaataaaagagtacaatataaaaagagtatagagtctaatttcttctttgaataggttctcaactaagtaataaagctgataaatatatagagacacgattttgtcctgttcatgagttgaaatgggctatagacaaaaaaaaaaaaaaaatgggcccttactataaagataa

SEQ ID NO: 72193 - DNA, 857 bp, Cannabis sativa
tttttttgtgataatgactaattttatgttcaggatttattggctgcaggaacagaaacttcaacgacaactatggaaatcgccttatctttcttattgaatcatcctgaagcaatggagaaggcacatatggagttggtcaatattattggaaatgatcgtttggtgaatgagtctgatttggctaagcttccttatcttcatgcaatcatcaaagaaacattacgattacttccgcctgggccagtgatcgtacacgcatcatcagatgaaacaaccattagtggacacagggtaccagctggttctatggtactttttaacatgtgggccattcatagagatccaatgatttgggctgagccagataagttcatgcctgagagatttttggaaaatgaagggctaggggaagggtttacattgctaccatttgggtatggaaggagggtctgccctggtgagaacttagcttggcgtatgatgggactaactttagcaaccattattcagtgttttgaatgggaaagaatgagccataaaatggttgatatgagtgaacatgtgagaggacttagtttgtccttgactaatccacttcaagctaagtgtcgaccacgttccaccatgatcaaagttatttctcaaatatgaaagttatgtgaaagtaggaataagaaaataagtgcacttaaaatttggcacacgcactacttcagatagtttccagaatttatgatcacgtttgcttacagtgatatattttatagtaaaatttaatagtgacttgagtgctttagattttttcttcttgaattatagtgctgcttttaaaataagacatgataatgcgtata

SEQ ID NO: 72194 - DNA, 1361 bp, Cannabis sativa
agggacatttttgtaattttgacccgagaagggtaaaactgtggaatttatattatgatgtgcttatggactatattattatatagtatacttatcttgtcctatttcagatattttctgacaaatcggcgcggtatagtcacagttgggaatttcgggcagaactgggttcgaggtcgaaattcatttttggaattttgcattggtattttattgatgtgtgaatattttaaaatttatttgagtgtgatatgtgatggaaatgacttaagtgcccttgaatgcttatatgtgtgttatatggccctagaggcattttagtcatttagcctatatggattatttgtaacaaaatggaattttgagtaaaaagaaatgaattttttggtttatttctcagccttgtgtgtcgaccccctctctctctcccttaagcatcatcttttcaacttcaaaattggaaaattcctttggaaggaagcttggatttttgtggtatttatgctaggatttggaaaggatttgaggtagctctttctactgtttttaatttgaaattgttgttgaaattgaagatgggaatcatgtttatttgtaaattgtgttcatatatgcatgtaggtgaatttgaattaagtgtggtgtttgaaatatggatgagttgttgaattgttgtgtaatgttctttgtatgtgttatatgagattctagggttgagatttgggattttgattactaaaattgatttaagtttgttggaaaagcatgttgagttttgaagttttttttgtgaccttgatgtgcaattactttggatgagaatatgatgattttgctcaagtgttgagcttagtgttgcatagagatttaggtctgaaatatggtccttgtatgctatgattttgagccttaaatgtatgtttcaactctatgtatgaatattgataattttattatatggtttgtgagtttgattaagttttgggcaggaattggtatgttttggcatgatttttcgagctggaaaaatggggtttcttgggtttggaacccaagggctgcagccctgctccttgggcgctgcggcccacccctattttgtggcctgggattcaaacccaggtgtcgcgggcccatgtgggagtgtcgcggcccaccctttatttttgggcagattcgaacgcgttattcgaatcttcgtgactttgtgatccgaactccattttgggagttctatatatcgttggaaagcttgttccgagatctatgggattatttataatttacatgccaattttatattttgtggaagtggatttagggattaaccctatacttgtgaatccttaaaattatgacta

SEQ ID NO: 72195 - DNA, 833 bp, Cannabis sativa
  modified_base (808)..(808): a, c, t, g, unknown or other
tacatcagcagattcatgacgaaggcgaccaaagtttcacgggtaactgaggatggaaagttatccgcaatactggggggcatagaagtcctcgatgaactctggaaggatataaagaataacggactagtagactcaaggagtgatttccttgatcggggcgaaggcttcataaagctcgaagaagctattcaacgagcgaaaggtgaacaaaagcctggcaagtcaaaggctccttccattggaacatctgcccaaattcccaatacccaaacatttcaagcttaggtggtaagcgctccagtaaccaccataagcaagggactggaagaaaggaaagtttactagcaaatgcgaacaagctccccgggagaatcatgccaaatacacttcattcactattctaactgaagatatagaaagtgtatacatggcaactcagtcgctggccccgtataagaaggccaggcccatgaagatagatgccaacaaaagggacatgacaaaattttatcggttccacgtagactacggtcacgacactaaagaatgatacaacttgaagtgggaatttgaattcctaataaggaaaaacaatccgcaactacaaaactatgttaagaccgaccaaggtcagaggaacgacaacaaccaagatttgctacctccactagtagatggacatttgcaagtcattgttggaggccctcacattgtttgagattcgggcaaagctcgggattggtattcccgaacagtgcaacacaagcaagaagaagtcatcctggccgtggaagaaagaaagccnaaagttccacgagcaggagagccaa

SEQ ID NO: 72196 - DNA, 1204 bp, Cannabis sativa
aggtggactgagcagtaaagaggttatgagtaaatttgaaggtgagtttcacagtgccatctttctgaatatttcatttttgatagtgcagtatgttaggatgtaaggtgtaaattaacttcaaaataatcaatactttttatgtagcatttcgtacaatatacatcatctcaatattttgggtatatgaagagtttgattgagatcattggagctatctgattggggaataagtatggtccttttagaaaaggttggaagtgtgtactgtctactttgtgtcagttctaaatgtaaaaggtttcacccaacagagatagcttatatggtcaaatatgtggtttggttgttatagtgttctggtctcaaaatattgtaaagttaggtatggagcctaattttaatcacattctttttgttttttgcatattatttttctcggaaaatatttatttggcacgatttgtcatcagcagagtcttgagtaaatgaagaaacattttccatttaagatattatgaatacgcaggtggtgtttcatgcacgtatgaagtccagagagccatacctgttctgaagaaagcatatggtgacagcatgcgtaaagtgttgcatgtgggcccggagacttgttctgtggtatctaaactgctgaaagaggaggatactgaagcctggggtgtggaaccatatgacttggaggatgtcgacactaattgcaagagtctcgtgcgcaagggcattgtgcgaatggctgatataaaattcccactgccatacaggacaaagtcattttctcttgtaatagtgtctgatgcactggattacttgtctccaaaatacctaaacaaaactcttccagagttggctagggtgtctactgacggtgttgttatattttccggtaaatctcttgttacttttttattttgaagatcttttctgtgtgacgtcctacaacaatctctcttcctccatcacttattcatgaatcattttcctacatagtgaccatgtcgatgctattggttaataccagaagtagtagttgttaacctcatttatgcagacatctgaagcagagtatattaaccagttcattactttatttgtctagttattgattttttactttaaaataagttgactgatgtaaggaactatggacttgtatttacaattgtaggctatccaggtcagaata

SEQ ID NO: 72197 - DNA, 977 bp, Cannabis sativa
tggaggggacagggtaggagaggtgttagatccctgtggaaagtttttggccagggcctgggtgccgcatcaatacaacaaactgcttttggttgatggggcgtataaagaaagttggtgcgggatggcttgtgtaatgattgacaaaatggatttgttctgggaatatgggtacttcagtaaggaagggttttcaagcctagagacagagataagagctattggaatggtggttaatgtagttgctcagaagaattgggtgggtgccgtgattatctcggattgccaagtagctgtcaatgcctttgctaaaaggaggtgtccggattggaagttaatgaatttatttctttatactctggagcagatgtcaaagtgtaaggattgtaatttggtgtttgttaagagagataatttaacctttgttaatagcttgattgtccaagctaggactgaaaggatatataagaccttttgtaatggggaaggattgcctcctgtcaatcctagttttctggtttaatcattgaattgaggttctctttcaaaaaattatctaatatttgagtttctttatttttttcaattttttttggtacagtatatatacttcaacaataattaataattttgcaacaatgtcttcaagaaaaaacaaattttgttaaaacatgtctttttcgtagtgttaattaacttataaaatgttttttctatcaactttatactttcatatattattatttgaaaatgaatgtgtataaattagtcagagaaattttgacaaattgcagtacgtatatgtttgacaagtaatggactcttgtagtatttattttgacttttatatttcaactaatcaaatatatatgtatatagagattatctatagtaggggatacaatttttaccctatgctatggggaaagaaatttggccaatgaaaaattaagaacaagggattgtacaaaaaattt

SEQ ID NO: 72198 - DNA, 883 bp, Cannabis sativa
tgttaagcaatttacttctgaatatcttaagattctagttctaacggcctaaatctttgaatttcaatttcgtacttaattctttttttttttaagtttttgttaaattgtctactttcaaatttttttgaggttcaagtattaatgacctaaacatttagattttgccaaatttactttaacctgttaacttttcagtagaaaattttataaagttaatttactcgtggtttcccgaagtttcaactccaaaattttggacctcttagacttctattttttaatttcccttttgaaattttcatatcttaattttctcgaaacttgaacttcttttaatttttaacttgagctacttataatttattgatctgagcataatttttaattgtgagattatagataatttatttttaatttttattaaataaaaagtaagttagataatttattaattattttcaattgatttctaaattaatcaaaatgatttaataattattcaacaataaaaaataaatataatcatcatagttacatttaatgtaacaaccctctccatattttaacaacattaaatatatcaaaataataataatataataataaataggagaactttaaaaaaaaaaattatgttttatttacaattttataatttaaaatttttaattacggaaatacactgttcaataaaaaaataaaaaaacaactaaaaaacaatgagaaatcaacctcacaataattataaataaactatataatgagaataaactcatgacaattataaataaactataaaataataaaaaaataatttattattttataaagatgtgattttgtaaataaaaaaaaaacttagagaaaataatttttttca

SEQ ID NO: 72199 - DNA, 2608 bp, Cannabis sativa
attgttgtagcaggtattgattgatgttgagtggagttctcaggagctaagtgcgaaagtgcactgtctgtggagttgtggtctcgagagggattaatatcaggagactgagggtgagtgttatactgcttgtattgtgggagctgagacggattgatctcagttgtgatatgagaatgattagtgtcagtattggaaaaaaactgatcaatgttgtgtggtggggtggattgtttcaaagggtatatattttcataaaaaatcacatctcttgagtgaaaaatgtgatttgtttgaatatcaagaagggtgtaagccttcatattatgtggatagccaatgaaaacacacggtttggctcgaggtgagaattttgttgctgaattgacaacagatgcatatgctaaacaaccgaaattgcgaagatgatgatattgtggttgtttttggtgaaggagttcatgtggagttttgtcatttaataagatggatggggttctgtttaatagataaacagctgtggtgaccatataactccagtactgcagaggtaagtgggattggaaggcaagagctcgagccacatttagtatatgctggtgttttcgttcgacaacagcgttttgttgtggacgaccaacacatgagttataattgatgacacctttggtggcatagaaagtagtaagagttagctccttggcattgtcagttcgaactgatttaatgtttgttttgtattgaatcagtacgtgctgaaaaaaggtttgtatggccaagggagcatctgattttgcttttaagagatataaccaagtgtgccgtgaatggtcatccactatggttaaaaaatatcggtaaccttcaatggatgggacagaatatggtccccatatatccatatgaacaagatcaaaaatatgaggagatatgttgttgtttgattgaaatggcagctttttttgttttgcaatatgacatgttggacaattaaaaggtgtagaaatttcagaaacttgtaaatgtttattgatcttattagtaatctttacagagggatgtccaaggcgagtatgccattggatttgattaaggtgtacattacaatcttgtatagtagaattgtcttcattggtctgttgctgtaggtagtacaagttgccaaaacgcttagcagtcccaatcttcgatatcggagaaaggtcctgtattaaacaattgttgttagtgaaggaaactaaggcattatggtcgtgtgtgagagcacttacagagagcaaattgtatcgaaagtcaggtacaaataacacatgctttagagtaattttggagttgagtattactgtaccgattttatgtatgctagttcgatgaccatttggtaattggacagaaatggccttaggatttgattgaatagaggaaaagcattctagatgacaacaaacgtggtgtgttgcaccactatcaataatccaagaaaaaggattagaaatacctgagaagttgttgatggcaacattgtcattggaggttgagggagctgtagtaggctgcaactgttgagtcaacatagagatgatttgttgacattgggcaggtgtaagttgaggagtagatgcatcagcagtgcttgaaacatgtgaagcttggggatttctggtgtgattaccagtgtcaggtttctttgtgttgacaggggggttgtcacttggtttgcgattgccatagccaggtgggaaaccaactagaaagtaacatttgtccttgtagtgaccaggtttttggcagtgggtgcaatgagggcgagggcgtttgtttttggaggttgcatttgctgcaggggcattgtcttgggagttactggatgttgcagcagccaagggaggaaaagatccatgacccaaagttctttgtctttcttggttgactaccatagaaaagactttgtttaaaggggggcatggatcaaggagtagtatttggtcacgaactgcatgatatgagtcattgagacccttaaggaattgaagaacatggtcatggttttgatgatctaatctttgggcagcagtagaacatgtgcaaggaatgcagggtcttaattgattaatttcgtccctgatggctgtgagtttagtgaagtatgcactaacggagtcatccccttgattgaggtatgttagtgtttcgtttaattcaaagatccgtggaccattgccttggttaaaccgattgtttaacacggtccacatctcagatgcagtatctaagtacatgatgctgctttttatttcgggtgaaaccgaatgtaagatccaagacatgacaagttgattgcatctattccaggaatcaaagagagaatcatgggaagggggtgaggaagagtaccttcaagaaaaggatttttgtttcttgctccaatggagagtttgaagtcccttttccatggttggaagttcttgtctgtgagaacagatgtaaccaagaccagaccaggatggtctgctgtactgagataatagggtgatcgaacgtcttcgtatgctggtctttcgactggaagaggacgatgaacagcaggagaaggaagagtgttcgttcg

SEQ ID NO: 72200 - DNA, 1033 bp, Cannabis sativa
agtttggtgataatgaagacctaaacaaaaattagatagaaaacaaattattacaatatcaaattatatagtatagtctttttaaaaaacataaaaataaatataataaacttactttgaggcatcagaacacatgagaacaacattcttttctggaccattaaatattctaaagaatacaggagtatattcttctaacttttctgaagctaatgtcaatagtccaaatggcccaataccaccttcaacatgagatcccttttgaccacaaagattttctgcattatcccaacttgggtcaaatttctcagctttctccaaacttgggaatgagaagacaacatctacatcagcctgaaaaagaaaaaaaaaaatcaataaataaaaagctctatcaaagtactgataaaaaaaataaaaataatgacaatgttagacataatacttgtgcagctgtaactcctttaacttcagaaaaatctcccttttcaagtttcaaattgctcatttcaaccttttcatctcttaaagattcaatttcctcaataggccattgtaataattgttttccattaggatcaagccaaactgtccttggaatcaactataaagaaaacacaacaaatattaacaatggtcatataataataataataataataataaacaaaatttaaacataacaaatattttatacatacctgaactccagaccatcctttagctacatcatcatcctcagtatcagactcattagcccaaccccacatgacccttctcagtttaacaggatcataaaatgactttgaagcataaaaatttccataatcatatcttaatccagcccatccatcaatggaggtattatcaggtacatacttatctttatgagtaagataagtaccaagagtatagtactcatacctagtaatatcaagactaactttatgaacatgtttaacattttcaccaagtgaagaagtgtccaaaccatttttggcaccagaagttgaaacagggtaaaaatcaggac

SEQ ID NO: 72201 - DNA, 1425 bp, Cannabis sativa
  modified_base (146)..(162): a, c, t, g, unknown or other
ttttgaaattgtttaaaataaaaaacggtacaaaataacagtactctcaataataaaaatatccacgttattattgatattaaattgagaaaaacgtatttaattgtaaatttttcaatatatttattcaaaataataataataannnnnnnnnnnnnnnnnataataataataataataaagaggattctcgttaaaaaggtttgaatatttgatgatatttgtatttttaaggggaaaggaacaacatggttaattgtacttctttgtgcaatacgttgtatatagttctttttccttaaataatttaagtttactaaatccaagtaatttaacttaagaataaatgcattttgacattgattgtgggcatggcacaccgtgcaagctcatattccttgaaactttcattgtgttgactaatcacagtcaaatagtcaatggccaaccataagagaatgaagttctataattcataattcttctaaaagattttgtggaatcttctttccatatttaagaaaataaaactataggtttgttttatatataacattctacctttactatctttagtggaaataaaagatttaattttaaagcttatcatttgtctttttaaatattcaatttacaagcatgtttcaatacacttaattttgtattgattataataattataaaataccaaatatattcttaaaaaacgaataaattttaaaatattgatcaaaactcaaaataaaattcttattttattattttaaaaaatgagtgaacacctcgtggatacgtattgattatatataaatattttatataaaatataaatacatataatggaagtaatatttatacactaaaataatacaaaaatttgtgaaaggccgtaaaaaaaattaaatattgtattttgcaaaaaaagaaaaaaaattataattcagtcattctaatctttgttaaagtagatttttattttgtaaaagtgaacaaaggaatacctcaaatttaatttagttaatttttctttaatcataacttactcaggacttataaagtgaaatcaggatattatttagctaccttccttgctgatattgattatatatgtcctcatctacctctcaatctcaatggtggaaattgttttgatctttgcaactgtctccattgcatggagggtgatatattgtaacaccctattagtttacaatacgtttttttttttttaattattgtacaaatctttgttaatcaaagaattttttgatttttttttttttataattaacattactatataatcaaaatacaaggtttacaatatcccaaccactaataaaatcaatcaaatcaaaccaagtctacatagacacataaaatgaattatattaacataaaatagatatccgcacttgtgcggat

SEQ ID NO: 72202 - DNA, 1078 bp, Cannabis sativa
ttggaaattatgcatatttttttaataattttttaaaataccacatatagtataaaaattaggtatacctctgagggaagatgttaggcgtgtgttgtaagtaaaaatcgttaatatctttagcagcgaacatgggtcgattgtgtttgttgggggcagcaagcatggtggtgactaagccaccagtgcttgttcctgaaattacatcgaaataatctgcaatccttacatctggtccatccaattcctgaagctttgattcaagaaaagccagaatagtgcctgggataatgcctctaatcccacctccatcaatacttagaactgtgaacacttttttctcactagtactccccattaaaacaaaacttgagatagataataaagcaagaaaataactatgaagagatcgaaatatatgaaactcaatgaaaagtgatatattttgattggttgatgctttgtatactcctaaaacatctatgttacttatatatatagggagctagagagagtagtacgtaatgagtaaaaagtcagaaattacataccgttgttgtaataatgtaatttatcctaagtaggacgccatggttgattcattaattcggtcaaaagtaataatatttcatatatagacaaccttacacgcttttattcaatgaatgtgtgaccactacaaaaagtgccaataaatttgttcatgtttttgggtccggccccaataaaccaacctgtagtgtccacttgtatttgttgataacaatacattataacagttttgctattggtactatgctgcccaacattttttagagatagcactatattaaaagcatctccaatgaaagtctaaataagggatgaaaagctaaaatataacttatttaataaaaagtgtgcttcaataatgtgccaaaaaatgatgtaaatttggcacgtagtaaattttgtgccaaatttagaaaccatttactataatatataaaatttacaccacaataaatgcattattttttcatttacatttatgttatttctattattttattattatatttaactatcacattaaatt

SEQ ID NO: 72203 - DNA, 945 bp, Cannabis sativa
attcttaaaaaagtccccgagagtcatatattttagacgaataattattattaaaaatcgctataataatagcagtactaacgctctaattaaacccttaatttttagtaattaattttagatctacatatatgacttttagtttttaaaattatttctattgaattcgtaagatgcattaatcttcatttatttataattatagctaaaatttttacatgtgattgtagtcatgtttgtttgttttaatggatttacaccaaacataatatttatataattgttaaaatcgggttatttatttgttaattagtcaaatgatgtactatttctgtctatttttaacttaattttttattttgttttctcttaaattgtgcagccaaactgaattaaaatttcagattgaagtgagtgttggggacagaccttctagatgtggtgtggaaagaataatgataatattgcaataaacttgtggatgtttttatttttaattttttttataaatatataataatatttttcttcttcatttataacttttgtacgatgggctgaatatatatttggtattaactgtatttggcttagccgcttaggcgtctgaatgaatatttattgatcatgatttgagttaataactttgccaaaattattattatatcaaaaatgttattatcattatcgatctgtagttgcattttttgtgaatattaatttattaaaattacaacaattattgtatctgattactgatttaaataaaattattaattaatttcaaaacaataatattataaaattggtaaaacttgacaaatttaaacattatattacatataataatatcaatattatattattaaagacaaaatattatattcatgaaaaataaagggaaacttacaaaaatactgtattttgacctaattcttacaaaaa

SEQ ID NO: 72204 - DNA, 1479 bp, Cannabis sativa
attattctttaaaaagaaataaatatttatgtttaataggacaattgtaatttactaattaattttctttccatcctttcaataccacacataatatgaacaacacaaatgagatcaattatcatctttatcattcctactcctatcctctctatgctctcaattcatccttctctctcgatcttcctaccaaacatagcctaaacccatccatgggatcctcacgatgctcaataacatcactcataccttataaattaagtggaaccacatgaattttttattatcatacagtatatattatatgcttcctatattaaaacataaaagaatatagacggtaaaattacattatacatgacacttaatcctataaattaatttattttaaattttaattcacttttatttttattttaaaatattttttacatttttaaaataattttataatatttaaataattaatattatataaaccattaataatttatcacatatatatacttaaaaagtccaccttaactcttaacataattggaaaatttacaaaaatactggaatttggttgtcacacggaaatcttttcaaaaatactgtgttgttataaaacaccagtaaatcataaaacagaacaactcaaaacaacagaagaacaactaaaaaatactagtagaataacaatgaaaacttaacacagtacaataaaaaagtaaaaaataccacttgatagcatttttataaaaaaataacaaaaattactataccatgtaaattccccacataatttttgatatagaaagtaaataccaaaacaaaaatacaatttgaaaaattttaccacaaaaaatatatatatatagttccttaatattatcatcaatatctctaacaataatatattatatatatgcaactttttaaaccagttgtctaatgaagggatacacttgtgatcacaattgtagtgatgtgcatatccaaaataatattattaatgaaactatagatatgtatcattattcaagcctttccaagttccaaaggtcaaccacaactaatttataacaagtggcttgaccatatatgttattgtggcagtcaaagagtgaatatatcatttgtacttttcaggtccccttttctcctctaacatacaataattaatatttttatcacttgaattttctacacattttatccttaaaatatatatgaaaaattaaaaaatttttataaaataacagttacataataataatccttatagtaagttctatttcttttatcgttaaaaattaatatttttaccttttaaattttgagaaatataaaattttaccctcttttatttaaaaaaattaaaattttctatttatcctgaaaaaattattaaaaaaacctgataagaatattaaattaataaaaaattattaagtttacttaaaaaaatatatatttcaaactttattttattta

SEQ ID NO: 72205 - DNA, 764 bp, Cannabis sativa
ttgatatttcatgtttcaaaaaaaaaaaaaaacattcaattcaacttttttgttaaataatccaaaaaaattggtataacaggtagaatataaaaatcacaatcaacttgattcaagtctataatattttatctaattttatgaaccaaactgaaaatgattatgcaattctcacatggaaaaaaaaaataattcagttgactatagtacaagatacaaaataactattcttatatagaaaaataaattacagtagaaaaatataaaatagattaagaaagaaagtttaaaatacattattataaaacataacaaatctttcaagtctatcaacttcctcattaccctttgaagttagaatacaaagctttagccttccgaagcatacaaaagcataaaatttatagtcatccttacttttaagagttttgtagcaatttagaatgcatacacaataattttaattaggggtgggcatccgatctaatccaatgtttttctcctcatctgatctaatccaattagtaattggatttgaaaaatcatcatcccatccaatctaattagacctcaaaattcagttcaattactaattggattggatcgtctttttaattggatatctaattacaaacctacattttaatattaacttaaaaatatgaagaaaaataattaaaaactaagtatcactgtttatttaagtttaatacttcataaacatatcattattacaagtgtaatataactaaaagttttaaata

SEQ ID NO: 72206 - DNA, 769 bp, Cannabis sativa
tttttttttttttttaatgagatgagtgtaatagagatagatagagaagaaccaattaagtatcggatgactttgtcggtaaaataaccgaattttcctttggattgccatcgatttgaattgaatgaaggagagtgagataacggcaataaatatcccgaaaaggaaataatcaactatatttaatttaaaatagataacattaataacaagtttaattatattttgatattattatacaagctttaagataaattttgttttgggttctagttaaatatttaattataaatatataaaataactaaagtttataatataacgcgtaacaaataggataatttacatgtacatacgttttttttttgtcttttattatcaataataacttaatctatcacaataataattttaacgttcgtttctaacgttttttaaattattatactgttttatattttttatatactaaactaactgttaattttttcttttgttttttatttaaaagacatacttacagaattaaaaaattagataactatacataaaaagaataaaaaaaaaatatttctttctctcttctttccaacttcaaaaaaaaaaatatttctctcttattttaaataataagatactaatataacataagatatttttatttaaaattgatcattttataaaaagtaactaattgatatattatccaaattataattaatttaaatattactataaaatatactaaataaaattatttcatatctat

SEQ ID NO: 72207 - DNA, 1453 bp, Cannabis sativa
agtatgcactgcaatcgacacctagcaataaatccagtaggaaagtaactagaattaatgaaaattgccgaggtgccgttttggggaaaattttgaaagtggtcgagaaaaccaccccttacccgaaggtcaacaattttgaatgcatggtttctgattcactgccttcaagactcgccttaaggggaaggaaagctaggtcagtctcccctagcgtgttacgaagacataaacaaggtaatactagtactataccaaaaaaagatataattaataatttctcctcaagacccccacccaaccctgataatgatggtattcttactaccattatggccaatattgggcccacttatgaccaaatggtagataaacctcatgttgagttatgtaactcaagacaaccacaaaaacatcttgagcccacacactctccttggcccacttatgctgaagaaattgggctggcggaggaattaatgggcccagcaccaatagagaaatttgaatcaattcatactctctttcatgaccccatagatttttctaatctagtccatcaatgcccacaaccgaagaaaagaaaagcaagccttacattaataccttaccctcaaaataatgctaaaatcaccagaaagtttactcaagaagttccttacctccctgagttttcccttgctttggatacacctttcaagatgggctcaggtgccttcctccataaaaaaggataaacgaagaaggaaaggatctcgctccaaactagcataagctaagaaatgccaaagccaagctgatacgataatcgttactgaggaagctcataaaaatctcattgtgtccttaaatcttcttgaagtccaagttgaaagctcccaaagttttcttccgggcgaggaggcggcccttatcaagccccccgaccccatgaaatgcttatcgtggaattgtcggggcctcgcaagagacctataaagaccgcctaagtttaatatgttggattattaaataattagggttgatttaagggatttaattattaattatgattagcatgttgtggagaattatttaattttaatatgtattaattatgctatgtgtgtgaattctcattttttgtgattgtgcttggtagtagtggaaagcgacgttgagctagagagtcacgctttcatatggtttataatgttatagatagtggggcattgttgttagatgttgagattgttgattaatttacgggatttggaaaaatgaccaaattacccctctttgctccattagtgtttgttttcttgtcaaggacaatgtggtcaattttgtttgggtttttgtcatgttgtggggtattattttctataagtttatttaattaaactaagaaataaaaagaaaaagaaagaaaggagagtatatggattaacttggaagaaacatttctctttct

SEQ ID NO: 72208 - DNA, 1141 bp, Cannabis sativa
taaaaaatggtaaaataattattattaataaaattttattattaataatattaataatatgattattattattattaaaagttttaaacttatcagattatatttatattaagtttaaaaacttaagaaatgaagaaatgaaatattcattctttggtgcgacgaaactctcaccctcaccatccgactttctttaattttcaaccagaaaccttgcgatttaagccctattagcagccaggtagtgaattattgaagagggagagctaaagggctgagatcatcgggaatgtttctccacttgagttggctgacatccgtgaatctagattaaaggtaagaaaattataatgtactacatggcatgacaggtttcttgattgtcgattgtttggtgcgacgaaactctcaccctcaccattcgactttctttgattttcaactagaaaccttgcgatttaagccctgttagcagccatgtattgaataattgaagagagagagagagctaaagggcggagatcatagggaatgtttctccacttgagttggccgacatgcgtgaatctagattaaaggtaagaaaagtataatgtactacatggcataaaaggtttcttgattgtcgattgtttgataaggcaacggtagcgtgatatataggcttgcctgattaggcaatgtgatatataggatcacctgattaggtgatgtgatatatggattccaggctatggcacgggcttgccttattaggcaatatgatatacatgctcatatgattaggtgatgcgatatatggatatcaggctatggcatgagcttcgcctgattaggcaatgtgatatatggataccagggagcggtatttgggttatttccgtgtgacaaccgtgataattcatgactctaaactgaaatcgttgctaggtttcttacttgtcagcgatcttgtttaggtagcaatagtgacatatgggtgccaggatatggaatgagcttacttgattaggtgatacgatatattggtgcttggataaggcacaagctcgtctgattaggcagtgcgatacatgggtgccaagttttggcacaggcttacctgattaggtgatacggtgatgcgatatattagtgccaa

SEQ ID NO: 72209 - DNA, 1322 bp, Cannabis sativa
gaacttgaaatacaaagataataatattcaaaaattaattttttgccacacccactaaagaaagtaccaatacaacacaaagggtaatttgtaatacattattattaaataaaaatcaaaacttagagattgcaaaacacaaaagctgtcaacttcaaaaaaaaaaaaaaaaaaaaaacttgaaataaaaagctaataatatttcaaaattatatttttgccatacccagtgaaaaaagtactaacaatacaaaaggaaggaaattttcaaataaaaaaagaacaaaaacaacatcatacatagctttcagtaaaataacaaagaaaatacaaggaaaaaaatatataataaatttgcagaaaactaattgttgggtttccagtaaaaatcgtcttttgactcccttaatgcaaaatgaaataaaggtttccagaaaactaatggttgtttgtgaacttacatttaaaatcagctaaagaagagagagaagagaatagaaataatacttatttgcttttttttatttatgaatatttattttgtgaattatatatttaaaaaatttacttaaaaaaatttggggtcattttagtcatattcaaaaaaagtttgaccataattgtaataagggcacaattatgttctatttataaaaatataacttccaaattattatttaacaaaataaaaaatttaattaataacttttataaatacacagacacaaaataatatttactctaattttttttttttttaataagtgaatggtatataatcacacactttttgtggtcaaatagattctttgctgttggccccatcgcccatttttacggatgtactcaaaccgataacaagtactatcgtactcccatttatacaaagtaactacccaataggagcaaatccacattagctttagctccaaccatttgttttttgtcttttctttattgaaagtggactttataaattgtatcattgaatttgacactatggtagaggggaggggggttcagagggattgaaaattaaagtgatttgtttggcaagagggagagatggagagagactttttccttcccaatatacaaatttcagttctagcaaatctctttgtttgagaggaattgaatgagagaaaagagatgagaaatgagaggagaggataacaaatccacccaaatttaaaatcccttcattaatggaataattggaactaggggtgttcatccgatccaatccgcacttttttgatcaaacaacatccaatccgcactaagtgcggattttgtattttgaatccaatccaatccgc

SEQ ID NO: 72210 - DNA, 885 bp, Cannabis sativa
ccaccagaattcattggtccttcgacgacttatttcttgagttcttaccatgccgaaaacaagataaatggtcagtctcttcctgcccctcctgtccatggagtagtaaccgagccacttcgatggaagtgtcctcctcaggggttgttcaaggccaatacagatgttgctttgggctttaactcaaattcttgtggtcttggtatggtggtcagagatcatgatggtaaggtttttgctttagttgcctgggaagtccatggtggtcctcccccggaatgggtcgaaactctagcaatccgcaatatcctctctcagtgcatctccttttgtatccataatattcagattgaattcaattgtcaaagtttgatccacaagctcaatactttaatgatcttggactcttttttggggttacttcttgatgatattagagatttatgttttgaatttttctattgtgattttcaattattatcctagaattgttaatctagtaactcatacccttgctaaatatgctttgcaagctacttctagtacaatttggtggcatgattattcttcatgtattcataacaattttttggctgatgctagttatcaataaatcctttagtctttggcctccttgagagtcactctgtttggtggtgttttttgagactattttttttttcaaaaataaataaataaataaataaagaagaaaaatgttaaggggcaccttaaggtatcaaacattatcaaaggtgacatattgttattattgtaatttaatcgagtctcacacattttagtataatgaattatataggaaactgctatgctaaccactaccaactcaccaaaattgtattgtgttgaatactaggggtgttc

SEQ ID NO: 72211 - DNA, 1043 bp, Cannabis sativa
agcattacaaattaatagaaagaaaagctttacatattagaaagttttagattacccaaaatggcgagcaaaagcaatgacagctttcctatctttccatagatcagaaattgggattccatttccatttaaatcaaatacttcgactttatccaacaaatttggcgtatcctcttcactacccactgtagattcaatccctgagagaaacagagataatagaatagatagattgaacaaatgataatcattttatttttctgcagattttctagcaaaccaaacagattattccaaaaaaaaggcttgcctggagagccagaaagcgcagaggctatgatatgggtttggcgtggtggtgagactcgtaggttcttgcagtgggtcggagtgggagagaagctgaggttgagaaggggagatgggtttgagagaacacgtgtgaagctttgattggtggttttgaggagggtattggagaagagtgtggtggtgacagccatagctttggtggaagttgcagagagtctgttaagagttggttatttgtgtgggaagcaaaagtcacacgcgtcaattgcgtccagctcggtatgtgatacgtgtcgtttaacacacagtatgtcgcatatgtgggtttctttcttcaatgagtaatgatattttgataccgtggaccatcttaaatatatatttatttaatataattcgttaaaattatttattaaataagtatttatgttaagtttctgggtaaattgtgatgtatatattagttatcttaattacttttatctacttcattgttatctcattttttgtactataacatagcaacctatatcggtaacacgtgtctgctattttctataattagctggagagatattccaaacatagctcagtcatacatctgtacggataaagtttgcttgactgagctgggtgtcacgggctcatcttttcaggcaacagaaacaccgagtggcaccttgacttctttaatccaaggtcagccttccaaccatctgagtaataatggg

SEQ ID NO: 72212 - DNA, 1529 bp, Cannabis sativa
agggaattttttttttttgagtgcaccttcaagagctctgattcgtggttctggaagaacattgttcgtacaaaagatatcgtcaggaaaggggcgtgcaagcttttttcaaatgggaaagagactaatatctgggtggacccattggttattcatagtcgggattttttccctaagcctattacccgtctgtcgtagaacttgaggttagttgctgacttactcttaccaaatggggactgatgtcaaagctctcaaacctttttgaccaggaaacgatcagtaacattatcaaaggtggcaagcctaatggtcaagagggtgatagatgagtctggactaaggaatcgaatgggttattttctactaagtctgcctactttatccaagcttttgagcgagctcccctgtgcagtgttgccccgacactctggaataaattttggaattccaaaattttagagcggcataaaattcattagtggagtattctttccaatgctctgcctatttgtgcctctctagcaaagagaatgcatatcgaggaggtatcttgtcccatttgcggtgagggcgaagagacgatggagcatctctttctctaatgtaattttgctttttatctctggtgttcttccccttggggggttatgcatgtttcgaattccagagcccgagtttgggattgggttaatttcttgtggagtttaaaattttaaggggtggacaataaaaaattatcctttatgcttcgattgtggtggatacgatttagcgagcatgcaatgacaaagtacacaagaatgttctgggtagtattatacattatgttgactccatctcttattgttacccagattatagttctagtttacttacctcttcgaaggttgctgggtctcctgtttgggtaccgcctcttgatgactgggtcaagatcaactgtgatgtcaaagttggttgcgactccatgtgtgttgtggccattactagggatcataaggagtctattttgtgggtggctacaaacttgcttagcttctcggaccccctcattggagaagctgctgcttgtctgctagccatggagactgctattttttagcacaatcgttttgttttggtggagagtgattcggagacggttatgaagattctgacgagcactagcatcttttggggaattgataactatgcgtgtcagtgtaaaagactctctacttttatgttaagttgtaattttttgtttatttccagaacttataatttcttggctcataatgtggctaggtgagcttatgctaactctattttcggtacgacggatctttcgtcaatgctggttactatcctttgtaataaccatgaggtgtaactttcttctatttataaaatgcctgtttttcaaacaaaaaaaataaaataaataatactacttttcttttccttttgctaaatgctatctgccacttcttatttatttatttttccttttagcttttttcttttagcaattctccccctttata

SEQ ID NO: 72213 - DNA, 1751 bp, Cannabis sativa
gagcacccgtgagccaagcccagcaagacagtagaaaatatcaataacatgtttatcccagtatataaacagtaatggcattcttatatgcctgtataacacaaacctgcatgttagctcacatgcctatttatgtctacgtagcgtagacctacgtgttgcgctcacacatctaaatacaataaggccatagaatggttcatctcggttctagttaccaagtccaacctggttatgccttgaacacataaccctaaatcttaacatgctcatatactcatatatatatatatatcatggcatggcattcatacaacatatatcgctagggtaataaccctaggctattcaaccgctcatgttagggtaataaccctaatcccgattactaattacttcatatatcatttccaatataagcaccaccgcgcataactctacgtgctaactagtgtcttacatgatgtccccaataaaagagatcccaaatccccgggtgccctgaccaggtgccgataatcctagtcacaaccagcatttacacaaataaggttaacccataattccacattcataaaatatattcatggcatctaaaatacagataatcacgtagagctcagaacgagctttccaatgatatcttgaactcccaaaatggagttcagattacaaagatatgcattttcaaagttacactcgaatttgcccagaaattcgagggtgggccgcaacatgcaaaagccatgccgcggcacctaggaccaattcctatgttcaaacaaaaagggcaggccgcgacatgttaaaggccatgctgcggcacctgggttccaaactgagaaatcagccaagaacacctcgaatttcagcaaccaaaacacattcaaacccattcaaattataacaaaactctcaaatcacaaagtggaattgctaaaaactattagagagttaaaacacataattcatgcattaaaatccaacataaaatcccaatttcagattgcacaacaatcactaaatccccgatttcatgctcttaagctagaacttacaagctagctccaatctttaatttccaacaaacaaacaacacatacagctgaaaattactcaagaagaataccctagaatttcatccaacgctcaatcatacaccaatttcaaagattcaagtaatatcatgctcaaattaacaaaagatcaccaacatgcaaccgaagatcaattcaatttacttcatgcttttaatcactaaaattcagcaacaataactcaaaatcaaagctgtaaaactacctcaaaatcacaccaaaagcaagctcaaagatcctcccacaacaaggttcacttcaagccaaatgtcaagcaattttcaccaaatccaagttgaaattcaagagggtttgagagagagagagggttcggatgagagagaaggaaaccagaaagtaaactcttatttttctcaaaattcaatatttattatttataaattaaaggtcaaaatgaccattttgcccctagggctataaagcatgcccacacatacacaagggtatttaagtcatttcacacacataaatccaaacatatttttatattattcatcaataaataaaatgccaataatcttatttcaaattacatttcgggcccaaacccggttcagcccaaaatacccagttgtgactataccgtgccaacctgtcagaatacacctgaaaaagaaaacacatgcatactat

SEQ ID NO: 72214 - DNA, 2372 bp, Cannabis sativa
aggttccttactcttgactttccagcatttgtgaccatttggaatccattagcctctattttaaaattagtctctattttccgatgatcctttttaactacccactcttgttgcttaccctctttccttcgacactcacccgaggaatgccccattcctttgcaatgggagcaaatggtaggcttccattcataagtgatcgccactgatacattggagccaaactcatcttcaaagtaaattaaatttgggaactcttgttttatagagacttcaattagtactcttggatagcttagcttgtccctctcctttgtaacatcatccaccataatcggaacacctagctgcccaactatcttgaacaaagacttcttcccccaatatttcagttgtagatcatccaattgaatccagatgggaacattgcttgtatcctcctttttaaaatttacattaggatcctaaggcttcattataaccggccttttgttgaaaaaagtgtatcccccattgagtatatcatcccgatcctgaacactatgaaaccgaattaagaaaatcccatatggcagcattccaaccttatctattttttccttccataacctccgtacaaatccatctaacacattcagaggagggtttgcgctcaaaacataagaaacaagagcagaattccaaaaagaaatttcttcttctatatcttcaagtgtaattttgaccttatcaactttcttagacttatcaaaagaggtttcaagattccttaccacattactagatcggagaacgagaggagaagcttgcaatcgctttgacagagaatttgagcaaacttgatttgcagctaagaaagaatcgaaatcagcctcgatactttcctgcttcttgatcagctccagtgatgatcttcgcaaaagatgcccttgattcgcaccatgggattgatgcccttgattcgcaccagacgtctcgcctaaatccagcccttcttcatcgtcagtgaactctaggggatcgatacctatttcttcaattttctcgtcatcgttcgcatcaggtttcgcccctgtcttcttcttcttcttcgtagaacccttcacctttctccgccctctcgatcgagtgtttgccatggcactagctaggaagctgcatgcaccaggagagagagaaaagtttaattacacatgaaaagtgagatattgtcaaacataaattgaataatttatatgcaaaataatgattaacaaaataattgacaaatttatacatactaagtagacatcagccaacaatattgttaatagagattatcattattattttttttccctcaaatatttcttatccatgagaaaggtttatttttctttcttccaagataattttttttggcatttatatattatagatttttttttggagaaattcatatacaaaatatatttttttgggcatatttatagtattttttatgtgagacaaaatataaaaaaataagaaaataaatatttggagaattttatataaaaatatttttaattaattaattaattaatatttataaacttattaaaaatattaataaatgaaagaattaaggagagaacaactaatgataattagagagattttagagtgacatgtcatcacctcatatctctcttttatatatagatagatccaggtttatttttctttctccctagataattttttttggcatttatatatatagtatttttttttttgagaaaatatatatacaaaaaaaaaaaacaggaaaatagatatttggagaaattcatatacgaaaatagatttttttttggcatatatattattttttacgtgagaaaaaatatataaaaaaaataagaaaatagatatttgaagaagtttatataaatatatttttaattaattaatcaattaatatttataaacttgataaaaatatgagaatgagagaattaaggagagaacaattaatgctaattagagagattttagaatgacatgtcaacacctcatatctctcttttatatatatatatatatagatttttcctcatattttggtcaactatagatggtgttataaaaaaatagtgtttttacactatatactgaaattttcaattttttttcttttttactatggggtgcaatttttttaaaaaaaatgctgtgttttttctcaaaaaaattgtgtaagttttatactatgtagtgtgttaagttttatacacctggcgtgaacctagcgagaggagaagtcactattgggattttatgccctaaataaaacccattacaatctaatctgatttgttattaataaaagattagaagtcatttatgtt

SEQ ID NO: 72215 - DNA, 3403 bp, Cannabis sativa
tgtgccaagaaacaatcaacctgcaagagccaatcttgctgaggttgaattcgattgcgatccacaggcatactcaactactctcgtccaagactttggggatgatcattcttggtacgcagacacgggggctactgcgcatgttacctttgatgctgcaaatttagacagtcaacaagtctatcatggttctgagactcttgccgtgggtgatggtaagaaactcaaaatctctcatattggtcattcctttcttccttcatttaactcttcttgtcctctgcaattgaattctgtgttacaagttccttctatcactaagaatctaatcagcatctctaaacttgttgatgataatgatatttttctagaatttcatcaaaattgctgttttgttaaggacaagaaaacaggtgctcctctcctaaaaggaaggcgtaaggaaggactctacatgctcagtgaagaccttggattacacactcagaccccacaatgtcaccttaccactctatctagtaataaagatgatcactactgtactgatcaatctactccttgtaaccacaatatgcatttgtccaatgattgtaatcagttcactattaataaagattcttgtccactttcttcacaatctgttttctatgctgcttcttttaatgatatcaacacttggcattgtaaattgggtcacccctccacaacaaccttgtcaaaaatattatccaatacacctcatactggatctctcaaaacacttcagttttgcaatgcctgtcaacaaggcaagagccatagacttccctttcctcattccacataccgtgccaataagcctttagagttgatacacacagatctgtggggcccttctcacattcagtccaaagatgggttcaaacactacatccattttattgatgaccttagtagattcacttggatctaccctttgtctttaaagtctcaagctcttgacatgtttcttaaattcaagagtatggctgaaaagcaatttggtttacccatcaaggctgttcaagctgatgggggtggggaatacaaaccttttaaaaggtttctgagtgaccaaggcattttattttctcacccttgccctcacactcatgagcaacatggaagggcagagaggaagcatagacatattgtcgaaacagggcttactcttcttgctcaaagcaagttagacttcacatactggtggcatgcatttcagtatgcaacattcaccatcaacaggctacctacacctgtgcttggcaatattagcccatttgagtgtctgtttgggatgctacctaattatatcattttgaagccttttggttgtgtgtattttccacatcttaggccttacaattcccacaaaatggattatcgatctgaactttgtctgtttcttggttactcatcataccaaaagggctacttgtgtgagaatgcccaaggtcgaatctttatagcacgcaatgttgtcttcaatgagacatgctatccagggaatttccaactatcaacatcagatcaggtaccatctcaacctatttctcatccttctgcaagtttcaatacatctaacttgttgataaatactaataccaatgtctctactggtgtgcaaccatctgctgctgagcccgattgccctcaacacaatatccctgaaccaccactcagaaatatctcacctgatcccaccatcaatatatcacatgagctccctcaaatatcagttcccaccaatactatgacagcccatacaccatctgttcctaaacccgattgccgtcaaaataatatccctgaaccagttcccatggttgcacctcagtctaatgcagaaatctcacttcagcagcctccaacacgtactcacagcatgaccacgcgatctttgaatggcattgtcaaaccaaaatcctatatggctactaaacaccctctcccacagtccctgctacctacagaacccaagaacctgaaagaagctcttatgaatccaaagtggttagcctcaatgaatactgaaattaatgccttgcagagggctggtacttggtcactagtgccatatgaagatggtatgcatattatagataataagtgggtacatagactgaagttaaatgcagatggttccctcgatcgtttcaaatcgagactggtggccaaaggatttttacaaactcctggaatcgattatgctgagactttctcccctgtggttaaacctgtaactgtgagaacagttttatctcttgctgtctcaaggaattggcctgtcaagcagcttgacgtgagtaatgcctttcttaatggccatctcactgaaactgtctatatgagacagcccccaggtttcattgacacacaaaaacccaaccatgtctgcctattacacaaatccatatacggacttaaacaggcaccgcgtgcgtggaatgataagctcaaaacatgcctgctcaactggggattcacggcttcaaaggcagatacttcattgttcatttacagcagtggtaattcctttatcattttacttgtctacgttgatgatattttggttattggccctagtgtgcatcatatagacaagcttattactgatctaaatggtcatttctcactgaaagatttaggggaagttcactattttttgggtgtagagatttatcgagactcgacagggatgtatctttcccaaacaaagtacatcactgatattctaaggaaacttaacatggaaggagctaaatgtactcccaatccctccagtgcctcaacaaagctatctttgactgatggtgaaccattctctgatcctacattatacaggagtactattggagccttacattacctctctctcaccaggccagacattgcatacatagtaaataaactcagtcaattcatcaaggctcctaccatttgtcattggaatgcatgcaagagattgttaaggtatcttaaaggcacggtcactgaaggtttagttcttcatcctgccactgagatggtgttacatagctactcggatgccgattggacaagtagtattgatgatcgcaagtcgattggagggtttgttatatttttgggaggtaatctgatatcgtggacaaccaaaaaacatcaagttgtggctcgctcaagcacagagagtgaatttcgagcccttgctaatactgcaggtgagcttaaatggatatcctccttattgtctgaacttcacgtttctttggccagatctcctataatctgggtcgacaatcaaagtgctgccgcacttgcagcaaatccggtgtttcatgctcgttcaaagcatatcgaaatcgacttgcatttcatccgtgatcaaatcattgccaatcaa

SEQ ID NO: 72216 - DNA, 2611 bp, Cannabis sativa
aacatctttgtattttgcaattacagtaattttttattcacctccaaacactcgcatcagttttatttatctttcgaaatatctcatcaaaaaagtctagcataaatagcattctaagagcatctctaatggaagatttaaaatttgtgctaaatttgacacaaaaaatgagtttatgttatatttagtccactatttataactgtgcttcaatgcactaaatgtaaaataaagaaaaaactattgattatattgatagtcatttcatattttattgagaatatacaaaatttattatttttttaatttttattattcaaataatggtaatatggtgataaagtaaataaagttcagaatcacaataattagtactattagagtaaataaaaaaataatatttattgtgggttaaatttggcacaatactatatcttgtgctaaatttggaacaacttttagtatgtatcaaatttagcacactttttagaacaaaattagagtataattttttttaagtgtgctaaaatatagcaatacaccacctttttagtactccattgaaagtgctcgttaaaattcattactctaaaaaaataaaaacaaaaacaaataacctacttgatggaagtggtattctttacacacaaatgtcaagtttgtttgtaccatacacaaacacaagttttttttttttttcttcaaaggaaatcctttatatactaaaggaaattaaacctcacaaaagcccactaaatcacattgtgaataacaaaactaaaacatcaagaaatcttagaaaaattacacaagcacaaacctagtgatgcgagcttaagcttatttcattccaacctcaaaaggtgcatcaagcctcttcattttaggaccacaatagcaacttacttgactaatctgttttaaatatatttattttgggggaatggtaataacgtaatgagcacgtgaaaaccactttaaaaaaattgagactcccaaatgaatgactcccataatgtgtttttttcatttttctccattaaatagttcaattcttgatatgaaataaaagaagctgttacaaggctagttctacaatttcctccccgctcttccatgttgcaagaaagagaagagagttcaaattaaaaatgtaaaataactaatggaatacatattatattaagctgtgtgcacccaaccaattatgaagaaaaaagcagaaacaaaggaacctaattgggaaaacaggaacataactacccactgtcaacaacatcaacctagttaatactacctcttatgatgctttctaatcaatcttcttttctttcaatggaccttttgggattttactcaataccttggcgtcaaaaactgcatattgcttcttaaactcgattaatgccttctctccaaacgagtccacatggtcttcatacttctcgtagagcactggcacagtgtgcagcaagacaaatactgttttttggatgacaaaatggtatcatagactgataaaattctagtaggaagataacagaaagtggtaagaaaattcttacatatgtagaacagagtcatgaaattgcaccaagtcccaacaactgagagaacccacaagccggcaacgacctattaataaagggaaaaagaatacaaaggatattttcaagatacaaaatggtcactgaattcagaaagagcgatgagaacttcggcaattgtgtctggcttaagagtcgatactaatatatgtcataatgtaggaaaaggttaagaatcaacatacaccaagaaacgttttgaagtctttcccagatgcaatatccctcaagatagacaatccataatttagctcagctctcagccctgaagcaacctcaaggacacatttctcaggaattcgaacttctgggatttgtggtgaagacctagtttagaaaggaaaaaagaggttaggtcttggtttttatttgtattatttagagaaaaaaactttaaatatttaaatgataactttacttgttgatgaaggtagaggcattggaccacaggaaaagaagagccacagaaagtatcattatatggcaaaccaaagtgattaaatgatattcaagaacctcaaagaggacccacaatgcggtggcaccaccaaggacacctgcagacaatttcttgttcctccataggaagacatcagcagctgcaaccaacaatttaacacaagtcaatgacaaacattgagggccacacagagagaaaacactgtgcaggtcgaacttctgctactgcttgaagcattgaaattttcggaagttcaatgagaaaaacaaatcaatgaatttaaacatagaaggattacgaaaaaaacttctcaaattttttaatagcatattcaaataaatagctcttaaataccacaaaacttacaacaggaaacaatgaataggccttgcccattagtgcatcttccctaaataaaaatgaatgcttagtacaataattcaaaggactaccaaacaaatacttctattcccttcgtgttgtattgtattgtattatattgaattggattatgtatcatatttttatataatactatgttaaa

SEQ ID NO: 72217 - DNA, 954 bp, Cannabis sativa
ttccatctctgtttcacgatcaacttgactcttcttcttctccagttttgattaatgatatactgagtatatatcttttttttttgaataattttggaagattggatctgcgaatttaagtatatgtaacttttacattgtatatataattatgaagaaagagaagaagatatttgtgaaatctctgcttttattctctgttctataataaattttcaaattcagaaatagaatcattgctaatattatatgtttttagggattaatttatgttcggtaaatggtttacaaaaatttaaataataatttatttactcagctcaatttgattatgtagtttagtaaattaattctatacttataataatattgaaaaacaaccttttatttatttcaatattgaagagaatttttaatttttattttataatggtagttatttaaaatattttataaaattttgtgatatttagagaaatttaattcggcaaaaatatagttcaaataatttaatttattttcaaaagtgtgtattgtaaaaacatttaataatatttactaaggtggtgtttggtaatactttttaatcatatttttcaaaaacatgttctataaaactatttttattttttaatattttaattgagaattaaaattttaaaaataaaagaaaatcacttttaatattttgttaaacaatttttttttctcaatcaatattttggacttcgatcagactcggacccaaatcctcccacggccctagcgctgaacacgtcctctgaccttagctcgaattcgaccacagacctagacccgacgtaaataaaattaaaaaataaaaatgaaaataaactttacagaacacacttttacagaacacatttaaaaaacaaaagtgttaccaaacggcacttaaaataaaatttattttttttgatatttttattggtc

SEQ ID NO: 72218 - DNA, 857 bp, Cannabis sativa
tttaaataatatttttattgtttttattaagcgatttacggaataaggcagttaattatttagtgtattatatttgttctttttcaataatataatatagcaactttttcattcaaaaaaaataacaaaacaaaagaaacaactaagcacatgcatgtgatgctagccgcacctagtttgtttttaaaagaaaaaaaaatgacacaactttgttctaatttgtattttgagtgaaacttgtgatatatttggtattgtgtaaatatcattacatcaattttgtcctattccaagttccacagcatttatcattatcgatggactatttttttcttttttaattataaggaacatttgttattattattattttttgaaagcaataaggaacattaattgagtcatggaaaagtatatgcaccaagaaggaagtaaaagtacgtaggatgacattttgtgggaatttacccataaggacctccatacatatactaaatttaatcattaattgtttatcaaaaaaaaataatcattaatttacataaaatgaaaacaaaaattacgtttccagttcaagagtacctcaacattttaagcaatgatttgaaaaaaaaaaaatacaaagtaatgataattaatataccaaaaattaattaaattccataattaagtggaaatataataaagaaaatttatgtgtaacctttattattagctactatatatttacagtcttgaatatataacattatgaaaagttcttccattctaaaatattgccggcctcgaattctcatcacattgtgaccattgatttcacgtcacgcatgaaattcagtgatatcccagcggagctg

SEQ ID NO: 72219 - DNA, 1760 bp, Cannabis sativa
tgaatactcgcacttgtcattacccataaaattctctttgatattaacgaaataatataatttggtgttgcgaaattcactcgacaacacaaggatattcctattcatcaaaatatttaatcaatatagtaagcctttcatttgaaataaacatacattattttttccaccaccaactagtaataaccttaatcgccgtccatgctccatcaattagttactaaagttagctattggatcataaaaattcttactcaaatccaaatcctaaaaaaacttgaatttgagtttagcaaaatagccaacatataagaatgcttatcaaatatgtgaatgataccattacaatgaaatacatcagatgagaattcatcttcctccattacagccaatatatgaaaatgaactttgagactaaagaaatttctattaggtgatttggagaacaaattaaatgagaaaatgacaaagttttgaaaagtctaacaaagaaatttgaacagctaatgtaaaaactagtaactatcaattgagtgaaattcacgcaagagaaattaggaattgtcaaaattctcactcaaaatacaagcacaaattattcaaaagtgattgtataaaactcaagatcccattcgcaacaaacacagattattggaataggcagttagttagttagttatcagttatttgtatctgttagtttgtttgtttcagttagttacaactgattgtgtatataaaccagtgtactcatctctttcaattaatgagatcttttcattcaatctttctctgtctttttttctctcattttttctttctgttctttcatggttactctattttctgtatgaacctttgttcatggctagaagatttgacatggtatcagagcgggagtttcctcctctggttgcaaacatggcaacgattggaaacaacttagctaacaatcaagcagatccagctgtccatggagctcaacctaactccagatcaagaaccaaccagaattctcaagatcctgtgtttttcaatcacagcatttcgattcgtctaaatgatcacaactttcttctttggaagcaacaagttcttgttgctatcaaggggaatcgattgcttggatatatcaaagaccctcctccagctgaatttctgaccaatcaagatcgagctgctaatagaatcaatcctggatatgtcgattgggaaattcaagatcaacttcttgtttcctggttgctatcatccatgactgaaagtctcttaacaagaatggttggctgcaacacctcacatcagatctggacagcactggaaaaacacttcacattacaagtctcttccaaaattctggaatttcaaactaagttgcagaacttaaagaaaggctcattatccctcaatgattatcttctcaaagtgaaacaaacagtggatctgcttgcctctgtaggagaagttctcagtgatcgagatcacgttgcagctattttcaagggacttccaagtgaatacgagacattcgtaatctcttccaatactcgaatcgaaaattacactgttggagagattgaagctctgttgttagcttcggaatcaagaattgaaaagtcaagggaaagatgttgatctgagtgccaatattgccacttccaacaacactagtgataccaattggtactcagactcgggagctacaaatcactgcactcctaaggcccaaaaccttacaaactgctatgattacaatggac

SEQ ID NO: 72220 - DNA, 986 bp, Cannabis sativa
ggcccaaagtagattgaggagtcgggggcagactcaatcctcaaggtcacgcacatgggaaaacccaccaagaggggagagaacacctcgatatgaacatcgaggtgagcaagaaagtatgagtaactttcaaagttaccaatcagaaagtatttccccaagtcgatcagtgaacaattacgatgatagacaagatcgacacccaaacatgcgtgatcagcctgatttgcgagaccatctaaatcgaaggcgtcctgatctatgtaggcagataaataaaaatgcacgagatctctctttgattggtttattcatttgctcgttgatcatttctatttataatctctctctgatgttgaggtatcatattccaactagggctcacatttttccacagtgcttaggaatagttggtcgcgttaattatgtgagatgtttctccttgctactaccttttatgacaaattaatatattagtttttcaaggaactctgagtgtggtcgatactggctcatttttcttaatctttcaacatacttagagtatgtgggtcaatgagttacaatctcttaaaaaaactaattatccaccatttctacttaacttattccttcatgctattcgtttgcctcgttcatacagtaaagtttcctatgatttaacttgtaattctgttatcctcgtgaattactgtatcagcagtgtcacacgaaattatcacatcttctaaagataatttaactcgaggcggaacttttattcattcatcgcatttatcattctttttatacttttggactcatttgataatgcataattaattttattaatgatttaaaaaaaattattaattaatatttaatagatctaccgctcaaccttctttgaattcaaattaacgtaactttagtttcattatagctgaaataaaggtaaattgagtacccgaaaaactacaataaagtttggaaaaattaattagtta

SEQ ID NO: 72221 - DNA, 841 bp, Cannabis sativa
taattagctatttctagtcacattttttaagggaatctagtcaaaaaatttaaatacaatttatttgatagatttgcaatcggattaattagtttaaaaatattatttgtaatctttttgatcttaattaaacatacatattctttatcttttttaattttattttaaaataaaatacgttcttataaaaatccacttttttatattacatataatttaactaattacaaaaatcacaagagtaattatgcttacattttttataacttaattatgacaattgtgttcaatttgccctaaaatggaaagaaagattatgaaaagaaaaacaaggtttggaattgcaacttacaaaatgactacaaaattaagacataaaagtataaaacttaacctaatttttcacaacattaaaaaaactatgcaaatactgaattttgttatagtaaaaatgcattttattcttcttacattctcgtagattaatagtcaccaaatcacttaatgtaaagatgattttcgattctacttaactaattacagaaacgattctatatctttttgctttcgcttctctctaaatttacagtgataaatcttgatttatttaatcattaattaccaattctcaagcacattaaatacacttataacaacatttaattagccgagaatgattttttttttttttaaaaaaaaactagttaatacagtatttagataaaattctatttttttataacagttttggagatgaatgtttataaattattagagcttaaatacatgatgttaaattaagaatatattaatataggaattttaaaaaaattattaataa

SEQ ID NO: 72222 - DNA, 1058 bp, Cannabis sativa
aattaatattaataatctcacctatttgatttggtatcaatgtatcataatctaaattaatatataatcacttaagctaaaatttgggtatcatgcattttttgtgcaaaggaaatgtcatgccctaaaatgtgtgaagagaggcttataataatataaattagaaaaatataaatataaataatgcaaaatttaagagattaaagtatgatcatacataatattgatctacataaataagaagacaaaaaaaaagtaatacctcaaattattctcacaattcttcctctacgatcaaaggttaatttttctatcatgagttagtaatacaagaaagcaatatataaataaatcaaaatgtatataaaaaagaaataaatagaatattgagagcctagagagtaattttgtatttaatgctgtcgtgtattaaatactatacatattgtttttaattattttttcaatcaaccaaatctttttcaattgagtaattaatttattcacattttatgggatagtgttttttttttataaaagattcaattaaataatgcaatcttaatttgtcttttattttgtaattataaacaattcaattcacaaagatatattgacaaagttaatagaagatttgttcaaatgctaagatagcgtttggttggaagtaataaaatagaatagaatgaaaaggaaacaattttctttccatttttttgtttgattacatttaaaattataattggaatttctgatagacttttccattattttagtagaatgattattctattttaaaatgaaaagaaagacaattccaatggacgatttgaaattatcaattttttgtatgtattttaaattttatttcattccattcctatttcaatttttattctcatccctatttttatttttatatttatatttctctcaaccaaacgccacctaatagttgttgttatagttggtattatcatcattttaagccttgattccattatgggatttggccttatatggtgatcaaattatgcttttttggaatttaattatgt

SEQ ID NO: 72223 - DNA, 932 bp, Cannabis sativa
tttatgataaaaaaattgaaatggagggcataaaacccaacaagtgggtctatcagtgtatatccactatttccctcaacatttgtcttaatggaggcatggtaggtaaaattgaccctgagtgtggtattagacaagggtatcccctttctccttatatcttcatttgggctgcaaacatcttctctcacattttggaggatgctctggctaaaggcaaaattaagggtatcaagctgagtagatatgggcctcgcttttctcttctcttttttgcggatgaccttattcccgtgggatgagcaaatattgctaaagttaaaggttattgggagtatcttgagagattctgcaattggtccggccaacgtatcaataaactaaaaacatcaatctttttagcaataattctaatgtcggtatgaaaagacgttgtaaggagtttttggggattgatggtactattggtaacattaactatttggtgcatcccctcttcagttaccaaaataaggatgcagacttccatttgttttggataatctaatttctaagctccaaggttggaaagtgaaaaccctctctaaagctggtcgtgccactatgattacattagttggccttgccgttccagtctacactatgcaaacgacaaaactttacaaaagaatggcatccaaagtagatggcttgattagggatttctggtggggttgtgagaaaggaaaccggggcatctacctgaaggctttggataagttgtgtctccccaaatctcggggtggtttaggttttcaaaaagtttcagagatgaatcaagttttcctggcaaaatagggttggcttctaattaatgagaatcaatcgctctgctgcagagttcttagggccaaatacatgaaagagagaaactttatgaattgttcctataa

SEQ ID NO: 72224 - DNA, 771 bp, Cannabis sativa
aaaaaataatgtaacccaattatgaggcatgagaatattctatgtaaatttaattttatataatttattttttatgtaaatttttcataaatgtaatgcgcaaagcatgtagctcaggtttgaatgaacccaggccatgcaccgccttcaccgcacgtgagtccgggtctccatgaccctgactgtgctcctcgacgacggccgactggctgatgcaagttttcgtgcccatggacgtttgacgtccgtatgcatgggcatgcaagtcgggtgaatgggacgttaatgtcccaaagttgtccctgccagtagagccgctcgactcttattatgtttagtttgactgaacaagtaagctcggagctcttcacggagctacaaggggacttaagttccttagtcgaggtaccccatgcatgagaaattgacccgtaagggtcaagccctacgtctgcttagaaggaaaatacctagtcgggtctcagtcttcgtgaccctcctacgattttccttcatgcggcaatgtcctacaatggccatccaaggccaccgtggccatggtggctcttcggagctgtcagccacgatggtggccatggcggccgacccctccgtatacatgtatatttatttatttatatatatatatgtatatattatatatattatataatgtatataatatagtgtattattgttgtaaattttttaccaggatctagatttattaacaagtatgtttcattaaaatcctaatatgaatttctaaaa

SEQ ID NO: 72225 - DNA, 2069 bp, Cannabis sativa
  modified_base (490)..(508): a, c, t, g, unknown or other
tcatacataaccaattttaataactttggattcagggaaaaaattataggtattagtaagtatattaattcaaatttcccttacaaaaatagacttccgtacatgatcggtctagtacacgttatttattttggtatttaaaagattttacagtttcttttttttataatcacgtatgttatacttatttaaaaaaataatttgcggcataaatacttaagtttaactcccaattgtaaataaatacttaaatttaatttttagcggtaataatacctaagttatatatttataactctctaagtacctaaccgttaaatattatgtcattatccacatgtcattttcttattcgtatatttaaattatgtttttaaaaaaaataaaaatttaatgacttggaccaatcaggaattgccacgtggtaatttacttaacaattaacaatcaggtacctgcaaaagctctaaaattataacttaagtattannnnnnnnnnnnnnnnnnnttaagtatttatttacaattggaagttaaacttaggtatttatgccgcaaattactctatttaaaactagttccaaacttttataattttaatatataaatatatgctgtacttataattagtgatataatctaaaacataacgtgtattatgattattattaattactataaaaggttgattataaattgattaatttaattatataattagtttatgttcaactattatttataatttattattttatataattttttcaggtaagtatatcaaatatcacttagaagagatatgaataaaaaatatgggaaaaaaataataggttgctaactcatattttttagcttataaatatttagatatattatataaatatataaatatataaatttaatttgatgacctaaaataataataaaaaaaataaattaggattaattgagcaatatcaagttatcaatcattcatacatttttagacgaatcaaaatgaatataaaaatacattgtttataatatagaaatatactaataatgtagttgttaattgtcaaccgatgccaattagagagcttgtcatgttgctatccaaagagttcatccaagtaaacatagactttggaaacatgcacaggcccgagaacaagctctgaaggacatagtttcacacctgtcttgcgaattgtaagttcaacttggttttttcttctaatttttcatagggaatggttgaacgaaaatagaatatattgaatttgtaatgtgagcttgttatgttatgatatgtactattttatttatttatttattgtaaaagtcgtgacacaatcagagtgtgccacgtgatctatgtaccattttatttatttatttattttaaaattgtgacacacgtgaaagatatgtaacttagattaccttaaattggaaaaattaatactttttagtatattagtggtataaatcattgattactatactttgtcaactctttagtatataacctagattactctaaactgggtgacaattttttttagaaatttttatctataaattttgacacgtgaatttacttaatatataatcacaatttgtaccatttataatttcatattactatatttatttttttaaaacttttctaatataattgtactcttatttctctaatatcactaatattattttgtaaataaaattattcgactaaataattcgaattttaaaattaattttttataccttcctatttaatgttatttagatttttttagatgattttttgtttcctatttaattttgtaatatcatttttatatgtagcattatttttaccaaagtttagtgaagaaagtttaattttttcaaagtgtacggtgaacaagctttaatcctttcaaagcattccaggtaagatcatattcactcatttttgtttgctttttactattagaatttggaaaggtcattgctttaatacaaatttgaaattatattactaacatttcgattttgtttatgcaaaaatatatttttcacattttgataatttttat

SEQ ID NO: 72226 - DNA, 1003 bp, Cannabis sativa
tactattttagaaaatacaaggttagtaacttttgtaaaatagagggtccaaaatggtatttacccataatttattatatctcaacaaatttaattgaaatgaaattaaattaagagaatgatgaaaagctgaaattaatattgacaaaaaaatgatgaaaatgatgaaaatattcacttgatcacaatattataacccaagattctttaagaatcgaaaaatgaaaacaacacgaagatgaaaataaagaaaaaaataagatggaacgtttatcgagcgtaagttgtactgccgagtagggtttctgggaacataagtttcatcacgaagaacctccatggcggcattgacaagaatatccattgcagatgactcttggactgcagttatggaaacatggggatctttatcgggtgcttcagtgggcagagtgggcagcgatgttgggcccagttatggacgcagggggatgtttattaatcctacgaacataaactttgagaggtttaggggaatagcccgaagccgaagagtggctcaccttgaattacagaatagcaatcttgaaggtggaagattctcataaagaagtaagattatcacttcctttgctgaagtaagattatcacttcctttgcttttttcccttcggcttgaacaaacaccctccctgattattaatgtttaaagtaacctcaagcctaatcaacgggataccacagaaacctcaccttcaaatggggccaaatgaagctcaccttctctctagaatcttcttgttacaaaagccgatcagaatattatgaagctgaactttcaacaatatattaacattactttaatggctcgatccctgaaaacgttatgtacacctctgtactcctctactattattctgtcttcacattccatcttcaagttcaaatgtttgaactctcctccttgaaaaaactttaaacattaaagtctttcatactgtaacgtccccgcttcaagcctcca

SEQ ID NO: 72227 - DNA, 937 bp, Cannabis sativa
  modified_base (729)..(730): a, c, t, g, unknown or other
tgtacgaagtgcctataatctcatccaaagcttgaagctccctgcgaccatttcagaaaatactgattgctggaagacgttatggtctctaaaagtgcctcccaaagttaaagatcttgtttggagggggatttccaattgtctcgcctctaaagtcaatctctgtattaaaaaggtgttggttgaaaatatctgtcccatgtgtggagtatatgctgagaccgaactacacattctggtttcctgcaattttgcctgggcttgctgggagtttgctggcttggctgctgcaagtcgtgaagcctcttctctcggacagtggctaattgatttgtttagacggctgtaagacgatctccacagcagagctgtgatgttgtgctgggccctttggtgtgctagaaacgacctcatatggcagcagcgatcccgtagcgtgaaggacgtggttacatttgctaattcgagtcttgatcaatggttgaaagctcaaggaaagggtaatattccctcgttgtctcctctcaaagatggagatggttcggagctttggttaaagccgagtgtaggcatcaaactcaatgtcgatgcagccatttccgaacgttcttcaaagcatggtttcgggtgtgttgtccgaaatgcagatggtattttgattgctgcctttgctggtgtgaaacccggtagagtttctcccgaattggccgaaataatgggcataagggnngctttgagttggctgaaaaatcactcctacactcaagccattgttgagacagatagcctcgtgtgtgcagaagccattcggagtgcagaggtgtttgtttcctctttcggttcagtggtggaagattgcaagaagatctttaagagtttgtttaatgtttcgcttttgtttgttaagcgttctgcgaattgtgttgcgcactttgtt

SEQ ID NO: 72228 - DNA, 853 bp, Cannabis sativa
ttacccttttgagttaaactatagtatatgatagttattttgttagacatattttaaaaaaataaattgtcactatatatttaatattaaaaaggtaaaataaaaataaataaaatccataacgcttaacttaattgcattccttactaaattggtgggagaagtattccctatctttgatctcatatttaatcaagttatctattttctaattttaatattgtaagtaaataaatgtaaaagaataattagtttacctttaattttcattatttattagtaaacatgatgtagattccgagccataataattagatcaatactatagattacattcaaatttataaaaaaaaataataataaggtaacaatactattactaattattaagtaggtacaaataaattaatgttagaaatataatatttgtcattaaattatagagaaagtataaaaaagaatccctttacactctccttgtgataattgactagtctaccacacttcttaggagattttaaattcaaatccccgtctctaaagtgtgtgtacatatatatatataaaaaaaaaattataaaacatataagaccacactaagttaatttacacaacacaattgagttgtgtagattaagtaagcaaaacaagatggctatatgaatttgacactctcacacggtgagatgtaggtgttcatcattttctagctcctgctcaaagtaatcccgacgagcatttttagctaacatcaatgtaactagccagaaaaatgttgaatcaagagacacaaaagcaccaccaccgagcagaccagttttggcagtaggacaatctgagttgctgtggtgga

SEQ ID NO: 72229 - DNA, 861 bp, Cannabis sativa
  modified_base (806)..(808): a, c, t, g, unknown or other
aattatatatatgggtaaaacttttttcatatggtagtgtagtagaataagcatactttatctatattatccttacatttacataaatattattcaagaaaagttaaggggcaccttatggcaccaagaattacaagaaatggcatattattattggtgtaaattaatatcaagtctcacaaattaatttaataaataatataaaaaatcgctaactaatcacaacgcaccatattaatataatgttagccaacatataatacttaataataatgctcttatatattatatatgtagtttctttctccactctgaaaaaaccatattatcgtaatcctcataataattgatcctaatttgctatatataattgcaacaacaatattcagcgtatgttgtcgaggagtttgatacaatgctcattcaaggtgtggattattttaattaatttaaaataaaacaaattaattgacagctaataacaaaagaaaacatcatgaagatttagttcctattcacattttgatttatgaactaattaatcaataagtaggtcatataaaagtcgtatcgcattaaataacaaataatattatgtttggataaaatattatattgtattaattagactataaatatgagttgtattatttaatacataataaatgacctgtattagcttgtattataatatttacaaatgatctgggatcaactccgaccccaatcccacagcctcaggcctcgaacctggacccacactacagaataccttacttttagtcacaactaaacttgtgactaannntaaattattattcttatgttgtgaataataatctgtggctaaaggtattagtc

SEQ ID NO: 72230 - DNA, 1268 bp, Cannabis sativa
aacccttctgtgtttatttcattaatttagagaattcatatttaggatgttaattcagcatacttgttagtaaatctagatcctggtaaaatattccgaacaactaagtccaaaggatcttgaggaggtagtttggacaggcctaaacaagcaaagggtggatccgagctgatcagaaacgggtttggacaggttaaggaacttgccccacctctagtactgaaacaggagactaaaagaggcagagagatgctcatccactatgagagccagtcggtcccttagatgaacgagcaactagctggggcgacaatgacttgtccttggagctggtcatgggaggagtcttgaaagagctttcacaggtacgtcttttttgacatttttcttttgttcttctttaactagttcggattttaatgtcttcattctgtcaagactggtctaaagatggcctatgcatattcctgagctaagtcagctgctgctaaaaaccttgccatgtccaacacaatgcgaacagaagtggacttggccaagaaggacgccgaggaagcccgggttcaacttggggttgtgcagatggagctgggtgaggtcaataagaagctccttgctgctgagaccaaagtggttgaactgacaaaagatttgcaggacatgccatccactgagcagctcaaagctgacgttgcttccttatctcgggaagtgaccagtctccaagatgaaagagaggatctctggacccttcttcgcaagttggaggaagagaagaaggctaaggaagaggagcttgggcccgaggttgagaaacataattttgaagtggcgaggctcagagtgaaggtgaatgccctagagacagctggtctcgatattttttatgacttttggaggccaatcccaaggcaaacattgattatctgggcaattccaaagagatatttctcgactactgtgctgctcaggaggtctataaggaatactaggcgaccacatccacctcttctactgatcgaagtgttgaagtgccttttgctcagactaatgatcctccggccccttctaactcagttgacccatacaaagagcctggaactcctgctgtttaagtgcttccttttactatcttttttttttatcagttcggccataaggccttttttaagacaaggtgatcggacaagcgatctttaaacttagaatctatttttcatttttcgaacagctagatgattggccagcctttaatcccgggtttgaag

SEQ ID NO: 72231 - DNA, 1227 bp, Cannabis sativa
aattaaaaaaatcgtaaaaatattcaaaattctgtacaactgtatttttataattttttttattatttttgtgaaataatcccttttttattatatactaatttaatttaaataaatattttattttattaaattatttcaagagtttaaattcttactagtaattatgatataattttttacaattatttaataaattagcaattttggataattaatattattatataaaatgcaagatcttttaagtaaaatatatttatttggtagaatatttagtgtaaatcattggagttgttgtactaactgcaactccaataaaatactaaaatgtcaagtttaatgagattttacactaaatttatcccaaccacactttaaaacttaccgtatttataacattatctatagtgttccactattattagtgtgacactatagattacacaaaatattttttttattagtttttaatatttaaatattatatttatacttaaacttttttgtatatttattatttgtatttatttataatttaataaaataatataataagaaaaatatgattttagtgtaacttttagtgttgtgattggaatggaaaatatttagtgttaaaattttattatttttttattgatttaacactaaatttaatatttattattggagttgccctaaaaattaaatttttttatactaaattgatgtagatttatcatcaaattggtataaccattaaacatgatctaagtatatacaaatcaaataaatcatattatattacgtaataatattagtcgaaaaaaaaaacttcttgaattaacattaatcgctagtataagtcactaaggttagtttagtggtgagagaggaaagggaaaaagagagaggtgatgtatttgaacccaacacctataaactattagttaccttcaatataagtttattgttcaaaaaagaaaaaattattttttcaaacaattaaaatactattatctaatgtgaaaatttcaaaaaacaaaaaaaaaaatactattatcttattaaaaaaacatatatcaatttttttgagttttgagaagatttagtacatgcatcacgttagtaaaattgaatttagaaaaaaactatttgaattcaaaatttttaggagaattactctatatactgtttttttaatttttttttttcaaatttacggtttaggtttctaaagtggtt

SEQ ID NO: 72232 - DNA, 1467 bp, Cannabis sativa
  modified_base (225)..(240): a, c, t, g, unknown or other
  modified_base (1039)..(1042): a, c, t, g, unknown or other
ttaatattattattattattaaaagggtaaaaaggaaatggaggcatttaattcattaaatacctatgggatatattgctacatcatatttttttagagtaaatttaacaaaaggaccacattattgtaaatggtatatttcaaaaatatttataacaagtagtatatattaaatcaagtagtgtcattagctcataacgtaaaaacaataataataataataannnnnnnnnnnnnnnnaataaataaataaataaaatttccatatatatcgatctagaattaaagagaaggaaaatttttacttttatggtttttacaatacatgtttgcaaaagtatggatttttatttttaaatttattttatggaaaattttaaaaatagctaattatcgaaagggagtaactggttaccttatctattttttacatgtttttaaagtttttcttgaattatacccataaagtaatttttggaaaagagccatatttttatatatataaaatttgtaatttcttcatagaacaaagacataagcccaattagttgtaattgaaaagtttctatttcaagctagttaacttcacaaatactttttttttattattattatttttacaattttgtttgtgaaaattacttgatgggtttaggaagtcttaagtttcattaagacctttttcttttatatcttaaagattaaattcacctgtcatcacccgtttttcttatttttcgtttgtgttaattttgggaatggaaagaaaaaaactttatcacattcacaagttaggcaagccgttatttataaaaatcaataacttagaagatttaaaatttgtgctaaatttgacacaaaaaataaatttgtgttatattttaaactaattatattgattatttttctttaatacacaaaaaataattaatattttaatattttaaaaaaataataattaattatattgatagtcatttaatataggataattactccataactatttttttgattttttttttcaaatttacggttnnnntttctaaagtggttgcagcgctaactgcaatagagatttttatacgattttttattacaatttacattgcagtactagttgcaataggagtttctatgtaaaatttcgtaaaaatgtgaaaaaaaaaactgtttgaaagtgtaaaaatgaaaaatgtcctttattattttgttaagaatataccaaaattattatttttttattgttttattatttaaataatggtaatatagtaaataaagaatttaaaatttactaaaaatcaatgaatcacaataattagtaacattacagtaaataaaaaagtaatatttattatgagtaaaatttggcacaatgttatattttatgtcaaatttagcacaatttttagcatataacaaagttagtacactctttagaatagggaaatttatatggtatac

SEQ ID NO: 72233 - DNA, 783 bp, Cannabis sativa
atatatatatttggctaaaagaaaaattagcaatcttatatttttcccaatttttataattatatgatccaatacataaaatgtaaattaactcaaaaaaaataaaaaatcattcaaattttattacaaatatatagcaaaataattcaaaaaaaaataaatcctaactatattttctatcaaatatttaatacaacttttaatatatactaaatttgatacacattaaaccatgtataatcttattttttaccaagatataaaaaataacaatgtaacacttttataatagtctattagaaatgttttatataagaattattttttctatattttgactcttcattttctttgtttataaaagaacatttgtattataaggtactccatacacatttatgacattgcatatataggggtgtgaataaatcgatctaatttaatgacaacgttgtgatcgccaaattttggatatccaattgtgatcggatcggattggatgttatttttgaatatccaattagatcgggtcggatgttggatgaagtgtataaaaatccactacatccaacatccaatttaactaattagtattttcatttagtttggatgcctaattagattttataatgttatacgtaaaatatatatgtatacataaaaattaaaattaaaattttactctttttttcttggattggatggatctaatctaatccaatacatattggacctaaaatattggatccgatcagatctaaaaatactagttgaaaatttgaa

SEQ ID NO: 72234 - DNA, 1106 bp, Cannabis sativa
cttctagggcactgactttagtaagagcggccgccttcgcagtgacgactgcctcctaattcttcttataacaagaatagcccttggacaaactttccttctccttatcagtctgcggggaaaacttcatagcatgggcacacctcaaagctgtctgacacatatatatatatataagaaaagcaaacacacttagcaaaggatgaagaaataaaagggaaaaggagaatgagcatttaagaaattacctttattcccgagatagcagtgtccttcagaattgaatcccgtccttgagaaatatagaaatcatcatcaggttttctcacggcatccaaaagagatttgaagtaattctcgactgactcctcaaacgggacatctttctgaatcctaaaagcagggatttcgtcccactcagtctggacccgtggaggatgggtagccaaaggtggggaacctcggctggagggaaaagttgagggatgtactaaaagaggagaaagggcaagttgagaagacgacgaagctcaaagaagagaaaaagaagtctgagcaggagagggaggtgaggggcccaggttatggcccaaggtagctcctgaaaggttctcggattgagaagtccgcccctgattagtaagttccgtcggggccaggcccccagaagttccctcagcctcactggcgcctgacgcaatctcagggagggattgagcagtgtcccaatggcgtcatctgtggctgaatcgtgctgggatgacacgccaaaatccgactgattggcctcctcaagcctcgcgctcttctcttctttgctttgcttttacgtttgggacactttgccataagccacttccaccgggcagcagtctgagcctcgatctcctcgacggtcatttcagactacctcattttgggaagatgacgggggtaggtttctgcaaggcgggagtgattctcagaaaaatctatcaaaattggttcgggtgtttgattcaagtgtttcagaacgcattttaagaaatcaggcaaaataaaataagaaggataaggagtggagattgttgggttttatgccctaaataaaactctttacaatctca

SEQ ID NO: 72235 - DNA, 1757 bp, Cannabis sativa
ttgaaatgttaactggcagtgttcctgatagttggttggtatttacagaaagaatgatgaggcttttgaggttccacagagaaatgggaattggacccatgagattgttaaaagaaagatcaattgttttaagttgtaatagatttttgattcgaccaatagaagaaggaatactcccactaaagaagtttttatacagttcaagaacctcaagatcatgtaggagagcaattcctttaggaatattacctttgaagaaattaagttgtaaatgaaggtgtttgagcttagaaagtttcgaaatattagatgacaaatgccccacaaatttgttatttgtgagattgaaagattcgagtttgacaagattggaaaatacagattgtggaattgacccgttccaactgttttcagacaagtcaaggaaagtcaagttcctacactttgatatgaaacctgggaatgttgaattaaagtagttccaagagagatcaaggtaggttaaggagctcatgcttgaaaatttagaccaatctgaactctggaaatagtttattccaagtgataagtaccataccttttgtagattggtgagctggtaaggtattggcccctcaagagaattgttgcagagactcaaatattgaagctcagacaattggctcatctccaatggaatttctcctttaatattattgtcactcaagtccaacaaagtgagcttggtgagattaccaatggctgttggtatcaaaccagagagcttacaattgttgaggttgaagactgtgatgttaaggaatggagtgaagttgaagttgtccaattttccattgagttccaagttggagagatctatttgtgagatttcttcattggaaacatcacatacaacattagtccagttgcagagattaatgatgttgttgctgtcccatgtatctaaagaaggtgattgcattgctaagctttccttccatgttatgagagcctctgcttgtgctcttggtgatgaagcaatcttcaatggaagcaaggaaaggacaagaacaagaagaagatcagagaaacaagttgttggaactcttttcatggtgtgttgacttgaatgtttaaattactaaatttgatgatcctaataatcacctgttttctctttatgatatatagtaataacatgttatatataacttaacttttaaactagtatcatgttcttgattctcgaaagtcaaccaagaaattatcacttccaaacacgtccctagtgaacaataataatttacaagttcttggaactcatctcatggtgtatgtataataacttgaggctgttgcacccttatgaattgatgcctttatttgatttttaatctaattttctttttcatatttaagtacgttataattatttaaaatattttaatttttttttgagaaatttagaataatttactatataaatattatagtgtttaaacaatttatttcacacacactgtttgaactctattttcggtatgttaaatttttttcaaattttttaaaattttacaagatattttaataaatataacgtaacataactatatgagaaaagaattaactgaaaaattatttcggataccaaaggtcagaatccaaactatcttatttgacatttttataataaattcaaatactacacatattagttaaaatagtaattgccatcaaagcaaagcaaagcttaatgtattaaaatagtgtaaagccgc

SEQ ID NO: 72236 - DNA, 1418 bp, Cannabis sativa
aaaaaaaaacctttatttattaattttttttaaagaaaagacatcattaaatagattaaaaactgttaaataatatcagtgatgttgatcaatacaaccacaatataagattaactattacgaaaaactgttaaatcatattcataaaatgtcacatcataataatgttgggtactataacttattgattcttaataatgttttaattttttactgctattacaatactgttagaatttataatgtaaaacatgaaatatatatatatatatgaacgatatgaattatatgataaatgtgaaatgaaatttaaacatatataaaacttaaatatgtaattaaaggattgaaaataccactagtcattgattctttaagattattagatcccacgatctttgcatctacaaaagaaacaaaatctaacgttagtgtggatattggaactttcaaaactctcatagaattcaattactatttttttttatagtaattaggtggggatatcctatatttataagttaaatactcaatcaatatttatgacaaattaattattaaaatattttgacaattaatttaaaaaattaaataagatagcgaattaaaaataatcattaataagaatattttaatcaattaattgattaatttacaaatcaaatattatcactgtaattgatttatgcgtatattcaatttatttattttatacgtatatatatacatatatatcgaaattttttaataaataccactatataagattagtgcgatatataaatatgagttgagctttttgatatgacatgaaacttacacgagtacgactaaacacaaaaaatacaaatttagacacaacacagcacgatactacaaattaatacgatatagcgccacgaaaaatatgtccttacgacatgagaagaacgaaaggtgcaacacttaagcacgaataaactagcccgaaaaacatgtcatacgacaaacctgaaaagtacggtatgacatattaaaaatattataataataataataatacttagatatatatatttagcagtccatggtttgacaaagtatatttttttattagacgatgaactattttattagttcgagaatgggataaatttacgagtgattttagtcaccatgtcaaatatatatatgtaatactgaaaattataactctataattaaaattattcaagatcaggtggttcatgccacaaaagaaactgtgaagaatagagtgatttgtaactagccaaaaaaaaaatccagcaagcagatgtcgactggtttacaagtctgtagcatttttttttttttttttgttatttttgttcagttgttggctcttgatgtgaaaaaaatggtgaaatgtatgtttataatttgagatcaatgtacag

SEQ ID NO: 72237 - DNA, 865 bp, Cannabis sativa
ataaaggcatcgcaccattgtcagaagtcaaacttaggattgggatctgtagtgttagatatgaattgaggaagggttgatggccaaggagaatttcatcaaaattgtggcacgaacaacaggtagaatggaggatcaccaatagggatagtttgattggtcgagacgtatagcgatcagcaggagattgttgtttaatgaaagattgaacgcaataggtggagcagcccgtgctaatggcaaagcaggtggaggacgaccgtcgttggttggtggttgggaattggtggtggaagaggaaatcatggctctgatattaagttgaaaatagaaaaaaaaaaaaaacagggagaaaatgtgaaaagagctcccctagcttaatgagctttctccaggatttatatctatataagaagtggttacaaggtttgagtagtaacgtccattctgttacaaataaatcctaacatattagatactaacttcctaactaagtaatagtcgttaacataaaccaatcgcaatactgatacacatagaaagatactaagaagcattaatactttttagcatttctcatattataatatattttaaatttccacatatgattatgaaaatcatttctgtgttttttatattttgtttgttttatttatgttgctttatgaaagaaatttctcatatagccaagtggcaaacttggacggtttgaatatattgaaaagggaaattcagtatataatgtgggcaggccaatttaatatttgattagttatgattcaaaaaaaaaaggttagatatggtatacgtatatatatggtgtatatatatgtacacatatacaatatatattttgtttata

SEQ ID NO: 72238 - DNA, 680 bp, Cannabis sativa
tcttcttctttattccaacacttacatgttctatattcatttgttatttaggacagaaaaccatgaagattgtcatcatcctcacagctgtttctgcttgtgcccttcttcttgctgctgttttcataaatcatagatggagaactagccacagttgtaagtaaaataataaatcttctgtgcatttcaatttttagtttctatttgagttagttagtctgttaaactgttgagttgttatctcactgtatggtttgcaattaaccgtgagataacaacttaacacttagactaactaactctaatagtttcttgtacgtctcaaaatttgtttgatctctcaatctaactccaaattttaaagctggagtagcatggcccattaaggagatcttaaggaaactttgtttggccgagataagtgaaactccaatacacaatcttcaaggtgccaaacaacaagatccatctgagttgtgtatttttgaattgaatagtgttttaactgctgcaaaccgtttcaatatcacaaacaaacttggtcaaggagggtttggttctgtttacaaggtgtgattacgttgtgttcttttactcttttattttttaattttcttgaaacaaatgaataactaaacaatcagagcaccaagtaaaaattgagatgtcatgtcgatctg

SEQ ID NO: 72239 - DNA, 1191 bp, Cannabis sativa
cacatttctcactcctaatactatacataccgattaaaagaaaagttcaagcttctttaggggcgatactcttttgtcgcccttaaatgtgatgcccctaatatctcaaattattgtagtgatgctcaaaacatttattatatatataatataataatccctttacatcatttttaaaagcatatcaaacactatgccatgaaattacaaaacaacaaacaaaaaactcttgaacaaaacaaatatataataaaatccaaaaaagagataataaagttatcaagattagtctttaagagaatcattggacaaggttcccatccaagatggtggtaacattccagtctgttcttgaactgtcttaaataacggtggtaacatttgataaactccagcaacctctttcatagccttattattatgatctccttcattaccgttaccgttagtccatacactaatcttgggttgaagaccacgaacagcctcagcattgatcttggcaatgtcttgaaacataccattgttaatcatgagatagtctctcaaagcatggtagttacctccaacagattgtagaagagtggttacatatgtggcttgagctgaacccaaagcaatgagtccctctgcctctttcttctttgcatacaattctccctccgccgcttgttgccgtgcgtatagctcggcttcggctatcgcctttttcgcctctgcctctttctgcttttcgtaaaaaattgcttctgcttctttttgcttcttgtacagctcccaatttgcttcttgcacctttataataacaaaaaccaagaatattaatattgatttttttttttttaagaaaaacaattatattgagaatcaaaattttgagtttttttttctttattaagatccaattaatgatcatttataaaaatgttaagggtaaatagcagcataaattcaataatttttttttagtgaaataactgatactacatattttcgtctagaccaaataatttagaatttggatcctatatgtgccatgtttaagataatagcaatctatactgatgaaactggaagaaaattacagttttatataaacattgatataattataaaaaatatatctttatatattaaaagtgcctatctaacggtatttcttggtttaacattcttggtttaacagaatat

SEQ ID NO: 72240 - DNA, 957 bp, Cannabis sativa
ttacaccatgtcaaaacgacaagacaagtatttttttaatttggtccttttatatgtgatttatttgtccgcatattataacttttttggcgctttcttagaattttatacattataaattaacttgattttctttttaaaatctattttgagaaatgtatgagtttttttcttttgtgagcttttactcaaaaaaaaaaaaaatgtgtaagtgctaccgtcaatttttttattacaattctactatttaaaaatatatgttggaatattttcttaattttttatggtgatatttagtatagttacacaattattcctgtaaatttttaaaaaaatttgaataatttaccctatcgaaaataggtttaatattttttaaacaggcgtggtaaattaaaatatcaggagctctgttttcaatgttataaactatttaatttttttagaatttataagaatatgattttgggtgaaggttgactaagagtttttaattataactcatcttaaaaaaaacaataattacataagctatcattttttgtaaaaaaaaattatatttatacgtttaaagaatttttttttatatatatatatttacaatttttcatgtaaacaagacgaaaacaaaaaaaaaaaactatataaaataacatttaaataacatcaaaacaccaataaaaaataacatacagatagcaaaaattcaacgacaaattaacaagattacaatataaaatgactatattttctgtaaataaaattaaaaaaatagtaaaaaaatttaaaattttgtgaaaccgtattttatttttgtattttttttgttgtttttgtaactatagaaaccaagccacaagagtatgaagaagtgtttttatgaaattcaaaagcccaaatccataagctgtctaaggcccaccaagaccctaaatctaatgggtttttttttttttt

SEQ ID NO: 72241 - DNA, 1088 bp, Cannabis sativa
ataatatataaaatgtattttgaaagtaattaattctctaatcaaactcaaattttgtcaaaatattttttaatataatacttatatatatagagagagatcattataaaatatgtataaaatacgtataacaataaaatttattcttttattgtatatatataatcacatctaaagagcacacactattatagccgcaatagctaaaaaaaattctcaaagattaaaatcttaaattctgtttcaaaaattaaaaaataaaaatacattatctaattaaaaaaaaattaaacatacatgtattgcacttaacaccatttaattaaacctaattaaaaagaaaactaattatacgtgagtgcacgtaacatcaacctagtatatatatacacattaacattctaattaacacttaataggtaaatctaaaaaatgcatcaaatttacaaatagaatcaaagataaaagagttttaagtgtttaaatatttaaacttaaggagttgtaaatttctccttttaaaataaaaatgttttgtacattcattactcattgctgataatttttttttgtattttagtgttaatagaaaagaatcaacacccacaaacaaaaagtaaaattacgaaaaaaagaaaatacattaaattttggcagggttgttgtgatgggcttaacaaagaaaaaaatcatgataattcattgtttttaacgtcaagaaaatttgagaagttatatcaaatgattcgtatgtaattaattatttttatttcaaaacttgttatttatatttttttttgccacatgaaaaaatcaataattatttttaagaattagaagcaaattacttaaagaatatggtatatctatattaattttattaaaatattttttattttaaagttatgtcgatttttttttttaatatatgagttgttagtatatagattttgttgtataatatatttttctattttgttgatggtatgttatcattcttagatgctatttattttttatgttgctatgtataatagtagtatataattttgttagcataatacaaatattttagggctcgtttggaa

SEQ ID NO: 72242 - DNA, 790 bp, Cannabis sativa
ttaccaccactttcaattctgaattgtttgtacattatttatactttagattgcgagtactcatttcatcaacacaacaacgagtggcttttatcaaaaagaaaaaagaacaaacacaaattgcaaagaatatttacaattccccaaaaaaagactatgcttaatcatgcttaaatgaaaagactgaaaagcatataatatatatacaagaacaagtgcaaacatgtaagaacaaatcagacaatatctctatctaaaagtttaaccaaagaaagtgaagaagcctctgcctctgccttacatggtatgtataggacatgttgcacttataattttgggaaaaagaaatcactgtgttagtagaatctgactaaatgaaaaaaaaaagcaggaattatagtaataaaaggcttcgcccttattatatatatatagtcatgaagtcatgataatttggtactggtacttgtctcatcgctcagtttcttgtattctggtctcagctcgtacgttccttgatttgctcctttgttgttgtacacacacagatctttcagtaagtctttcacaaattgctgcaaaaggaccctttgttacgattgtgagaaataaaattaaggctaattagatttttaccccctaaattttaatatatgtaccaaatcataactcttacatttttttggctattgaaattgttagatttaaagactcttgtctaatttctttcaattttactatttcaatgattgtttatgtactaaattatgctacccagactttgatatct

SEQ ID NO: 72243 - DNA, 1232 bp, Cannabis sativa
  modified_base (564)..(569): a, c, t, g, unknown or other
taactaataatatttttttaaaatttttaattgtattacttttaaataatataaaaaaaaataacataaaatttagtatacgtgcttcagacttaactttttgctagtgtgtataatatatgtaaatacatttgttcataacatatataaatacatatttatctataatataagtatatacatatttgtctgtaatataagtacatacatatttgtttataacttcctaatgcatacctgtccataacatacatgatataatattatattggttcgtaacttttttttttctatgaaattttactatttttccattttcttaatgcatgttcgataggatttttctgtttacttttaatttttttttggtgcacatgttctcaccaatgataatgcataaaaagaaatatattaaaaacgcattaaaaaatatcatccttaacctcatgttaacatattcttaatgggcgcagagattttctgtctaaatgttaaatacggtgggaacgggaataacactccccgccctgataggtactcatttaatattttattttatatttnnnnnnatattttataatttatatttgtatttttttaatatattagtatcatttttataaattttaaattatattttagataataattaatttattagataataattaattacgttgaaatattttaatttttatatagtttaatatttttatatttttaattcttattttttattaagggatttaccatccccatgaaaacacttattccatgtaaaataaaagggatagagattaaaatctttaactctcttttaattttctgcttcacgtgcatccctaatgttgtgtctatgatcactattaataatttttttaatcgtgatatttttatttttaggagaaaaaaaaacctcttattttttttttttcaaaaacaacaacctctacattaatgtcctacaacttctgtaaaattttctcaaacaaaataattattaaacggaaggaaagaacaaaggtacaaaaagctttaaagaacattattaattgaaactactttcttaattttgaataattaagtcccaattatgtcgtcaaaatttcagaacttatgggggcatttatttacgcactgcactgtgtgcgcatataatatataaatatctacactacatatatatttttttaacatttttaaaagtaatattgaaatataaaaattgaaaa

SEQ ID NO: 72244 - DNA, 1398 bp, Cannabis sativa
  modified_base (886)..(891): a, c, t, g, unknown or other
attggattttgaggtctaattagattagatcggatgatgattttcaatctaattactaattggattggaatggatggggaaaaaatgttggattggattggatgctcacccctaatccaagttaccaccactgacaagtcacaatcgactcgatgcacctgaaatcacagttgagatgcccataacagcccatccttcaccaccaaaagctttgccaccgccactgagaacctgccagcaacatccaccgcccacgccgcccaaaccacaccactatcatcacaaatcacacctcctaaccccgcaaaactagtcttgtgtttcactactgcatctatagacagcaaaaacttccccaacgttggcgacatccgccccacctcgctccccagaccccgataaccactccagcctccacttcccacaccaccttccacccactcccttgacaccccttatacttagacagagcattttacgcgagaggaaccaacacccccaatcttgaccatgcattcccaaatagagaaccattcctattaaaccacacccaccataacatcatagcaaactcactaaagacctccttccgcaactcaaaaaataaagccatgttaggttatttttagtattaatattaaattaagtttaatatatttttaattcttgtttggagcaattctacgctttttatctttaatttttgtagatttaaaatataagaagattagaaaatatcaaaagaataagataaaaaaaaaatcacacaaaaaagatgatttgtaaaatagagaaaattgtgtaagaaaataaagctgaaacttcaagcctaaattcgactatcttctgattaaattttggaaaaagtcaaaacacaaaaattctnnnnnnctcttttatctttctggaacatcttgaatcgtctaattccgagtaatatcaagagagttatggctaaaatactatcagtcaagcaatttagaggcaaaaaggagtacaaatttaagagattaaattcaatactggaggcattctacaaagggtttttatcattattttattctctatcttcttttctttcttaaagttaatatatgtgattttacttccattaacatgtgtagctaaacacttgattagggttagatgaatattgtttaacattgatttatggttttaatataatttatttttcccctaatttctatgtattttatttcattcgtgcttaatacttttaattgtctggccttaattaactgttttatgatttcgaagcgagaaatgagaagtgagtgtcaattatgctatagtgaaatagaattgaatttcgatatagtacgagagtacttgtatggtttagatagtttatagggtttttgtgtttaatgcatgttg

SEQ ID NO: 72245 - DNA, 1148 bp, Cannabis sativa
aacatttagatttgtttggatataattccttctagtaaaagaaggatctagaagaaataattctaaccacaaagtgtaagagggagtaattataaataccttatcaagggttccaaattgtaaccaacaccaataaatcttactaccttctcatacaaccctctcttctaagcaaaaaccattctcatatactaaatcaacaactacttatcaacatcactacttcactacattaccacaaaaatcattaaccgcatatccatctattctaaacaaaaccaacacaaatttattctcaacccatcataaaagatggggagcaggaggaatggagagaataattgatctcttttataataatatttggtattaggagtatatatgaaaggatgaagagtaaaataaatactgaaattaccattttatcatttttaatatattatatattatttttttaaaggtagaaaagatattttatataattgttttatctttttcttaaattctcccatattaagagagattaaaaataatgtgtttggagtgagattctctcattctatctctcctctcccttcttctctctctattgccaaacaaaagtattctccaattcctctatgcttctttctccctctttctctctcctctaccaaacatagtgtaaaacttattgtgcaccaaaatacattttctatcataattgatagttattaaaactattacaattttataaatatagataaaaaaaataaataaataatttaaatcaaacttcaacaataataatattttacttaaaagatctcaattaataatttataataattaattacaatataattataggatatgtctatggtaagcatcttagttttgtccttatggtaggcatatttttatagtcatagatatttaatctaatggtaataaattgatgagtgtatataaatggttaatatgtagaatgtactagattattcataattaattttttttaataatattcttaaattaaattataattatttaaatagattattaatttattcttaccttttttttttttctctctctctttcattcagaatctcaaatctttagacataccatatttctttcatttcttctgcttgggaaccatgttt

SEQ ID NO: 72246 - DNA, 1388 bp, Cannabis sativa
taatattaattttttattggagcataatttaagtaaattgaagcaaataatatatctaagttgtacacccattggattggagattgtcttaaaagctaactcaaatcaatccaaaacatgtataaatgacaccagtggctggctcctaatgaacaaattagttggcacaattgtgaagttagtttaatctacagaaaaataaactatcaaaactgacaaatattctttgggctaaaaaccctttttaataagatgctttgattacttcgatcttcttccatgccaagtacttgttgttttcttgcttgtatcttctccactctcttaaagctgccaagataacatgcatggcaactggcagaaaaaatggctgtgcatatatatggaagaagattaaatatgagagagaatgaattttcataattctagcatgggatatataagatgtttttagtaaactaaccgagtagacagcaaaacagtgctcgaatgagtagtagctaacggacatgatcgatgggtgaaaaaaggcgtcctctgccagagatcttgcttgtccagatgccactgataacaaaagaaataaaactagttctcagcttgaaatcaaatgttttggacaattcatgagatattaacaagttaaaggcacataccagcagaagcatcataaataccaagagaagcattattttgagtcagttttgctgcctccagagaatacgctacctactcgtggagatgaattgagatctatcagtatcagaaagaagcaaaaggctagaagctatagacacatttgtgtccctagtttatggagctactataaatgcacttgggtccaagctaaacagcatagaatgctcattttccacgcattgtgttaattttacgagtctagttaaaaattagacacatgtaacttgacaacggtcactggagagtatcagaaaagttacctgtttaccaatctcgtccataataatcatcctaggaagtgactgaacctgtatgaagaaatgtgttattcttgtcacgaagatcagctgcagaaaaccaattcaaataccgaacaagtttagacgtaccagtctggaaagagatccaagggtggtagcacatgatcgaaggttaaaacaggcatgttgccgcgacaagacatccaattccctacaaaatcaataaatacaataattcatacctaatattataataagcaataccattatatgacatcaacaggagaagtcgttgataaaacacaaggtcacatcaaagaagtgatttactataacaaacatgttaacaaggggatctggaagtgaccaactgcaggttttagcaaaatacagtgagattccttgatatatcaaaataaaaatgcattc

SEQ ID NO: 72247 - DNA, 1131 bp, Cannabis sativa
aaagaattatccaaaataatattaattttcttataaataattaaataaatacactataacaatgagaataattagttcattcattaaaaataatgacaaaatagctaattgagctcaatattcatgttccaacatttgataaagttcaaaccattttaaaaattcaaaataataaaataaaatgtaacaaaacttagctatcatattgttgctcttgtatttcagatgaatctctattacgtgcacctgatgcttgatcatatggaggtacattaggtggaggcatgagattgttatggtgaagaatgtctatgacaaggctaagtcgttcattagtactatcaagacggttatatgcttcattaagtttttggagtaattcttcatatgttggatgatcaggttgggtagtattgcgttgtgaagtaccacttgcaccattaaaagaccgcccccaccctcgcaagtgtacagaacgacgtccaagaatacgttccataatatttttatcagacaactcttctggagtgtgttgatcccttaaagctttcatttcattctaagtatataattttattagttagtatttaaacatcataaaacttatcaaaattgtaaatttaataaataaattacttacatataatgtctcaagatctggtccagtccatcccttttccatatcataatgtttcaaacgccatgtttcaatttgacctgtggaagaagctaagtccattccacgtcgaatgtggtgtcgtggtgtagagactgatccatttcttgattcccacttccttttagatcggttgttagtattctttaatgctctttcctaaaataaataaataaactaatgagatgtaacaataatttaaaagacaacaatacattagattattaacacagtgattgtagttgaaacataaagtaagaggttgtttagtgatataattagagcttcttcaaaacttttaaaaattaatcaatgaacaaattgaataataaaaaaagtttctcattggtataacctatgttaaccatatatccaataaaaatgacagcatttagaaaaattagactattcatttgtcccaatgatacaggaagacgagtgaacctccaagcaga

SEQ ID NO: 72248 - DNA, 1332 bp, Cannabis sativa
taaaggcaacattagtatcttaacgccagtttatttatggcatcttattttacgtatgtaagggcgttacaaccggaaatttgtgaaacagaaggctggttggcctgagaagaattggtttgttcagtaactttctggctcaacatgctcatgagtttctgacattggccaaaggtggccataagatcatgctccatgttttgacttttaccagttgcagcagactcctctccttgtgcaccagtgaaattagctgctggtccttttccaactgtaggagcaccacgattagggaatttcccatgtagcttataacctggtgggtacccatgtagtttatagcacttggcaataacatgtccagccaccccacagtgatggcaaatcatctttggcttgttgggttgtacacggccagcaaagtgccctgaattcgacgcaccaggaggctcagtaggcttgtccttttcaccatttctagatatgattcccctttgcctttcttcctgaacaacagaggcaaaagccttgttaatattgggaaaagggtcctgcattaaaatagcagatctagcattgctataggactcatttaacccaatcaagaactcaagaaccctatcctcatcttgatattcttgaataaccttcattgcaccacaactacaaacaggttgtggtctaaactcttgaattaaatcccaataggatttcagtcgagtgaaataggtggtcacagaattagaaccctgatttaaaccctgtatcgatctcttggcttcaaaaactcttggggcattcttttgatggtatctctcttgcaactcagaccatatttttgttgtattatccaggtacataacgctatttttaatttcacttggcacggcatggagaatccaagatatgaccaaactattgcatctaaaccaggcatcatactcatcatcatctttgtctagctcgggcaatcttccatcaatcatctttatcttgttcctagctgcaactgccaccatcattgaccttctccaagaactgtagttctcacacccagtcaatatttttggtaacaaactcgaaacagattaatctccattcgacacataatagggactccgaggatcatcactaccagaatgattgtttggttcaagaacagagaacctattcgagtcatctgcaacattctcctgacttcttgagcttcgagtttgagcggctccacgagctcttccacgagccatggcaatggctgacaacagataaaaaactaaaaggggaaagagccacttggctctgataccatattatcaaagagagaaaaagagg

SEQ ID NO: 72249 - DNA, 1391 bp, Cannabis sativa
aaaaaacctacttgaaggatcctttagagagttcctctataatataaatttctaagtataatttaagaaaaaatgaaaaggtatctaaatgtaattattctcattactgtaattacatatacggaaaaacgacagcttttcctacttatattctttatttacaacttgttatagctttatactgtgcattattttatgagtatttttgttcttctttttttttatgattttttttttcaatttataaatacataattatggaagtgaatggctagatacatcttcactagtgatgcatatttttctcaatccaatgaatttccaatctttaatgaaatggcacagagacaaataaatatttgtcccaaaacgatagatgaaacggggttgttcaaaagatattctaatatatattcatcacaacaacaaattaaatattttaattaattcttattctcattattattcttattttattataatatcattactaataccattattattatattgtaccaaactaaatctcacatatttgctaaataataataccccaaaatatttatttttaatgaaattattccttgccatgaaaagattatctcaaaatgtttgagaaaagttggcacgaaactagaaagagactagggattgagtgcttttctgtactatataaaatttacttctaaagttagtattaggttttattaaaaagataaaaatatagtctaattttataaatgtgtaatagatgtagaaaagtagggaatgcatacctaataaaatttaattgttcaaatgaaactatcataccaaaatggcaaaatgaataactataaaagtcatacacaatatcatacctaatgttatttttgtccgaaatgacataaacttagagaaacttcctcatatgtgaggtcactcactctagccaaacatcattaattttgtattgtttagattagtaacaaattataggaaatttagctctgatacataggaattaatctctgtaatttcagctttaagatcacccttaaacaaataaaagttaaatcaaaacaaacaaatcaagaacaaaaaccagaaaacacattaaattagaaaatataacatagatgaatctaaatgactatcagaaacaataacagaggagatttatactggttctgattctaagttcaatgtgaacttagctatactccagtttgaaagcattgtcacaaatctttattgataatgagaataagagatcaatctcaggagctacaaggaaataattagcaagtcatgcatggtgttatccctcaacactcattaactcactaatccgagcaaacataatcaacaatgttgctcaatacaatttctcaatcccagctctctctctc

SEQ ID NO: 72250 - DNA, 1837 bp, Cannabis sativa
attatatattattattatttctttcaagtgtctcatacacgtgcaacatatatatagcatattgctcatagttttacataatagaggataattctaatattatctcatgtctgtattttcattattcttgtttggagcctttggactcaacaaaataaagcaaaacataacaacacctcatttaagaatgcctcagcaattttaagttggataatttagtattataattagaggtattcattggacctacattttatatttttcagacctattcagattatattagatattaaattttaccatataacctgatctaattaagtttggtcattcaatcgattcaatatttaatggatgctgaattagatctattcaatctatcagatttatccaatattttagactcagtatttcttaaattggatcagatccatccaatattttagatccagtatctattagattgaattgaatccatccaatcccaaaaaaaattaatgttaattttcatatatacatatatttttttttacgtataataacatgaaatttaattactcattcaaactaaatgaagatattaattagttcaatttgatgttagatgtattagatttttggatacctcatccaacattcgatctccgatccaattggatattcaaaaataatatcaaatctaatccgatcataattggatatccaatatttgatgaccaattataatggatcgatcggttgtcattaaattgaatcgatttaaccacaacactaattatgatagttagctaaaggcacaaaattcacaaatgcaagatgttaagatttctctcccatcacgagttgctcattggttagcaccttctgctggattgttaaaattaaatgtggatgttgctattcgttgtgaaaatgatactattagtattggcgctttggttcgtgactcagatggctttccgttggggtgttttgctaaatccatagctggttttttcttccctaaagaagttaaagcattagcaatctcgtatgctttaaaatggtacttgcaactggattttttttcgttttttgtggagagtgatgctgaaattattatcaatgatcttgtcaattagttttctgggagtgtatcccaatgggatcatattattagatctattagatccttgtaatctctctttccgagtgcatatctttaatatgtaatgagaaatagtaatactgtaggacatggattagcaagatgtgctctacagatagaaaacgaggtttattggttgtaagaaatttctccttgtataatgaccaatgtattgtttctctcaacaataaattggttattacattaaaaaaaatattatttaatacacttttatttattttggtatttacgagagtttttcaatccatttttttcataatggtatatgatgtaattatttagaatcacctgtaaatttttaagaatttttaaataattaagagtgtcaaaaataaaatgtaaatattttgttgcatgtgtaattactttttcttatgcgtgtagtactaagcaactgtttaaactttaattttgacaaattatttaaaaaaatttaaaaatttgtttgtggtctgaaaaataaaataaaataggaagagaaagctctcctaaaactcgaaacaacaaatgggtatcattgatatggttttgtcttttgacatagtgaaagtgtcccggtgtgcgacattcattgtcgatgtatctatattgtcttgtactggttgtgtggttctttattttttaagggctagtgttagggtttataaaacacttaagaaatatataaat

SEQ ID NO: 72251 - DNA, 993 bp, Cannabis sativa
gcattttaagcatagaatttcaaattttcctttctaatttggtggtatattaaaacaacatattttacatttaagcatactaaaccaaatttcccatgtcttaaaagattaagtatatatattgaataattttatagtggacacacttattctgtgtccttatagtatagagacattttcttaatctttgatctctgtaacttttaagtgtacacaacattaaataatatatgccattgtgtaccctttttttttacagtgtataaaacaacggccacatataaaaaaaaaaaaacacttactgattagtgcaaaatttacatatatttatatgttatttggctgaataaatacaattaaattattttatctttacgagcttaattgcataaattattttatttagaaatatttaatttaatctaatattgtgttaatttttaaatttagtgcataaattggtaaaagatgaaatagaggatagcaactctaaatgaagattgacccaaatcatatccatcatatcatggtaggaagcctcaattaatatgatgtcaataatagtttaagaagttcaaactgagcttgaggaaattaatatgtaaattgggctttactattcttcactcatcacatggttggtaactctctttaatagaaagtggcgtaagaagctcatcatcatcaacatttacatatcaattacaatagaggaaattacacttactatggaattttaaaagttcttataataaatatgacacatttaagtttgaccaattatatggtatttttttatttttaagtatttttatggtatttgatatgtcatatatatgtaattaggttttcaaatctcatatagaatgtttttatttgtttaggaagttttgtttgtcatagatgccagaaaagtcattggagtttgctgccgctgtcggaaaagtcgtcggagtagcggtcggtgccgaaaagtcgacggagttgctgccg

SEQ ID NO: 72252 - DNA, 948 bp, Cannabis sativa
  modified_base (70)..(74): a, c, t, g, unknown or other
  modified_base (154)..(163): a, c, t, g, unknown or other
tcacaaatacacaaaaacaacaaaaaatttataaaaatatagttttgcagaattttaaatatttttacgnnnnntttaattttatttacaaaaaataccgtctttttatattgtactcttgttaatttatttattgattttttgttatttgtannnnnnnnnntgttgttgttttgatgttatttaaatgttattgtcatgttacttttatgtagttttcttgttattttcgtgttgtttctatggaaaaccgtaaaaatgtgaaaaaatgacgtcttacgtaaaagtataattttttttttttataaaaaatgacgtcttatgtaattattccataaatttaagctttagtaactttttttagaacaacttcttgaaaaataaaaaataaaaagtagaagctaagtcaaacattagtctctaaaaagcacttttaaatccatgctcctttccttaaaaatttaaaggaaaacgaaatgaaattcaatttgtttctttttttttttttgaaacagaattcaatttatttcaaaactctttaatatacatatatatatttagtataaatattaaagttttattttcgattacaaataaatacataagtttaattaaattataattctataacttctatagatatatagtcgttaaattgtcaagtaaattgtcatatgacactccttaattaaatttttatttaaaaattaaattaatatactaataaaaaaataatacatagataataaaaataagtatattttaataaaatataatataaaaaatatttttaattaatgatgaatacaaaaaagatgtatttttcaacttatcttttataaattatatatatagggcaagactatggtaggacctagcaaaagttcccaaccggtagagaattttttttgaccattgattttagatcatgtggttattatgatgtaa

SEQ ID NO: 72253 - DNA, 801 bp, Cannabis sativa
ttgtccaactctcacaatgaaaggcatccgagggagtcaccacgtggcaggatgtacacgttgcaacatgtcggacaaatctacatgcattaattattatatttatatatgtattgcatcctatgctccaaattaacaaggcgacgaaaactacccacatgggtttaggactgttggagggacggcctctctgccctctggcttggtttgtgagccacaaccattaacagttaactttttaatgttttctcatttggtttagatctaaatccacacttcattcttttaacatgacattaattgtccacttaccaagtttggagagcaaaaagcatctccattttcctaggcaagttgtttaacggctactgatatacgtagtgagaaatatggcgtactaaaatcaacatatatatactaggtggtcaaaagcataccaaaagcacgtaacttctgttcaagttaattttttatttttatcaattgtatttaaataaagacagataatatatttaattaaattatcagattaaatgtaaaaaaatttaaaattctaatccaaattactaaacataagttcatattaatattagtgacaactaattattcggtaccagatcaatatagtattaaacactttaatgtgtcacataacaataatacaataatagtacaaaaattatttaccaaaaaattagtacaaagattattcataaaaagtaaaataaaaaaaaaagacaaaaaaaaattactaattaattattggataccacaccaatgtagcattaagtacatgaagag

SEQ ID NO: 72254 - DNA, 1007 bp, Cannabis sativa
actcactcacaaattcttaggaaatttaatatatatttttttatcttctctattctatcctaccaaacaatcttaaattttgcttctatcaataatcttagagcatctacaatcgagaactataattggaaagcaaaatttaataaaataaaaagaactccgactctgactataataaaaaagacttcgattatgctgtgttttattttttgcattttgcattttgattctatcgataatctatcctttttttttttttatatatatattttcttaaaatgtaatgtattgctatgttttaggacattttgctaatacttaactccaatgtaaaaatatgtaccaaatttaacacaaaagataacatgagccaaattttaactcataataaataccacattttttaattatctctttgttacttattaacaatttttttatatttataagatattagaataatataaataaaattaattattttaaatattttcaataaatattaatagtagtattttaaatattaatgatgtattaatatgaattaaagtacaaataaaaaaattagaccaaatataacttgatgatatattttaggtcaactttaattcaatttaaatgtgaaattctagaaaataaatataattagaaaaaaggcatatcattatattttaatatactgaggtgtcaaattaagagtgattaataattttttatattaattattaaattaaaatatataaaaatttaaaatttaactctactaataatagtacaaaatgatcatttttcacataggaatttggtttggtgtaagaatgtaatggaataaaatatgtattgactaaaataaccttattgcttttattataaaatattaaaaaaaaaaatatagaccgactttttttattatatttttactaaaataatattttatttttttgtaatggagtgtaattgtaatgaggattatattggttttggtatgtaatcatcattacaatact

SEQ ID NO: 72255 - DNA, 1008 bp, Cannabis sativa
atatatattaacattaattaatattgttaaaaataaaaaggaatctattaaatataatttaacacaaaaaattaattaaaataatatcaacattaataataatagggtatttatttggttttatttatatttaataggctaggcatatttataaataccaaccttattataacgacctctcttcatcaaggttccacaatccagatctcttcctctctctctttctctatcatcttcttctcattattaattctatacccaaaaattgtagctttttctcctactcaaatctgggctcggcttccgtttccgggtctcactgtaagtatgtatctatgtttacatatgtatgtatttatatatttacggtaattaaattgaatgcagaatcattgtactaatcttggacaccctttggccacagatctctaatttgtacaagattgcattttgttttgagtgtgaatcatttgtgtttctgtacttttgttttgttgggtaattattggttttatgttagttttgagtaatgtgggtctagctctggatcatagctatttgccgttttcctttttcttttttgaggaaagatcgttaattttgaaaaagaaaaatgtagtgagttaggagatattgagatctgatttggtttcatatgcatagatctgttagttgagtatttggtttgaggtggattgtgtactgctttaatggggttcaatcttaaatatatcattgcatttgttatttttaaatgcttattttgtgtttgtcacaatgtctgttctggatttttcttgaatatacaagtccctttttcttaatttggtttcagttgattataaaatctgtgaatactattctttggagaaagatatgaacatgactacaatatttttatagttttgtttttgtttggtttctaatcaacttttctaagttataaacaccaatcaagcaaattgtaaaggctagttttacctaaagttaattgttctgccttaatta

SEQ ID NO: 72256 - DNA, 903 bp, Cannabis sativa
  modified_base (528)..(537): a, c, t, g, unknown or other
agagacatctgacagttggataaatgggaagccgagagggtatatttcctcccaacagtcagtttccatcattgcatgcatcgagaaaagtgtttcagcaaatggaaagtctgcacaaatccaatcacaaccatttttgggcatcccacagaacacgcgctcatgacgcgcagaaaacccaaaagttagcatttaaaaccctgacaagagagcaaaagaaattattccttctgaataatgacacttcaattggtggctgatgacgtagtgtgataaggagctcgtgataaatcccacgtgctcaaaactatctacgagaggatgttgcaagctcccagaccattttacatcttgagagcttgggaggtaaatgttatccgtattttcataatcatgacacgtttatttttaatcaagaaaggttaagaagtcatcagctacccaacttcctcaatcgatgctccgagaagacaaaggcaccaactttgcgggaagagcctatgtgaagaagagttccctaactgctannnnnnnnnngggtatccgtgagccaaggtctccctctgttctaggaactaaagtcatttactatcgcaaagagtatgggttttcctaagattgccaagaaattttgagacacaccaaactaggctacagctttagctcacggaagccttgcctatgcgtgtcagtaactaggctttttatgtacgacgtcagaggctcccccatgacacgctatcatatagagcatgcaagtccttgtgtacttgaccgaatgatccaacagatagggataagggaaattaaaaaagaaaaagccctgaggtgacacgcatctgtggcctagcttgtaatctggcgcccttaaatgccatatgggaaatatgccacctaccgatc

SEQ ID NO: 72257 - DNA, 798 bp, Cannabis sativa
atatatattgatcattatcttgttatagatggaagttgaagttcaaagctggccatataatttcccacaatcaaaggaatatccaaaatcacaccaacgtggcagcttaagtggcaaattactactcttcgacaagtattaatattaatttattattagactctcgtatttaaatttttattggaaattttaattaagctcattttattatttactaaaaaagctttattaattttattggcgtgagcgtaggtatgtgagtaattttcctataagtgcaagtggtgcgtttgtggggttggctgccccaggagatgccggatcttggcaaagagaagctaaggtacattataatgttatattattttatagttaattaggattttttgccctttaaattttgacatgtaccaaattatgcctttgaatttttctgaccgttaaaaattctccctgaactattgcgattatcgaatttaacgacttttgtctaatttcattcaattttactaatttagtgattgtttatgtactaaatcacactcatcggattttaatatctatcaaatcacgtctctcatactttgacatgtgtcaaattatgtaccttgaatttaattggacaaaagtctttaaattcaaccaaccatcttaatagtttaggaaaaattttaacgaccaaaaaagtttaaagtgcatgattttttacatgtcaaattcgggagacaaaaatcttaattagtcttattttattagacaaaaaaaaaatattagttacatgcatgaagaaacacaaca

SEQ ID NO: 72258 - DNA, 918 bp, Cannabis sativa
aatactgcactcatttgttgtatggtaatccttccaatttgtctaaaagagagcttattacttagattaatagattcagctatcacaagattcaacatactctcagtagtgccagttcctctgagcacaatcatgtttttactcaatggtttccacaactccgggaatatgtaaccaactatgttctcagtagaaaatctaatgtactttaacagactctcagactcatgatgcctcagcttcagaattttttcatccaaaagaaatgttgcaacctcatagatcagagtaagagccctgcttttgtagaaaattacatcacaattctggattggaaagtcataaagaccttggagtctgtccaaaaccatgactccaaccgaaagcatctctgaacaccaatatctctgagctgcagaaacaaactggtgtaattcaatagatgccaacttgccactatctgatcttcttctattttttctgtcaggatcagtatatgatcttttatcaatattctgagcccactcagcctcagggtataggagactaaatattggattcgaattactgaaatccctccaaacacctaaatagttcaagcagaactctccataatttttgaacttattaacttttggggtctcaagacatctaagagattcaaatacaccaacaatcttgtccttccaaatattccaaaagtacacaagtgattctattgacacgttcttaaaaatcatgtcttctgaatgcttcataacatcagtaaccagttcctctttccaatagtacttggttcttaaagaaaggtgcatgtccagaatttttctagccgatagaatctcgccagtaacactattgtgcctctgagaagtaatcatctgattcgcgactgttatcaattcactctcttcattt

SEQ ID NO: 72259 - DNA, 1197 bp, Cannabis sativa
tcaaagcgcttactgcagtgctggcaggtaactgggaccaggagggcaactctttttgctttctttagagcctgctccctaaaatcgcgaagctccttcacctcgatggttaggttggctgtcgtattcaaatcagcttggtgcagctcctctagggactttagcctagcagtcagttcttcaaccacctccttggcctctctaagctcacgcctcaccttggtcacagcctcatccatggtcttcagggcgtcgtccttttcctttaactcctcagccttggtctttaacgcctcctggtgactccgctccatctgagcctccttctactgggccttctcccaaatagccttcctctctgccgccaagtcttttagactcttcatggtctcatccatgcccccaactcggacatgatgtacccattgtcaataagagtcttcgaaaggcgaccagtctctacaacaatctggcataacaagaaaaatgtgtaagtagtggaggccaggcgccaaaaaacaaggccctagaacactaacagatagacttaccgcggtcatggcagcactaatatcctgaatctggtagattgagttcgtggaagccaaggctgcatatctcttggctgggagttgggtcagattggagacaaagtggcttgtcaactatgaggcaaaaggagcgagggtaggcccgatgaagcggttgaaccagtctgtcaaggggtccatgtttagatcccagccgttcccgaagtactcactacgtgaggaattctcatgggcctcccttaagacctttttcaaggcctccacctcagcgttcccctttgtgtattcagccatagtatagttgtgcttggcaatccggagttgttatctctcttcatcagtaggaacgggagtcaggactatgctgggaggcacggtatattcctccgcctctggtaggatccccaggttagaactgggaaccggagtaatgaccctcctgggcttcttggtagactcaacctccaccatcttgcccttgcgcttccagtccaaaggggcaagaatcttgccctcttcttcctcttcagcctccccatcctcatcaatcaagatgatttggcctaagggaacgctcgaagaagacctccctggggtcaccgtttggtcaggtgccagagggaaggctgggtcgggactgtaggtc

SEQ ID NO: 72260 - DNA, 1954 bp, Cannabis sativa
tatgatcctcgatgtcttctcttgtatatattttctccttgaatttaccgtaacttgttgaagaagaaaataaattgttaaatccagtttcattggtccctctagcatcactaggacctataccgtcaatggtccctctagcttcactggttcttctagcatcactaggacctctatcttcagtggttcctctatcattactagtttcgtctggacaactactactagtaccaggtggttgacaattttctttacagggcattcttttttatgtacttggtgtgagattacgatcgatacaaacatttctctttaccaaagtcacaaacaagggagtagattcatctgccttcttcacaagcatagacaaaaataaccttacacgcttatcatttctaattttaggacgatacattaagtcgttcatgtacttgtaattcacttctaatttcaagtaatattgtactttgtcaatagtgagttcttcgtataaaagatcaatcaaacatgagtagcttacgttcatatcaatctcaaatgtcaaatttctggctcgatcataaacccaatctctactctcaagctctcaaataccattatacataacgagcgcaaaaacagttgaacctgtcacaaacattaacaaaatactactaaaaatttaaaagaaaaatctaacagaagagtgatacaaaatccttaaatgacttaaatttgtcaagcatcgagccccatcgagcacatcacccatgacctaaagtcctagctgataatcaggctaacatcggatacaacatcgaaacaatcaaaccagataatcggatccatatgatatcgaaaaacaatcgtctatcgggtcatatcatgccatcatctctaacttagaatccaacactatatcagactaccatcgggccgactattgggtcaatcgggccatcatccctatccttggaacccagcactatatcgaactatcatcaggccctatcgaactagatgagaaaaaatgcagaaaaaaaaaaaaatgcaatatttagacaacaattattttaacacacaaacagtaaaataacagaaacaactcacagatcaagtatcaaaacaacattctaaactaaatataacaaccaccacaagattaaacaaagaaaaattattgcccattaaattcgtgtatgatgcttcgtccaaagatgagtgatataatgtaatataacttatagtgtagtgaagagaagtgaagagaataagttaagagaagggaatgtagtgttccttcgtgtacagtggaggagagctcgggatgaaaaaatgggaggggagcatttgtttcagtgagaaaaagagagggaagagagagcggagggatgtaaatagagagagcattttagaaaaaataacaaatattgatctatttgagaagtatatatacacataagttttaaaaaattaattaccttttaatgtacacatattttcaaatttctctgttaaaatataaaatatcagataagctttatatagacctgtaatagattaatacaaactttgaagtgaatatttttgtattaaggatgcagacgcacgccctgatcaaattatcacaaatagcttccttttgaggtttgcgcaagtacatgattaaatgttaatttggtgtgaaatttatcaaaaagaaaacaactgctgactattccatcaaaacaaaataataataacaataacaataacattaataataataaataataataataattcttaaatgctatttgacaggccctttcaaaataaataaataaataaaaattgttgtttgacaagtaggtccatccataaaaaaagatcattctaagtaattcctcaatactaagacttttagttggaaggaatgaaaacacaagaatgtgaatgagaataggaatggaataaaatttaaagtgcataaaaa

SEQ ID NO: 72261 - DNA, 1384 bp, Cannabis sativa
tcattggatatccccaagggatgaaagcttatacacttcttgatatagcaactaaaaccatatttcactcacgagatgtaattttttatgaaaatatttttcccctcaagggttctaccactcataacctggaccatttcttccatctcagcactacaaacatttgtccaatacaaccacctgctgcaacaacaccatctgcagcagattctgttttgaatgcctctcctacaccacagccctctgatgcacacattccaccacctgctgccaccagtaactctcccatcaaaaccaaaattggcagacaaattcaacaaccacaacatttaagagattatgtgtgtcaacattctactgcacaccctcttgagaaatatatgtcatttcacaaacttcataaaaactttagaaatgccatccttcaagcatacatggaacttgaaccaacctcatacagtcaagccaaaaaattctctcaatagctcaaggctatggaaaatgagttctatgctttaaaaaagaacaatacatggacagtcgtttccctccgtcctggctgccatgtcattggaaataaatgggtctacaaaatcaaatataactctaaaggagaaattgaaagacacaaagctcgtttagtagcaaaaggttataaccaacaacatggcattgactacttcgaaacttttgcccccgtggctaagttcaatactctcaaattattctttgctctcagtgccataaacaattgggatttacaccaaatggacatcaacaatgccttcttacatggagacctaactgaagatgtatacatgtcacttccaaagggctaatattcatgatggggaacttcccccaaatgccgtttgcaaactcaataaaagcctctatggattaaaacaatcttcttggcaatggtttgccaaactcagttctactctcctaagcattggcattactcaatctcccaatgatcactccttgttcattcgaacatcccctacaaccttccttgcactccttgtttatgtcgatgacataatcattgcgagcaataatgcccaagatgcttctgaattcaagtcctttctccactcaaagtttcatctcaaagacctcggctatcctagattttttcttggattagaaatagcccgatccaaggctagaatttctgtctcccaaaggcctttcacccttcaaattctcacagattctggttcgcttggcaaaaaggtcgtttccactcctatggatgccaatacatcccatagcaaagacactggaccacctgtttctgaccctacttcatacagaagcttaatcgggaagttgctatatttgaccataacctggcctgacatcacctatgccgtca

SEQ ID NO: 72262 - DNA, 1085 bp, Cannabis sativa
aaggttcaattatgaaacccctcgcatgacttaggaatattggacgaacatttaactattcattagtgtcatctatagccttcctttatcaagaaaacatatatttatttctatttaaatggaaagattagctgttttggaccaattaggttattttcaaagacaaaaaagtatagttatatgtggtgttcataaaatagttaagagtattgctattgggcaccagtagtactcaacatcttttataggtgataacctacaattagttagcgatatttcttaaaagttatttttttaaaagtatatgagactcaatacttaattacaccaatcaacgggaagggtgctaggcacctatggtgccttttagcaattctcaatatttaatcataaatctgcacaattcaatctaatctgcatgattcgatctataaagtatggatattcgcacctcattatattaaattgaaaaatctaattgcgaattagatgttgattgacctgtaaaataattgattcaatttaatcgacacacatttatatatatatatatttaaaaatattatataaatatttatttactatttaaaaaaattaataatttaaaaatctgatacatataatataaatatattttaaaattatagattaaatgtatattttattttataaagaaaatataatttaaaataaaattaaacattttttgatggatacaattttttttcaaaatatcttccacatgttctttataattaatcacgtttatttaaattataatataatttctcgtctcatgaatgtaaggtatactcttataagcttactgaaagtttctattctatataaaatgtggctatataacaaaattattagtttatgagaaattattgggtgactttttttttcaaataaaaaaaaaacaaattattagatgttgacatgtaaaggttcagcatccatgtagttagttaaaattaattataattaatccacctaaagtgttacaattaataataaatttgttcatattgtttatttttttattaaaaattattttcaaaatttgatatttagaattagtt

SEQ ID NO: 72263 - DNA, 1282 bp, Cannabis sativa
gctgaccaaacaagaaggcttctaggtggatcaatctttgacaagatgggacccatgataggggatctaataaacactttgaatcagagaaatgaggtgcaaaacaagcatgttaaccctcccaacactcaaccaattaatgtgaacaattatgtgtttggcgaggttctagggggaccataggtgacacatgttggtcaatagcaggtcaagttaatctagtagtgcaagcccaaatagatcaacttaagagcctcgtattaagcctgaccagcccaaaattcactgacttagaactcgaccgaataagaggatcaccgttctcacctcaaatcaatgcccttgatcttccgatcaagtttaaaaggcccatatgcaagatgtatacgggcaaagatgaccctctatctcacatcaagtactttgagatgcagatggacctacaatcaataaagagtgatgtacggtgtagaatctttctagctagcttggtagaggccacccaacaatggtactttgagctagccctagggaaattcatggaacactttcatggaagagtttcacgcacatttttcctcttccaagaaactccctactcacttagaagacttggtcaaagtaaaatagatactagatgaacttttgaaagattatatcagtcgatttatgaccgaggcaacaaaggtgaagggattgattgaggagggaacgctggccaccatccaaggaggaattaaacctttgggagaattatagaaagacatcaagatgcttactatagggtcaatgggagaattctttgaccgtgtagacgaatttataaagcttgaagaagaagaagtctgatgactggacacagtcagttggaaaaagatgaccaaagccccaccactgttgacaatacatctctccagtgcaatcaaaactcccaacctcaaaacggtgacaattcagaccaaggtggtaaaaggtaaaacaacggaaataaccaaggcaatgggaaaaagggaagctcaataacaatcccgatcaacaacatccttgagagagggctccaaaattcacttccttcagtatccttacaaaagaaagagaaaatatcttcatggcaactcagtctgttgttttgtacaaaagaccccctccaattaaaaaagatataggcaagagggacaccaccaagtattgtcgctttcaaggactacaaccattgcaacaacttaaaagaaggaataaaattcctcatcaggaagagctacctgcacttacgtaggtatgt

SEQ ID NO: 72264 - DNA, 1102 bp, Cannabis sativa
atgttcttcttcattaaaacaacttctccttggatcttcttgtgattcgtttcctctttctggtctttcatacaaaatgtttgcattactttgtgtgtaattcctggacttgaaccagaacccattgtaagttccaacttccaagtcaaggaccaaaaaacaccaagtctttaaggagtacttttaatgtatggtattgtttatagaaacaaaaaagtatttagaaaaacaaataaaacccctctgtcaataaaaaaacctttaactgtctatttttgtcattaattgtattgatgtgtttactttcgaattattagtaacatggccactttattagtgaataaacaaaggacctgattccttcttggcattggcatccccaatttgccatatcttttctcaatagaataatattactttagtctttataaattattaatctttgttcatacctacttaaatatgtcaacatatcatatttttgtattaattatgtgttccttacgttttttgttttggagattactatcatagattcttgtttgacagctcaattgattggccttttaagctttataaatatgtgttgcttcgctgttactataaccaccacccttaactatgtctttttttttttttttttttaaatcttctctcttaattcgtcaaaagacagtgcccttaatacttcatagctacatatttttaaaaacagtcaattcagcaataataaaatgtcattttcggaaatgtataaagttttagacaaagtcttaggagctcacataattcttaaatataacaacacctgaccaatcaaaactttttgaatagtgataaaggatatttattgctaaaataccccaactttcattttacaagtacctaaaatattccaattttcttctgtcaaggaaaaaaaataaaacccagctttcattctactagtaatttacatttttgttggcaaaaataataaagatcattgttattgggtgttagtagtacctagtactttttataggtgacactccatgattaattaacaatattccctaaatactattttcttaagttatataggacctgatacttaattaca

SEQ ID NO: 72265 - DNA, 1970 bp, Cannabis sativa
tttggtcccttctgcagtgtttattaggtgcaaaaaaaatatatttggttttgtttcgtcatctttgtaaattgttaggtactatatattgtttggtctaatatgatagttgtacatgttgctttttctgcatttaatgcagttataacctttagtaggatcaatgtatttcttatcttataagattagtttagtttttaaagtcttaggatgaaagagtaaacagagctagaagctatagtaattacttctattaatattattattattgctattaattctcttattgaatttgtttctaaattatagacaagaagtcaaataagctgtggtgttttttttttgtaaatgtgttatgctttctgttcttttgatttactatttcaaatgaaattgataaaaacaagaatcataaaatcttaatatttgcataaataattacttattaaattgtgggcattcttcaagtgggcatatgaaactttactggttttaaaataaaaattttcttttcctttcataatcattattggactcggtgataaagatacttgacacctatacaataacagaaaatgtgctaggttcttcgttctagaaactattgccagagttccctacttcgatcagagttttttgtttgttgtttgcttttctagcaatattatacttagaatagttatgaggtactaatctaaaaaacttatcttaaggtttgggaaacatgtaattggataggatttggatcacaagaagggaattactatattgtttgccaccacttattgtacttaaaatgcttatgaggtacttttacttaatcaaaaaaaaaaaattagctctttgtcagtttagatcattagccactaggttgattattcattgtttatttttttgatgttgacctaatttgtcatagtggataattaaatacctttttctactatgattaatgactttctaatttattctttacagggtgcccctgaaactatttaagattagagcagattcaaccaatatattgtcaaaagtgaaaggctaatcacatgaattggtaagtatcttttcttatgcactcacacagataggctaaaatatattctattatatctataacatttgtggtgatctaaatattgagagtaacatttgcattgagtgtcacttttaaaaaaattattacaaaaaatattgtgtcggtatctgtaagtattgtgatgattttgtttagattttataaaagcagataggtgcttggaaaatgatcaataataacaatgacaacaataataaaaggaacttctatccaatggtgtgtactttgaatgtaaagggtaagaattgattttaacttcataataaatctaacctctcaaaattacaatttatttgcattcttttttcagctttgatatatatgaacatcggatgccatctcagacattttacaattattagattgtcattttattctaatatgaagttaataatcataggtaataataaccagtgatcaagccttaacaacatgtaaaaaagttaaaatatacacttatgttaaatgattagcttcctaaatagcattggaaaaaaacctactagttcatccttgttataaagcatatcattgttcttcgttaatatagcagtgatatttactattattttgtttaattgcaacataagtttttgagtttacaacattgttttgtgttctgcaggttgttgatattcttgaaaatgttgcttaaggggataagccactactagaaaatgaggattaagaaaaaaaaatagttggttgttactttcatgagaggagatatattggttgccatacatttatttttgtatatttgctttgaaagatttttattattaattatgtattgtatagaaatcatttttgtttgatatttttggaataaaatttggttattatatacacatgaataatattggcagca

SEQ ID NO: 72266 - DNA, 1544 bp, Cannabis sativa
taaaacttagaaaaatgcaaaaaagtagattcaaaattttcaaatatgtatatatataaacatacaaaagatacaaaggaatgcacatatctgatccaagaacccaagaaatgtgaacctttgagtttatcttccaagaattttaattttcttgtaaatgtgggtatactcaaactaatgcaactaatttgatttaaaaattttggtccgaaaatcccaccacaacaccacctagtttcctattttgctcattgtcattatagaaagtaaatactttccttattttattgcttattagttttaaaaaaactaattgatataattaatccctataaatagtggaatcatctcactattcaaggataagaaattcattatgagagaacacacgagagaaatctagatttaaaagtaaaatactcagaaattattgtaagagcttttcaagagagatcaaggccttcttgcttctctactctcaagtaaatacaactaaaggggagtaggctattactatcatcaaggggacaaacctctataattatggtatttttttttatacttaatctcaatttatatttattgcttaattattcttaatcgctttaacttgactcactattgttggctaaaagtgaagtcaacattatgattgttgtttattttacaaagagtatgctttgaaagatttatgtttggtatgtggaagtagcagatggattaatcctaataccaaaggacaaaaggttccacatacggtgatgcattattttccattgattcctcgtttgaaaagaatgtttagctcaatttatacagcgaaagatatgatatgtcatcacactaggatattagaaaaagttagagttatgcatcaccctgtggatgggtctacatggagggagtttgacgctagatatcccaattttatgaaagatcatagaaatatatatttaggcttggctgctgatggatttaatccttttggaaattcgagtcaatcgtacaacatgtggcctgctgtgttggaaaactacaatctcccccatggctttgtatgaaagataataattttatgctgagtattcttattcctaggtcaagatcaccaggtaaggacatcaatgtatttcttagaccattggtagataggttgaaatagttgtgcattaatggggttcaaacaagagataataatccgaatactatctccaacatgagagctgcctttctaaggaaattgaacgatttccctactcacagtagtttgtctagatggagtggtcaggggtataaagcttgtcctacatgtaatgaagacacatcttccattcgcgttattgggaagacatcttatgttggtcatagacgattcttgccccataatcatgagatgaggcaggacttgtactttgatggtaaagttgaagattgacgtgccctgagaaagtttacatgtaagtagattttagaacaagtaaatgctctaccacctcaggtcccaagaaaacatgaaaattttgggttattgaaacgaaaaaagt

SEQ ID NO: 72267 - DNA, 1598 bp, Cannabis sativa
  modified_base (1566)..(1571): a, c, t, g, unknown or other
actaaaaaatttttctggatgccgaaacaattcaagagtgtatttgtacatctcttttaaaggagtgcattgtagaatcacccattaatattattagtagggtagatatcatttttgaactctgttttgcaaaagttattaattgttttatgttctgttaaatgataaaataaattttatattttttaaaatggtaaaaaaaactctaagctcaatttttcaagaattttattttttaatataactaactttaacacaatttctaacacgaatagatacagaaaatataacaagttttgtcataacatctatagattagattgttattcagttttattttgacaaaaaatcagttaagaattctatttgtataattttaaaaaatacaaggtatattttgtcattaacaaaatagagagtctaattaatcatttttgcaaaacacaaagtcgaaaatagtatttactcttattattatttacaaaattttataatccaattctattttgaaaaattacataattttttttcttcacataaatacgacaatgtacacttatttaagatatttattcaaaataatttatatgtgtaaaataaagtttaaataatttattagatataattttgtgtgaaatagattgtttgatctttatttttctattttatattataaataagtataatgagttttttttactgatacactcaatttttttacggagttcacaatagaagcccccttactttataactttattgaaaatactcttgcttaaaaataaagaagctttattgaaaatattgaattcataaaattttgaaaataatatgatacctccataagaaaaaaaaagagatgaattcataccaaagagtatctatactaattcatgaacaaaatagattaagaatattttcttttatatttaaagttttaatcctaatttttttatatagatttccaattatagtataaaatcattctattatttttaattaataatttacgatattgaaaataaatttaaaagtattatttgtacacatatataaataaatcaagttctcatgtaattgaaatcatattttatataactaccacaatataaataattatacaatttaattttgggataactaattaagataatttttcttaattttgacatgcttttaaacttttgtccacatcaaatatctgtaattattgaaaaaaaatttaacaatttgaaaagttaaaaaaaaacacataatattatacatatataagttgattacaaaaattctaactagccattgagaattataatatatgtagctaaacgtgagagatgttagtataaaatgttatatatctatagttattagatattaatagtgcttaatatttttaataggtgacgctttataattaggaaataatattctttaaaagttatttttttcagttacttaatactcgatacttaattacaacaataaaaatatgacaacgagaagagtactaataactaccttgtagcatttctcatatatatatataactagatgagagttacgtgnnnnnncacgtaaatattagttttatataagtt

SEQ ID NO: 72268 - DNA, 754 bp, Cannabis sativa
ttagttcgttgaagaagaatcaagaaaccaacaaccatcaaatggaaaatcttcccaaaaaaaaagtcagtctgttcaaataaatacattgaacttggacaatttttcagtaaagttaccttatataaataagaaagcatgataaacattatcactacaacctatacacagtttcttgactaagaaatcaaatttaaatgaataaaataaatataaatctttccttaaaaatacaaaataaataccaataattctatataagaaaagcacatatttattaaccaattaagtctaatcaaattttttaaatatttttacactaagaaaagaactactattttttgaaaataataactgcaaacatactactaattttgaaaataccataaatgttatttttgtctattttatcaaatatgcaaacaaaagactttacagagaatataaaagccaagtgttggagagaattaacattaccaccatttaaatttaaaaaataagatccacttggaaatacaaacctcttagtcattaaaatttaatttaccaaacatggattaagtttaacatttttagtcccatcaagtctaaatcacataccaaaagcaccattagtattattgtgctccaatgcacaatcacaaaatttaatgtttttattaaaattataaaaaaaatattaattttagagtaatttgcggcataaatacctaagtttatcattcggttttaatttaatacctaagttaaaatt

SEQ ID NO: 72269 - DNA, 877 bp, Cannabis sativa
accaactgtcaaaggtccttgtttatttttatttttcctttatcaaaaaacaaaactcattgagtttgaagattccttcaacattactaatgacaagctaatatctctctctgcagactgtgaccgagcttaatgatggatcggccttgtttgttacggtggcaaaatacttatccccggcgcttcatgacatcgataaagttggtattactcctgatgtacagtgcactgcagatatgttaacatcttctaaggaatcaatattaaagtccaaaaactcttcctcctcaactctcgaagccgattcgtgtatcttagttgctgaacacgagttagaagttcaagaatccaaaggaacagcttcttgaacaacaggaatcatcaaatttgtaccataaggagttgatttgaaaggtgtagtggagataattctaggcagttgtattttgtaaatgttatacgtaaatattaaacacaagtctacttacagcagataacactatatacaaaaaaatatatataataataaatactaaatatcatcactaagtgatatcatttaaccagtatttaatttttccaggaatatatatatatatatatatatattgtatattcactttattttatatgttttaatttttacttttatttatgtattttaagatatacttacttctatagataatgtcctcattatacctcttagtttaatgtaaattatatcttagacttaagtgtagggtgagagtatattaagtaatttacttttaaaagtgactatattttaatgaaatataatataaaggtatttttgattaatggatacaaaaaaaaaaatatttctcaacttaacacattttttttacttatagcg

SEQ ID NO: 72270 - DNA, 957 bp, Cannabis sativa
  modified_base (26)..(32): a, c, t, g, unknown or other
  modified_base (58)..(64): a, c, t, g, unknown or other
  modified_base (91)..(97): a, c, t, g, unknown or other
gccaaattgttttcaaaaaacaattnnnnnnncaaattgttttcaaaaaacaattttnnnnnnnttttcaaaaaacaattttctgtttttnnnnnnnaaaaacagttttttagttatgataccaaacatgcactaattgtttttgggttttcgactggggtaagacaatgaatcttggacataattagatttttgcaaacttagttttcagtctttttcttctcgccgaagcacccttcgcagccacagcgttggttgtccttccacttgttttgcacacacagggaggaaccattaaattgctcagttggttttttttgatcgaagtcgactcattgaggagtggtgtctctctcctagcttgaacaccatacatttgttggcttggttcttcgtcagagaatgtccaagaggcgcaattgaagacttcaagctgttcaccttgaggacaaggtgaatttcaggcagttggtaggagtgttcgcggtgcgggtggtgcggtttctgactattttttcaaactaagctgtacatgcagttttttaaatttcccaaaccgcacccgcactgcgaaactaaaaacctgcggaaaccgtaccgcaaaaaatagtgcggtgcggtgttgtttttgcggtttgaactatcaccaataattaaactatcacaaatataacaaagcttgagcaacacttatcaaatataccataaggtttgaaaataaatatgaaaaaaaaaattaagtttcaataatacaataattagtggctttgggttgaacatttacatattagacctaaataaatataaaaattgatatttgtataatgtgcggtgcggtttgaactgcatattaacatttcaaaatcgcaaaccgcaccgcgcagtttaggaaaaatttaaaccgcgaccgcaccgcaaaaaattttaaaccgcatttttttttgcagtgcgagcagt

SEQ ID NO: 72271 - DNA, 585 bp, Cannabis sativa
taatattattcaatatataatttgaaattccatcaatagattattattttctcatgaaaagaaggtgtcttatgttatattgcacaatttgcactgattatgacacattttaaagtcaaatacttgtgcatgcatatagttttcaacatagagagaaactgcgaaagagagctaaacaatacttaaattattggtttccaaatattcctagggctgagcattgctagtaaagatggtgaccttttcacaagaaaggtgaaaactcagctcaaaaaatgctgaggtactatcactcattaaatagccaatattctgaatacagagtatgaaggacacttgtcacaacaacatggacaaggaccacaatgaaagggaaaaggcataacagaaaagtgaaaaggcacatgggaccatacacagcaaaagcaagagaacaattacattagcaaagattaggcagaggataagcagagtaattagtcttcataatgtttcttaacaccacccctcaagcgtgagggttattgtgtcacaccaagcttgccaacaagaaactgaaatggagagtgtgatagcccctttgtt

SEQ ID NO: 72272 - DNA, 1102 bp, Cannabis sativa
gatcaacttttactcagttgtcttcattcttcgatgtccaaaggattcatggatctcttgcacaacatggcccatctcacagagccttagaacaaaggatttcatctcaatctatccatggcgcgcctgcttcaaatcaagtcttagttgtccacgatccaaagagaaaatttctccattttagaatattatgacaaggtcaagatccttaagtaggataaaatatctcctttcttgtagtgtactattgtgacttagggcctctgatcatcgaaaagatctttactcaggttgatcaacacacatgaattaggaattgagggaagaaaagtatatctagatgaacatatgcacatgtttatagtgtgcatgtattatattgcaatgtagctagcataaataacggtatgtgtgtacatagaattgcactaagatactaatatctaatatgttaagcaatgttgaatagtatggattaatgctaccaacaccaataaaattagctagagtactgagcttagattggtattaaggttaatcatgctacgggtactaacattcagatctcaatatatacgtataggagattgagtgtatgagcgctcaattacaagttatatatatgttttttttatgctatgtttttcttactaagtctgtcaactcagagatatatttctatgtgtaggtaaaggcatagtcaagattggatcgcagtgagtgagagtaggtggagattgtgcatatcaagtcatcttaacttggaaagtacttgcgattttcgagacaccgctaacacattttgattatgtcgttagactatacttttgatactgtatatgctatgtatgttttataactagattttaggatctcggtttataattgttttataaaaaatatatatgttgcatgtttagtaaagttttaacactacaaaaaattttatttttagtcataacaaaacttgtgactaaaagtaaaagagttgtgactaattataaattattatttttatgttgtgactaaaaaattcgtgactaaagatattagtcacaataattacaatttgttgcaactaagtgtgtttttattcacaata

SEQ ID NO: 72273 - DNA, 1580 bp, Cannabis sativa
acgtcgcgttctaatgttgtcgagtacaaaataagcaaaaatacaaaatttcatatatgacataaaaaatacactctaagttcaaataaatctccataaaactaagcggtctttacatttcattctcgagatgttattttttatgaatccacattcccccttaccactgatcccaacatcaacattgataatttttttcctgcatccactacactagcagataatacacaccagatgccccacacaccaacaactaatatacatacatctcatataccagcaaaccctattcaccatttggacactacaaataacaccaaaagcagaactgcaattttcccaataacttctaccaagtttggtagaaacattactaagccttcatacctacaagattatatatgtgacaaggttgcaacgtcaaccaattatcccatttctaactatgtctcttatcatcgtttttctaacatattcagggctgccatacttgcaactcataccttaactgaaccaaaatcctacactgaagcctcaaaatatgctgcctggttgaaagccatggatgatgaaacagaggctttagaaagaaatcatacctggattgtcacaacactaccatccaatcaacatgtcattgggaacaaatgggtctacaagatcaaatacaacccagatgattcaattaataggctcaaagctcgactagtacctaaaggatatacagaaaaactaggtatagacttttttgacacttatgctcctgtagctaagttcaacacactcaaattacttttagcccttgttttcataaaaaattggaatcttcatcacatggacatagataatgcatttctccatggtgatttaaaagaggatatttatatgaaactacttcaagaatgcactcccaaaggggtgataccacacactgttgtttgtaaattgaacaaaagcttgtgtggtttaaaacaagcatctagacagtggtatgctaaactaagctccactctcattacacaaggatttcaacagtccaaaaataaccattccttgtttataaagaacacatcacatgctttccttgccttacttatatatgttgatgacactattgtagctactaacaacattatcctcaatcaatttattgctactgattcaacattcaaactcaaagaccttggcagtctgcatttttttaggccttgaagttgctcgctgcaacaagggcatctcagtctctcaaagaccattcactatgcatctgcttcaagacacaggccaccttggctcaaaacctgcttccacaccaatggagccaaatctcaagttaagcaacaaatcaggagaactcattccagatccgaagcaatacagaagtcttataggcaagcttatatatattacaattactcatcttgacattagctatgctgccaacaaattaagccaataccttcaggcaccttgacaacgacatttacaagaaccatttggagttgtcaactacctcaaaaactctccagggcaaggattattctaccatgctgcaacaccaaatcccctccaacttcatg

SEQ ID NO: 72274 - DNA, 1362 bp, Cannabis sativa
agctccattaattcactcgtgtttattttctattatttatttagctagccttttcttgaccacattcatggttttcattggctacttaaaccttgctttttcatgggttttccttgttcacattcatataattaaagttgtaaaaattttactagtaaaattacaaccataaacgaccataaatttttactatttcacatttttagtttagtaaatttcacacaaaatcaaaactccaaaattgaatacaaacgaactagagacgaagctctctcaatccgccattgttgaagccgagaagaagaaaatgaagagagttccaaatccgtaccatgatttttttctatcacattttacttcaaatttggcggttttggtgtgtggttgtggtgagtagtgagtacttgaaagccatagccatttacatgattacatttctattatattccattgatggggttttggtcaagtgggaaccactttcaccttgtgctttgtttgccttatttttgtcatagctggctggctaccacgtgccatatataaattcatgtttgcctttccattccaaacaccattctccatactttatattaaaaaaagcaaagaaaaaatgagaaccatatttatgtgatattattattatatataatacagtattgttgtagcagtagatctactctactcacctaagaatagaacaataccactatttttatttatttatttacatagggagcatacaaaagctagatatggttctataaatctttctggactaaatatatcatttttccctgaaaaaatttcagtctcatttttctcttcaatttcagacacttttttggagcataaagactgatatttttaagtaagtgtttgattttttacagtctataactttttttttttattatttagttgaatttcacttatgcaagatgtgtttttgagcttcattcatggtttcattagcaacttaaagttagcatttttacatattcttctgttttttcttttctgggtttttcttattcacattcatgatttcattagctacttaaagtttgcatttttagatattcttcagtttttcttttctgggattctcttgctcacattcatggttttcattggttactaaaagttcaagtttttcctctaccctttttctgtctttaattagaaatgtcaaagtataatatagtgttctttttagctggggtcttcttgttcataatcatagattcatcaaccacttaaagtttgcatttttatatattcttctgctttttcttttctgggtttttcttgttcacattcatggttttcattggctactaaaaagtttaattttttttt

SEQ ID NO: 72275 - DNA, 879 bp, Cannabis sativa
ctaggtgacatgtcgcctggtactgggagacatgtcgcctaggacattaaaatgcaaattttagctttgcattttaatcgtgttttggctccaaatttgaatccaaatgtcctgatcctactagttgagacgtgtgatgacttctacactgtatagagggtttatgcgagtgaaaatatgatgatcacatactctctctctctctctaaacctctccctctctctagcttggttacttgttctctccaagaaacttcatcaagaaatgcttgactttcacaatatcccacttcttactcctaatctttgtgttttgctctatttaattgtgttcatactttttcatctcctactattttgatccttattattgtgatatcgaattatacttgtttgattcacatcattttttgctctatcttttttcttgattatcaaattcatgctcattccatgaatatgaatcttgatcatcatgatcttggttcttatttcttaaagaaaacattctctatttattataaattgattctgtaataccattcgagcttatttggtaggtcttataagggttttattgtattaataaataacaaagaacactatgtttggataaaacattgtattgtattaattattatgaccataaattttaatataatatgaatcgtattattatttaatacataacaaataatcagtataagctattgtatatattataatgtttactaagtataaaatcctatataaatagagatatgatcccactattttgtactaagtaaaaaatacatacaagttaaattataaaatatagcatctaaataccctaattcttattctttcacaccctcgtcatactcatttagccacatc

SEQ ID NO: 72276 - DNA, 1143 bp, Cannabis sativa
ttattatcttttgaaagcataacatgtatatgtgtcatttgtgatgaattttgattaaattgcttgctttagaataccttatatctattgtacatatttaattctattttgtattattttttggtttttcaaaaataaaaaaaaaataaaaaaaagagggaggcgttggtgacttgaatcatgggctaagaaaattttgtgctttgtttggaaagtttcaacatttattcgaaattggtttcttttgatttgtttccttttaaagtttgatatcatatccattgtattttgtctttgatcttgaagaattttcttagattggatttttggaaaatatcttggtaatttttgttttctttaattttttgttaaaaaaataattttgaaaaagagtgggcggtttcctttttgtgtttgtgggctggtggttactcaaaattttgaaattggtttccttttgcttaactttcccatttttatttaaaccgatttctttgtgttatttttctcaccacctactcgattcctatttccttgtattctttctctttgtttttcatttctctttcagaaatccatggctaagactaagaacctagggcatccaagaacaatggtggactccgaacaagacccctcgaacgctcctcctgctgctccaatcttcctgcctgctgctgcaactgctttgaacccaggagattcatcgcttcctcaacgtgaatctcagcctaagaagcccaaaccgaaaagaattcctaaacaagtggttcgaaaatctgtgcgaccctacaaatgttggacttcatcgtcttcatcttcaaagggatctcctccacctgctactgtattgcctcctgctgcaacagggaagggagttgctgctttaactccaacaggtccttccactcgtactcgtgcccagcaagcatctatcgagaaggaaaggaattatgatttgcatgctcatagggtatatggtattgttaagtttgttcaataccaccaatgggaaaatactcccactggttttgaaggatatattgaaaatattgtcaaagaattttatgccaatttgactaatgacatgcttgatgagaattctgagttctttggtaaagtctatgttaggggacattggtt

SEQ ID NO: 72277 - DNA, 976 bp, Cannabis sativa
tcaaagtgataaagaatcataaaatgattatttaaaaagcttcttgaatgtcttacatacaattactacttgaagtagttaatatctttgtatgtgcttagtttttattaatttatcaaagtgacaagtcatgataattagagtgctaactagtctattaataaattagaccacttgttaaaaagacatgagaaaatataaataatatattatgatttttatgatcagtatttcttacaatgtatataatttactaatattgagcttgcaataatgcagtatatatttagtattttaatattgtaagatgtttatgaattatgaattaagaccccgtttcactgttttgaaaaggcatgatgaaatctaatcaaatccttctttgaatagtgtgtttttcaatcgttttagtattactaattgaaaggtttattgatgagtgttatttgttagtcacattttgcatatcttaataaagatttaaactttatgacctgagttgaagggttcaggattgtggagccgctggttggttttgccacataaaaccactgaaaataaaagaatcttaattatgttcttgactagagaactatcatatggtctcaggtgccagcatgatattttctgctccaaagattcaaaaattttagcagaagaagtgatgatgatcttcgtgacatagttgtaagtatcagcagtagagaacggtctcgcgattctcatatcttgaacaatatggcatgattttgaatgaaccattaatatgttcctataacaaatacttttagaaagaattgttgttcgatcaaatgtaatcttaaactattattatatgagtgtaaaataccatacgagagtgatctcatgttgagaaattttaattagcattaacatatgagtatataaattgccattcatctgatgcatttgccatacaatagaacatattgcaataatctatagatgcttggat

SEQ ID NO: 72278 - DNA, 591 bp, Cannabis sativa
gccatttcctcatcatagtgcccctaggatgacccctttggctggatggtggtctagtctacttcaaattagctcttaaacaacacttttcctttggccagtgtactctccaggaaagtcgtgtcacccatgtaagaaagattagcattggagttgtacaacttgaactcataaaggtcggtcagacctatgctaaattgttgacccttactggccattcctaggtacgggagcttgccttggctggaaaggcctacacctgatcattgtgcttggccggccaggcctacattggagagggtctggccggcaagttttccttcgtggccatttagacgtataaagggtagggtttggccacttgcaatgctcctatggctggcagaacctacaagaagcaaggtctggccacccatgaatcctcggttgactaatgtggtttgtgtgttgacaggaggcagatcactctgattgtaagagtttggtggatctaggtgtctgaagcgatctgcttcacttcttaaatagtaattttgggtgtttcaacccgctcctggtccttgtcagttgaagattgacctttggcacctc

SEQ ID NO: 72279 - DNA, 1304 bp, Cannabis sativa
ccgcagatggttcaatccacagtccagtttgagggattgccatcaaaagatcccaaaatgcatcttgcaaacttcgaggagctgtgccaaacattcaaaatgaaaggggttagcgatgatgcaattcagttgaagctattcccattctcactgtgggatcgagcaaagaattggttggtgtctttcccacctaactccattaacacatgggaggaattggccctgaaatttctctccaagttctttcctctggccaaagttgtcagaatgagatcagagatcaataacttcatttagcacgacaatgagtctctttatgaaacctgggagagattcaaagacctgatcagaaagtgtccgcatcacgggattgagaagtgcatgcaagttcacaacttcttcaatgggttgacaagtacaaactctacactcattgatgcagcttctggtggagccttcatgtagaaaagttctaatgaaacttatgagctattagatgagatggcaatgaataaccaacattggccaagtgagagaagccaatcaaagaaagtgataggtttacacgaagttgatgccattacaaagctaacagcccaagtagaagcccttgccaagatgatgacagcacaagtaaaataggccggggtaatctatgagttatgtggtgggcctcactcttatgacaattgtccagttgatgtgaatagtctcccaatggagcaagctcaagccattagatttctgaaggttggtgactatacttctactgatggagttcttcgttttataaaagtgcagccatctggccagcctcaacaaggtttctttcattaaagaattaggccaccacttcaaagatatcttcaacagcctgctcagtaatcaagtactagtggagggtcaaacatttgaacatatttattgctctaattcataatggatcctagatcctccattaaaactatagagaattaagtgggacagatggctactcaaattactagccaaactcaaggtaatttgcctagtactattaaagtcaatccaaatgaaaagtgcaaggcaattattgagaagtgggaagaactatgtcgggccaactcaatagaagtcagctcaagaagagggccaggatcaacaggtacaagcactggtacaagaggaaaagaagactacttatggtctataaacaaaagaagcctctcctccaatcagtattaagcatcatgtcaagatcccttatcctcaaaggcttcccaaaagcaacatggataaccagttcagtaagtttctagaagtgt

SEQ ID NO: 72280 - DNA, 866 bp, Cannabis sativa
gcttgggaacccacgggcccaacaattcctagctgacaattgtgtccaaaagaaacccaagtttgtttttcttagtgaaactttgtgtgctaaagatgttgtggaaaaagtcaaaaaccgtttgggctttgaaggaagtttttctgttgatgtaaatggtagaaagggtggactagctctattatggagagataaatcttaggtccaattactcaaatattacaaaaatcacattgatctggttgtgaatattcctggaatggcttcatggcgcctctctagtctgtatggagaactaaatcggcatctcaggcatcgcacttggactttgcttcgaaccatggctactgaatcgaatcttccttggtgcattattggcgatttcaataatattctcagcaatgaagacaagaaagttggtcgtccatacccttcctctttactctcgggttttcaagctactatccaagactgtaatctcattgatttggagctcaaaggctacccttatacctgggaacgaagcataggaacagctaatgcagtggaaatctgactggaccgagctatggctactcaaagttggctggatgttttcaatgaggtatctcttactaacctcgatttttcatcatctgatcattccccattatttttactccctgaaattactgctggttttatttccactgcttcttttcgttatgaaaatgcatggcaaagagagcctttatgccatcagattgtgtctaatgtctggtactccaacccgactgaagatattatgggaaaaattgttatctgtggtaagcaactagctgattggggtcgaaacctgactgggaattttaagtctcggctgaaga

SEQ ID NO: 72281 - DNA, 1139 bp, Cannabis sativa
  modified_base (1104)..(1114): a, c, t, g, unknown or other
aatttctcaaaattttgtaagatatcttaaatagatataacgtacatgaatataaaaaaaattagactaaaaaattcctttagatgccgaaataaattaagaatgcatcagtacatctcttttaaaaaagtacattgtagagtacccatatatgtacacacatacacatattaaatacttcattttattaatttgcatccgatcgacttaaaaaacaaaaatctaagataataatacaaagaaaaaatcaatatctggcgcgtacagattaatatttctttaattagttaaatgtatatgttatgtaatttgacagttttaattgtattaattaggtatgtggttattgtatatatagttgaatgagaatattagtattatattctataaattgttaatgtttttatatatatatttatataaataaagattcttctatagcagccagccggccaaattaatgtaaattccagtaattaatattctgtgctgtatgtaatgtttttgtttttgtttgaaaagaagttgatcaaaattgatctggccggtgtcaataattttcaattttctaacttaatttacatcatattctttatctaatcataataaattgttttatggccgaaaacctaaaatattgtttctcaacaaccgaactgaagataattaaaaatacagttaatgggcatgcatgcagtaaaaaaaaaagcatttattattattttttttaatttacttatatattattattttttttaatttacttatatattatttttttttttttaatttacgatttggattgttccggtaatttttatgtaagttgttatatgaatttcggttctgatttaacttgctccgttagttgttaagtgaatttctatgtaaatttccgtaaaaatacaaatgaaaatattttaaagtgtaaatatgaaaatacctggaaaaaaatgtacttatggaacaccttaagatatcaaacactataaaaatataaacatattaatattagtgtatttttaagtgttatacattttaatttaatataaaaaactgctaaacatgttacctttggtgccgtttggtaacacttttttaatnnnnnnnnnnnttttaaaattgaaaaagtgaaaata

SEQ ID NO: 72282 - DNA, 583 bp, Cannabis sativa
aattaaaaataagaaaaatgacttcaacggtaaaaaaaaaaacaattgaagtgagagaatccaatgaggtttggtgttcattgatgggattcaaaattgtaccaatattcactgacccattttttctgtctatacaaaagtgtctttttatttactatttttgttttgaaaaaaagaatattgtgaaattaattaattaattaattattattattactatgatgtgtatgtatcatgtatgcattgttatgataatatgaacatgaattgcttttataatgtaattttaagatcttaaatttacttattcactccttacttgtttaggtatttagaataatttttaatttaaaatttttatctttataaaatgttaagaaatttagaataatttataatataaaaagtattgtttaaataatttattttatacgcgtgtacaataaaataattacacgtgtaatatactatttgaattctatttttgacatattaatttttttttttaaatttcttaaaatttttcaaaatatcttaaataactataacgtacgatgaatataagaaaaaaattgactaacaa

SEQ ID NO: 72283 - DNA, 2207 bp, Cannabis sativa
  modified_base (1360)..(1383): a, c, t, g, unknown or other
ctctctctctctctctcaatttatccctctctggcatcaatctactcggcctctcttgctcacgacgatggaggctttcccttgctccaaatctttcactcgacaacgatgacaagtctctcattctctctctctctgtctcttgttctccgtttgggaaaggcggagtgttctcttttaaccccttgttgttacccaaatcgttgcagtggtactacttccctacttcccctggttcaaaatgtttggcccctagaacttcttcttctaccacttcatcaatattttcactagttcatgttcatgtataattatatttgttgttcgtttttgaattgtaacaagaaagtacctctagtacttatactaggatacatgtcaaactatgttattatgaataatgtcaaaccaagtacttatactaggatgcatgttaaaccatgttattatatacataatgtggaaatataagatgtatacttaaattggtactttcacatgaataatatatatgcttgttcaatatatctataagctgaatatttataaaatagtgcattacgacaattttgaattttaggggtgatgttgtttggggcaacttaaagtcgcctctaataataagagtattataggcgacaaagaactatcacccctaaaaaatgatcttttttttttgtttgtttggtacagaacacttagagatggaaaattaactattaggggtgacaattgtcgcccctaatattacaaaatttttacgttatatttggtacagggattttcttgcttatagtatattaggggcaatttctttgtcgcccaaaataatacttttaggagcaaaatattaggggtaacttttgttggccctaatgcccacaatttttgtagtgttaccccagacccgcctgttcatcatgaataatttcaacctgacccactcgtactatatgagtgtcttccaattttagggttttacgagtcaagttcgtgcagattggttgggtccgggcaaaacgcagaccaatgttcaaccctactatctactagctttaatttcttctatgaatacgactacatatacacttgccaatgcacacatatatatcataaaaaaaaaatcaagttttttgttaaatctccgtataagcagtccttaaattttatcaactaattacagttaaaaacaagaaagcttcaacaaagcttttaacaattacaaaaaattgtctagctcagcagctggactctcacactcgcaacgaacaaaaaaagaaccctataaaagaaagaaaggtcaagttcagggatataccagatcagatcttcatcttcagatatatatatatatatatannnnnnnnnnnnnnnnnnnnnnnngagagagagagagagagaaatagctcgagaagagaaagacccaaaagagaaaataaacaaagagtattagagaggggaagtgttgagagaaaccttgtaaaggaaaatggaaagaaatagacactataagaaaatctaactttgcaagcgagagttttcacacccgcaaaactaggcgtaagacgttggccatgttttatcgtcgagcttatgcgccggcaaaggctgccagggatgattggtcaacataagggtgttttgcctgcgaaacaccttcattcgccagcaatttttttttgccaaagatgtttttggccagcagaagtccaatctctggcattaactgcattaacttgtcggctgagggtttcctaacgaggtcttgccggagaaatcagttgctgtcaaaacttttgcgctaaaattttttcccacgaaatttttgccgacgcactttacttcgttggcacaactttccagaaaaaattattttactttgccagcaaactaaatgattgtgccaacaaaagttttttttattttttttaattttaaatgtatgtatatataataagattaaaattaaactaaaactagaatcaaattttttaaaataataaaatataaatataatctgaattatataaaaaactaaaatttgtattataattatacaaaactaaataacactatatcgttagtttataaaaattagtattatttacactataaatttaaatataaaactacaagtcaacagcagtggcgtcatcgtcattatcaacctgagtggggtggggtagcttgtgaagaagacccagcgt

SEQ ID NO: 72284 - DNA, 1336 bp, Cannabis sativa
gtcaacccgaccaaccgaaacccgccaacccatgacccgtcaacccgtgtcctattcggatctgggttgggtttcatttttttgaactccaaacccgtgaacccgaaacacgcgaacccaaaactcgataaactcatccaatgttcagccctagcatcaggagtattggctcatttttcataagctgtaatgagctcaccctattttaagaatataagttagaaagcattaaacatacataaaatagtattttatttagaagttatgaataaatacggacatatttctgtgcagccaattgattaacaaatgtatttgacgatttcttggtgtgaacttccttccaagtctcaatgaaattacccttattcttctaggagagattaaaaaattagaaaatgtgcaatgtaatataatttaactaaattgatattttaacttactttttcataacgcctatcagccatagattctgttccttgtgttgtagggtactgcatcttttttctattttctgcatttattttagaacgggcaataaactccggactagtgaaaaattgacaaataggaagctattgctctggagtcagtacactaggcgggtgggcaaaagcattatccaaatccactagatttttatagtattttttgaaatgaacatgtcttaacatctttcgtttcttatatttgtctgccattttagtccatgcaatgtttgtaattacttcagaatgttcattgttgtcgatatcataataatactagattaaaagaaaacaaactacgttagcaacgtagaaattgtatgtaacaaaaattaacatacaatttttttacccgaatctgttgaagactgaatcacgatacatccttggaactttctccaaactaccataatttcatgggacatgaattctaatctctctcccaatcaaacaagaaaaaccgccactctctattccaactattttacaggcacgaacatcacacacaagaggtactggtactgaagattttttcctcctatcctctaagtcattaaggacattacaaccgcgtttcctctttcttgaagaatcagaaagctcattttcagcttcagtagcaaatttacactcggtgggaatcctagtaggatcaagcgagacctcacccccaccatcacctccatggtatctagcaacatctacagacattatactaaaaaaacaccatccaattaaattgaatccaaaaatatattacacattacactaaaaactgataagctactttgactaaaaaaattaccactaaaagacagatgtagcttaatttcaagaatactataact

SEQ ID NO: 72285 - DNA, 923 bp, Cannabis sativa
tatgagcgagaagattagcatctctacgctcgaaacaaaactcaaaagaatcaaagttactattgaagctttttctagagttgcaaaataattttaaaaaaataaagatttctcgtatttaaatttatagttatagaggttgtttttttctctagcctttttctggacataggcacagtttgattgggattgtatttgatttttgctattgcatttagtcttgtttatatgacacagttttcagtgttttagttttgtcttagagacatgatttgagtgtttagattttgtctgtataacattgtttaatttagttttattgttggttattctttcttcgatgactcgcaatgaaatcgttattagtagttaggaataataagttttatgcgactaaaggagctaaataaacctactgcaacaatttttattattttatcttttgaacagtagatggaattcaatataagtgtttttaaagtttgtgatgatgcaatttttttaatttgattttatttttaatttttttatcaattaatttgagaattaagtagctgattatttagctcaatttttttttttttattttaatcctaattgtgtctaatggaaaaaatgttctgattggattgcagactattattttaattgattgctattaataaaattacatacttaaaaaagaaatagaaaaaatttaatcaagaattgatatttggcaacaaactcatttcaataataaagtaaatctcacaaacctcacaaatacatcaatatattctcatactaaaatgacatatttcaataataataaaacaataagtatgtgttgaaccaaaatatccacccaatatattatacaatacctttcaaaccaaatttaaaaaaacgtgcacaagttgattaagcatatatcattactc

SEQ ID NO: 72286 - DNA, 1073 bp, Cannabis sativa
aaaagaggtatgtttcaattaaatataaaattagagataaatttgattaattgattaataaaaatagtatttctcaacttactccttctaaataagtatgaggcactggcttaagaatggtatgctataacatttgccctaaaagccttgagtccacaaacctaataaattaagcgaaggaattaattaatcatctcaatgctaacctataaaaatctctgagagtagactccttaacattacaatattaatttttatacaatctctattcgttttcaaatttcaggtaaactcaaggccaagaaagtcatttgtttcaacttcttaggcagccaacaagcccaacaggaatgactatatgacaacttccaaccttccaaaactaacaccatacacaaataaaaacaaaattctagattgccaagattacaatattattaaatgaagtaaatggaaaacaaacaaaacccagaagtactcatattataataataatcataacagtaattcatatagaaagcctttttcattttatccaattaagggatgaagactacaacactcaacaaaatataattgattaatgtggaaatatcgcatagctgtcaattaattagggtagtttatttcatgccactaagaagttgatcaacaacacacctactcctaccttcaatgactttaaagtccattcttccaagtcccattacctataaaagcctaatagcaaataaatttctacatacacaaacaacaaagtttcctcttcttctcaatcagaatccacttatcttcccatcacaaaatcattttttcagtatttcaaatttgattgataacaacatggcttatcaacgaatcccgaactttatattaccatttatggttcttacaatttcattatgtataagcagcaaaatggtttctgcggcacgccacttgctagagactactcctagctttccaaaaatacccgagattccaaagcctgaacttccaaaaatgcccgagttgccaaagctagaaattcctaagtttcctgaagtatcgaaacccgatgtctcaaagttgcc

SEQ ID NO: 72287 - DNA, 616 bp, Cannabis sativa
tactatttcattcttcattcaatggtttttacttttgtcaatatatgcttcttattaatgaacattataatgagtatgtgttattggatagcattgttatgcttaatctcgtgaggagataccatatcgtattgttatgtttagtctcaaaaccacaattggtaatatttaccattaatattctctttttatcttcaactcaatctaacatttttacaccaagccatgtacagatttatttcaatgattcacattagagaaaagagtgaattattttcttgtatgtttagttaataaaattttataattgatttaaaatttcatttttttatgtactagtgagaaaatattttatttattaagcatatcttttttccaaatatgatgatatgtttttactgtatattcgttcaatacatgaatcccaataatgtttaaaaattgctataaatcattttttctacttatatttttatttatgagagtaaccgacaagagtattgtcaatattaatcatcaataaattcttcgaaacatgtctaagtctatgagaatgaattatgcgagaagtatttaaaaaaataggcgatgatatatttttagttaattttttttt

SEQ ID NO: 72288 - DNA, 1058 bp, Cannabis sativa
aaagagaagaagatagagaataaagtaatgctaaaaactctctaaagaatacctccattattgccttctgtctctgaaattcgtactcctttttcccttctaaattgcttccttgaaatcaactccagttcaccctttatataagctttcagggactaaaaagatataaaaacgcacatgttaaatgcctattccaattgggatccaaccaaaacccacgtgagagaaaaagacaatttttgtgcagtttacaggggaaggtcgcggcccgtgttggagtttcactacatggcttcgtttcgacggtgatttttttcctacgtggactgatagtattttggccataactctctcgatattgctcgaaattgaacaattcaagagaacgttgtttcaatataagtaaccaagagagagaatatggacaaaccaaatttatgaccttcagatgttccaccctgcaataacccattcactatatataagatacaaatatctctctaagcatagaaaatgagttaattgcggcataattctaatactttcaatttacttgcaatgaactcccaaaactcacattttgacggtaaaatccctaaaactagcactgtgttagcaaaaacacactttcgttcccctgaatcctttatttgtcaatgtggctcaattcagtttagccaacgtggacacagtgtatatattggtcttttaaaaaaaataaattttaaatactaaattaatttacaattaaaaataaatcattaaaaaaataaaaggaaaacaattttttttattccagtcatttcttctttttttttcaattctcatttcttcttcttcattctttctaccaaccgcaccgccaccactgaaacaaccactaccctaccattgcaaccactgcaaccaacaccacaaccaaaccattgtgtttattagatccaaatcaacgtaaaaacacaaaataaaaatgaaatccatatataatctcaaatccagaaaaaaaaaatttgataatacatggtttttttttttttttttgatgaataagaaatttt

SEQ ID NO: 72289 - DNA, 1545 bp, Cannabis sativa
tatatatatatatatactaaaatttttttatataatccttatatataataaaataaaaactaaatatcatcttaaaatactatcatattattgccttataccaaaaaatttatatatacattattgtcatttaccattaatgacttactttaatgctcttttgtaattaaattattgccattatttttctaaaaatataattaatattttaattatcattaatgataattattttttatattaattttctattatgcattgaaacacaattatatagcatttattattttttttgctaaatttagtaattttttaaccccatgcattggacattgtcttatatatggtctaaattttacatttatgctccaaatacatatgagtaaaattatcatttcttttaataaaaaaatgtaaaaaaaatcaacaaaaatattaattttttattaaaaaaatatataaaaatcctattaaatatataaataaaatataaaaaaaatattataatattaaagagtgataaaatactaaataaaaaaaaaattattgtgatataaattttagctcaagttatattttttgttaaatttgttacaacttttagcgtgtactcaatttagaccactttatatgccaccaattcatttttataaatatgtgctaatatatgcatatatatatatcttatattaaatgtgactatatataaacaataataacaaaaatataaggggaaattgctctgctagggttcaaacttaaccatggcgggttggggccgcccatgtaaagctgcttctccgaacaacaaggtgactggtgctaaggtgcaaggaaaaaggaagacatcgattaggaagaagggaccaacctcctatgacatcgtgctcaagactagatcagtagctgagatcttggggtggatgctttgtttgtctccaatccagatattgaggaagatgaaacattagtgaggaagaaaaagcagacaaatgaatatgtggttgaagtagtatcgttgaggtctattattcgtcaattgacaccagagcaggaggttcgtgaagatttagcaatttcctaaaagctacgaacagatcaaagacacaaattcaatatggtaagtctactatacctccaatcttatttgatcctattattcagaatttaagtgacaattttggaaaagaaaccatagctgagaaattgaaagtcaaaatagaatctgaagatatttcagaggaagttgaatactaacaatctgctatggtatgttatgttttgggagtaaatctaccagtaggagcttttgaggggtttactaagagagtttggaaggagaaaggagtggacaaagttggcttgttgaaaccaggcatttttatagtcatatttttagctaatagcactagagatgagatcatggaggctcgttttttgttttttgacaggaaacctataatcatgaaacgatgggatcccataacagactttgaaaaggaggatgtttatgcgattccaacatggattcaactccatggatta

SEQ ID NO: 72290 - DNA, 1634 bp, Cannabis sativa
  modified_base (26)..(50): a, c, t, g, unknown or other
  modified_base (228)..(240): a, c, t, g, unknown or other
ctctttctctcttcatcttcttcttnnnnnnnnnnnnnnnnnnnnnnnnnttttatattattttataacaaatgcccatttttttgtttttttaagaaagtaatcaatctttattaactttcaaattgaaaaatgctaaagggtatcaatggtgtctaccaccctcttatgtatcgatatcgttattggtccaattaagtatcgagtcccacataatttaatataatnnnnnnnnnnnnntatcgctagccaattgcaacgtgacatgtcgagaaggtactaggcaccactggtacctaatagaaatgctctttcaaattcagcaaccaaaataggaagcagatcagttgggacatcccccatactgaagttacgatcaggataagaaatagcagctttagcaatcgcatgagctactaaatttgctgactgtttaacaaaagaaataataacaccccttaaactcacaagcaagttttgacactctttaattacatcaccaaaaaaggagatcatatgaattggactacgaattgcttgtactaccaccaacaatctgtttctaacattacattcagctattgcttatcttttatccagctgagagcctcacgaactccaattgcttcggctaactccggtcgtatcccattaataacatagtctttgcaaatttaaataataagttacatattactcttaaatagattactactatatcaatttcgagattttggtcattcagttgatttttaacgttaatatttaacttgcgtgttaaaattgtaaagaaaaataaatttaaaggagttttaccacaaaataaatgataagagatttaatataaaaatcaaaacataaaggaattttgcagcaaattactctaaatttaactccctattgcaaataaatacttaagtttaatttttagcattaataatacataatttatatttctataactatataagtatctaacattaagtgtcaaatcattattcaaaatttaatgacttaaaacaattagggattgtcaattgacaatttacttaatacttaatatttaaaaaatttaaaagcataatttaagtattattactttaaaaaattaaattaacatatttagttgtagcaaaaggttacacttaagtatttatgctcaaattactctaaaaatacattgtatattcatgtatttttttggcaaactttttttgttaattttgggataaataccattttggattttatattttacaaaagttactcattagagcttaaatgacaaattagatcttgtatttcctaaaatgttacaaacaggactctgaactaattttttgtcgaaataaaatttaataataattttatgtaattgtattatgacaaaattatttatatttttttatctattcaattattttaaaattaattatattaaaataaattgtcaaaaattaaagttagggtcttatttttattattttaaaaaatgaaagatctattttctcatttaacaaaacgtgaagcaacttttttttaaatgatatttacccgggaaatttgcggcgaaagtccccaaaaagttcacgttgatgctgattagtccccaaggtccaaaaatagcggcaata

SEQ ID NO: 72291 - DNA, 914 bp, Cannabis sativa
agcccattggggcacaatactcctcctctttatttcccacattgctcacccaagcctcctccatcctaccaacaacaacataataaatacaatcttactctagcttacaactatgagtttgttttacaattattttgtttatgattaattcttcatattcaaaattaatgcacaattatggtttttatagatagccaaacacttaaaaaaagtatgagttttacaattatttgtttatttttactcaattcctttttaaattgatgtattaattagccgccataattttactcaaaatctttttaatttccatgatttattatttattagtattattaaaattatttttatcacttcttgtgttttttttttcattgttggacatataataattaatgtataataattttaaaaaataaaatatagcagcccagaccctataaatgttataataatataaattatagtggctgcaaaattattttttatttttatttttaatttcaataaatttatgcagtgcgtgaattctctaatatctcaaacaaattttagtttaattttttttttcataatcgcatatgttgtaactatttaggaccgtttgtaattttcaaaaaaatttaaataatttagaaattgtttggctgtgttttcagtttttagttttcaaaattgtattttttaaagagtgaatacaaaataattttttatcattttataattttaatagtgtttgacttttaaaattagttttaatattttttttactaaaaaaaattaatattctacaccataccatgatatgaacccatccaaccccagacccgaacctaatctcagaccccaaatccaaacccgaacctggaccaggaaccaaacatgggctggcgttcgagtttggtttcggggtc

SEQ ID NO: 72292 - DNA, 2147 bp, Cannabis sativa
acacaagaagccaatctctgtaagctttccaactcaaaactggtttcttcccacatatccctaaggaaagaggttttctccttcaaatgagtcgctccatcaaccttcaattcaattgtgggttcggaacttacttgtccaacaatgttggcagatatacctttgctagttagcttctccatcacaatatccaagttttgtttacttacctcaataatgagaccaagttcttcagcaaaaattgtttggaaaaggctcttcccatgtgaattcaaatctaacacaacaccacaattcccagaaaatgccatctctagagcacatgtcagcaatccaccatcactaatgtcatgaccagcagagatgaactcatcatcaagaagtgtttgagtgcactcaaaaactcttttaaaatatgggacgtcatcgagatcaggacaatcatccccaacttggtcaaaaacttgagcaagtgccgatccacccaaacgacgctttcccttggccaaatcaatatgaagtatcacaccatcatctcctaacttcaaatttggggtaactgtttttgttatgtcaggacaagtgacatagacgctaatcacaaggtttccaggagccttaacaacttcacctccggcatgggcagccattgaaagactgtccttccccccatcaatagctattccaagatcaatcatagcttccgagagagcattagcagcatcatacattgcagccccttccccatcaagtttggcagcatacatccaatttccacttgctttaatgtcagccagagaagtcaccttcgcccaaacaagattagtgagtgcttctccaacagccaatcttgccattgcttttggatctagcaaacctttgattggttgctccccaatagcacatgcacctccggtaaagtcattataggtttgagcaataactgcaacatcagcaagtgtaatttgtaggggtcctacagtttgttgctgggctacaagccctgttacacacctgtccaccttagtagtcaagaaacgctttgaacaaacagatggaagtcttaataccctcttgagagcgtccatgacagttatcccaggagcaatatcaagtggctttcgtgcatcgacgacccgatggaattcaaaggtcttctgtggcatgtcaccaagtactttatccaactccaaatccacagcaggtggaggcttaggaagtccacttgattggcatttttcaatagctgcactatcaactagaacaacccgaccctcaccattaatggttccaagaacagccatagaaaccctttctcttttacaaatcgactgcagaaggtcacgactttcaggcttcactaaaattgcatcttgctcttgatattcagcaccccatatctccaacaccgacatcgtgtggtcaccaactacaattgcccggatatcaatctcagcaccctttggataaatgatttccttgacaacattacaatttccaccagctccttgatcgtgaatactaatgattgggttattctctcccatctcaatgcaagcacgaacaacacgatacaatttttgtgccatctctgcatctccacgttgtacagcattaaaatcaaggtctgcatcattctgtccactaaccatactagacgcagccccacctcccataccaatacgataagctgggcctccaattttcacaaccagcattccaatgtcgggctcgcctttcgatatgtgagtgtgatcaatctgcccaatgcctgcactaaacataataggctttagccattcccgtctttccccacttggaagtcgcattccgaaagttctagtgtaaccctgaatcaatggctccccaaacttgttgccatagtcggatgcaccattactggcatcaatgagaatctgcaaaggtgatgccaaattagatggataggtgaaagaaggatcttcccaaggagcataagaaccctccatattgagattgccaacacagtaaccagctgttgaggcaacaacaaaagaccctctcccagtggcatgtgtgtcccttatacgtccacctgcacccgtttctgcaccagggtaaggtgccactgcacaaggaaaattgtgtgtttcagcagtgaacaacac

SEQ ID NO: 72293 - DNA, 899 bp, Cannabis sativa
aatacgagacatgctcatgggcctagctggtctaaaaccttcagaacttaagcaagacaaggcgaggggattgccattctcgacatacatccatgtgttacccttgcctaaattcaagatatcgtcttggaagatgtacaccagaagagaagaccctcttgtacacctgaagtactttgagatccaaacagatctcctacaagtatctagagatgtgcgatgtcgaatcttttcgacaactcttgctaaaatagcccaacaatggtatttcaagtttccctcaggaagattcaactcttgggaagagctctccctagttctatattaagttctctgcttcaagatcaatacctgcctgattagaggatcttatcaaaataaagcaaagataagacgaacccttgaagaactacattgaacagttcatggctgaggccaccaaggtcacaggcctgacaaaagaaggctgatacatggccatactcaaaggcatcctaccgttgactgacttatggaaagatatcaataggacctcaattaaaaacatggaggagttccttgagcgagctcatggcttcatacatttagaagaagttgtctggcaagcataatgacaaacaaacatagggcctcatagcgctgtccagcatgccgaccagcacaaacgatctctaccaattctaaaaaaatgagaatggtggaggcacgcgcaactacgatgactcaaaccaacgtaatggaagggaaattcaaagatctctttattccatgaagtctaaggaagaaggaggagaagtgtgtagcttaactgttctatcaaaactcccaaagtaaggcatgaccagatatcccaacagggggagttagcaacaggcaatcagaaggctggcctccatctc

SEQ ID NO: 72294 - DNA, 1154 bp, Cannabis sativa
aattattttttacattgcaacacatgtttacttattttttgtcacaatttttttaataataaaacataattaatccagagaaagatgatgaaaaagcttcataaacaaggaaaatccatcgatgagattgttgaggttcttaagcaaatccccatacatcccagagttatccctgccattaaagctgctcatgctcttgggtacgtatgtatatatatatgtgaaaagaaaatacaacatgtactcatgcttctttttattttccaattaagaatttgatttcttattatacatgcattattaatttcaggtgtgatttgagaattattagcgatgcaaatatgttctcgattgaaaccatgctgaaacattttggtgtgagagaatacttttcagagatcaacaccaatccaagcttcgtagatgaaaaaggaacactcatcattgaaccttttcataattttagaaactcctcacatggctgcactactaacacatgttctcctaacatgtgtaaggtatatacataaactgtttctagctatactctcttatgacattgtaaattgttttgaatttttggtgcgaataacaaatttgaatttcggccacttggtgtatgcatgcattttgcagggtttggttatagaaagaataaaagcttgtgatgagggaaagaataaaagaataatttatgttggtgatggaagaaatgactattgcccaagcttgaagctgaaagagaatgattttgcgatgccaaagaagaattttccattgtgggacttgatttgcagtaacccacttctaataaaagccaaaattcatgaatggagcaatggtgatgaatttgagaaggttttgctaagacttattaactctatttgtagtggtgatgatatcaagtctgttttgagttcagctgatttcattaggccaaatcatcaagtagtaccagtcagccgataccgatgggacaaagatccgtggtcatcagacgatgattgatgcaaatacaccaataatattaattagtggccctcttatatattccctttccattattttacttttactatttaattttattgttcttttatatcacaaatctattttgggctataacaataaaatattatatttaaaagtattat

SEQ ID NO: 72295 - DNA, 994 bp, Cannabis sativa
agttggattgatcgtcataattggggacaagtaattttggaatcagacagcttggtatgcgtacaagctattcaaagtaaagtctctatgtcatcttcttttggtcttttagtgcacgatgttcgtgcgttgcgtttatctttagacaatgttgaattgcattttatcaaacgatctgcaaactagctggctcgctgtttagcaagagattcttgtttctctctaggtcgtatgcttcagttagaggattgttcctctacagcacgttctataatttttaacgatttgattaattaataaagataccgatttgagtaaaaaaaaaaataagatatatttttatatttaaaatatttcatttagatttaatttattatctttttttttctaggaattaaaattattgtggtattttaaagtgaagaattggattgaaaaaaataatatattttttttacaaaaagatcatattttggaccctgatcgaagtccactcgcgcgcagcatcctctcctcattagagtcgtccgttctttgatcaagtggcccagacaggcgcgtgctccccactccaaacaaggatgcgtgagccctgttctccttcctgcctctgcctgcagcgtcagacgcgtggggccctcctactgcagcttgtctcccccacaacagccactagccagctaccacttgtccgcctctcgttcaatccgagctccagcagccttcccatgtgcgccaagtgctgtctcctccttccatccaccattttcaaattattttgatgctgccaagtgtcccaatgcatgaaaaagtactgaaaatgtcaatttcaaaaatacattataatttcctattcctttgcatttatttggctcattttctcgttttactatttctctctgccattaaattacacatcgtatattttaccatgctacccttctcatatcccacctacctcatatatgctagaaatttttagaaaaatattaaa

SEQ ID NO: 72296 - DNA, 1208 bp, Cannabis sativa
attgatgttgaataaaatagattacattgaaatgtagttttatttagggcataaaacccaacatatacgtcttcaacactccttcaaagaagagaaggactgcatggagtctgtcacacgcccagtgatgtttcaccctttgatcttttaaagtgaagtcatcgtttgaatttttatgcaactttagcctttactcactgaagccaaagtatgccacataaaaagtcaacatgactctcgcatgcacgtagtttttttgttcctaaaagatcattggggttatagaacgtcttcaaccctacctcttgaaagagaaggtttacttgaattctctcacacgtccagtgatgtttaaccctttggtcttttaaagcgaagtcatcgtttgaatttttatgcaactttagcctttccttgcagaagctaaagtctaccacataaaaattcaacacgactctcgcatgcacaccgattttttgtgcctaaaagatcactgggggtatcaaccgtcttcaatcctccttccaaaaagagaaggcctacttgaagtctgtcacacgcccaatgaggtttcaccttatggacttttaaagcaacgtcatcgcttgactttttatccactttaagcctttcttcgcagaagttgaagtttgccacataaatattcaacatgactctcgcatgcatgtagtttttcgtgcgtgaaagttcactgggggtatgacatgtcttcaaccctccttctcaaaagagaaggactgcttgaagtctgtcacatgcctagtgatgtttcacccttcggtctttaaaagtgaagtcattgcctaaaattttatgcaactttagccatttttcgcgaaagtaaaagtctactacatagtcattgaagataactctcccatgcacgtggtttttttgtgcgtgaaagatcactgggggtatgatacgtcttcaaactccttcccagaagagatggactacttgaagtctgtcacaagcctagtgatgtttcaccctttggtcttttaaagcgaagtcgtcgcttgaatttttatgcaactttagcctttcttcgtggaagacgaagtttaccatttaaaaattcaacataactcttgcatggacgacaattttttgtgtaggaaagatcactgggggtatgacacgacttcaaccctccttcccggaagagaaggtttgcttgaagt

SEQ ID NO: 72297 - DNA, 1137 bp, Cannabis sativa
ttgaactttgaatgaaaattcctcttaaaaagaaagacagaaagaagaacaatacagtttgtggtacgtagtactactatttcctaattatataactcttaattattagtaaattaatatataaacatgtgcactacgttcaatagttggttttcttcccacttaatgaggctaattccattgagtaatgagtagttggatagactaaacaagcaccgaaagcattaaacatgatccgttaaggtcgctttcatgtgcattactacgtttcttaagttatatcccaacggtcaactcaaccctaaactctcatccatatgtcaatcatataccattcttaattacattatatgagaaatagccatacatatacaacaatacagtacacatctccgtttcaatgaatatgaatagtaatatatctgtacacataaattatatctacactacatagatgtgaaggattttttatattatgtattaaaataaaatatgtaatatatccatattgaattgtaccgatatcacattttaatattttttttaaaaataaataattccttaaaactatgacgtcacatataaatatgtatcaattttatatttaatttgtgtctgcatataaaagaaaattaaaaagtcaatgatgaattgtattgaaagccttagtaaggtaggctggtatggctgcccatgaagggaacatcaacgagtaaattttttcttttattatcgcgtgtggaggtttctaattctattcaagtagttagtattgctatacattagatagtaacggtgtctgttacaatgtaacagctttagttatcgtggtattatatagtaattattaaattttacaagctactagtgctcattagcgtttctcattaaaaaataattaaaaacatcatatgtacccatattctacaattaaacccaccataatattcagtacataataaaataaaataagatgggtttgcttcgtggatccatttgtgtcacctgcaaggcagtatgtaattattagaagcaatagtcggtgcataaaattcataaattatgtaaagacgaagaaatattaaatggatataactgaaagagaaaaaaaatgtctatatatactgaaagtaacaa

SEQ ID NO: 72298 - DNA, 943 bp, Cannabis sativa
  modified_base (30)..(32): a, c, t, g, unknown or other
tactccactcattgccaattggttttgagnnngaaccccatgattctcaacacttaaggaccatgtcaccctcctaatgcttttactccttctagagtaatgtctaattgaggtccaatggtaaattcttgcttcccatcaatcggggtcccacaagcaacgtggatttgttctagtaggcattgcatattagtaaaaactagtggcaatatttaccctccaagttctaacttgcttttttgtaagttgggacttcttacatgacgcccttttgttttcctccagtaaggttttaatcaccacgtcatagctaggagaaataaaattgtttgcacatgtatattacatgttacttggtggatggcttgtaggtctgcatacttttttgcctcgattctgacaaatctaatttgcattctgaagtgatagactagttttaagtgtattttataaagtgttttaaatgtgtatttcaattgattgtgttcattttgggtagaattaggctaattttctatttgtttcaagtttaaatgttaaaattcataatctgaattgaaaatgagaaaaaacatgttaaatgagatgaatatgatgagctatcatggaatttagagttctaagacataagtggttaaaaattttaagttttggattctcaacatgctccgtttgtggttgaaaatcaagtctaaaacttcaagtgaatttatgactatgatggtttcactttgaaaaaaaatagtgtgaatagaagttctagatctctcttttagcttttcaaaacatcttcaatcgagcaatattaaaagagttatgaccaaaaaaatatcaatcattgtactaagaagctcgctgctaaaagtcgagcttcaagcgccgcgacactacatattctaaactgcaaaaaattaggcattttttttttatcttttgtagctat

SEQ ID NO: 72299 - DNA, 709 bp, Cannabis sativa
  modified_base (34)..(37): a, c, t, g, unknown or other
tcataacacatttagatcgaattattattaaatnnnnttttgacaaaaaatcagttcaaggtcatatttgtattattttagaaaatacaggatttattttcccatttaacaaaacaaaaggtgtaattgataaatttttcgaaacatatggtcctaaatagtatttactaatttttttatattattttgaactattatttttatgcagttttttttggtctctttatagaataccgtaaaaatagtaacaaaaaaaaattagaatttttatatatattaaaaaaaaccatttatgtaatttttcccttatttttataggaagaatattctatgaagattttaaaaaaaaaatgttattctttgagaagctggattaaatataattcaacttcattggcaaacaaagtgaagcttgatgtaagtgacattcatgattatgacatttctgctctatatgactttcatcaatatatgtgtaattggtcaaataattaaaaaaaaaattgacatttcatgaatcttggttttttataaatctcgattgccagattatcccagaatagtcattcattggttttcaattttcaattttcagaaagaaaaaaaacctcaggtctttttcacacttaattggacctcatattaatattacttgtattattaatagttgtatatatcacaatcattttaatttttagactactggaat

SEQ ID NO: 72300 - DNA, 1662 bp, Cannabis sativa
agtataaatgtttaatattggtaaaaagagttacttagtttaaatttccctatattaaatgaaattttagtttttattttagggaataaatcagatgtaatattttttttaacaactatctcatatactattttttaacttttttttttcaaatttagagtttaggttgctccggtaatttttatatgggttgctatgtggcttttggttgcgatttatgttgctctgttaattgctatataagttgctatgtgaattttcgtaaaaatatacataaaaaaaactccttaattgtaaaaataaaaatctcttattttttaatcgatgtcgtcatgttcaatgaaaaataaaaaaataaatagcattttttcccctgaacttttaacactacctaattttacctcttaaaatatactgcttattaaaaattatccctgaaatataatatttacataattatactcattctgttagattttatttttttaccattaaaaattagttattttaccccctgaactttaatcaatataaaattttgcccatttttattaaaaaataataattttaaaaattacaatattctatttttctataaaaatatttaatatattttattaaatctaaaaaaattaaaaaaaaaatcttaaaaacctcatttacttaattaaattattcctaaaaaaatattttcaaactttattttatttataacacgtttcttaaataatcaaactaaaattattgagaatctaataaattatttaaataaactaatattttttgaaaaagaaatcaaacttatttacatttataaactcatatcttataaaataaagaaaaataatttaaaattcaataaaaatatcaaattattttaaatgaaaaaactatataaactaaaaaaaaattattttcacttaagcaaatttacagtttttgataaaataaaatatactcaagtttgttccataaaattcagtttttacaaaatttatatttttaatatatatttttttgatatttttatacccgaaattcggctaccatctcagtgggggacacgtgtcaggataaaaggaatatggatcgatgcaatcattttttatggaataactcatttattatgtaagtgtcatagtatatttgtaacccgctgacaataaggtcttatgcgaggaatcaatatacaaaatgttgcttagtatattagcgagaaaccgtatgtcgctgaatgcgagtagcgaggcatcaagtacattacatgtaggaagacgaaagcgacacaactgcgaaagcctttagtgtataacatacaaactaagtgtaacagtcgggttggctcaagacctagtaagcgaggtgtctatctcgctatgggagggcttcctgtagcttcactcagttaactttagtaaggtttacaatcctgacgagtcagaagctaacattcaaacaagctttgaaaaactctttgtacaaaagggtcgcgatcatcataagacgtgtatcatcgacctctaaaggaaaaatggccctagctagctattatgatccctggaaccaagcctctgtctagacatccttagatacaacgattaaagacgtgtttaaatacacgatcattttgacccgctaaaagcgagaaaatcctagctatat

SEQ ID NO: 72301 - DNA, 1744 bp, Cannabis sativa
atggtgaaatgaatggagaaaggggcagctccacgtgtacaaaacgtgtcgccatgcatgaggcccattcaaccacgtactatatagcttacgctttcccaaatatacccaactccaacctacttaaaggtcgtacatgaacaattcccctatatgacttgtcgtttatagctctttttcctatactgagattaatttattcagatgcttgcaatttacacctacagactacagtgttcactaactggttatattatatatttaaatatatatatggtatggttgagatgatcagctgcttgaacgtgattctgtgccccttgacttattgtcatcatctggatcttgatctttcattttcattgcgtaggcctcgaagaactccttattttccttctctagctccttccacactgcgttacatttcaattaatatatatttatatgtaaaagatatgatgatgatgaaaagacgtacgacgtatgacgatatatacatatatgcagttatatattacctatggatgtgattagaggcttgatatttgcatgcttagatagtgcttccatgcactcttccttgctcaagttgaacacgataaactcttctatcaagtggtgcacctgcatatatatcatccatctcacatacatatttatattactcacatataaattaataaacagaactgataacacagagtaagactatatattcaaattaccatgtgaatataagaagcagaagatgatgagtctcctatatatataaattaaaatatgtatatattcctaggtatggtatattactagatcgggagctagaaggaagaagaaattatcttaattcgtatgcaaataaagccaaaagggattattcaagaaacttaatatatatgtgtgtatatatatcgtgacaacaatacatgtataattatatatatggattctacaaaaagtagttcttgcttgataaagatgaagggaagggatgatatatattaggcagtgatgactgagattatatgatatattataatcaaaataggtggaaatatcatatcgtggatgagttcatatatcaagtgttgcacatatatataattcatagaaatggaattggggaaggacaggtgatgatatattcatatattatatatatgatgatataatacagtataataggtttgattggaggggttctgtggggtccaaatcccacgtgggagatggacgatgattggtggggagaggatgagaggagattctttagggcagcctcttgtcgtgtcctacgtggccactatgtgtcatactccacatgaagcgtgggctccacctatgcttacgagtcacctccttgttactcccatagtccatacccctttccttttcagttttcactatgatctttttcattttctatccttttcaattttccacatcatcatcctcggaagaggtggtcttttttattagtgtttttataaaatgagtttatttgatagataaattctataaattaagtttttatattaaaaagtttctagatatctttttgtgtcaataatttatttaatttgaactgaaaaaaattttaaatttataaaaaaaatagtattttaattttttttttgttctttttgaaggatttttttattaaaatgaaaatataaagagtgttaagtggtattctacatgttttttcttttatttttattaaattttgagttttcacttttta

SEQ ID NO: 72302 - DNA, 859 bp, Cannabis sativa
tgatatgtcacctaaattagtgcaggagggatttttcgacattatgtggcgtatctcgaagggcttagtgatattcctatcatcaatcatcagcgttctaatgtccaagcaatgccctattacgattggtatcagtcaatgggttgtgcaatctcaaatgtggaatcctaacaatataaatggagactttaattcatcatttggacacatttatattctatttactgagcgctaattagaaaactctctaggcttgtttattcctaaatatatttctacgtattaaattgtagaaactttgttcaagtctgtaaagtctttttttggcaatttagatgccaaaatattttttatatatggtgagatttttttgtgttaataaatcgattttctcaccttaagaatttgtttttaatgctcttttctatcataggaaagaatattaattcagctgtccattttctaagtttgaaaatttcttgtaagagaataaattttcttatagaaagttggctccatatggaaactttgaccatggttaattctctttaatatgtttgattatgtcttgataaaatcagatcaagcacactgtttttggcagatatcaagtccatatacatgatcagacactattttggcaagtttccttttctggtctggtttttctactacacaacgtgtctctgatgctacaaaacaagtttttcttttggaaagtttgtacagctgtggaatcgactttgtgactatatttagggttcctatttttttataaatagaacctagagagcagccaatcaattcaactcttctagctttcattttttacatattctcatttgtaaagagagagttc

SEQ ID NO: 72303 - DNA, 1473 bp, Cannabis sativa
  modified_base (1147)..(1151): a, c, t, g, unknown or other
acaaatgagaaaatacaaaaaatgaaagctagaagagtttattcgaatggctgttctttaggttctatttatagagcatagaaaccctagagacaaccacatagtcgaatcagctgctgtacaaacctttccttaaaaaaatcatgatttgcaacatcagagacaaatactgttgcaacaaatcagaccagaaaaggaaacttgccaaaaatgtgtctaatcatgtatttggtcttgatacctgccataaacagtgtgtttaatctgatcttatcaagacacaatcgttctcattaaggagaataataatagtcaaagtttccataaaaacaaactttccataagagaatttcttctcttacaagaagtttccaaacaaagaaaactccttctaaaaaatgattctttcctaagatagaaaagagcaaaaaaaaattcttaagcttcttcgctaagaatcaccatcaagtttgcttgaggatttgcattccatccttgtccttgacattttttcaatgagtttcctctgacttcatcttctcaaagagatccttactacattcgaagatttgaagaccgtacaaccattcatttccccaagccctaacttcaaacagtaagtttctttcttcctttacatgcttgtttcattgtgtttaattgttgcttaatttgtttgtatcgttgccatcttatttggttttggtagttttttagggttaaactatatttagctcgatactagggttcaggcaataagtaggttttttcaaaatctccaactcaccaccttcgggtttgataaaattctctccagggattgggaccactttttgcttgcagcgatgtcccactctagtttaggaatttatcgtccaaaagattttgaacttgagtttcctacagaatcaaccatcctgtataaacccaacccttcaaaatccacctccaaattagagttgaatgatgctagggttagggaacatgtagtgagaaccaactagaaagtaatgctagttgttataggcgtttcttgaaagaaatctccgaaggcaaatgataattcttgggagatgcggcttggccggaacctctcagcgtgtcctttattcctttggcaaagcctttgtttttacccaaagtcacnnnnncttttgaaccaggtgacttggactttgaaataatgcctcccaagccacgtacatcaaagattccctaggacccaagagtcacctttaaagctgagttaatagaatcgaaggtgtgatctatctcaggctacacgggtgatatattgaagacctgtggaatcaaacttgggtgatcatgccaagttaggtcagtgtgagagggtgagttcagttgtttccccctgtgcgcttttcaagcggtatcccaggggccagtggtgagactagtactagtggctcgactggcatgggtgcctgaagccttgagcatatcagtgcatgg

SEQ ID NO: 72304 - DNA, 1265 bp, Cannabis sativa
ggtaaaattaattccaacacccttaggcagtattacatcaaataggattcttaattttgaggtccagaacattatttgtcacttcaaactcccacaaaagatagtgttagacagggaaaaatagtttgacatggatctctttactgacgtttttaatagacatggaatcattaggtgtttttcaatggttgcttatgcacaaacaaatggacaagttgaagagttcaactaaactcttaaggatacgttaaaggaaggcctactgcaagccaaagggaattagtcggaagaattaccaaaagtattgtggtcttatcgcactataaaaaaaataaaagctgaccatactccttttgctctaacctacgggtaccaagccatgatatcaatagagttcacacaaccatcacattagagactaacatacgaccaacaaaccaaccatcaattgttgactgagtctttagatggaactgaagaaataggagaaactgagcttcgaaaggcgacttatcagcaaagagtcacaaaacactacaactctaaggctaaagatagggaatttaaccttgagatatggtgttacagcaagtattcctagacacgaaagacgcatcagcaagagtacttaggaccatatgtcgtcactgaagcactagaacccaaaacatataattttgcatgctatgacttcaacttgaatccagtgctagtaccaaggtactggaacgaggtgcatctgtgatagtactaccaataaagttgctatcttcaaaatagttctcttcacagtgagatttactttacaatgagcaaatgaattgatcacatcttaaatttgtgagatgcgacaaagttgtctctaggttaagaggtccatcgctaaggtatggtacctataatattagtcaaacatgacattagtgtagtcgagatcagttgagctaagcttggatgaaaaacaaaaatttgcatccgctactttttctttcaacttagctcacagtaatgtaattgtatttaatttaatgcataaaaatattgaacaaagctttttttggtacttcattaacgttaatcacttacagctcacagacttgacgacgctattaatcgctgaataaagcttgtagagttggtcttgagatagcctcagttgtttctttagtaagtacactgccaagccacaaatctttagataagcagaggttgctcacacgtgtaacactctcctaaaattcatgcagaagaaagcctaggggatt

SEQ ID NO: 72305 - DNA, 710 bp, Cannabis sativa
ttagcattagggcgttacatctttgctcggggaatatggacggttaagtcattgattgcatctattacgaccgcgggtaagtattcattccaataagaatctttgggctggggactggattattttgtatgagatggtcgtaagggttggtgatattaatccattggaaaagaagaatcttatgattggagatctgatgatagacgatggactagcctggaatgaagcaaaaattaaatcctttgatcttgctcaaaatgatgccttggtctagactccggatcctcaaggtaatttctctcttaaatctgcgtattgggctttaaataagaacactttttctattgatgatgagttatttaagattttatggtgtagttctctacattctcgcattaagttaattttttggaagttgtataaagatgccttgcccacaaggtctaaacttgttactatttttgctaatgacctgggtacatgttatctgtgtaatcacccatcaagtaatacaacttcgcatttgtttggggagtgtgaggctgttaaaaagctctagtttttgtcaaaatagagcattagaattgagtcatttcatatcaggtttggtgcaaatgtagtgaaatggataatggatgctcccttgttgcaacatctggatgcccaagatgttagcgagttcaaagtgtatgctaccgtattgtgcttta

SEQ ID NO: 72306 - DNA, 841 bp, Cannabis sativa
ttacaaaagtattcaaaatattcttttcacaaaagatgtcgcccagcgactacaaaatatgagtccatgttgtcccgaaaccaaacactccatgcttaaccatcttgatatgtacaattaccagcaagctctagactcattgatgctcaacctttccctttcctttacctacacatgtagacatatatgtgagttgatagattcagtatgaaaaacataaaatatataagtatatgaccgacttgcaactagattctcatacacctacctaaaaggcttaacagatgaatcaagaatgttcttaacaaaagtacgatatctataccacatgtcctaagtactagtcccatactaatattggtagggttaatttgtacctcaagtacaactgagcgttataccacatacactctgtactcgtcccgtactagtattgtaacgctatgtcataccccttaacattatactgtaccaatacactgttagggtttataccctgaaaagtctataaagacattttttattattaataaagagttaaacattttgatatatgcatgaatgttaaattattaatatatattattgaataatttatatataaatatcagaaaattccttattcatatatgatgttgtgatttgtagttgttaagagaactaagatcacttagctatgaataaaacaatcaacaaagtaatgaaatctttaatcaatagttgccactacggttcactgatgcccgttctacggtgcaagtaatctcagttcagattacagatgtagcattttatatatgacaaggaccgatatgaataaagatgtctttatctaacatgt

SEQ ID NO: 72307 - DNA, 902 bp, Cannabis sativa
aatttttcaactcttttgcccatgcatttcttataatcataaatataacactaaattgagaattcctagtatgatataaatatataataatgtaaataaacagagtcattaaaatgagggagagaaaaaaaaaattatgcattataaattacatatatggatggatgtttgtagcttcttttatttgtcaaacacttgtctatgtttcatcagccaaaatctctcaatttcttctgctttacgacccggaatccgtccagctataagaccccatctgtgtgtacagtgtacaaattcttacaacttacatatgggatgataacttttacaaattatatgtagcatttgcaaattggtaatagattgttaaaatataacttatttttgtaaataatgtacttcattagtgtgataaaaggatttttttttaaaaaaaaaaaataacgtgacaaaaattataccaaatttgatataaaacaaaagctatgtgaaatttaagcacacatataacaagatacaaaatttaattatatcttaataattaatatactttttaaaaaatattgcagcataaattcctaaaaaatttactttcatgtagataaatgtttatactaaaagtagttttgataacgtgtggacatcaaatcaatattatatttgacacgtgacaagaagaaaaacattcccggagtgaaagaacttgagtcataacaatcaacttaggaaagggtccctagccctgcgcaggttgacttcgaggctccgaattaggtatttagatcccaacaagttattttcaagtcatcatccttcagtattctgagtaatgaagtcaataggaatccaagtccgaggccctgaaactaaaaatatatgaaacaatatcatagaaatcaact

SEQ ID NO: 72308 - DNA, 635 bp, Cannabis sativa
aaacttagtcaaccgagcataagtaagattttgcttttatacatagatagttgttgttctcattaatttgtttaagaaaaagatttgaaccgagtccataaattaatattgttgtaaagaactgagtctgtgttttttcttttcttgtaaggagaactcatcagtcagtagtgttgtgtaatcaataaagtgaggaagtgaataaaatgtccttaggggagttcaaatagaagtaaggctcaaattatttgtgctgatatactctataattttttagtgtgaactttattattattattttgcttatctttgctttcctaacaaataccattaatactaggaataatgtaacaaacaaaataacaacaacaatctaaacacatattaaaaaacacttaataaagtccttgactacactcatttggaactacaaccaaccaaccaaccaaacacataatcaaaaataacatgcatataaaaggaagaagaaacttaatgaaaatcaataataagtcgtagctgatcatatatatgaacttctcttacggacgtaggttgttaattcttagtgcttaggaggagcaagaccagccttgagcttttgaatagtgtcaacatcagtcttgaaagagata

SEQ ID NO: 72309 - DNA, 838 bp, Cannabis sativa
catataggtcactttcagagattctttcttgattgtctcccaatgttccttgtttgattacatctttgaagactcccactcaacaaaaggagtctggttaaatttatacacagtgcgcatttaacctcctactattggtacttagggacctcctattgtgacattttatctaagtctggaaacattaagttccttctagactaagtcatcaacatagcattctagtttagcattaatgtaaaatacttgcttaaaattgagtaatcattagagacacctcaaaacttttcataaggactagaaattgagcttgagtcattaaaaaagacattgcaaaatttactattatccatatgaatagttagatggaaagttttccattgaaaataatgaatacctacacaaagattatcgtcgggtatttatcgaagaagtcaatgtggagaatgcattactcccgtgtcccatagtcggcgattcattgacaatagtaggttaagctataaaaagttatgtagcttggctgtaacactaataaaactgatgcaaataaagatttatcgaagaagtcaatgtggagaattctagtattagcattaatgtaaaatacttgcttaagattgagtaatcattagagacacctcaaaactcttcataaggactagaaattgagcttgagtcattaaaaaagacattgtaaagtttcctattccagaaaagataaaagtcatgaaagaattccttaggatcaacagtgagaggtctcatgaatgcttcggtatgcattagactagacacctgttgttgagtgggagttatgagtaggtatcatattaat

SEQ ID NO: 72310 - DNA, 724 bp, Cannabis sativa
agtataaacgcttggagtgcaactttgtgagggtgaagagtcggactcggcgtcatttacctcattccgcggctgggcctgctacgtgggttacatcgttgtaggtcctcttcttgttgtacgtcgcggccgaggtttcatgcggctggatccctcagcgttggctgattcaagtcaatcccctcctagtcggtccttcgttcccttctagtgcggttagttcctcgtctagtattagttacctgagggttatccgagtgagtggttggtactcgaggtggacgtcgagtcctatttcgtccatcaatctcagcctgtaaagctcacatttgatcttgtaatgtcgtttattggtcggtagttagctagcaatgccttccgataccacgacatgtgtgataggcagaaactgccccaccgtggtcgcaagtgtggatgtttctccagcatgagcgacagtttctgggaataaattgagaggtgtaatatttgttcgtcccactccttcgtttatggtgtcgacgggaggtgttttgttcccaggaagtgggacattcatcgtcccgatgttgattgatacattgttgttatcccgagttgtctgatttccagccataatgattttccttcaaaatcaaccaagtattacgttcccacagacggcaccaaatgttggtgaaggaattttaacaacaccactactacaaaaacaccctttagaggc

SEQ ID NO: 72311 - DNA, 1271 bp, Cannabis sativa
accgatttggctattataatcacaactacagccaaaaatgacaatgccctacactttaattggatgtctcgccatcccgatcgtttgcctaaggaaaatgagatccaagagagatttctcgctgcttacctagatgtggggacactaggtgctagtactttaggaagaggtaatggacccttccacatcctgtgtccctccacacttctcaactcacttggggggtatcatgcctatccatctgtgccccaaaaaaaacgtactgtgtgctgtaattcgttattattttctttatttttcaatatctataatttttgcttaaactaagatgcattttcaaccaaattcctttaaaaggaaaatagcttgaattccttcttaaagctagaataaacacactcaatgaaagaagaagcatttttagccaaaattccctgaaacgggaaatactcatctgaattccttctcaagagctttcaaaaagagttgtataaaaatttgatacggttaaggcttcgcttaaactcttatagacttcggctttatcctgaccaggaaaatgccatctaaagtctatagcatgtgaaattgaccttcttaaattataaaaatgcctaaacggtcgtaacatatcaagcctccatgatcatgcagtaatttaggaacagcctagaaaaccattcgtattttcagtaccgacaggaggcaggcacttcctaagtacctcctaggtcagcagagggatacaaggttgaccaatgtcaaaggtttaaagcgatggccattggaaccacacgcttctaaacagcctaagaagacagctcttaaaataactatacaggccaatattgaaagctaaaggttgaaaatagtacgaaatattagagtcaaaacatggtgcctcgcataaaggaaaataaaggtgttcttgaagagaagtgtcacatagagccccgtggactaggctaaagtaaatacaactccgcgacaaaaaaagaataaaaattgttttaaaggaaaagatagactacaagaaataaaggtgacccctattgatcttgggtaggagaaggtgctacttagtcgattagggttggggcattagttggctcctctggatctgggttaggctcaacaacttcttgaacatggtcctcctcaaccccgctggaagacaccttagctttagcaaactcttgagatcttgagacttcaacacttgttacttcatcgctgtcgctaacaactgagagaggaaactccttgatata

SEQ ID NO: 72312 - DNA, 1221 bp, Cannabis sativa
tagtattttgggcataactctctctctcgatattactcagaattggacgattcaagatgttctagaaagataaaagagagatctagaatttttatgttttgactttctccaaaatatcatcatatcctaatcaaatttaggcttggagtttcaactttattttttttttttcacaatttttttctattttatagttcatctttttgtgagatgttttaattttttttttccatcttattcctttaatattctataatattcttttattttaaatctgtaaaaataaaagataaaaagcataaaattgctccaaacaagagtagaactaaattaaaaatacactaaaaattaacctaaaaagtaataccaaaaacaacctaacttagtgttaggaagaaaatttcaaaaatctttattcttcatataaatttcattgacccaacgatctcaaatgttgtcttgtttagtagaaatagctcaaatatactttgccataagagctaaatttcacttcttccgcgctctaaaaccaaatccaccatagcgtttgggtaagcaaacttgctcccaagagataaagtgaagcttattgcaattgcccgagctaccccacaaaaaatcttttcaaagtttatcaatggcagcagtaactatttgtgacagaataaaaataatcatctagtagttacgaattcccaataagataaaatgagttaactaagccctatctgcaaagaaaagatgatggttggcccaaccatgtatcttcttctagatcttatctagaacaccccgacagtctgaagccttccacttagtaggacgaagattaacctcgagatatttcaaaggaaaagaactttcatcaatctttgagatttctaaaaggtgttgtttataattcgaatcaacacctccaaaaaaaatgagagattttgaggggttagtagctaaccctgtcacctaacaaagattggagaaagcctcatgaataatgttgtagggaaaaacattacctttgcaaaaatgaccaaatcatccgcaaaacaaagatttattaaccataaagacttacaaaaaggatagtaaccaaagactttacaaagagaggcatgagtgagcaccctcgtatagcagaggagatatgtaacgctcgtacttttataaaaatatcaattttatttacaagcgttaaacgcggaaaatcataatgtcgcattt

SEQ ID NO: 72313 - DNA, 912 bp, Cannabis sativa
gtatacttatttttgttttcggaataaaattatgtttacatagatatggataacacgttaggaatatattttcgtaaattttccttaattgatttttcctagaaattagttcaatatccttttaagaaaaagaaaattagttcaatatagagaaccacataatgtttttttaataaagctaaatgtatcttcttagcattacgttgaattaaaagtccagactacagagcgacttcaaagtagcataaaaaaaaatctctggataaaagaagtgtatttgatttttaatttaagaaagaaaaatataggacaaattcataccaaacgcaaatattatagaaatttttttatcaaaaatacaaaatgctaattttattacgaaaatactaatgaacatttatacaatttagttttagtttattatatttttaccacatgcacacacaatacatgcaactgacacgtaagtgattgatgtattacatcaatcgttctatacatcattttcctcattttttttctcttctttttcttattatttttcatttcttttcagtatttttttaaaaaatcataaccttcctcctccacgatcccaactcgattttcctcttctttttgttcttcaatttttttttcaactcacattaaccgaatcccataaccgttttccctctttttattatatatatggctataactcgttcttcatcaacttcttcccctgttcaaaagaaaagttctaaaatggggttgaaatctttagctaatagaaacaaaggtaaacagcctgttgttgaggaagatgactcttattttactcctccattgtctacacgtgagggagctcctccaaagaataaatcaaaggtggttgcccaggaaaaaattcatcaagatgatgctcaaaaa

SEQ ID NO: 72314 - DNA, 1943 bp, Cannabis sativa
tatctccataaaaaattatgaagcgagaggttgagcgtcgatcatctatgtcagtggcccaatcaacattgcaaaaggcaaccatttcttgtaaagaagaccttttgagatgaaaaccatgattgatggtaccactgagatatcttaaaatcctcgtcatggctaaccagtgacttaattgaggatctttcatgaactaacagactttattgacactaaaagagatttcaagtcttgtgattaggaggtattgaagtgcaccaacaattgagcgatacaatggaggatctggattaggttcactgccatatgcatatagtctaaggctgatgaccatgggggtaggagatggtttaacatcgtacatttgagccttaaaaagcaggtccctgatgtatttagattgtgataggtgtagaccagatgaggttgattgaacttcaatgcctagaaagtagtgtaaatccccaaggtctttgagtgaaaatttgctgtcaagagcaacaaccagatcttgaattgccttattattgctgccagttacaagtatgacatacactagcactaaggtagtgtatgtagaggtgtgttgtatgaaaagagaatgatcagacttggatggaacaaagccaaggtctatgagacaatgatgaagcttgtcaaaccaagcacggggtgcttgttataatccatatagggctttatgcaacttgcatacaagatagggagctgaagttatttcaaaacctgagggttgtaacatgtaaacttcttcattcactgtgccatttagaaaggcattattgatgtcaagtttggctaattgaccaaccatttgatatagcaatggtgaggacaattctaatggtcacaggtttgacaatcgggctaaaagttttagtaaaatcaaaccccagttgttgatgaaagcccttagcaacaagacaagctttgtacctgtgatgtgttccatctgaattctcttttttcctgaaaacccatttgcagcctatgggagtccttccttctggtaatggaacaagagaataagttccatttatggttaaggccaacatctcatatgtcatgacttgattccattgttcttgatgcaaggcctctttgacagttcttggaatcttaatggtgagatagactttaggtttatgaattcctaattttccccttctttgcatggcatgagaatttatggtgatttctttttgtgcaacaggttctggtgttggtgtggtgtcaacagcagagggtgctggtgtgacagcaacaggtgacactgcaggtgcaacaacttcaatttagcagtgagagttggtgagacagtagtagtattgttgttgtcactgtgtgaaggagcagactatatgatatctggaacctgctgagggatggaagtaggtatgttttcctgtataggcagagaaaaacttgccacagatggcacaatattagtagtaatagcaagtgtaagatcaggacaagaagtgttgaatgtgttagagagtggaatttgtgcaggtgtggcaaattcagagtacatgtatgaatcagtggccaatctgggaatggaagtaaaagggaaagatgtttcatcaaatatgacatctcttgagatgtacaattgaccagaggagtctaagcacttataccctttgtgatcgagactataccctaagaaagtgcatggagaagacctaaattggagcttatgtttgttataaggtcttatgttgggaaaacaattgcgcaccaaatgtctatgtttcctttctactaagccattttgttcatgtgtagtaggacatggatgcctatgagtgatgccaaattgtttaagatactcagtgaaagacctaaattcccttccccaatctgtttgaagacacttgatctttttaccaagctgtaatttagcttctgttttg

SEQ ID NO: 72315 - DNA, 1017 bp, Cannabis sativa
tgaaacccgacaaactcgtccaatgtttagccctagtaggattgtttacacgtggtgattagataacacaattctgttactgttaaaaataataatataataataaaaatatagtgacatatattgactatacatagaaaactatcattgttgattgatatttcggcaatcgttacacatattaataagaaagatttagaaatggatgaggattttttacgtggttgaagctttaataataatctttaatccacgagtcacttttattaaaggttggaatgttctctagttcaagagaatattcagttcatagcttacgaagttcattatgttcgtgaatctaaaagttcttttacatttactgtcttctggtattgatcagaggagaaaatggcacatcttccttttctctctaggcaatatctagtctccgtagtaagagtttggtaagacaagttttatcccatatatggttgatgtgacagtacagaatatagtcgccactttatttgcatagacaaatggattgtcaaaacatatatgatcttctaatgatgttaatcccatgccaaattagttgtatacagtgatttactttggaacttgtgttatgtgaataattgagtccctgatagcctatgatccaagagttcatgacttttcgaatggctaagactgtcattctttcaaccactcttcaaaaggtttgcgaccctttccagacgtatctcatattaattggagaggacttacataataatgagtattaatctcttagcaggtgggtcccatttgtcatgtggtgcctccagcgcttgccacatattttggtaaaaaaatatgttcaacatttagcccaagttccaactcataaattgagttgggacttgctttaatcttagtcgactcttcagttcactctcggaggactcgtggcgtgacgttaagggtaagcgaagagtttctactgttggtttttatggtccatattatatataaagaccgcttagtttaatt

SEQ ID NO: 72316 - DNA, 997 bp, Cannabis sativa
ccttgtttgctcattttgaaaataattgcgtatattaggatcaactatagaagttaaatcattcaataagttttttttaatgtgtattatttaattgatttaataaatattttattttactaaattattttaaaattataaatttttactagtagtcatggtataaccatatgataaattagttattttggattattaatataaatagtataaaatgtgagattttttaagttaaatatattaatttagtggaatatatattgggtgtaatatttagtatgaactattggaattgttgtacaaaatgcaaaatattctacaccaaattggtgtaaccattcaagatggtcttagaacatctctaatagtgcaccattttacaaaattagtgtgaaatcttcacactatttaatgacacaccaaaatggtgtgcaccaaattttgtgtttacaccaatttggtgtaaatcttttgttttttgttttttttttttttttgcattctagcatttattttatttattttaaaaattaatctcacagtttagtcctcaaattaaaattcatcacaaaaataatagttaatttaaaatactaacaaattgaaaaataaaaaataaagataacaaaaatactaataataaataaaataaaaataacataatctaaattataatactaaaaagaacaacataaataaaaataagtattaagtaaaataataatttaaaaaatattaggtgcaattttatttaatttttttaatgtgtaatatttaattgatttaacaaatattttattttattaaattattttaagattttaaattcttaatatgatataaccataaattgttattttaaattattaatgtaaacaatataaaatgtgaaatttttaaataaaatatatttatttagggaaatatttggtgtgatgtttaatgtaaattattgtacaaagattacacactaaaaaaacaaaaaatcaatagacac

SEQ ID NO: 72317 - DNA, 949 bp, Cannabis sativa
cgtatctatacatatataaatgttggagaaaaaattaagactaattaatcatgggaataattaataaaaaaccatcaaatcattaattaagcagctaaattaagtataaagatttaaatttctcttttattatttgtagttgtatcaaaatttattagtttaatatttttaaaattaatatttataattaaatatatttagtaactatcaatgattaatactcttaatgattaatactctttgagaaatattcattatatatttatttaatatactattagtattagctgtgaaattcttttgtctcaattatcttattaaaattcagtattattttaatatacatttatatattatttcttcacaacacataacattttaatttctcaaaattacttttaatgaatagatatactagatgttattttcgttatgtgtatttttaaaattttataaattaaaggaaaccatttattaaatttttaattttttttaaaaaatattcaaagttttaaaaatttgaggaaaagaaatattaaatttaagaatattaaaattaaacgtactcccaatattaaaaataataataataaaataataatgttacaaataatatattaataatttatatatatttaaattaatttaaaatttataagcttaattaacctaaaacaaataatattaatatttatatatatttataaaactaatcttactaaaaatgttaaatttaactaaatattcttatattcttaaaatattatgttaaactaacaaaaagtattagatattatatataaagatataaataaattgaatactgaatatgatttaaaataagggataattacataaggcacaattttttgtaaaaaaattacattttaatgtttaaagaattttcttttatatttttacggttgtctataaaaacaacacgaaaaca

SEQ ID NO: 72318 - DNA, 785 bp, Cannabis sativa
gtcataaaacaaataattcattattgtaattattaaatacttacctatatatgtgattctaaaaataggcaaataattgatgaattattaattgtcagtgcctacaaaaatgcctatctatctaacactcttttctatgttaagagataaaactcttttcaataaaaacactaattgacacaacaatagtttgtggaggtttccaaaaaagacaatatttttttttttttgaataaaaaaaaagactattaatattatccatgtcaggttttgatattttttttttaaatatcaaaggttttgatattttttgatatttaagtatacgaaaaaaaaaaagttataattttgattctaaaatttacccacaaatcatgagtagtaaacattttaaaaaagtgtttagttatctattttggtatttatgaaaaaaatttagtccttttttttttacttatacttatttatgatcacttacaattttttaaaaaattctgaacaatttacggtactgaatataaaatttaattaaatttaactataaaaatttacttatagttatttatacgtgtaataaaatattcgaaccttgtttttgacgcagtaaattatttaaaattttttgaaaaatttataagttgtcttaaataactataatatacacgattataattaaaaattacactagatagcttagtggtgagggaggaatgggaaaaatggagagattatgggttcgaacccaagacctttaagctattaagttaatatatgattgtaaaata

SEQ ID NO: 72319 - DNA, 1618 bp, Cannabis sativa
  modified_base (1588)..(1592): a, c, t, g, unknown or other
aataacaataaaatgaacaaaattgatatttttactgcaaattttcttaaataaataaataaattaataaaagaaatatttttagcatagtatttaattgtacaactaaaacctaatgttactatatataataaagttttcgctctctctcttggttgtccttcttctcctaggaggtttagtcactgttaatgattgagttcgaagttaaaggggacttttgagtttgatttactcgatcctaacctgtttctctttaagttcgttctcgacgatgattgttttcgtgtcggactgtggattgtggagtattccttgttggttttggctgaaccaactgggattggtaactactcagatctatgttttaattatgtttctttttggatttagttgcataatttaccaatttgatgtctttcaactgcggttgggaacgaagttggtgcgcttattggtcctgtgattgaggtagcgttggttcttttggtgatcatataatgggtctttttttcgcgtgcagattctcattgacattactgttatacccatatttcgagcaataaatatagtcatgacacgtgtgatagggcatgaaaacaaactagctcggatattgaagaaataaatatgttgaattacttgcctcagagaatacagattgtagacgtatttaagtctcttcctaatcatttaaggatgatttataaataccgtgatttggtaagactagcgagataaacaactaacagaaaaagttcatctcagaaagtacagagtaagatgaaatatgagatagacgaggcagtgtaaatgctctcaaacctataaggagcacaaatataagatacaatttgaaaagcctatcataagtttttataaagattatatatataaagacttcattataagcggctaacgtgagaagaaggtcaaagagagctcgtcaaattcatctcctttacattgtataatgtgaggaataaagcaagatgcaataccacatcacaacaaaactattagtcaacacaacctttttggataaagacaaaggccgtttgtagtggttatttcttttatccatgtggtgtgtaaatatgagatgtgaggattatccacgtttcattaacagttataaaaataagatcaggcaggaataacggccacccctacacacctataaataggggaaggatttccaaactagggtgataattatttgagaagaagaataagaagatacaaaaaaaaaaaataaataagggaagactagaatttcattcaactgcaagatcaaaaagtgtagaaatacaattaattagaaagtcttatataggaaactaacataaaatactaaaataaaggaaaagactacaataaccctaaataattatttaacacttgatagcaaggcccaaaacaaaagcccaatgctaattgacccaaatgtcttgcaccaaaaagtaaaggagtggatggaccaagccacttcttcagcccatgacactagcagtgaacaagcttcttcaaccaaaggaaacaagaagaaggagaagatgggagataactgttaggttttatgccctannnnnaactccatttcaatgtaatctatttt

SEQ ID NO: 72320 - DNA, 670 bp, Cannabis sativa
tatactgcagtatgaaacttataaaaaaacacagtaaaaaatactgtctggcagtatttttataaaaaaatagtaaaacttagtatactatgtaaattttcctacttaataataatgttgggcaccacatgaacattgttattagtactaataatgtctagtaccttctataagttgcgctctaatccccataattaattagcgatattttctaaaaatttcaatacttgattatactaataatattaggcaccaatactaatagtatcttttagcaattatcttttttacttagtgtacgtgtgaaacaataacatctgaattggtgtaatatatgttgcattttgtagtgggatgttagaacatgttggccacaaatttattgaagagttttttagttgttgtgagtctgttttagcagagaatggccttgttgttctacaggtaataataagaaaatgatagtacttttatttttctgtattaatcttctttatatattatgtgtttcgatcaattaataatactttaaggtaataatttaagatggagtgatggttaattatatattctcaaattttgatagtttgtatcaatgcccgatgatcgatactatgagtacataagaagtccagggtttataaacgaatacattttccctggtggaagt

SEQ ID NO: 72321 - DNA, 529 bp, Cannabis sativa
tttttcatttgattaattaattgtctaaggaattaaatcagtcccgactcaagcagttgggacctttgggcaaaaaaattaaaatttgaccttatattaataaaattatcaaacaatatttcataaatttatttttttctttttttatttaaaataaatacttcgtaaaatctaaaattggcaagaattttagaataatgttcgggacaacaatcttttatcattttttttatcatttcatatatacattatttaactagtttaatttctaatcagaatatgatttttattagatttaaaatttaatatcattatttaaatcaattaaatatttgtgtatataatgaagcttaagtttatagttgtcagacaactcacatacaactgaatcaaaaaaatcataaatcaaccctagctttagttttgggatttttttcaaaaatataagtaaaatataaaataattacaaaaataacttaataaatctcaattacaataatatcttgccacatcattaaaaaatacctta

SEQ ID NO: 72322 - DNA, 977 bp, Cannabis sativa
taaacggactagctagtgtgacgtctcgggaaatcggggcgttacaatggcgaaagtaaagaatgttgtagaaagaaaatatccaattataagttacctcgtgagcaccgtttgatcatcaatgatgacttatcaacgaagattaatccacaggtcagttgaaatgatgactttaattacagatcagagaaaaattcttgaaaaggtaaagccaccaaaataaagtgtacttgatgtgcagaatgaatagtacaattctctaggaagaaaatcaaaagtcttttcaaaactgaaaagacttttaagggggaaaatgctatatatatttttttgagcagtaaatgaggacgtccaaacatatgacatgtgtacgataaatatcataaattaactcagtcaacaagaaaaccgaaacataattacctcctcaaagtatgaaagtcatacacgctcttctcgagataaattgacatatgcaacattgagtgtgagatgattaacacacccataatatgaaactgatggtgctaagcttgtcaaggcattcaaggatattcctgattttgatattgttaatgacgagaggcttaattttcttgagcctactcttgttcatcacctcagagattgtgtaattaaagttaaggtgttctccaagaagcatgtaattaccggagacacatatccaagtataagcataatcctagaggactatacatcaacaatcaagagcctcgatgataacataccaccaaatataaagaacaattctaatatgtcagttatgttattataaataaaagggttataagttgcttctcgcctatgtaattaaatgaaatattgaaatgtccacattttatgaacgactgtatagataagatcaaatgtaactgctattctactcctataaatatcagcaaaaatattgtaaagacaccacacaatttcgggtttagacaaaactctaccaaatt

SEQ ID NO: 72323 - DNA, 1004 bp, Cannabis sativa
ataaaataaaataaaataaaagtcttatatattttaatgttagtgttaagatgatcacataattaatgaaaacaaaattcatcaactaccaaactgatcatgtcacaatcactaaataaataatactgacatatacatatgaaatactactttttttttaacaataaattggattattatttgttcccctgaattacacgtagggttttgcaaatatcatccaccaattacattctgcttttttatttaaacaatttgtaaaaatacaacactaaggtaacatttaatggcctagttcaagattttatattaaaaaaaataaacataataaataactatcaattttacaaagatgatcagtaaaattttggagaaaaaaaaaacataaatattaaagttaatttcacattattaatgtgtagaaataaaatgtcatgtatacatatatgaatagtacctacataaattataaataatatgggacatttagttctagtatatttgaagaaatttttttatgcatagtttagtttgtgtagttgtttttcaaacaaaataaaaaaaaacactcacaaaattttaaaaatggaataaaaaaaatctaatatgccatagataaataataaaatttatgatatagttatattatctttttatgaacatatttgttattattttatgttacatgtatagatgtgtctagttcccaaatatacatttttgttcgtttcttattgcttaaagagcattgatgttgggttgttcggcccactaaaaagcccttctcatacttcggacctttaacaaaaatagcccaaaacgttttttcttgtttttttatgtggatatagcccaaagctttgtttagaaaatagaactttttccagtataaaaatgtgagaagccttcaaagtatatgtttcagccttttacaaaaatgaggattaattacttattggaggagctgacagataaatactattcatggaagaaaagattcgaaa

SEQ ID NO: 72324 - DNA, 731 bp, Cannabis sativa
aacactaaaagggtataataatgcactatttcgttttccttattctaattataataattataatatgaaaatggaataatggacataggcattattcaaaacacaaattaccaattatacatataagtattatttgaaaacataaatttttattgtaatccactataaacaatcctataaataaggaaatagtgtcaaatcacactattaataatattttagtgtttggttagagttaccctaataaatatatgtcaattagtaataatatacatatttgatgcatctgaataatttagctataaatatcactacacctctaatatttatctatacaaaagagcttctacaatattatttcttatatagaattaacatttgaattattgttacatttaggagaccaaaaagtatgactttatcaaatttgtcttcactttgggtgtacttaaagttagacacaattcaatgaacttgtaaatgaaaccaaaaagaggaaaagaaaggataagataaaagtaaacataaaacagcttcggattcgaatgcatattagtttttaatcatattataataataattatttttatttattattgtttcttttttcttttcttttcttttcatataactataactacttaagtatttagactatgtagtgtgaagtatgtgtcctaacaaactacaacaaatattacacaccgcacgtatctgtataataatctttt

SEQ ID NO: 72325 - DNA, 1510 bp, Cannabis sativa
cttttaaaacgagaaagaaaataatggaccatcttttgataatcatatactacccgaccttgcttatcaaggaaagaggcatttcgattggactcttttttttttcttgatacaagcatggaagtaagctaaatttttatctccaaactttagccaatctattttactttttttctcaaaagactttcaaaaaacctattgcaatcaaccatcttttcccaagcatggtttaattcctaatgtaacaacaaaaaatgaggatcatgttgaagattattgtgagcttgattgtagtaatctcgagccatctcataataaactttgacatccctaatatgatctaaattgaattttctctgcaccccttgaagtctttttaatttaaaatacggagtagctagattacttcccttagcttatttcctccgattggagagaacaacatccttaaattcactatgtaagctccacatattggaaaacttgaaaggtaggtaaccccaattctccaatttcaaatgattaatcaatccataataatgattaaattcatcttctcactaaaaataagcctcaatatttagatgaagatctaactgttcttatttttaaaaacccaatcaatcttcgagtaaattctcacccattgttttgattattagtccaggtatcatgagtgtcactttttttcatttcatctaccagacccaaagcaagtcatttatttttctcccaaaagtttccaaagctaacagatttccctccaaaaatatccccatagctaaatactgagttgaagtcctcacaaaggatcgaaagtttaactggcatggatagaccatctagcctttgccaaagaaactctctctgtctgcatattacttccatagactgttattaggcaaaaagaatcaattaaccctatcattttaactttactatgaacaaactgagagttctcttctaaaatttccaaaaacaaatttattaagccaaaaaatcaaaattctgcttcctattattgagcttatgtagtaattctatcatcaaaagaatgagctcaatatttcttctacattatctcctcttacttttgtttccaaaattgcatcaattcccaccttatttttatttattaactccctaaccttttcttgcttttcttttttccgattaaagcccctaatgttctagcttggaatgttgaaattctccatggttattgtgagtcatagttccttcttacagcacactgaacttattgttgtattgcttagccaacattttttggattttgccacattttctttttagaattttcttttgttttttttgttttcctcttttataccatcttcctgttgcgtattttcagctactggtatggtattatctacctgttgaggagcaggagtaacttccttctcttccaagactagcattgaagaactttccctttcctcaacaacttttggagctacaattgtatgcttgtcaaatacttgagtag

SEQ ID NO: 72326 - DNA, 1564 bp, Cannabis sativa
  modified_base (28)..(31): a, c, t, g, unknown or other
  modified_base (396)..(402): a, c, t, g, unknown or other
  modified_base (1493)..(1499): a, c, t, g, unknown or other
  modified_base (1537)..(1537): a, c, t, g, unknown or other
tagggttcacgagagagagagagagagnnnnagagagagagagagagagcttttcaaatttcttatttttggaaaatggataaaatgagataagagaatggttttatcaaaaccatttcagctaaataaactttaagaaaatcagattactcatcaacataaagtccactaaaggacaaaaatataaatggacaaaaagaccattttgcccttccacactaaaagtcataaaatggcacttaggggtattttgggaaattttaaaatcccgactattcccgacattcttaatgtctaaactattgtcctgatatactaaaaatactaagatgtgattctaatagccatacaccgcgttccaatgttaccgtgcacaaaatatgcaaaattatgaannnnnnntatgtgacataaaaatgcattctgaattcaaataattgatcataaataattaattcaatattaataattaattttcataataaagccctaattatatgctaatatccaaattaaagctacgcggtctttacattgttcatagcaaatctgttatctaacaatcctcctactaagacgatgtaccaagttttcattttcaggaactgtggtaaccactgtcggtcattcaactaatggtgctgaaattgttggttcataaatttcatttatgatttcttcgataaccacttgactctgtggctgtcaggctaattttagtctaagttttgggtagtatttttgggtagtttttgacttttgtttctagttttagggctattttacgcttgattcttttgtattaggtccccggatgtttaaaggaagtattcacaacaatagatgataagagatgaaaaagttaaggaaaaaaatgtacaaagctattttctgccaaagcccgtcgcgccgggcagaatccttcgccgcaacggagaaaaagcttcgccacaacaggacttggcagaaagctttccaagttgagaatgctccagccgtcatgacgaggaataagcttcgccgcaacgaagccttcttgacgacaaaaatgggcagtttcataatttcttttaaagagaaaacttggctcattcaaaagggaactcgtgattttttatcattattaagaattggagccctagaaacaaaggaggagactagaagagcggcttgtggcgatccggatcgatctttccaaccagatctttcttctctctttaatttttcaatgctaattcctgtgtcaattttaattatggatttgattatggatgttatgcactaaactcctatttggggagaggatgaatgttgattgatattatttttagttaatgataattgctacttctcctttcttaattgtgaatttttccatatttgtgtttaattacatgtttaagattgagcaacttttccatgctttatgatcccaattaaaaatctcaaaagtaagaatggggaatggtgaaattggataaactaggttttgnnnnnnnacgaaagtatttgcatagcctttgtgacatttagattnttgcttaatgctgattatatgttagtc

SEQ ID NO: 72327 - DNA, 847 bp, Cannabis sativa
gaagttggagattgtcacctgtcattgaaacgcagagacgagtagtgtagtagtaaaagtgtgattagaatgattaaaaacgacacacaaaggatacgcaggtaattacaaaggaagaaaccatattaacggtccaattaaggcaaacaattccaaaatcaaaatagcgtattgtcctcattacgtatgccaaagcttttgaaacgttttttcttttcttcttttggttgggtttggtttgttctcatcgcactcaacctttctaatcaattaaattagaagaacaaaagaaaaaaaaaaaagaaattaaaggcttaagggacgccattcattccacaaagatgtggttttgagctcaacataagctcaaacacgtgttgttcgttttttcaatcctcagtcccaggtcagtctcattcattttccaacattaaatcccctcctccgttttctgggtcttctttttttttcttaatacccaagttcttaattttgtttctattgcaatgtaaaagggagagcttttcttgagttgcatatgtaatggtactggatttgaccacctttaatgatgctaaatctaagttttggtttttggtacaattttttattttcagggactaaatgctaatttggtctgttattttatttgtttactggtcatgaatcatgatgagatggattgttttggccaattgatatttcacactgacttgttttgggttctgattactctttctgatggttgctttagcttccaaaatatcgattactcggagattgaacaaagtttttagtacatcaaactaccagatcaattttttttcgttttccttataaaatttat

SEQ ID NO: 72328 - DNA, 1080 bp, Cannabis sativa
tctttcaaactctagttttgaggattgggaagtgagtagtgaccatatagagtctcgagagcccatggtgcagcaccaccagtaccccgatcaaatacgtggagaagggcacgggcattttaattatttgagaattgaagaaaggttggaagctggggtcactgagacactacctgaaggccgactagccctatctgctaataatactaaatcaagtacgtagtggaagaattttgtattatctgattatcattgtaccatatcccattggatctccaaatgtgcgtacattaaatcaaaataataaataataagtttcgagcatatacctcttgataactatcaatgtatctttgaaacttctcgtttgttgtatctttaatccaaataatacaatttgaactcacaccactgtcttcgaaatcgttccaccacacacaaggaatagtgtgagctattaagataaagtgtataatgtgttctttttgacttctcaacacatgagcaagaacaatttgagagagaaaactatttttttctctcttaatttcaaaaattaatgttgtaaaagtgatgttatgatttctcaaatcaaacttctatttatagtaattaaattcctttaattaaattatatttgattgtttaaataaataaatatctataaatgaatttggttactgatatttatagggagatttctcaactacttgagagaatatcttaacaaccttaaaatatctataaccactttttaaatgagatatttacctaattgaattaactaaataaataattaacctaaaaagacaaattccatagggacatcaacataagctaggcgtctactcttgtctatttaggataaaaatggtgtcttttgtcctgacaacttttgtcccaacaaatcttgtcttgacaaatttgtcttaacaatttttgtctttttcctatttaattaatttgaaatttaataatttctattttgccaattcaaaataaatttttccaaaaattattatactatactctttatcccaacccttggcagtgtttcaaggtagcgatttggggaccatg

SEQ ID NO: 72329 - DNA, 2385 bp, Cannabis sativa
  modified_base (1214)..(1221): a, c, t, g, unknown or other
tccacaaagttggcctccgaggtcaacaaagtgatatttcgggcatcattcggcagttgagcgatcctttgagctctatccctaagagctagtatgaagggttgatggtaatatatagggatctgcgggaactgagtataggtggtgcccatgccttccaccatgtaatactcatcaacaaaattcccaattttgctcacggccttgtccccggtgccagtcaactacttgaagtctggctgagaaaaatagaagtattccgacctaccttgcttgggattagacttcaagtcaagaaaccagctaacctcgttcggagaaggcgtaccccatttttgggtggcgtagaggacgaacagggcagacagatacttgatgcccttggggtaaattgggtcagacaaagacggaagaagtctgccaccttcctaaagtacgggtgcaaaggtagaattgccccttgtttggaatgagcacccgaccaggcacacatccccttcttcaggtttatggctcggtggtttgaggcaggaacataacatcctagttgacccagatagccagattggtcgaagtcacttaagcgtgtcgcagtgactttggatagagggctcacccacctggcacctaaggcatcttgcctcctgtgaggaaatgcagcagtaagctcctcggtgacgtagtccactccttcaaccaggacatcgccgtccgcatctactggctccccagcctcattgtattccctaaaatttggaggtgcagcctcctcctcttcctccgcctcggaagggctgctaggacggacatcgtcctgttcctctatctcttggacttcagcgtctccttcatgattcccctcctccttgacgggcggagccggttcggcgctgggtaaagtggtgtgctgggccacatgagggtcagacgcattgaccttatgcatcgtttgcttatttcgagccatcatcctatggctggacggaaaatttgaagtggagagcaagtcacttgaagaggacgggctggcacgaagacaaggataatccttgtacaagagttgaagtaaatcctagtcaattcggtgttcgctatcctaaaactcaccagggttcatctacaaaagacaacacgtgagatgagtgtttggtcgggatatcgaataataaacaggcaaatatgccaaccaagagtactcaacagattaaaagaannnnnnnnttcaaaaataagtcaaaacccaaaaatttgaaatttttgggtttagggccaagtttcacaaagctttgaataagcaaggtgaaaggcagacaatgtgcgataaaaggctaaacgtcatcaatcacgaagcttcacagatcattacaaagaaaatcacaaagttttaaaactagattttctacttatcctctacagcaaagtcaagaacgcatgtatggaacctagaaattaagcatgcaaaataaaagaggaaagaattgaaaacttactcgctgttcaacgtctaagtttggtccaaacgaagctgctcagatactttgggtggaaatttcacgacaaacaaagcgaaaatttccttttttgctctgagcttgccaaatacataagttggtaaaagtgaatttgtgaaggatatacaaccctatttataagcagaaaaatgaaaaagggtaatcatttcaaatgccttagatgcctcggttccccccaaaaatcaaatatcaggaattaaatgtaattaagtgtaaccgtcaaaacgtggagagagaaaactgggttttgaagcacttattgcgtcacagcactaattagccaaaaactgaagagacgtcttgtcaacctcacattgaatcgcgaacagacgcacctgacacatgtcacccatccaaaagcaaagacatctcagatgaagtctacacgcaacttcgaaagtcccgtacagacttgggggaaaatgttatctcgatttttgcactctgacatagcatcgcatgatggtgacacgtggaatcaactttatgtaccttctcacaagaaatatgccaaagtggacaccacatacattcactcggacgaagtcctctaagccgggtagtgagcgatccgcgcagcacgccaacacttagcaaatttagctttcgcatcgtgagtcaccgaagaaatccctataactttgggatcagatcacaaagatatggcaagctgtctgaatcccacgattagtgtattctgtatttactatgcaatctttccactaatatcaattgtaacaagaacggaaatactttcctcccaagcttatagccctataaatagtgattcatactcattgggcaaatggtcgaaaaacttgtctaagaatctatattcagagatattattgta

SEQ ID NO: 72330 - DNA, 1694 bp, Cannabis sativa
atctacaagttggcactacatgaactaattgatcctcgaattggtgattcatatgatactaatgaattataccgtatggctaaagttgcaagctcatgtgtacaaggaagccctgaaatgcgtccgtctataggagaggtaattatagaatatagatcattaacatgcgtatgcgtacataatattaaaaaaatttgagtttttattcatattttttttaattgattaatttttttttttttttttacttttacattatatagagtgaagttgttctatccgttgaaaaaaaatactaaaataaattctttggtaaaacaatatttaaaaaaaaaaataatttgacttaaatattttttatataaatatatttttttacgtagtgtaaaaagaattactttttgattttatgttataatgaagtagttaattaaaaatagaaatttttctcttttattatttgtcattggataaaaatctaatgttttaatatttttaaaattaatatttctagttaaatttatttagtacccatcaataggtaatacttattgagatctaaaatattaaaaataaaattttacttatttatttatttttagattggacaaatctagtctaaacaaattattagatctaaaatattagatggatatgatctgatcaaaaaatattaagtctaaaatattagatatatctgaactagtccaatagatatacatgaaatatatttagtggatagaaacggatttaatgtagcatgactaaaattaattgattcggtggatggtaaaatataacatctaatatataattgaatcaaatttgaatacacctaaaaatattaaatatggtctaatgaacatccaagtgagattgaactagaagttaaccaaacacacaaactttgcaagaccataatatacacaaccttctttatcaattcataaatagggtgattttttgatagtaggactacactggttaggatatgatttaaaaattgtagtaaaagaagaaatatagaagaataaacaagtcgtttattatctaataataaatttgaagtaagcaaattgaatgcaaaatacatgattaaatagagatttgatatgagaataagaatgcattttgagggtcattaataattgtaatttattgcaattaacaattgttcagctgaattttgtttcacaaaataattttacaatatttattcatctaactagaggtaattgagaaatgttaatgacacttttcaattctgattctgatagtcccaggagaatcagaggtaattagactacataattacacagaaatattattatttttaaataattagttattataaatgtatattttttcttgtctaattattaactcgatcttttctaacatgtaagtagtatacttgataaaagcataattatgttgggtaaaaactatattacactatttttttttgaatgcactacattactatttagtactaaattggtaattgccctatatgttattaaattacactatttagtaattacttgattggtaactacaatatctctggtaatcatcctaaggcgtgtttgaaagtactaagtaatgactaagttttgcaattatgtactaaagtagaaattaaattatactatatttttagattaaaattacatttaaatttataacattaa

SEQ ID NO: 72331 - DNA, 613 bp, Cannabis sativa
aatatttttgtttgaatatttcaacacaagttttagcctgactgattacgtttcatataatttcttattaagacttttgaggcttaattaaataaagaccatgagagatgatacaaaatgaaacttccaaagttacatgttatcttattggcaaagaaaagtgtatatatgattttattatttaaattacttggaattttttcttatgacaagaaaaaaaaaaaaactatttctattattacttaatctactagaacgaaaacatgtgtcattatttttatatacttttataataaagacaaactctgtcaacacaaatatagtttgtttgttaaatcaatttttcatttctcacaaatagtaaggactttagttctctacactaattaattttgtttaagataaaattgtagataagctttgtcctaataaaataaataaagtacacattttctgataatgttaaaaaaaatatacatgtaaatattatttttaaatacattacaatgtttctattttagttagggtaataacatttttctgataattttttacaaaattattttagactaatattaagtatatatgcctagaaaattagtatgtaaaaatt

SEQ ID NO: 72332 - DNA, 958 bp, Cannabis sativa
ggtttgtgtattgcccgctgcatcagtgagcttcttaatgcgattattggttgatctagcattagcacgctgatggaaaaactttgtattggaatcaccagattgcatccaagagattcgagctcgttggtgccaataatcctcttccttagccaacaaatcatcaagaatctgctcagaattttttagtgcagcaaaatgttgaggttcggtagatgaggagttctgaagtgctgcaacatgctcatgagattctttaatgtcccttctcaggttaccgaaattcgaatagtgccatttctgtaagctagtggcacaattggagatattggttgtgagttgaactaaagggctgctatgatcccgaatccagttggcacttattatatcagcacaagcatcttcctttaaccagattttttcaaatcgaaaacgtgatctgaactcaggaacatccacacgatccattagtgcagtaacagttgttttaagggctctatgatctgacttataaaagtccaagtgcttcaaagatggtgcaaggaaagtagcatcccaatagttattagtgaacccatagtcaagtctttctttgacattcccacttccctgatttttatttgtccaagtcgatcgttgtccctcaaaaggaatttgacacaatttacatgcatctaccacagaacgaaaggcattgatttggctgtcactcctccttggtcctccaattttgtcttcatgagagaggacctcattgaaatcccctaaaactagccaaggtgataagggtgcaatatcaaagcatctacgcaataaagtccatgttagatgtctttgagaagcacatggatgcccataaaaaccagtaaagtggaaagatggcccatcttgactttccaaaaagcaatcaatatggttaagtgagtaattgtttatggaaagagtaacatgggacttc

SEQ ID NO: 72333 - DNA, 1314 bp, Cannabis sativa
ggaaagaaaatgctagaccaaagaaagagagtaacaaaccttaatggcaaaaaattatgtaattatgtaatgagacttggtcgttaggaaaaaagaatgctatcttttttctattagatttgggattttatttttcttaccaatataaggtaaaatataataattgaaaagattattgatgaataaaaattacaactagtatgcttaggagattgactttgtctcgaagaaggcttgttctaatactggtgcttacattttttcgtccctttcaggatgaagagtgaagacattgtgcaattgtttagggaatagagcaaggagctcgagcaaaaatgagaacaaagggatttatcacaaaaggaggaactcaaagatatattggatgagcgtctttctcacctatcgcctccgccgtcgcctgaccgtggtggtgagaatagtgcagctagcgtcattgcaaaccatagactcgatccacctctaatatggataatgactatcgtgatgttatttcaatcctcaagacgttgcaagttaaggttccctattttgatggatctgaggtggaggattggatttacaagattaataatttttttgatcttcaagatgcatcttattttttggtagcccatcacattagttaagcgtgcttgacctagggtaatttcaagatgggtgacctcctgcgaagtttatccaagaagcgtgcgagtgaggacaaagcatgttagaaatactcgtgttggtttgtagggtcagtcgtcaatccaggtagcaactagagtggcgtactcgtgtataagagccatcattcagtgggtgtaaagacccaatggaggcttaaagccagaacgttacaaaataatatcaaagccttgatccaacacgaaatgtggttgacgaggacgtcagaccccgtaaggggggtgattgtgatagacagtagtcttatgatctgtaaggtgaaataccgagtaagctatgcaatcccacatcgcttggggaaggttaaatgtgatgatttggagactttgtaggtatgggactacacagttgaagaggcttaaataggttgatcggtactacctatattaacaaagtgcatcttgttttctggtaacccatcacaaaagaactctaaaagttaagcatgcttgacctgtagtaatttcaggatgggtgacctcctgagaagttttcacaggttgcgtgcaagtgaggacaaagcacactagaaatactcatgttagtttgtagggtcattctttagtttaaaaagcacccaagagtgacgtactcatgtataag

SEQ ID NO: 72334 - DNA, 931 bp, Cannabis sativa
tattttattaaaattaacacaaaagtttataaaaaaaaaaaaaaaaacgttgaacaaaagtgtttacaataaattaggaaaaaaaatttaataccatttttttttcaaaaatattggagtgattttatatattttgagatacaaatataatccattattataaataaaaataataaaatgtggtgaattgatattctttggagtgcaaataaaatttactaaaactttgaaagaaaatatcatctctgtccctacatatatataataaatatattttatctcttggtgacatgcaaagaaagtggggttagtgtcaaatgacttggaatcaatttatatgtaactaataatctaagctagaaataaaattcagttagttaagtgaaagtgattatcagccagccacccacttccccagaaattatatcccttgttcagtttttggtttgtttttccatccatttttgaccataagtacacacaattgtaatttgtgataaaaacacgtttgaattgacttgtaaaacatatatacatatctaaaatattcttacataaattcgattattatatctcagtcttcaacacaagtccagtcaaataaagaaatctatagcaataccataacaactaaagccaccaactaaaaggtattatatgattaaaatatcatattcccaaaaccataggatatataagagaggctactcctccatccaaaacccaaatcattactcatactactcgacctttcagtactataattgacccacatttaatattataattcttaattatcatctaatttttaaacgctacagacatgtctcctcaactcaacaccactgaattttcggttgtgaaggaggaagttgagcttgtgaaaccatctaaagccacacttttggatgttctgtctttgtccactctt

SEQ ID NO: 72335 - DNA, 530 bp, Cannabis sativa
aaagaacaagagaggaaagcacaaagctgatcgaggcaccagctctggtttaggagttcgccagagaagaaaacaaaaaaacacgacgaacatgtcgaagaagaatcaagatctggagaaagtttttctttcgcgctctgataccatagtatggattagaaagaagacgagagaaacattttattgagtaaattgaatgaatgaaattacatgaataaaaaacagaataaaaccagcttatattctatatataggttgtgaccaaagatcaattaaactgacttaattaactaattagtcttaattaatgaattagttaataacaagaataaggtgacaaaactaacattataactgtaactactttctgacagtagggacaaatatagtaacggaaataatataaccaattcttgttaattaagtaataaaatgttgttggaaagcaattgctttatgtactgtaattactaataacattagacacaccaaagaagagagtactaataaaactagcattaatgcatctg

SEQ ID NO: 72336 - DNA, 852 bp, Cannabis sativa
tagggcataaaactcaacacttactaattcatggcacctatgagtcaaggattttgttccttgtactgaaacatatttcatttgtcctcagtttttcttgtattgttcacatcgggcaagaaaagatgggctagtaaaaaattcacactgcctttgccattgttctggagttatagtaattggatgatttttagcacttcctcgtaatcctcaggttttgaataaaaatatttaaaatgcttgtgtcaactagttttctttattctatatctattagcacacttggtatcgaaacatctcaaaattttatcagcataaggattcttgtcaatttgatagtaaaactacataaaaaaatgttaagtatattaacaaatatatctatagcaaggataaatttttttgaattatttactcaaactcttgcaagcacttgatccttgtactgttgggccactgcattctaatctttgtaatgtgtaggacacatagcagcaatgtaattgctcagaatgcgtgtgaaagctgaatgctctacttccactatcttctgtcaaattggatagtagagtaattgcaatggctcttttgcatcactccttcttttctttaattcttcacgaatagatggatcatgatcctttgttcgggtatcttatgttttgaataagaagaagaaaactataatcaacatatatatcttttttttcaaaaatatttgtataaaatataaattaccagagtcgtcttcatacgtagcaagaatcctagaggatcagggggatcttcctccgtcaccatctcctccatggtaagaagctacatctactgacatattgaaactaaatacaa

SEQ ID NO: 72337 - DNA, 903 bp, Cannabis sativa
attttattaattttttaaggttttaatttttttaatattaatattatcttatgttatatatatttgaaatgaataaatatattaaaaattaaaaaaaaaaaaaagttttagtaatgtattttaaaaaattatgtatgatataatgtgaaaatttcaggtaaaatagaaaaaataaagtcttaataacatattttgaagaatagagtataaaagttggtgagagtgttgtgctctaccagttagtgattaaatttactcaaaacttttttaattagataattttttcttgaaaaaaaaaaagaaaaatacatattgtcaaaatttcatgataattgcttacaaagtcgagttgggttgggaaacaaactgaaatacatatttaaatttaatgatgggcaataaccatccaataaagaatgttaagccatagattaatgtatggttagagaatgtatgtttttctgatatgatatattattattgagtattgttataaggtaccattataaagtgagggcgggcccaagcatggccagcttgggctattgcacaagactctaatttttttaaggccaatttatttttaaagaaaagacttattttttttttctattatatatacataaataaaacatttataattaaaaatttatgaatgaatttttttttaaaaaaaatagtaatagaattgtaattttaatgtacacggttttatttttttttaaagagtctaattttaaaattttacacaagaccccaaaatacttaggccggccctgtataaagttacactctttattggtagacttaggatgtcactcaaagaaagatgaaataaaatattgaaacaatataatatataaatgtaattatatatatttatttagaaaaggtagatactta

SEQ ID NO: 72338 - DNA, 657 bp, Cannabis sativa
gagagagagagagagagaggatccaagttgggattttttaggtcatggggtttgattccgaggtcgatctagcctagggctggtcggagaaccgttgagaatgaagttagatagaaagaacaactctgagaccaataaaggtttgaggagggggagatcaatacttcgactccgtttgaatcaatgaaagaagctataagtcgttttggtagaattggttaatggaaaccctctcattcttctaagctctttcaacaacatcatgagtgagtgagtgggacagtgcggttaagtgagaagaaagaattagggtttctaatttttagagttttgccactaaaaaaatagaatttaagggttaactgcaactaaaataaaaatttaaaaatttttgccgcaatttgaaggtactaactataaaataaccatagttatggaacttttaacttttattcaattgattgtgcttaggagacagaaagctatgatataatcttcccctttatatatctcactctcgtataacaaacttatatgtatatatatgcattttaaactatgtctctacactttaatgcaatgaacaatcttatatactaagctacctacaagcaaattcttttaacaaaatttcatttcttttgttaaacaaggtta

SEQ ID NO: 72339 - DNA, 622 bp, Cannabis sativa
agccttttttcaaatttttacaaaattatatagattatttgaatatttaaaatactatttataaatttctgataggtaaaatgatatttggcctggaatatttattaagaattatgatgaaagtggggaatagagaaggcttcaaattccataaaaagtgtagagatttttgaagttgaatcacctttgttttgtgaatgatgtcttacttttttgacacggtgacttcaagtctatcctataaggtttgaagttattttcttagacttcaaaattacatacaagtgaaacaaaatctgcaatttaatgttgtggtgtgactcagaataaggttcaaagagttctcgatgcttcaggctttgtttgaagtatcatgcctttcaaatatttgggtgtcttgatttgtgcaacatgtatttcagcttgattgtacaagtattattgagaaaatgatgtctcgtattagaacatggagttctcaaaatctctcctatgttgggggagttacattaattaattctattctaatttcgattcatacttattgagctcatatcatgttggttccaaaaagtatcttgaaagaaattaatgctatttgtagagcattcttatggaaaag

SEQ ID NO: 72340 - DNA, 565 bp, Cannabis sativa
ttcaagctcaacctaataacaaatttgttattgctcaacttgatgttcatggaactggttctataggtactttcaaatttttatagatgcaaccattgaccttaatcgaaaaaaatacagtattggcattgttgtattggatgggttcaatcaggttaagcagggttctccaagtctattgttggatgtgttcctcctgcagtgatagaagctaaggctatcttacaagccatccaatgggctcaaatgcttcaccttcctgtagatgttcttaaaactgaatgtaaatttattgttgataaacttgtttcttgtaattggggcagtagtctcttggatgacattctggttagtattaagaacttgttatcgttcagtccaaatcttactttggtctatgttaatagagagtctaataagttggctcatagctagggttgctaagttagatcttggactagataatgagtttgtttgaaatggttctctaccttccgttataaacttgcgtgctttgtattctatgttttatctaatgaagtacacaagtttttttttttttttt

SEQ ID NO: 72341 - DNA, 1327 bp, Cannabis sativa
aaaagttccatataccttaagtattattattataaatattaaatttcggtactctaaatttactattattaattatttgaaatgacattacagaaaaaacaaactatttgaaatgacaagttatagcttttgccagcccttgaatctgtcttttggtcatatcattatactgtatcattttaaatgacacatcgattgtttacgatctaaatctttctaaaaaaacataaaaaatggaggtgtgttatataatcttttaaccaatctgtgctcaaaaaatagaggagtgctacattaatctcttagtcaatgttaacggtctaaatctactgttaatatttcattataatttcttagttaatttttgtacttaaaattttttaatcaactttcctacctgaaaaatacatgcgcgcctaaatgtttttatattattttattaaattaaattgtgtcacctcacattaaattaaactaattagaacatcttcaaaggaacttgctcaataagatcaatgctaagtttctttaaaagtagtcaaaaaaatttcacatttgtaacaactttcattctaaaatactcaaatgctaccaaaaattattattcaatatattatttattttaattttctaaatattaaaaaaaaaaaaaactcactacggtaattaatttgaatgtttattccaatactaaaacaccttgcaaacgtggttctttgtctaagagcatcttcaatacgggacatttatagttattaaaatatataaatcattctaaaatattttttctctctcatctacatgagatttgtcacatttttttttttaaataatctaataatttacaactctaaaagttatccaccatggtctcaaatcacattaaattaaaaaaaaattaggtaaaaaattattttcttctaataaaaaaatatcatgtggccattgtctatattgagcaacattttacataaaattggtcttaaaaattggaccacattacatatgtgacaagaccacttcaagtcactactacaaaaatagtttttctcgacgtttttaaatagtcgtttaaagtattcacgtcggtttctattactgtcgcctatacgaaataggcaaaataggcgacggtctaatgtggacttcccgacggtttgaatgtaataaaaaaagaagaaaatacagatttttctgccattaatggcagaaaatctgcattttccctcattttttcctgcattagttttataattttacttaaattaaaataaaacaactaattaattttgttacaataacaactaactttaaaacacattaaatt

SEQ ID NO: 72342 - DNA, 1673 bp, Cannabis sativa
tacttggctttatcctctcaaagccaagtctgatgctcttggagcattcattcagtttaagacaatggttgaaaaccaatttgactgtaaaattaagaagctacaaaccgattggggggagagtaccaagcctttagcaatcttgtcattgagaatggaattctctttcagcactcttgtcctcatacttccgaacaaaatggtcgtgctgaacgaaagcacagacacattgtcgaaatgggtttgacccttcttgctcaagcccatatgcctctaaggtattgggttgatgcttttcaaacatcagtctatttaatcaataggctccctacacctgtgcttaaggggaagtctcccattgagtttttgcttaggaggaaactggaatataagttcttaaaaagattcgactcagcatgttatccatgtcttcattcctatcaaactcacaagtttcagtttcactcaactgtgtcaacttaggatatagtgagtttcataaagggtataaatgcctaagttccaatgggagactctatatttcaaggcatgtcgtgtttaatgaaaaggaatttccattcgaaaatggtttcctaagcaatttcaaaaaggattctgaagttaatcattcacttcccagtacctggtttcaacttcccttccaacaaacaacttttcacgagccaaacaatgctccagccgtgccttcaaactctgaaattcatgctaatacaaacaggtctgagcaaagcaacagcacatcgccatccttgaggctggaccaatccatgaattaggtaaatctctataataatccttttgtcgagttgaacattgatcgatcagatacaatagatgctgatatgacagtagcacatgatgccttgattactacacaacaagataatgtcactactgccactactcagccgtgccatccactgataaccagatcgaaggttggcacctttaaaccgaagacttacatagctcaaaccagatggcagggtgatataaccgaaccacttactgttcaagaagctttggctctagaggggtggaataaagcaatgacagagaagaatatttccttaatcaaaaataaaacctggtagctggtgccgagattgaaagacatgtatattgttggtaacaagtgggtgtacaagataaagtacaatgctgatggatcagttcaaaggctcaaagctcgtttagttgcaaagggcttccaccaaagaccaggaatcgatttcagagaaacgttcagtccggttgtcaaagtatcaacaattagagtggttcttaccatagcagttgcaaatgcatgggatgttagacaactttacataaacaacacattcttgaatggtgaactagaagagtcggtgtatatggaacaaccccaaggcttcgaagacaaagaaaaattggattatgtctgtaagttggaaaaatcgctctatggtttaaagcaggccccacgagcatggtatgacaagctgaaaaagactcttctaaatggaattttgaaaattcaagggctaatacttctctctttctactgaaaacacccaagtatgtcattatggtgctcatttatgtggatgacattgtcatcacaggaaatgacacaaatgaactaaattggttcatacagaatcttcacaaga

SEQ ID NO: 72343 - DNA, 995 bp, Cannabis sativa
aaaaaaaaaaaaaaaactaactagctaccacataaattactaatactacttcatataataataataatattatcacatcttacaactgtaatataccaatataaaatttaaaatataatatatttacttaacaatttgtatgataatattagaaaactattattgttagtattttccaaaatctaatatatataaatccgatattaatttgtataaagaataataaatgatatggtatatatttctagttaattatgtgtgtaatgatgttttacctgagaaagcagccatcgtatatgatacgagcaccattggcagcagagcaattgcgaatttgtttctccgcagctgcaaagcaagcagcgcagtcggcactcgagaggtagttcctgcactgtgccatggcatagacagggtctgatccccgtgcctgctgcgccgttgcaaaccacttatctccctctcgaatctgagccccgagatcggagagagtggtgttgagattggagaaaaaatcagcaaagtctgttgcattgtacgggctgcatgcttctttcaacagcttggtttgtgggcttgctcttagtgcctgcagccatagccaccacccaataattattattactagttttgaagccatcttttatgagttgaataatagttgttgatcttttatatatatatagagacacaaatatattattttaataaaaacttgtccaccaatgagagaagggcgtcggtgtgattagtgctggtcttatataccaataatgaggatatatatgcaattaactaataatacaattgaaatttgatttgtcacaacccgagcgttaacctgtgacacacatgtattatccataagtggtcacaatttgaaccttttgaaaagtaatacttacaagtgagataattgttaaagtcttgcaatcaacatcaaactaagaaaactctcacatatgggagcaaataccagctgtggaactttctat

SEQ ID NO: 72344 - DNA, 669 bp, Cannabis sativa
  modified_base (63)..(63): a, c, t, g, unknown or other
aatttttcaaaaatttgtaggatgtcttaaataactataacatatatgaccatgagaaaaaanttgactaaaaaattatttcagatgctaaaacagatatgagtacatcgatatattcattttaagagggtccattacctttgaatttattgcaaagtccatgcaagttgtttatagtatattttgtaatatgtatataatatatatactagaatccctattttagaatatatttgagactaaataaaatattttctaattgaaaggttgtagctaaatgtaggcacctcaaaaaaaaaaaaaaaatcaaaagcacactaaaatatttaaataaatgtaacaacaataaataatctttaatactatatcatcataaattatttgatcaaatacaatatttatgcatatatattataatttggaataaaattattaatattaggtcaatgaataaactatatatattttattaaaatatatatatttatgtataaataaagtcctttttttaggggtgtttggataaacaataaaaaattattttttaatttaaaagttttttagctttttttaaaataacttttgagaagttatttacttatacttttacttttagacagtagaagaagagaagtaaaagtttaagcttttcatttagtgtttggattt

SEQ ID NO: 72345 - DNA, 786 bp, Cannabis sativa
ttgtttttgggttttttttttttttttgttgcattggcttattggttttattgacttgattttagcggcggaggctcaaagaagcttgaaattgtggttttccactgagtcatctgaccaaaatgagggtgagaagaagaatgttgtagttgaagagaaccatgaagacttacttggtgacagatcagaagctgcaatgcagccccagggagtgaatcctggtaaaggttggctttaccgcggtgtacataaggtatttgataagagttttcaattatactttatgaaagtgtgatattgagttttgtgtttttgtagttgggtcttgattggatccatatgatataacaaaaaaaaaaaagtgatttaattgctgtagaatgtgtaatcaatccattgaatgattgctatgcttcattattttttctttctctaaagtctaaacaatgacattttctttcatgggttttgcttagttgtgttctcggtcaaatttgtctggcaagaactttttttatttaagaaccattttttcacttagacatttgaggaataatttaattattgcattgtaatgcaggcaataatttgtggaaaagttgggcaagctcctgtgcagaagatattgcgaaatggcaggactataaccatctttaccgttgggacaggaggcatgtttgatcagagaacaagtctggaaaagggcttgccaagacctgcacaatggcaccgaattgccgtgcacaatgatccactcggaacttatgctgttcaaaagattgttaa

SEQ ID NO: 72346 - DNA, 1916 bp, Cannabis sativa
acctcctcagccagtgcatgaagcatcaatgaataccacatatggttcctcactgttaggaacagtgagaacagactctgaagttaatctttccttcaattctctgaaagcttcttcacaactatcatgccacacaaactttaattcctttcttgttaacattgtcaaaggcatagcaatctcagagaaattttccacaaagcgacgatagtagcctgctaacccaagaaaacttcaaacttcagtgacattctttagtctttctactactacaatttggtctttcagtgacactatttagtgacccgcattatagtacgggtcactaaagagttaggattcatttttagtgacatgcacaaatagactctaaatattcagtgttagtgacctgtaatgtgggtcactaaaaatttggagtgtcactaaaaagtaaatcccataattttttaatttttattaatttgaaaaatattagcctatagtgacacaccagacgtgactggataaatatatcccaactcatatggtgcgtcactatatagtaactaaattaaaaaataaataaaaaatacaattataattaatactattttaataaataaataaaaataaaagatataataataagtaaatcttttacatcacttaaaacaaaaaacaattacaatttgtttcaaagaaaaaagcaactccacttaaaaaaacaaaaagcaattaattagtgagcctaagagacgcacaccagcccattctaaaaaacaggagttatcttttttttctttcgcctctctcctccttatttcttctcagagccgcacactagctcattccaaaaaaaaaaaaaaaaaagaaaattgttggatccagccaatgatttactcctgccaccttcttccccaaccacaattgcaagggaacgtcagagagatcgacgttaaagatgagatcaatgttcgctcacggcaagggaacgtcaaagctcttcaaggctctcttggtcgactacggcgaagagatcaacccaggcaatggctgggtcttcggcgatcgacagcttcaacgaagctggaatccaagatctttgccccaaaaatattcaggtacccacttcctcttcttcatcttcttttcttaatcctgctcaactttcatattttttttttctcatctttctttttatttctgtgtatagatctctgctatatggtgttctctctctttctctcttgttgaatttctctacagacgatggcgaatctcgggatctgtatcgattgggctcaaaaatggccaggcttgagtcagttctacagttgcagtttgttagggacagagatcagaacttgaatcattgtgactaagttattttttctaattttttttattcaaacgctcataaccgtaattatgggtttacattgatcttgtattttcttttaaacaattatatattctttttgttgttggaaatattttactaaaatttattttggatttctattttcgtttgttcatttggtataaaaaccttttgagtattttatgtaagtatataggaatttgattagttattacaacattgatatccataaaaattactttaagttttattttaaaaaaaaaaactggtatcatttttaataaaatgaaatttggtatcaatccaatccacacctgtttacaataaaattaaattaaataatatataaaattagcaattatacatatatatatatttaattattgttttaaaaaataatataaattattatttataatatataatatataaaattaaaattaaaataattaaatattattttttagaaaaatattttatatagtgaccctttttgtgggtcactatacctttaaatattaataaaaaaaaaaggatatagtgacactctatg

SEQ ID NO: 72347 - DNA, 1057 bp, Cannabis sativa
catctgaataaatagaagacatgtctctaattctatccaaaatagaatagataacacagttaagaactttcttcagttgtatagcttttctagtgtttttcgaaaacaaagttatttagcttcactggtggagcttatattattatagatgaatttttacatccttctagaatacttcctccaccccagagtaaccaccattactaataggttatgaggttgtgtagataaaaggattttaatatgcaccccaatcatctaacatataggtcactctcagagatcttccttgattatttcctaaacactactgatatcttctaacatttttcttaaaaaagtaaaaagataggctacttcaatggaacttttttatttttcagtaattatgtttttagttaattattgtgcatagaaaagtagaggaagaatattctatccaagggaggggccggagaggtcagtcaaagttgacccattggaaaataaacctgtaaatacaaatgaaggtttagtaaattcttgtaagagaagaaaacttgagcagcaaggaattctttatattgcataatggatatgaaatgggtcaaagtgtgttgtatgttgtgacgtggtgcctgacatataacatattcaacatgctagagctatagctatactctctctctctctatatatatatatatggataagcatgagcggaagctactgacaaacttccttttttctttaacaaaaaataaaaataaaaaactagtgcacatcaaactgatacaccctttaatgttatagtatttaggaaaaatttaaattatcaaataaaagtacatgattgtttcaaaaacaaataaataaaagtaagtatctctatatatatatatatggtaatattttagtagcatctagcaaaagtttactattaataggaaatttcttttttttaccgttaattttagatcttgtaattattatgatgtaaggtatatatccttactatagggctgcttatatacaattaaaactttatacatattaaaataatatttgataatatata

SEQ ID NO: 72348 - DNA, 1046 bp, Cannabis sativa
  modified_base (426)..(433): a, c, t, g, unknown or other
taaaataatttccaacattcacaaggggaaggtcccaaaatcataatctcacactaagagcacatagctaaatattctccataaaatgttgagagttgtagcttgaatttactttgtcttccatagtgatctacatgatattatctcataattaatataactaaaaaaggagtaggtcattacccaaatctaagggggtcaaacctctataattctatgtattctttctatttatttattattcatatctctttattggtgattaccgagagtttattagactccgagttagtgggtaatttttccagtcaataataggtaatttgaccaatactaaccacaaaccggcacaaggagggataatcactagaattgattatatcaatggacactatagtaaaattcagtaaatataattctataatnnnnnnnngttcaattccatatttatagtggagttatctgggaattaatgaataggattatttggttgatgagattcaataaataatctagtttattggagcttagtattatagatccacgtgccccatattgcaacctttacccactataaagggaatggataaagttgtataataatgttggaaaaatctattttgatttgttaacatagtaattatttattttgtaataaataatttatttttcaaatttattaattaaatcaattggaaaaaagataaaaattatatggaaaaaaacaccaccattggcgccactatcattatgttaggacacaatgataggtgcctatggataggatttttacccactagatttgttgttggattaattaatttattcaaaagataaatatttatttgaatttaaatttgaattgaaaaagttgatacaaatatttatagtggttgagatatttcgttaaagtagtggagagattctcttcaggtagttgagatattgtcttaagtggttgagagattttctcaatcggttactagatatttaattcaaacttaaatatctaattcaaaataaatatttgttggaaatttatttta

SEQ ID NO: 72349 - DNA, 1523 bp, Cannabis sativa
acctccaaccaaacgtcacctaagggtttaaacaaccaaatgctataaaaactgataatagaagggaaaccaaatgccaaaataataaaatcaagaaacatgtcatattcccatccctattataagaatattttccaagttttcagaaaaaataaatcaaatttcaaagtttggagaaagaacatatgttcaaatgaaacaactaaatttagaatggataatttctatggcctgtgacataacaaatactcaaataacttatcaactacaagaattcaattcagactcaaacctcattggccttttttcttggttcctttggagcctgtgatgaaatggatctaacaagggaacaagtcctagtgtttgcacaataatttttcatgagttgtgaatgcgaccacggacgaactgtacattctcttgaatactgcctttgatgaagaagagtaaattctgttaaaaacattgttgccaagaaaaacaaaatcattgtccctctttatctttggtattagaaacaagtgaattgatctggcaacaagctcataacccgaaatacataatcgagtgcctgaaattgcccaacaactcattctcatccactatttagcttcctcaataacacaattcttctaatcaacacatagtaatcaactaacacaacaaaagtagtagcaaattcgaattcactaaccgttatttctaagtagaacctgcataatgaaattaacaaaaaaaaaacattcagtttgattttaaccaatagaagaaactaaagtaaggagcaaaaacccacaaacctcacctttgtgatatcattcttatttacattaaaatgtgtttttgagcttgaatttatcacacccataagctgcattattcaacagtaaatttgtattgaataaatagcaattcaatatatatatatataataagccaaaaaaaatggtactttatctggcttgatgtcggttgagtggaaagcatggtactcccgccatctctgtctcagtactttcctcaaaacatcagtctccttctttctccataactccatagctgatttgcatgaacctaatatccctcaaatcccagaaataagtatattttttttccagaaaacagtatatgaatttgaatttgttagttcaaaagcattgaatttgaagaagctattggtcacttacccatggtggcttggaaatttcggttcggttgatcacaaatggtggtggtgtttcgaaaccctaagccctaactctgttgagcgactcgagagaagaaggaggaccgagtaaagccctgatcggagccccgactcgtttcgttggactcgataagaaacccgatttgaattgggctcggattcaattaggcccacttatttttcactctttattggtctcagacttaacacattagggccaagattttgaggaaattacactctatactctttttatattgttctcttttatttttaccttcttttttaaaatttatcatttttacctcttttt

SEQ ID NO: 72350 - DNA, 866 bp, Cannabis sativa
aaagaactttcttgcacgacgtttttcgaataaacccatcaatggagatttcagagcttcaacatcagtggctggaactttatatatctaattaacaaaaaaagaaatttattgttatatttttataaaatgaagaaacaaaaaatcaaattttattacatttttatatttttttttttttttttttaatctatcttatacatattaaataaatttactttatcaggtaaaggaaagaaaatatagaaaagagtgaaaagactaaaaaatgtatttcctttttagttgtttggttagtaggaaggaaagaaaattaaattgttataaaattactatattacccttaaattattagcatatttatttattttttcacaaaaataaattaataattttacattaatattttgtaaaacttttctctccaatttggaggataaaacttttagtgcatcccacctcaaatttttctatctacttctattttcttcacaattttctttctaaccaaacaaacatttttttttacttctttccttccaaacatttctttccactccattttctcctctatcaaacataggtaagagatattaaaatagtttacattttgaaggttatagtatacctttcctttgttgtagacaaaactaccatctacagccttgaaatttaagtacttggtgacatttgtgtggataagaacacgaaccaaagcaccatttgccatcatgaactacataagaataaaaatatataatagtagaataaaccattctaatatagccaatactataatatgttttcattcaattacaatactataatatatatagatatgcatataccttgggtatcatatcaac

SEQ ID NO: 72351 - DNA, 1023 bp, Cannabis sativa
  modified_base (789)..(789): a, c, t, g, unknown or other
aatacaaacttttaaaactagtatcaacattcattaaactctctctctctctctctcgcgctctctctctctctctctctctctctctctatggaggaagtgaaagaagtgtgcaccagtgacgaaaaccccactaaaactattaaagtgggaaagaatctgccctcggctgtaagagagaaaattgtctctacaataaaaaagaaatgtgataaactagcctggagccaatcttacatgactgaaatcaacccacatgtgatttttcatgctctaaacccagaacctgctgtggaactagttcatcaaaagtggcgacgattagaaccaataagatctaaagcagtgaaggcgaaagtagacaagcagactaatatagagtttctccgcgaagctttatatccagtatggttagccaatccagtattgatcctaaaacctaatggaacctggagaatgtgtatggaattcactaatgtaaacaaagcttatccaaatgactgttatttacttccacgattagctcaaatggctgatgttacttcaggatatgaacttttgagctttatgggcctactcccgttgtaaccagatcaaaatgcatgtggctgaccaggaggacactagttttcaaactgataaaggaatctattgctacacggttatgccatttggtttgaaaaatatcatagccacatttaatgccttgttaacaaaatgtttaaacaagttctagagaagaatatggaagtctatgttggtgagattgttggaattttatgccctaantaaaactcatttcaatataatcttatttactaccaatagaaaattagaagtcatttaagttacatgttattttcatgcttatggtttaatatataatttttgataaatctaaaatatatgttattcacaattacattgaaatcattacagtggaaggtaattgtgattatatgcttcaaaagtgttgtcccataatttattagtgcatgcactggatttacattgacgtgataa

SEQ ID NO: 72352 - DNA, 914 bp, Cannabis sativa
gtagcaacaagaatctgcaaataataagtatgtaatgtgcaccattaaatctgcttgaaacaaacattgccattgttattttagtggcttcacagatatttaaaattcaacccaaacacatccattgttaagttgaccaacaattttacaatttgaggtgaaaagaagaaatggaacagctggaacgtgacttcgcaaaccaaaagtttcgtaacagcatacaatgcattattcacacgctttaatgtttgatagtgaaaaaaaaaacattaactttgaactagtgttttgctgtgaagataggacaaacctgacaagggtttgcttgcatgcgcttctgttccagagcaagtcttgtacctcctattacaacttgtacaccaatagaaggatgatacttcaacaatgtattggcttctgcagcagcttgacatgccagctctctggtggggcatattacaagcacaaaaattggggggatcttttggtcacggccaataggagttgactttacaacaacttcaatcgatggaagctgagagagtaagcagagaagaagaaaataagatacttcatgattagtagactgataacttggatatacccaaaaaaaaaaatcaaaaaacatacagaaagcaaaatccaggtaaacttataggacattttctgattttcacataattgataagtacaaataagagaaagtgtgagagccaaggaattaaaagacttttttcatgttttaagtttcttctaaatttttcatgactttttttattttcattttagaacaaaatgatatagaaagtttaggattgattcaagatgtcaaagactcaaagatagaaattgttgtggagcaagttctagtaataacacccaaatttcattcactgagttttgcatatgaagca

SEQ ID NO: 72353 - DNA, 1469 bp, Cannabis sativa
tgctaaaattaacttaaaattaatactaaaaataacctaacacatgtagcaatgtaatttacaacaattacaaatatttattttctacttataattttggcaatgtctatcgaaattatttcgatatgtgtcgatagttttagaaataatatttggcgaagtagagaatgaaatttattagcttgtagcgatttgttgtgacgcagttgtcgacattgttcatgacatgttgtgacatctcttgcgatatatctcgacaaataatttttttccatttttattttgcgaattcaactgtatttgaggttgtactgtatgatggggcttgggcagttggaggtttcaactggatattttgttgttcgcgtttctagcaagggacacgtggactccaggtcagcatccaaagcccactagtaggcccaaaaaagataacttgagccaagcttaagtccaataaggccttcgggaaggtatcttccctcctcgattcacgtgagctttcgccaaggactgtccgtacctggaagcaattctactgtgctcctagaagactagataacgtgttccttgaagacaagaatagttttcctttttttcaaattgcacaaaataagagattaactttccttatttttcagccaaaatatcatttcaaatataaaaggaaaactacccaaaatgaaagtcaagtaattaatttacaattaattaccaacaattatagggcacggtaatgacaacctggtcgtggttaatttgcttagtcagcatgtctatcctctcatggactaggcctcacgaatacaaccctagtttatgtattgatcatgtaaactccccattagaggaaaaaggaaaaccaagtataatttctgtaaatactataaatacccaacaaatccttcggcttaggagttgaattctcttgcaatattttcccaggcaaaaggagagaacaaatactcattgtatttcctaaaggcctttctagctaaaatatataataacatcgactcgtggactaacacttattagcgccccaaccacgtaaaatccatgtgtttgttatatttctttctttgaattatttattttttcagttctaatttcttataattggttttctaaaaagcttggtaaatattttggtactttcattgagagctaaaggatgtaatgataccatctaaagatttcattcagtaatcatggtacttagccgaactaaattttgccttcattatgctaatcataatgctaaggtaagagatacagaagattcgaatgaggtgaacagtcgccacaaggaccaacatggtaaataccagaatcttaatgatcccataatcgaagaattaggagagattagttctgatgatgttgaagattatcctcaggacacaccaaaagacgttcacccagatacgcctgacgatgatggaaaaaagaaggacaatctagacgag

SEQ ID NO: 72354 - DNA, 761 bp, Cannabis sativa
tttagcaattgaattggtttatgtatgctaaaggtgaaatgtggaaagttgtttataaaattctagaacttgcttgctatttgagacgaaataataaatgatgcatggttaggaaagtgatttaggcattctttggatcgattaagtctttcaaaccatccttgtaatttttatcttagttaccattttttgagttttaacttgattctttgtttctatacattttgagccaaaacaacataaaaccattattatccaaagttgaccctaattatactataaatggatcttaagtttgggaaaactttaatggaaagttttatatatatgtgtgtgggaaataagagtgaaattgaaagatgtgaaaaatcgattggcaacaacttaaaaaatctgacaataaagagtcaaattcgaaaagaaaaagaataataaagttgttgcaatgttgaagaaaaaaaaatctcacgtgtaatttgaaaaaaaaaaaaaaaaagggataccgagattgtttgtgaaaaaaattattgggtgatctggttagagaagcttatggtataggcaagcttaaatgactattccatctacctgtacctaagcctatcattacaagcctaaaaagactttttgattcttgattatgcatatatttatattagtagagaataatgaatattgcaagcttatggaatatattaagttagtggatcgatagttgtatttggcatgcataaattgctagagtgtgattatggtttcat

SEQ ID NO: 72355 - DNA, 1190 bp, Cannabis sativa
tttatattattttataaattattccaataaaaaatatagatattctttttaaaagataaaaaatattatacaatttagctacagcctaaaaacttggaaaataattaacttctccttgagattaattctctctcagtttattcaaaaaaaaattctcaatttatttaccgatgcattgagtattaaatctccataacttttaattttctttgtaaatagataaatcttaaattgtgagtattatgaattttttaaattggtattttaggtttttgtaattattttttgaggatatgcaattgatgttttctggcgcaatgtatttgaagcatcgatcgttgacgtcaactggtcttgacccatttcatgggtgtgatgttttctgtctcatcaaaacttattctttaccctttcttatttttctatattaattatttttttttctgttcatactgccctggcttcgacttttctggtgattgtttatgagctctcattgtttctagagtttaatgtatacctcttttcatcatttaatgccttttttgtagtctaagtttggattttttgatctaggttcttattacctgtcattaatatgctaattagtgacccttttaatcgttctcatgatttctatcatagagtcgatcgaccattatctgggttaaaacccaaaaatcctaatcacggattactcttcgattgttgaaattcctctcttcatcatttttcatcattttgtctattatgttttttgtttttataattagtttattataaaatatcgtaagcaaatgattagatatatgtattttgatttttttcttatggatttgtttgttttctctgttcattcattgtggtttcttgatgcggtcatactcttcgtacctgttcaagtctccatcgttcttcagcttttttttttttttttttaattttttttacacatgtagatagataatatgttctttttgacacattcataggttatggaggttaaagttacagtgataagtacctctcctgataagaaggaagaagctattgacaatcttggtgctaactcattttttatcagtcgtgaccaaaatcaaatagaggtgctaattcatttagctattaaaaggttttttaaatttcaattaatgggttatgcatgttttttaattaaaaattattatgaa

SEQ ID NO: 72356 - DNA, 1269 bp, Cannabis sativa
  modified_base (1191)..(1195): a, c, t, g, unknown or other
tggtgtcgaccactctagtgtcatttactattaagaaagaattttctctcagataaaatagagatcaagctcaatgtgtttaggtcgagcatagagcaatggatttgtcgtgggaagaattgtgctgagattattacaccagacaattggaggtcgaggcaaatggatgtgtaactcaataaagagagaatttaactaagtaagttctgtcatagtttgagcaaggctttgaagctcaactttagtatggcttctggacactgtatgttgtttttcgcattaggaagcaacaaagttagagccaaaaaaatatagcagaaccataagtagaactttcatcaaggtccgttgcccaatcagcataacaaaatatagggagctcatagttggatctagtttgtggaggtgaatgccatagtccatggtgccatacctgatagaattctcttgacaacttaccaatgagattgtaaggggtttcccgtaaattgactgactttattgacactaaatgatatcttaggtctagtggctccaatatatggacctatattgttaagggttgtcaacatgggaactttcataggctgaaagttaagaacacaacatagagtgtcaacaacgtgctgattccaaacatttatcatttgtgattgatatcatagcctatgaaagtacaaggtgaggatctaaattgtagcttgtgatcgttatatacggtcttatattggaaaagtaagtacagccaaagattttaaggtttgtatataattaggttgtaagtgaaacaggacctcaataggtgatttgtcctttgaataagcatattgcaaaacaactggaagggttttttaagagatgccctggaagccaattagctgaagttgatgtggcaattctctcacattgaatccaaacgtatcaggattgtcctttatatgttaggctatgagagtgcacatactaccaaaaagtaggggtgttcacagattgatttggtccggatttttatagtttttgaaccaaaccagtataatagttttttgattattaaaattaaaccagaccaataaatttctcaaaccaaataaaaccaaaccattaagaacggtttggtttggttcgaaaccacggtttaagtggaatttattcatattttttaattgtactatttttactaagtttttaatnnnnnttttcaaaatatatatttaacatgataattaagtaatagatctataacaaataaataatgatataaaaacattc

SEQ ID NO: 72357 - DNA, 1485 bp, Cannabis sativa
  modified_base (46)..(50): a, c, t, g, unknown or other
ttattaatcaaataagtaaatagatgatcacatgaaccaaataacnnnnnaaacaagtaatgaaattaaatctgtttctttattgataattgaatagaaaagattacatttgaatagagttttatttgggcacaaagcccagcaataaattctcagacagatttatcctaaaattgtgaaatatctttcacatagcctacttttcaacatgtagacagtcctagtcttagcttgaacaagaaatttctatcctagatatgaaataaaaaagttcaaccaggagttagtgtacttacgtgttgagtggaaaggacatgggttgctatcgcagaatcttatctatactcttcgaacccaatcgataaggcagtcataactaatctagaaatcgaatcctctgtctgccagggggtcgagctagtcaatttgaaggggttcaatgtctagaaaaaagcctcgggcagagattgagcaatcattgaatcaaactctcacactcttcttgcatacaatggcaaaataacggctagagagaaaattttgcaagggaaaactcaaagtctagtagaggtgtgaaaaaagtgaaagagcatcatcggtgtcaatttatacttcaagaaaaaaataggcttttttcaaaatcaatggtctagatctctcattaaatccaatgtctggagagttgaaagggttggaagcatttatttgtcatgattttcctcaggttcatcaagccataaagacgggtcttttcaaatcaccccgctgtcattttaacctttttctaacatacccgccccaacacgcgtgtaatgaatcaaccagggcatttaatgtgccgcatgatcgccacattggtaggccttaatgttccatctacccttaacatattacaactcaccaaaaagatgcatccacgactctaatagtcaacacgtgtcaacggtcaattctgggaaagagattgcaagctcccagaactcagaaagtccgagaagcttgggggtaaatgttatccgtgtttcgaagcaaggaacacatggcacaattagagaaggagacttgttaacctcccagattagcagagatactatcaaggtcccttgcaaaggtttcttggtagttcgggaggagttttatggataattgatggggagagccatccccagctcaagtagcatctccaggatgcagaagaaccatatgtgtccccatctccaagaagtcctagaacatgatttgagtgaatgacttttgggtaaggacttctacaaactggtcaaggatcataaccgatacatcaaggtaaatggccatgtcatcttcatatggaaataaacctacaagcggttaaacctttttttgacacatgatcagatcttgtctcccatgacagggcatggtagtgtgtgttgagttttgttccctaaataaaatccatttcaatataatcaaatttttaaattaataaaagatcagaaatcg

SEQ ID NO: 72358 - DNA, 1049 bp, Cannabis sativa
gatctttactgtcaatgtaaagctttccttcttaaagccccattaagggcctttctcacctcaacctccttggcccaacttttagaaccaacaagcatcttttgaatattcaggagttggacttccagctgtgagatgcaagtatccaatttaccaaattgctcccaattctaccagctctgggccagacgtatggcacccattttattaaacactctacctgggacccagtcatggaaaactaatgcccaagcatgatccaaaaccagtggacttctcgggtccctggtccgccatgccttaaattggaaaggtcgtctagttctagtattaggatttacattactaacacaaaggggtcagtgatctgaattgcaagtgaggaatgaactgaccaccactttaggaaaaatctgtaaccaatcttcattgaccagagctttatcaagggctgacttaatatgagttgatccatctctatggttgtcccatgtcagattgccaccttttatgggcatatctattaaagtatgacaattaattaactcagtaataaaggggatgaactagtccttccccttagatcgaacacgcttagagttactcataataaaattcacatttcctaggatcaaccagggcccgccaaacttgtttccaaggaccataatgttcgaccaaatttttttcttcttatggaagtatggaggctcgtaaacacaagacaacaatcaaggattatgcttaaggttagaatacacaatgtgagagatatgatttttagaaatataaatactttcgaatctatagcccaccttccaagctaaaattaaacccccgcataacccacagcaggaacaacaatattgtactaaaaatgcaaattcttaagaggtcgtaccagattagtggtatccacttttaattctataatgaaaataaagtcaggtgaggacgaccgaatcagggctttcaattccaaaactgtagaggtctgtcccaaccctctacagttccaggcaacacctctcatgactcatgtggaggag

SEQ ID NO: 72359 - DNA, 745 bp, Cannabis sativa
atagtcgttccaatttgttgtcaaagctgagaagtatgctttgcaattcctgccaggttgtttcagatctggactcgattagagaaacgattgagagatattcaatctccaatccagaaagcacattagacacaaggtgtctctctgggtatggttcaccagcaagtgcgagtgaatcagcccacatacgcttctgtttgaggtactcggtcatggtagtcgagcccttccttgttgtctgtagtctggtgcaaagatcatcagtatgtgctcgagaataggctccgaagaggttctcgagtgctgtccagagggcgtaggcggattgacagcccataacttcggatgcgatgctctctgtcatcgaaccgtaaagccaacccattaacaactgttcatgaacaagccagtcctcatagttagggttaatggaaacaatataatcaggggaatcaggaatacctgaggtaatgaactcatctggacaggctcttttgccattgatgaagccttcgagtctgtgacctcgaatgatggtgaacaccattgttttccacaaaggaaaattgtttctatcaagcttcatcgtgaatggttggcttagggtgctgctgaagggtgtagtcactggtatgtgacttatggtttgagcagatggtctaggttcggactggtgcgatgtctctgagccttcgacctgctgctgtggagttgagtctggatctgccatggctgacgccggaga

SEQ ID NO: 72360 - DNA, 574 bp, Cannabis sativa
attatagccctctaaaatgacttgtattgcatccacacaaaagatgttatttttatataatttaaaaaagaaaatagttccacaaaaagtatgtgttattataataatattatatggtgaaggcgatattttcctaatgagagagttgagagataacatggttggatttatacttttggaatcaattagcaccaatgatgtaatacccatgtggcagtggcgccaaacgaagactctttcctcgtcacatgggaatctttacccatacaagaaagaaagtattgcattatgttaggaatcaatatccctttttcttgctaaaaaagaaatatccctttttttcctttgtagatcaataatctatttgttgataattatggggttctatttaaaggatataactctgatactatactgaaaatatgggattccatctctaaatttattggtaatgagtggagtagctcatgttcttatatatggctcaatattttgctatttattccatgtagaacaatatctacaatactatttacaattacaataataaaaaaaaaaccacaattaagttgta

SEQ ID NO: 72361 - DNA, 763 bp, Cannabis sativa
cgagaacttgtatttttgttagggttggtttggatcgagaagcattgggatttattgtttgggttattattgttttggggctcatggaggcatgaggtttaaatttgcaataataccaatttttgaataaaataaataagcttgatatcatgtaaatgtaatttcttgatctaggattagaaacgtagctaattttttacaatggtatcagagcacaacaacggattcaacgtaaaccaagaacaagaaattagcaattttagaagaagaatgtcctcaaaattagggagagtttaatcctcaataacaagtatttgatattaaaggacttgtagatgttcctttaaacgattcacttgaaatctctaactctagctcttctaatttaaatctatgtgctagtcataataaaatgagtagcattaaaattgatatagataaattagagagaaatatgaagagaaaggaagaagaaaagtatgtttggtaaaaaggaaactagagggaaagaaagagaaaatgtggattaaattaagtttttctctttgttttttttttttatattttgttttaaatgtataatatgtattgtttttaaggtgatattttagtttagtagaatgtaatagtaataaaataaaataagaataatgggaattaattacaatatttaatttaatttattattggaatgaatattaaaataaatgataaatcaacaaaataacgttgctttaatttttatacttatacaattaagaaa

SEQ ID NO: 72362 - DNA, 1039 bp, Cannabis sativa
cttatttataattggcccaaattgagacttgatttttttataacaaattagaggttattcttaaatagagtattcttagatagagattctactatagttaatatataatctccacattaaaaaatcttttgatgagcttggttggtttgaaaagcaaatataatatgctatgagaacatgacacgtggatctttgagtttgtttatgtaataaatttttgtataaattggagttgttttgtagtttatttcctcatttatttcgattatgtctatttatgttttgcacatgatccttaagagcaaaatattcacatggtttttcttcctccaaagcccaaactcacgagacttgtccaataatgccaattacctttatatatgtttgaaatttgatttcttcataactttccaaaattccaatatttggaccactccaattaataataacaatataatttattgattggggtacttgaaaattccacaattaatttgagataaacttattttgaatatattttgattaatattaattttcatcttttcttttttcgaaaaataacataatttagttatatctttttataaggtcagttctaagaatatatgggcctaagcacatttaaattttgagaccctcacttttagaaatatataaaaaaaatattgaaaaaattgacatgggactcgaaaccgcactattgtgtaatgtgtcatacatctcaactaactaaattgtgaatattgagtgatttgttttatctaacgtatatgcatttcaaaatatttccaatgttctgaaaaaaaaaatgaaaaacttggacaaaaagtaattttagtatataagctgttttcttgagcttcactatgcttaaaaattgaaaatttaaatgtttttcagaggtgtcacaaaagaaatttaacgaaaaaaagatggcataaaacttgtttttgaaaactaaacatattctttcgaaaattctagcgtgggctgtaacgccccgatattttgccttattttacaaaaatactatttt

SEQ ID NO: 72363 - DNA, 783 bp, Cannabis sativa
tttttttttaattttctaataaaataatttttttaaaaaagaaatcatatttttacatataaaatataaaaactcataaaatttataagtgtgaatataaaatagtatttggggggtcatagaaagtaaaaaataaaaattgtagagcttcatttattgggattggtttggagggttgtgatgggattaaggctagggttagggggcatggcatgaaagtgagtacatatatgtggtgtataaaaactttgtgggacccactaaaccaatatcatacattaatttttgcttcttctacatctttcacacgtgtcatgttacaacctatgtgatgacatgagatgaccactttcacttatacttcttactatatccaaaaatgtataataataataataaaaaaaatgtgagtaattattatactacatatttggtgtatttgttattcttttagtagtggatgttgggtagatttttcaaaaataacattttttgaaaataaaattattgaaaaaattaaaatttataaatacattttttttttcatctaaaaaattatctctttaaaagattgttagactttttatttaagcttacattaaattttattgattttattaaaacgtaagttaattggatagttctttgatgtgttaggtcatattgttagtgatgatttagcatctgtgtgtaaagtttaagtgaaacataagtgtgagcttttctagttaactgaagtctttgatgagcaggctcatacatattgtctcatcacaattgtat

SEQ ID NO: 72364 - DNA, 698 bp, Cannabis sativa
gcctcatgtggatttgggagaagactttgaattggcctcacttagagagcctgtatgccaaatcggccaaaccgaagaaccacacgccgttggtttcgatgcatttgcacaatagagacatgactttctatatcttttgatctcattaggcagagttggactgccgtaatagggaagctagtgacctataaggcagttcaatgaaagaactgccaggagaggtcatgatctgattaaagatcccctgtaagggagattgatcaacagatcgggcagggtctataggcaaaaagtctaaccaagttcttcaggaacaagggcagactgcctacttcttgaaggaaaataagtcttgccacacaaatttagtggcgggagcagctagactctggcaactggtggcatggggggtcgaccaggtatctctagctcattaacaccccactcatccaacctttggctggcctacaaagcaaaattcgtctctgaaacatctgggagcaagttgttttaaggcctatcattaatcgcctaggtctaggaatggacttggggggaaaatgttatcccaaattttatccacttgatatggcatgtccacgcaagccaaagatagagtacaggtgaagtataaccctgttagtagcagaacagggcctccatacaagatatagcaaaaccgtcaagtagcgactgaa

SEQ ID NO: 72365 - DNA, 838 bp, Cannabis sativa
ttagttaaattaactcatgttgatggtgtcttcaagctaagtttttaagccatagaatacaactaagttcagttctaagcctttaaaatttgtagccctatgtatagaactgattgatattagaatattttctattttaagaatagaatcaacgaattaatttaagataaataaatctaatttaaacacaattaattggttgatattataaattttgtcagattacgatttactaaatatttaccaaacaatttctaaagaaaagactatagaaagcaattctttcttatttatggaataatttagttgaacatcatttaaagttttgctagagtaggaaacaacatgaggtattttatatattcttttccctaagacaactccaatagcataatcaaaagcatcacacattatttcaaaaagaaatgtttaaatcaggaggtcaaacagtgggtgtagtagttaacatagtttttaattttttaaaagcaatatggcaatcacggttgaaaacaaatgcattgtcattcccaagtaaatggcacagaggccgtgaaaatttgttaaagctgtaacactctgtccaatagggacgccacgtgtgtgcaatttaataaaatacttaatttatataatatataattatactaaaagtgtggttaattaaattttaataattaaaaattaaacatataaactatatgttaaaagataaatggtattaaccacggggtcctcctgtttcaaaatattcattaactggtttaatagtatttttacaacataaactttgtattcccaaaatacattcaaaatagagcatcttgtttactgggtc

SEQ ID NO: 72366 - DNA, 812 bp, Cannabis sativa
tactgtctttttttcttttcgttctttaagttataaaatggtatatatattttctcaatccagcgacatatatggttgaaagtttatattagtttgaatttcaaattttggtcactacttcaaaaaaaaaaaaaaaaaatggtatacatttactttgttgctaattcatacacaaaatgctacaatgcaactataatgatattatagaacaaagtaaataatattttgtactttttttcaaaaaaaattgttaattagattcttaaataaaaatttagaccctatattttttaaagtagtatgaaatagaaaattaatttcattttcgtcaatttttctattcttcaatgtaatcaactaaatgttaatttctagcactaaaaaatgtaaaaaaaaaaaaaaattaactaatttagtcataataccttaggtggttattattaagtttaaatttgataaaaaataagttcaggatctattttgaattagtttgaaaaatacattgtctgaattatcatttaacaaaaaaaaaagaatttaatcaataacttttataaactacggaattcaaaatagtatttcctcaaagaataataattcagacaactcaattaaaaaaaatcatagttattctgaatatgtgactactttaagtctaatggtggcaatttgtgttcgcatgtcgtattcgtgtcgtgtcgagataacaactgctttttttcacaatttttataaaaagggaagctaaagggtgtaaaaatattagcctgttgaaaattaacatttagaggcggttattttataaaaatcgt

SEQ ID NO: 72367 - DNA, 974 bp, Cannabis sativa
cttggcttcaaggatggtatcaagtggaatcaagctattcttgctaaatatgtttgggccagttcttccaaaagggatattctttgggtgagatgggtcaataatatttatttaaaaagcaagaattagtgggattatgaactcaagagtgacactagttggtattggaggaaattatgtcatttaagggacaaattcactcaggaagacatcatcaaagcaggggcaggtacaaagtttaaaactgctctgttgtataacagtagcatttcacaaaaacccttcgaatacagcaaatttaactggtgttccattaacatgccgaagcacagattcatcttttggcaagctatcaactctcaattgctatctcgtgataagtttgagcagtttcacatcaagcttgacaatgttctttgcccggtttgtgaggctgcaccagaaagcaatgctcaccttttttttgattgctggttttcacaacaggtggtggagatggtgtgcgtctggctgggagttaaaatttggccgactggtttccacagctagaaacagtggctggtgcagaatgatagggacaaaaagcatagggttcatgtagcaaccatggcagccatgatttatttcatttggagcaataggaacaactgtccctttaacaaattttcgagtacagcttcaaagattatacaagagatcaaaaaaacaatgtattatagattacatatagctaaaggaaggaatttgaaagaccatgagagaagatacatagagagaatatttttgtagttcttgtttgctgcctttataggcttatatagctttgtaatagtttgtgattaatgaagattgttccttcttgatcgaaaaaaaaaaaactagagtctcacaacaacatcaagattaaacaatcttggatcaccaatacaatcatcatcatctcaaaatatgaatacacaaataagaaaaagttt

SEQ ID NO: 72368 - DNA, 900 bp, Cannabis sativa
taagacttttttgaagaaggttctcttactaactaacatgattaattcaattgtgaatactacatttgggttcagagccctatgctcatgtgaatttgattagcttgtgatatttatctgttgcttcaatgtttacagtagatattatcttattgtttctgtataatcttttgtaattcagaaaatcgagaaggagaagcttgagaagctcgcacgcaaggtatgactatggcttagcttacaatttacttgtatgtgttttcattttaaaatgtatgcatgttcaatttggaaaactttagggcaattattctgtctagattcttggaggaactatttttagtgcctgtatttataggtgtttcaaaattaaaccttgatcatgtgggcattctttcttcttttttaagattttaaacaaaagctgatgagcgccaaattattatttcgacactaatgttacatgaaacggtataaggtctaattagtacatgaaacggtataaggtctaattagtacatgaaacggtataaggtctaattagtaaattattagtactgcctatgtatagtcattttataaatggaatcaatcaatgaaattgaattacaattaggagtatttttattgggagatagacacaaaatctcgaagagtgcattttaggagatttgtcttgtctcgaagaggactattatctaacattaggcgatctttgttctttccttaatgctttgtttggaatttggagttgtgtgtgggaaatgagcaggagaaagaaagagcaatagaattttataatatttcttttggagcttctcttttctaatatatatttgtaaaagttttcactatatgattagatcaaattgaactctctcttaaccaaccaagtgaaag

SEQ ID NO: 72369 - DNA, 749 bp, Cannabis sativa
ttagaaaatagtaaaaatagttagaaaaaaagataagatgccaccaaatatcttttgtgctttcctttatttatatatattgatattgatgattaggtagatagatattaaattgtggactccacgtctgagaagcttaaccaaaacaacactctttttttttataattattttttattattgaccaaaactcatttttcctttaactgtttcacacacactttcagtgtcaatttacaaaattatctcatttcatttttttttgttttttttatcttaaaaatatcttattaaattcatgtatatatattttatttttgataaatataaaaaatataatttaaaataaatatacatcacaatgaatttatatttatattttaaagagaattaatgatttcaaaaaaaaaaaaaaagagaattattatatttaattaattagaatgtgatataaattggaaaaaatagaattatatgaccactaatttatacttataattactaataaaaaaattatcattagttttgttttataaccaaaattattatttatttttaaataaccttcttaggatttttgagtgagagtacaaataatttataataaaaaataatcacaaagtcataaaataatattaaaataatcattattaaatataaccgtgtatgaaacaacacattgtataggttaaaagacacaattatttcaataggatacacattaattttttattgattaaaaatattgg

SEQ ID NO: 72370 - DNA, 760 bp, Cannabis sativa
attgtacataatatgatcagaagaggagggtttaggaattgtaccatccaagaaaccaagcttgtttttgacggagatggctaaaatcattgctctgctccaagacatgtaattgtcttatctagtgaggagttgagaaacgaggacattaccagggttgtccccatgatgtaagtagtacgggtgcgaagggtcttcaagatgacttcttggttgaacaggttgttgattttggtgatgttgcatcgacggattgaggggatctccagcaatcgtagatataccatcattgttgacaccatgagtagagctttgatcatcagtggccatcacagaatcggatcaaggtatattcgagaaagaatatctgggaaagaaaagaaagaaacagacaaaatagagcagagccagtttcagtcgcagaacgtcgccggagaagaagcacggcgaggatgaagagggaagaacggatcaagggaaagcattcctttcccgctctgataccatattgcggaatagaaagaagagagaaatttcattaatgtgaataatactgagttgcagaataaagctcgaaacagagcttatataatagactaaacaccctcactaactaacccaactatctaacccaaaccgaccttaactaaaccaggatacaacgaatactactaactgtagtaaagaaactgttaaggtagttacagattaggtaaaacagttagaggaatagggacaaactctaactataacagatcgg

SEQ ID NO: 72371 - DNA, 1475 bp, Cannabis sativa
caaaatagaaggaaaaataatattattcaaatgtataagtaggcaaattaaaaatacaaacacaataattaagaaaagaagaagaagaagaagaagaagattaaattacaagagaaagtacctactaaacaagaaaagcttgaataacttttaagaattttgtccaaaaactttatttgccgcactatagtttggatcactttttaatattattactctcatgagtctagctcatagaaatgatgagtttacatactgaagaatccaataaaagaaaagaatgtaagagatgctcactaacattgtctgtgaggtcactctcttaattaaaacttcacttaaataaattcaattgaaaaatgatctcagcaaacttgtaacatttttggagaattaaattaacacgatataaaaaaaacagccatcgacgcagtccacctacgttgcaccatgtgttgcacaacgagagccacagcactgagtgacggacccagaatttttgatcagttggggcttaattattataaaaatatttattatttactttacattaaaattataattattttgtgagggctttttcctatttttctgtataactatttaattaaataaaagatatttaattttttttaacactaattttttttagtgggggctataaccccacactttctttactgcgtccgtccctgactgacatttctattcatacagcgctgcagtgccagagtgccaccaattcgatattattaggttttcttttttaagagcaattttaaactcttatgtgacttcaataactattacactatgcatgcacacacatatatttaagggattttagcataaatgtccttaagtactgtcgtcactctaagaaattttaccataaatgctcccaataaagtgtcattttgtttggcaatttaatttcttaacttatcaaatttaaagcactaatatataactacctcagagtaacttattaaatatgttagaattttgtaactaaatcaatataccttattatattgttttatttaatataccttaaccttaaatcatatatatatataattgttcaattctctagatcaataagaaaaaactatgctcctattccaccctttcatgttgtccacgtgaatcatagtcattaagtagaatatatgtaaatgacttatatatatggttaaattaattgaagatagtggtttaatagtccaaaaaaggtgcaaatattactacgatgacaataattgtgacacactaaatatgtgggttaatattgccatttgtcatatttggtataggcacaaaaggtcaagaagataagttaaaaaataaaaagaacataatttgtatgacattctaaaaagggttggcaatctcttgtttggtttggaccatccatgcctcgagtggtagttgcaaaattggatatttatataaagaaattctaatataattgg

SEQ ID NO: 72372 - DNA, 902 bp, Cannabis sativa
gaagatcatgatgatgatgagccataagaagaaactcatgtacatggtaagaatggatatcttctagctagagaaagaactagaagacaaactagagctccaaagaggtatggatatgcaaatttattgtctttctcctttgttgcagcaagtgaagtcttagaagaagagcctttaggctataaggttgtactaaaaagcagatacaagaataaaatggctcagagccatggatgaggagaagaagtctttgcatgataaccatacatgggttctgattaagaggcctaaaggatctagagtggtaagttgcaaatgggtactcaaggtgaaagagggtattccaagtgttgagccaaccaaactcaaagctaggattatagctcgaggcttaactcaaagaaagggagtagactacagtgatgtattctcaccaattgtcaagcatagatcaatcacaattttattggccgtggtagttgagcataatcttgaactaaaatagatggatgtgaaaactgtcttcttgtatgatgaacttgaggagatagttttgatggcacaaccagaaggattcattgagaaggctagagaagactatgtgtgcaagctaaacaagtctatttatggcttgaaccaatcacctaggtaatggattaggagatttgatgttttcacggacaagatcaagttcacaagaagtaagtttaataattgcgtgtactttacattcctacctaacagtgatattgttatattactattgtatgtttatgacatcctaataactagcaatactaagttagaagtggaaaatgtcaagaaggaacttagtgttatcccaatttttgcactctgacgtggcatcacacgatgttgacacgtggaatcgactctgggta

SEQ ID NO: 72373 - DNA, 857 bp, Cannabis sativa
aaaaaaaaaaaaaaacaaaggacggcctgatttgatttgactgcttgaccccaagtccaactaaaatctttttcctaatttattattatttaatttaatttttttatgtggtgacaaataaaacaaaattaaaaataatattataattattatttttctcagcaatagaaaatgaaacaacacagaattcccagaaaaaaaaaagtgtttggctagtaagaaaatgagagagaaaattttgagtacctgaggaagagttgttgaagcaaccatgggagtaacactttgaagaaacctttcaagatttgttgttgttgttgatgaagaagaagaagaagaagaagaagacccaaaagacattgttgaattcaaaaataaaatctatataccaatctttctctgatctgattaatcaaaacccagaaacccaaaagttcaaagtttgaatcttttttcttacttatccattaaaaaagataaacaagaaagaaaatttattagtcatgatgacaaaaatggtggaaagggaaagaaagaaagaaagaaagagagaaagaaaatgagacatgattttacaaaaatggacagtagtactatactcactagtactactcatttcaccaaacacaaatttatagacttattttttttaataaataattatttaataaaaaagggaatatatttgatttcagaaaaataaattatttaatcagaaacggtcgttgcttttatatactattctttttctagattagaaaaaaattgtgggaaattttataatgcacctctttaaaaagaatatactgatacatttttatctattttagtatttgaaataattttttagtcaaatt

SEQ ID NO: 72374 - DNA, 1049 bp, Cannabis sativa
agtaaagctgaaagtccttcagagaaaattaagaataaataaggtgataacggatccccttgacgaagacctctttgtggaacaacagacccttttacggctccattaatattaaaagagagggccgcagatgtaacacatttcatcacaagattcacccaactgatatggaagcccatcttaatcattacctcatatagaaagtgcatgccactcggtcaaaggctttgctcatgtctagatttaatgctgcataccccatacggcctctttttttgttcttgaggcagtgaacaagttcaaaagcgagaagcacattatcagtcataagacaattcagaagaaatgcactttgattctgagaaataacatggggtaaagcctctttaaatcttgctgcaatggccttcgaaaccaacttgtataacactgtacataaaccaatagggcaaaaatcgctcacaaactttggttgatcaatctttggaataagagtgataagagcagtgttaatagaatccatgtcatcaccatcattcaaaattctgagcagactttgagtaacaagaggtcccacaatatcccaatggtgctggaaaaacattgcagacataccatcaatgtcgggagacttgtcaggtgccattgatttgagtgcttcttcaatgttcgaggctgtgaaaggctttaacagcttttgatttatatctggtgtcatggctatgtgaatggtagaaaggacataatgcagagcttcctcatcgacaccatttgtggtgaacaaatgtgagaaataattgacaatttcaatacttatttcctcctcagtatgaacaataccaccattaccagcttgcagctttttgatcttatttgtcgcgtttttggtctttgcatgggagtggaataatttggtgttcgaatccccattttgaagccaatcaacccttgcacgttgatgccaataaacctctttttcaagtaattcatcaaggattttatcagcattttccactctgtgaatatggtcagtggaagtagctctactg

SEQ ID NO: 72375 - DNA, 969 bp, Cannabis sativa
  modified_base (941)..(944): a, c, t, g, unknown or other
gtttcttcatcaagaagccgatttcttcatcaagaaaccagtttctttgtaatttttccagcgacaatgctaattttgacaactctggctactttttcgacaccgaaaaaattggcattgttgccagtttttctggtgccaatgccaattttctcgcgccagtagcaactctggctactttttcgacactaaaagctactccgactacttttccagcgcctatagcaaactccagtgacttttcggccattactgtagttttatttgttttatttttttaaaaaaaatatgaagagaattttaatatttttaatggaaattcaaagcatatctcatatacgttaagtttttatttgaaataccatatttttttctataaagttttctgaccatatttatgtaaattatctttatttttcctatatatacatgtgtaaatacctctttttaaatagtgagatataaaataaattttaagaaatttagggttgcattatatatattaaaaaaaatatatatagggtacaaaatattctataacccatttttataacttcataattataataatattttgctttcaacaatatatcaaatttaaaataatcttagttttagcaccgattggacatatctgtatcgtaaatttataagtaattctaattatttcgtctaaaaatatcaaaataatcttttcaaaacattaaaagtctaaaccaatattaacttcttaaaacacgttccaaaatattttatatcttattttattttattttaaaattaaactaatcttattttaatttagattatatcatatatatatatatatatgatattatatataaatatatatagatcttgatatatgttatattaaatggtataaataccatttcacaccttgtattttgtaaaaattattaattggaccctctgttttnnnnaatgacaaaatggaccatgtatttt

SEQ ID NO: 72376 - DNA, 854 bp, Cannabis sativa
  modified_base (780)..(805): a, c, t, g, unknown or other
atcgaacagtccagcacctcatcagtttcaacacgtccaactttcttcttccctctcttgctagcagatcgagactttccttgaattccagatctcgttttcgccatagccccaactttccagctgtgagagcaagaacacgagaaaagtccccttcttatttatgttgtacgttcttttagtgcatgtgtgacctgtcctttctttgatgtatccttgacgcgcgggtgtcatttttctttgttaaactctgtctgccatgtgtcttgttgttgcatggtggagggtgttttcttctatatttattggatccgtcgacttcttgcttagtctctactgattattttgttcctttgaggaatgatttccttccgacgagataccttgctttcagttaaggcaatgaaaatgatcctagtattaactcttgttgagtacgtttctcagacgggagtatgattttgttttatcttgctttaaatatcatcattctatgacatcttttgattgggtttggtttagtcattggctattacttcgagttgcgaacccttattttgtcctttcttgagtctttcatgctttgtcgttatgctccattttttcttcttgtggctttatgggctttttatttttttatctatttgtgggcatttttgttttcctccaaactattgggccatattgttgggagtatgtctcattgagcttttgtaccttttcttatatctaattgggccctcacgccctttctcatttggggtaagttgaaaaataccnnnnnnnnnnnnnnnnnnnnnnnnnntacctctaattttatatttaattcaaacatacctctttttatatgtatt

SEQ ID NO: 72377 - DNA, 754 bp, Cannabis sativa
tatcagtaactttcaaatatttttttaataaattcaaaatcgagtctgtaccgatgaaactgaagaaaaattacagttttataaatattgaatactcatgacataaaaaaaaaatagtaaacttatgtcacttatgaatttaaaactttatatactcataccgctattttaaaaaaataagtactaatgtaacataaaagaaatatgttaataaggatataaaactaatgaggtcaaaaaaaaaaaaaagcaacaacaactaaacttgttcaaaaataataataataaacctatgatagagattgaaattcacaagacaacatactaagacttcaactcaatatctttcattagcaccttaacattagcatatgataagaactaaggtagcgtttggttactaaatgaaaatagaatgggaatgggaataagaataggaataagaatggaatatttattcttttgtttggtaaagattatggaatcaacaacggaataagaattataatgtttggtattgtatgaaatggaataaaatttttattattttgactaaattaccttttactcttcaaaaattatatttattttattaaattaccattattttataaattgaacaaataaataatattctgagcaaaaaaatatctttatcatgtgatggaaatgtgcacattcttaagcctaattattaaaaaataaaataataaaattacatataaatattaaataattagtaatatgatggtaa

SEQ ID NO: 72378 - DNA, 808 bp, Cannabis sativa
ttccttcctcaccatctctctcctgctccttctcttctgttctcgactcaaccatgaccttgccacgacggccgtccatggtcgctgatggtctaaaaggaccacagaaacctgatctcgaagcctagaaacctaaacccagtgatcccctgagtctgtctctctctatttctcaatttttctatcgatgaggctaaagctttttggcttcgatttggcctctttggttgtcaataagctagaagaatctcgtttctagcttccttgtgtcgagagcttccagatcccatggttcgcttttccatgcaccacttttgatcaaagacgaccaccacgcacgacaatgctctaggttggggtttgatttccaagaagaagaagaagaaaaaaaaaaagagaatttttcttttttgatttaaaaaaaaattaaattatttttataatattattaatattaggtggaccaataataatttagcacgggtacacttctgtacatcgtggcagtctaccttagcacttaacaaatcaaagtgacgaaatagtgaagatcaaaacggaattgtattttggagagttttactcctaaaaattcagtaatgagagttgatcatgctaaactaaaaaatttaaggagtttggttgtaaattatcatttttaacttaataatgttaattcatttttatatgtccaaaaataataagaaatttacgcaatatacgtaaaaacataatttttttaatattttttacaaattttgagaaaattataaattttatgaaattttatactatttgtgcaaatata

SEQ ID NO: 72379 - DNA, 654 bp, Cannabis sativa
actgactttttgagaagtcattgccaagtgacattcgtgaattcccttgttgagtgacttctcaatgccttttctgagtgacttctcaatgtcaaggtcgagtgacattgtcactctcacggatgagtgacattgtcactctcacggtcgagtgacaaggtcattcttaaggttgagtgatatttgttactcttaaggtcgagttacattgtcactctcatggccgagtgacattataactcttaaggtcgagtgaaatttggtcatgacgaggccgagtgacatttggtcatgattgggccgagtgacttttagtcactattggaccaggtgacattaatcactctcaaggaggagtgacattgagtcactcttgggccgagtgacttttgtcatgtcatccttcatgccttggtcagctaaccttagaaattacaagtgccaatttctaaaattaacactttcccccgttgtcttcaagaattctttaaagtgttcttggggactagttattagggtgtcctttggattccttgcggatttctccctcgacacgcactttgataatgcccttagtatatataggaggtctccctcattctcttcttcacttcaaaactttttccttgctctagtggtgaaggtcaatccttc

SEQ ID NO: 72380 - DNA, 1924 bp, Cannabis sativa
aaaaaaaaataatgtataaaattacttatacctaattttagcatatacttcaattctcattctattttttaaaactagacttctacattcatgtagattataatttataaatatttattttttaaataggtaaagcctacgtacattttcattcaaattacagagaaatttccaaacacttcgcttatgtgatgacacctaatattttttcctttcccttaatattcaatcaaatttcttaatactaaaatagatatgttagattaattaataaatagcttcaaacactttaatttttatatactcacacaagccacgacacacttccttgcatcttctcgctgggaccagtatgtatagtcttacatatctttcgtacataaatttatatctgttataaattggaccaaaattaaatattaatctcaattaattatagatccccaaatctgtacgacaacattatttatatttatattagtgtggagatgtgtgacaactccgtaacctgtcaaaataatatataggttaatcatatatcttatgtcatataagttcttcattatcttatatcattatatcacaaaaggtggttatttggtgtattttaatatcagcttcaaaaaattttaatttgataaataattggaaaactctattaagtattaagtatcacatgagtacattgaacacctgaaagtaccatatagtagtaataatgcaaaatattatttataaaaaatagcacaaaaatcattcataacaaaaagaaaaacaaaaagaacaaaaataaaatagaataaacttaaatcaagttttgcagttgtgcattgaagtataatgctaaaaattgatgcaaatatattataaaatcttttttttttttttttttttgctaaatatagtacaatttttacattctcattgaaaatgttcttgcaaattatatataattaaaaatattaaatttttttaatataaattaataaagatattaacatatattaataacaaaaatattaataagacacatattaaggtggacacattaaagtgtcaaacaccaaaaaagacagcatactatcattaccaacctgcgcagccacacgatcccagcaccactatcattaccaacctgtacttcttttcctgtgtccctgaaccgcgactattaaataatacacaattagtaataagaggatcatatataatagaaatacctaaacatgaattcattacattacataactaaaaccaaatatacataattacaagcattattgcattaacaagagtgccttgagaatatttaactaattatagtatgtaatgccgagagggaggataatctttcgtattagttttttatggtactagaaataagaagagtaaatcttagatcattttaaggtatctaaacatttgcttcaatcataatacaagaaaaatatatgaataacatgcaaattttcaaacaatcatataatattaatttacgtacctgtggagggtaggaaaactagaaggacaaaaagtaaaatcataagaatcagaagttaagcaagagaaactactactactaatcttgtcattaggagaagaatgaggaatgatttttcaaacaagccagaattactagtcacaccagaacaataatcttcatcttgatcatcttcacttgcttggcagtctactacattattacatcccacacccacatcaccatacataactctcagctcctcagggcactctttaatcaactccaccacacaaccgctagccttacaccttccacctcctcttccgcccaccggagccaccatcatcagtgttgggtccgcccctttattggtgggcttggaccattaagggcttaaggcccatcatttgtttgttcaatttaaagaaaaaaaaaaaaaaa

SEQ ID NO: 72381 - DNA, 874 bp, Cannabis sativa
  modified_base (510)..(528): a, c, t, g, unknown or other
attcctaactctttattggcccacactttttctgtaggtcactaaagaatatttttttcatttatatattttaaagaaattattatttttgcatttgtatagaaatacatggagcaattaacaagcggagcaacctaaattgtaatttaaattgacattgcacaaccactaacaaccaaaagagcaactccttttgtagaaatgaaaaaaaaaaaaaagagcttaaaaagtgatatatagggtgattctctaatggtaaatttgtaatagtgattaatataatactcaatatatatgtatatgacttaaataatgtcttgattattaaaataatcatcaccacttgtacgtgtatattataatattcaattaatatacatatatatattatggtgaataataatatttaagttcaataataattaacaagtggaaggagatctctcatgaaataattagcaataataatctagttatgattaaggagacttcattattattattattatnnnnnnnnnnnnnnnnnnnattattattattattatttatgagaaagtttacagtacatctccaataaaagatatgttttgacagatctcttttataatatttaattaaggataattagtatttttgctccctgaattttgatatgtaccaaatcatgccccgtgtacttttaacgtctttaaaaatatcacctaaactattaaaattgttggatataagaacattttttctaattttagtaaaaaaatctaacatgaatgaaagtttagaggacatgatttattatatgtcaaagttcgaggagcataatttagtagatatcaaagtctgggcatgatttagtaatagtaaaattgaatgaaat

SEQ ID NO: 72382 - DNA, 844 bp, Cannabis sativa
gagagagagagagagagatgggggaaacaatgagaggaatattttaggggtagtggaaaaaattagcacaattttgatagaaacatttagggtgggataattttgttattgtgtttacttttaagtatgaaaagttaattttgtcttattatttatgaatttatatttgtgtttatagtcttgaattgcaccaaattaacactatgttagcgctatatcaataaattatttaaataaatgagcacatttttatattgaatggatacatttacaactattttgatagttagggaaaattttgcaacaaataaataaaatgacaaaactcaagaggatcttagtttcagaggatagattctatttatttctaaaattattacaagttttattgtcataataaaataattagaagtataaggaatttatttttaaaacactcaaaattattgtaagtgaaagttattgttgctaggttttacccttataaaactatgtttcttatgttatacttttatttatcgattaggcaaaataatttttgatttgtttagtcaaatttattacttatgtttatttactaactatacacttaatgtgtaaatatttattaaatttaaaacatatagataaggtcaattatagtgagatggtcacaatggaatataattgtaattgtatattcaaataaataagtcttgttattattcagtgcacatgatttatattgacgtggtaatttacgatattgtctatttatagtaggtgagtggtgtatagtgaaataaatgtgatcgaatgtattatattggactatagcaatattggtagtagataagatatataa

SEQ ID NO: 72383 - DNA, 1319 bp, Cannabis sativa
actgattttaccttttagggagaaaatccaaattttgaaactcgggattaccaaattgccccttcagtaaactataaaaggggatttacatctctttctcactcttttgcatattttccaacttaaaaacaaaaacgaaaatttctttctctccagaatttccatgtttttattcttcaagcttcaaagaaccctgaagtgatttctagagactaagtcgaatcatcacccaaaaacatccaacaatgagtaatttttttatctttatgcatttttttttaaatttctacattttatttttcgtttggatctgttttatgagatatgggcttgaattgaactgtgctacaacattagaaattaggattctttattctgagtccaaatgtatttgcacgacatatgatttttagttttttgttgatttcaaatgttttgctgaaaaatatttgaatatttgttcgacattattaggaatttcccgagttcttcctgtattctagaacttgtttgctctggaattttcgtcatcaggaaggaaattccttcctttgatccttaaatctttttgattggagcatgaataatgttttttgtttggaaaagatattctacttgtctagttcctacctctctctcccttttgtagatgaactcgggcaattttttgggagataagcaccggataggtgaagatttacttcatctactttacgaagactaacccaggcggctccatgcaacttcatcgtcgtcatcaagcgagagctcataaactacaagttttaatgattgggacgtgacaagtgattcatcagagtcctcagagtctaccgtgaaacaccatcattacctcgaccaggttggggaagacatgtacaaaaggttcatctatgagttaaaaaatgttgaagacagtacttgcctacatattggacatacaaggtctaggaagacattctaaacaccctgtctgaaggttgtccagagccacctaggaaagtatctatgctagcagaaatcgcaatgaacattgccaagcacactattcatcccaatatccgcccagacataggatggtggcgtgcaccaaacatagccacatgagggtttcaattgaagaggatgttgaagtgcttttttgtaatgaggaggtacaggaggtagaggactagggtaatgtccgtccagctggcgctgaagagtaagaagaggtggcccctgcaactctactgtacgaattgtataacaaggtgagggagcccatctcaaaacttggtgatatactaattgagatctaggactatgtcactgcagag

SEQ ID NO: 72384 - DNA, 843 bp, Cannabis sativa
aaaaaaaaaaaaaaaaactcacgaaattttaaatattttgtttataaatttttatttgcaaaaaaaaaattacgaactagtgatgttttcatgttatttttgtgttataattttattgttttttgttattttgttgttatttatcgattgtttttttatgttattttgatattatttttatatatatttttattattttcatgttattttataaaatactgtacaattgtaataaaaaattaaaaaaccgtaaaattgatttcttttttcattcttttgaaaaattataaaaaattatttgaccgtaaacaggaccggctctaagcggtttggggatcttaaaggaaaaattaaaattagatcttttattttttaaaaaaaaattagtaatcagtactttataaatttaggtttttttttaaaaaaaaaaaatatcattaatttagacaaaaattttaaaatcacaagttttgatcattttttggaagtacatatttatttggtgttacgaacatttattatgtctacattgtaaaaaaaattattatattatatatatagagagatgataaagaaagaatttttacaaaaatattagattttgagaaaaaatttacaattttactactatatacaattatttacaaaaatactgtctttttataaaacaacctaaaataaccgtaaaataacaaaacaaaacaattaaaaacaacaatggaacaaactaaaaaacaactgtagaacaacagtaaaaacttaacacaatacacagataaaatttatacaatcttttgaataaaaaaacgtacgcagcatttttaaaaaaaattccgctccaca

SEQ ID NO: 72385 - DNA, 881 bp, Cannabis sativa
  modified_base (746)..(766): a, c, t, g, unknown or other
ggagggagtttcaacccccaaaacttcttccaaaaactgtcaatcactgcctcttcttggatattctcaccatgcatatcttgtgccattttgtaagcactcttgagaatatataaaccaaaaatttctcctatccaagtgaggtaatcttgtccacgatccttttgcagaggagttcagaggatcaaagcttggtctcgctgctcaaacaagtctgctagcagcttttcatcccagcccgtaccatctatagagaataaattacaaacctttggcaccaataagagcagagtgagatgagataaccaagggattcacagtatcaagtaactaaggatctcccaaaaccgagatacatgtgccatccccaacagaccaatgaacccctttaaccaccaaaaggcgagcttcaagaacacacgccaaacatagctaggattggctccaatattaactgtgaagaaagagcctcgcggatagtaccttgccttaaaaatacgaaacataagagaattaggtttagagataagatgccatccttgtttactcaagaaagccaagttaaattattaactattaacttaaggtgatttaaaaaaaaaagaaaattaactaaggatatattttgaaaggatatgtttaagggtaaatactattttgaaccatgtgttttgtaaaagttatcaattggactctctattttgttaaatgaaaaaatagaccctgtattttttaaaattgtacannnnnnnnnnnnnnnnnnnnntttgtcaaaataaaacttaataacaatgtgatcaacagatgttataataaaactggttacatttataatatctgttcgtgttaaaaattgtctaatagttgattatattaaaaaa

SEQ ID NO: 72386 - DNA, 967 bp, Cannabis sativa
  modified_base (907)..(912): a, c, t, g, unknown or other
agagccatcattccatgggtgtaaaggcccaatggaggcttgaagcggggacgttataaagagcccccttcaagatggagtgtaaaaatttttgacattcatcttggaaatgagatcatggaagtgggctggaaatagaggcttcgtcatgatgtctgctatatttgatttggatggaacatgatttgttttgattgtaccagtgttaatcttttcacggatgagatgacagtctatttcgacgtgtttggtgcgctcgtgataaacaggattctctgatatgtggagtgcagctttgttgtcacaaaacagagtggatagaagttgtatgttgatgccgagttctttgatgatggagtggagccaggttagctcataagcggtgttggcaatagctctgtatttagcttcagcggatgatcgagacactgtttgttgctttttcaatttccaggagatgagggaatttcctaggaaaatgcaatatcctaatatggatcttcttgtatctaggcaggctccccaatccgcatctgcaaaggcttgaagtctgagaggtgaaggtgatgttgtatgaaaaaaaaaaagtccttgacctggggtgccttttaagtgaaatgatgcggttggctgctagtaaatgaggttcccgtggggcttgaagatattggctaagtttgttcactgcaaaagaaatgccagatcttgttatagtgaggtagatgagcttccctatgagacttctgtattgtgtaggatttgtgagtagagttccagtgtcattgttgagtttggtatttggttccattggggtggaaaccagttttgtaccaagtttgccactttcttgtaatagttgcaaagtgaagggtctttgacttactgatattgttgggttttatgcccnnnnnnaaactcatttcaatataatcaaaattacttgttaatatagatcagaaataacatt

SEQ ID NO: 72387 - DNA, 781 bp, Cannabis sativa
agaatattacgtaattgattctgtcaagattcaatgaatataaaatattcatttatcagaatcaataatattattttatttccttaattagaaatattctaatatcctttgcatatatttattagtgaaagataatagcatatataagatttatgtattatttagttaattggttttaaaatagaactatatgcatattaattcttataattctaacatagtattagagaaaaacccaaaaatctctaacgaatatagactaaaaatagaggaaaaaataatccaaaaataaaaaagctgataaaaaaatagagaaaaaaaaaaaagagctacaaataatccaaaaaccaatttaaaaaataaagccaaaaaaaatcatttgtaatttgaggatatagtgagctaaaaagagtttcaaaacatccaaaattccatccaaaaaatagagttaaaagaattatttgtgattcgggaatagtaagtaaaaaaaaaacagttttgtgatcgagttatctaaattggataagcaaaaatagtcactatcgttaggatagatgttagagaatcttatattgttaatgtataaaaaaaaataatcgcatatatatatatttatataatccatgaactatttttttcgttgccaattaattttgagatgaaactcctctctagggctattcattcgatccaatccgcatttttttggtcaaacaacatccaatccgcactaagtgcggattttatttttttggatccaatccaatccgcacaatagctc

SEQ ID NO: 72388 - DNA, 694 bp, Cannabis sativa
tactttcttatatgtttgttgtctgttctgtttggctggaaagaaaagaaaagaaaggaaaattgctctctctttttctctttttttccttttttagaaaggaaaaaattgttttagttggcaaaagtattatattatctaagttggttgctttggttacctacatacaaaatcataaaactatattaaatttgaagctaaattatattgtatttgttttataaatatcagaatcaggaaccttttatttttattttgatcgtattgtataatatttatcaacccctctttttttggtcatagaggactagatttttgaaatcaaattaatactattattagtaaaattgattttaattttcaaatccttgaaaaagcaaagctaggcaaattacaggttaaaattttgctagagaggcatgcatatatataaatatgttataatagttaaaaccataaaaatttgttctccccttttaaattaatctaaattgttacatattcttaacagaggcatctgattctggtatagagaaaagtagtagtgagggttctgtcaacagaggtaaagtaaacttatatttcaatttcctttatcaattcaattttgtaaatttagtaggaataatataactcttttgatattaacttttactctaattttcttttaaagatgctgtgcttgcaagggttg

SEQ ID NO: 72389 - DNA, 2124 bp, Cannabis sativa
gatgaagtcagggagaacctcttttaacctattagcaatggattaggccataactttgtaaatggtagaacaaaggctaatgggcctaaaatgctgaaccatgaccgcattgttctttttgggaataagagtgacgaaattttcattgatggaagccatgctagcttcgttgtttaagacattcaacatttctgaacaaaggtctttaccagaagtggactggttcttttgatagaaaattgggttaataccatcaggaccagaagccttatccccaaaaagttggtaaagagtagatttgacttctaagagagaaaagggattagcaagaaagttaaattgagattgatcaatacgtttggtattgcgcatgagaatcaagttaatagactttaaatcaaccccattggaagtgaaaagatcgaaatagaactggacaaaattattggtaatatcagcatggttgtaaaccgtgacattatcatcaaggatgagacttttgatagtgttatttcttttcctagatgaagctttattatgaaaatatttattgttcttatcactagctttaagcatactagctgtgtagagcgctgcctccaataaacctcctccttaagcaagagggtgttaatggaagattgaagattattagctttcttgatgttatgagagataatggatggttgagagtaaatttgatcaatggaatttagattgtcaataattatctttttaagatcaactttgtcattagcccaatatttcatgaaaagaatgcagtttacttacttattaaggaaagagtcgagggtggttggagcattattagtggccctattagaaagccaactgttattaataaggtgggagaaacccaactccataatccaatagttttcaaagaagaaccttttgtgacttttattaagatacggagtaggattgtggaccagtttaagagcacgatgatctgatccatagaagggaagctgaaaaatagtcgcattggggaaaatatcaagccaagactgattgataataccccaatctaagcgctctaaagtgttgccatgtttccatgtgaaacagttacctaagtaatgcaaaggaaacatattgtatttataaagaaagtgttgaaaattatggattgcgtgggcaagggcaaagtgttagtattacaatcattataacccaagtaattattaaaatcacctatattaagccatggggaaaaaggaagcgcatcaaaaagatgatccaacaaaattcaagagttagacttttcattaacatagggagaaccataaaaacatgagaggtgataataattatgagagttcttagaaacattacagtcaatatggccaaatgagtaagataagatattcacattcataacatcatttcaaaagaaaagtaaaccacctcctaaaccatttctagggacctgaaacacattatcaaaagacaatctagctttaagcaaatgactagaattagcagccagcttcgtctccatcacaaaaagaatttgaggtttatattgcttgatcaagagggagagattttggaatgctcaggaactccataatccatgagcattccaactaataatactcatttttctagatggggttgcctagcaacacccgcctgttcatcagaatcagaaatggaaggaactatggcaaagtcagaattaaaggagccagctggaactatgtcccatgactggaaatcgcccccgattatagagactccattaatcctatatcctccctgacctcctcctcattggaacctgccccccaagactggatcaaaattaattgcgatgctaaggttggaggggagcatatgtgcatagcagtggttgctaaggattacctgaccaggttaatttggatgtttacggccaaaatggacttctctgataccctgtgtggagaagctgttgcggttttcttggcgcttgaggtcgctaaggagaaaggtcaccattttatcctggtggaaagcgatttaaaaatagtgatcaacactctcaacggtttggatccccgatggcaaattgaaaactactctttattttgtaaaagtatcgctgcttcctttgct

SEQ ID NO: 72390 - DNA, 708 bp, Cannabis sativa
atttcccaaatattgtgaggccctaattaaaagtaattcaaaataatgtacgacttgtgtagataggataaataatttttttaaaataccaaaaaaaagcctatgtaaattgaaatggggtgggtcaagttcatatatataaacataattttttatatatttaattaaaattttaatatatatatatatatatatatttatatacaacccttaacacgaatggccacccacccacactcactcttcattccttaatttggctaaaatacatgccaatataattgtttaatcatatactaagataaaaatatataccttaactagttgtattattattatataaataagaacttaatatatcattgaatcgatcaattatttatcatctataaaactatacatatatatatatatactcacaaattgtggtatatattgaaatatatttaatactaaacaccctagctaattagtacttattgtgatttgtgaatctaaattatatacattttgtaagtcttgtagtggatgagttgtagtacatagaaattggcaatatttgtctttatattaatttgatttaggaagcgtcatgaatattttattttttttaatattttatacatttatatattacttattttttttaatgagtaatatatgtttttttcgatggatttaatactatttattacattttcgttgcag

SEQ ID NO: 72391 - DNA, 1411 bp, Cannabis sativa
ccttgttgatgatgcttctaaagctctttcatatacagaggatgttattgagttaagaaagcacaacatacaaaatcttcctattgtaaaggaaagcaatcctaaatatgaggcagaaattaaaaattaacatcatcataaatctgtataaaattaacaccatcttcataaaattaacatcgcatactgctttcatctatatataaatctgtatagtataaagggaaaagatattgcggggttattttttgcatgatatatcatattatcttccatatatacaacacaataagtacattctaatatttaaattaatatgagtaaaaaaaaatacctaacttctaatcaatagaacaatacatgatggatatgcaagtatggatatgcatgatagattgtgtttggtatctttctttattagctaggatttcgcctcgcatgtgacaagggtcatgatcaattaattccaaaaaactgacaatagatgatctttatagatacaaagcgtagccaatgacactttataacattccagattctaaatttaacattccaatttctaatcataatttaaccgtgtctggctgaaatttaaacatctccggttttcttcaaacacttcactgtatagtagggtagaatgaaaaaaatatttattttccttttctataccagtaatgacaaaacaagcccaaaagaaaatcaagtttatgacagtagaaaccgaataaaaattgatatctcagaaaatataatcaattagcatcactaacctgcacctcaatatgaatatccaagggtcaatgtatatggaactacatcaatttcgtacaatcctctcagctcctcaagtttatcattggggatcttagataaatctgcctcaaaagcaaataatatatacataaattttgcaaccaatgatcatgttatctaaaacaaataatttacaagcaaattttgttaatgtcaccacgtgatttatccattttaaaaatggactcatctactttatttgataaattaactttgactacaatttaagaatcaaccacgagcaaccagccaagctcaatgatgattaataccatgaactaaaatcagcattttggctctttactacagtaactacgaactaaataaacaattacatagacccaacaataccatgaaacctcaagaatctctacagatggagctcatattaattttatttttatgaaagaaacaattgttacatatgaccaatgaacctttaagacaagttaaacatcttcatactaataaacaatatagagactaaaatttaaaagtagattcataaacatataattacacaacagttcaaaatcccttaccagagttttggacaccttcaaacattattatgtaacgattcttctcacatgtt

SEQ ID NO: 72392 - DNA, 1080 bp, Cannabis sativa
  modified_base (1046)..(1047): a, c, t, g, unknown or other
gattcacagtgcacaacatggccaatccagttcagaaattgaagacattagccatgaaagaagaaaacgatcaagatgcatccattgatgaaaggcagggttatgtaccatattggaagaaatagaagattcgggtacgctcttgccttggatgtcgacgaagtagaatatcttcaagatcgtgagctcgaatggcaggaagcacttgagactgccaagaaaaaatagttgatccaatctaaccttagtggtggcaagaacatggtggttggaaccagtgtagggatcgtgaaggttattctaaatcataagatcaaaatagagaaacagagagtgaaagggagaagagagatagaagaaaagcgaattgatgtagtattttctcattaccaactcttgaggaatacaattcttatatagagaatataaagagtatagagaatcaagaaccaccacttaacaacctagtagaaaagactctaactaactaactgaaactatatagttagttgttaatcacaattgtcactaacttcctcaacagtagctgatatgccttgtgattgtaatttggttcttctacaaaaaaaataataataataatttggttcttgttatattttttaccaaacaaatttccaaccatttgcttgagggtatacttatagtatttataggttaggatttgggttcgggtatatccgtgacccactagggtttgcatgttaatttggcccactaatggggtaaatataagaaatatgttgactgggggcccataaatcgaggttagcccatgaggctaagctgattcgtacacttggggaccacacaatcctagacagatgtcatgcatgcgtccttttttatgtactgtaatgtcaaaattgtgttgtcaaacaaaagggaggtgttcttttagttatgtgtgcactcttagggtctaacataggaaacaataccctaattttatgggattcaatatcagagggctgccacattgtaatatcccgaaaaatatattgatattttaattggacatattnnattaaatatgtgattaagtgggtattagagtag

SEQ ID NO: 72393 - DNA, 1096 bp, Cannabis sativa
  modified_base (56)..(67): a, c, t, g, unknown or other
tgaatttttatacaacttcagccttccttctcggaagccgaagcttgttacataannnnnnnnnnnnactctcgcatgcacattgtttttggtgcgtgaaagagcactgggggtacgatacatcttcaaccctccttcccgaacatgaaaggacttcttgaagtctatcctactccttgtgatgctttgcctttgatattttcaagcaaagtataagcttgtatttttatacaactgtagccttccttccaggaaactaaagcttgttccataaaaattaaacatgagtctcgtatgcacattgtttttcgattctccagggcctcgacctctagaactgccatgctggaggtgttgcgtgcatgtcctctgcaagctctgccttgcggactaccgatatcacggctgcccactagcggatttgtagcctctccatctccagaccccctttcagggccttgttcacctccttctccctctgcattttaagaaggttaaaagggactgccctcttggggaagtcgaacaccgcggtaggcattctggattgagcctgggggagagccctgggctagcccaacctcagttgggcgtaagggggtcgggggtgatcccctgatccccccatgtcaaagtctaacaccataagtttttgcctcttcctggcagaggaactgcttcccgccgttttaaaggggtcggcctattctggagtagacatgatgtgcctatccatagattggcacaacaaaaagaaaagggtcatggcttgaccccaaaaatcctagaagcaacactgttggtcccaaaagcaggtgcaccattcaaggcaccctccaactcttaaacaaataagcaaagaacttaccggttgaaggaggtgtgttggaatcgaaggttctggtgcagtgttgatggcagaaaaatgcaactgagaggaagggaactagaaaagctatgacttgacaggcaagaagagtgagagatggattaactgctgtaagtatttatgggacgactggaaggggcatctttcacgcgaagcagatgtttcagttcaccccaggaggtgtctgatgattggatttgagaattt

SEQ ID NO: 72394 - DNA, 599 bp, Cannabis sativa
ttttcctaattatctaacactaggcccaagcccatattattaatttgggcgccgaaaatgaacttggcgccaaaattcgtttcccgctgaccaaattagggcgcgaaaatggctgttaagttcccttttaattctattttatcactattctgactaaacacattccatacccagatttctccatagcttcaagatctcatcaggcaatggcatcttccagaggaaccaaggaaatggctttcaggcaaagaagaacgcaagctccgaaacccatttcctgtagctcttcatttagttatgaagatattagtagcgatgtttctgattccgaaaacgacgatgatgttagctgcctggtttgtgggtctggtgattatccggcggatcttcttctttgtgataaatgtgataaaggatttcatttgttttgccttagacccatccttgcttctgttcctaaagggtcttggttttgtcccacttgcacaaacaataagaagctcaaatgtatgtcaaagtttcttcctttttcttttcaatttactgttttattggagatttggttggttagggcttttgttgttctatttagctgaaat

SEQ ID NO: 72395 - DNA, 1478 bp, Cannabis sativa
tctaaccgcagagcatgctttgccaagccatgggccgctaaattctcagagcgaattatgagttttgttattgaattttaaacatacacggtttttttttttgttagttagtattatattaaattgtattttatgtaaagttatgtgtgaaattaatttttataaataattaaatatattatattttagcataaattaaaattttatataatattatataaaaatataatatataatccaattcaatacaataaaatacgatttaatataatattctaaacgagcttatagtaaattattcgaaaattattgagattattgaattgaagaatttttattggattttgattaaatgattgtctatctattgaattgtgcctcaaaatattaatatttatcatatcgtactttttgaactttaacatgtactaaactattaatttttttattaataaaaaattatatctttaattatgctattaaaaaatattaacttttaatttttttcaaaggaaagagaaagtgagaaaaagactccatttagtaatttgtttaatataaaaaattataattaattgtaaaataaaatatattttaaataataatttaattttttttttccaaagagagatagagagaaagagactccatttaataaaaatataaaaaaatatatatatagatttatgagtgtatttagtgggttctttatgtgttttaacatctattagagtttttcagtttaacttttttttttataattgtatacgttacagttaaataaattatgtataaattttttaaaaaattcgagtaatttacaatgttaaaaataaaatttaaatattttattacacgcacggttgtttttttttaaaagcgtagttactaagtaactgtttgaattttatttttgaaactgtaaattattttaaattttctaaaaatttacgtgtattaagtagctacaacatacgtaattataaaaaaaatagactaaaatttttttaaatgccaaaataaacagggtctaccagaatatttcctttagtggtgtattagagaaatttccaaaattatattcttaaatttttgctattgtttaaatttttttcttcttaaaaaaatactcatatacaataagagtaatatatattttaaatattaagacaattttttttaaataaagcattcaatgaaatttatttaaaaaaattatatgaaaaaatttaaaataattattaaaattagcataaaataatgtaaaaaaattaaaaaatattatgaattattttttaaaaatgatttaagtttctattttttcaaaaatattaaggtgtatttataattttctagggtgtaaataaaataataatacaataagataataaaaaaagtgttagagagtctcacattgctaatgtgtggaaagaaaatagaatatataagaggaatgggctactcctcccattgccaat

SEQ ID NO: 72396 - DNA, 814 bp, Cannabis sativa
agaccttggttcagagggtaataaagactcaggtaaaggatgtttagtagctatgtaggattttggtttggaaatgccattttgtagtcttgtgcgcatagggtgggttcgagtaggggcaggcagggctactggtgggtttatattggtgggaatggattgaatagagtgaggaaggagttctgtagggggaatggtaatatctggtgatggatgagagatgtctggtggtatagaagatggttcagtggttggtagagtggtattggtatttctagtattgacagggacaggtgcatgaacatgagctgtatgcaaggtaggaggtacaactgttgcagggtttgtctggttagttgggaaagcaacgggtacaggacatgcagggtcaataataggagcatggtgaggagtattataggtggtactaggacagtggttattaggagaaactgagaactgagcaaaaggaaaaacatggtctgaagttacctgtccttgttggtgctttatagatgcaggaaaaagcttttcattaaaaaccacatgccgtgcaatgaatagccttccttcaggattttcacaaagatatcctttgtgtgaagaagaatatccaaggaaaagacattgttgagttcgaaactccatcttgtacctgttgtatggcctaagatgtggataacaagcacatccaaaaggcttgatgaaagtatagtctggtttctgtcccagtaaagtttccattggagtgctgtagttaagaaccggtgtgggcagcctgtttatgaggaatacagcagtgtgaaatgcatgc

SEQ ID NO: 72397 - DNA, 575 bp, Cannabis sativa
ttattattatttcttcttcactttgataactaataaaaaaaaatcctaaaatatcataacattttataattttttctactaaaaaatgttttagtgggtggccagatagaagtgttacaaaattgaggattacattatataaaacaatacgacacattttgggttattattcttattaaattatttcattagaaattttgtaataattaataatcaattaatttataagctttgtttgttcccttattaaatatgcttttatttttgatttgaaaacgataagaacgaaaaaaaaaaagagaattgaattctatatttgcacccataagatttaaaataattttttttttttttgaaaaagtttttaattttttttaatagtgttttttttctaataaaaaattatataattttttgttttaattatattttttaaaatataatttattttaataaatatattttttaaaaatatgaattgaaaaactattaaaaaaataattaaaaatatatatatattttagggaaattttacaatgcacccccttaaaatggatacattgatgtactcttat

SEQ ID NO: 72398 - DNA, 837 bp, Cannabis sativa
ggaaggcacgtgtgatccgttatacatccccgatcatcaaggacagactacaagtggattcactacagttgactacaatcgatcttgctcaatgttactcgttggttacaaatcatcattatccaggatcaatcgtcgttgaaagtccatttccataatgactaagtgcgttttaggaaggcacgtgcgatctgttattcatccctgataatcccagcgagactacaagtagattcactatagttcactagaactaatcttggtcaaagttactcgttggttacgaatcatcactatcaggtatcaatcattgttgcaagtccatttccatactgactaggggtattttatgatggcctgtgctatccgttattcatcaccgtcccatcgtgactactagtggattcactatagttgactagaacccatcttggtcaaagttatgcattggttacaaatcatcactattgggtatcaatcgtcactgaaagtccgtttctataatgactgggcgcattttaggaaagcacgtgcgatccgttattcatccccgatgatccttgcgagactactagtggattcactatagttgactagaactgatcttggtcaaagttactcgttggttacaaatcatcactatcgtgtatcaatcgtcgttgagagtccatttccgtaatgattgggggaaatttaggaaggtacatgcaatctgttatgtatccccgatcgtcccgtcgtgactactagtggattgaatatagttgactaggaccgatcttggtcaaagttactcgttggttactaatcatcactattgggtatcaattgtcgttg

SEQ ID NO: 72399 - DNA, 971 bp, Cannabis sativa
  modified_base (636)..(637): a, c, t, g, unknown or other
agagagagagagagagataatactagtagtatcattattatttgatcatttttgttttcacaaatgtagtgagagaaagtgaaattttattagtttgagatttgaaaataattttatgtttttaaaaactttaaaggggttcatacacaaatatttgattaatttggtatttttaaaaattaaatctgaatataattttgagtttagtttaaaaatgaaaacaaaaattttgttctctttcaaattagtgaattaaaaaactcttaaaatttctcttacttttttttattgtgagattctcaacatattacaaatttaagtgccgtctgttaacacttttatttttaaattttttaatcacagaaataaaaataaaatttttatttttaaatttttattttttaaaaataaaaatatgttctataatcgttttttaattttaaaaataaaaaaacaaaagtatgttctgtaaattttattttttattttaatttgttgattttatttaatctgggttggaggtcgggactgagggcgggtccaagtctgaggccgggttcgaattcagattaaaaaaaactgtttaaaaaaattttaaaagtgattttttcttttgtttttaaaatttagattctnnattaaaaaattgaaaagtaaaaataattttataaaacatgattttgaaaaataattttaaaaataaaaaaaaactgatcaaaaaagtgttactaaacgtacccttaactttttaaaattcaaaaacacaaaattacactacaattaatcacatttctagaaataattttttacatacaaaatttaaatttttgttttcaaaatactcttttagaaaatataatttttgaatcataaaccagttaatcccttaagaatttaatttcattgagattatataaataaatgtgattgttgaccgagattttcggcaaccaataaaataatataagatt

SEQ ID NO: 72400 - DNA, 828 bp, Cannabis sativa
accctaacctcaatgaggatggcgccagtagccaccatattgatgtttgcactaaccggagaagtcagaataataacgggtgcaataatggtgttcctccttggaatgctcaaatgcagtctaacccaaggcccatggattttttatttaatagaatgggcccccaggttggagaagatctttaggataactaaaaccgaagaagaattaactgggatggatacatctcgccctaaaaagatccttcaagagcgcagaataggccaattctcgccaatccgtatggctaacttcctattaacccaagagaagagcttgttggacaaaggacgacaagagctgatcctacaatgcaagcatagctagatcaactcaagactcttatacaacgcctatccaacaaaaagatatctctaaccttgaacttgacagggcttgaggatcgcctttctctgcgcattaacgtgttacccttaccaaccaagtttaagatgccaacttggaaaatgtacaatgggaaagaagatcctttggcccatatcaaatactttgagatctagatggatctgcaggggttgatagaggatgttcgttgtaggatatttataacaaccttgtgtaatactgcataacaatggtattttaagttgtccccaaggagatttgattcctgagacacttttactgctgagttttacacacagttctcatcctgcagaaagataccttcctaattggaggacttggtggaaataaagcatactcagaagaacctttgatagattacatccaaaggttcatgattgaggccacaaagttcaaaggcct

SEQ ID NO: 72401 - DNA, 816 bp, Cannabis sativa
accaccaattaagctcctgtattcggttggatttttgagtggcgttccatctgtgattgaaaatgtttttcctatggtcattggagtaggacaaggcttcaaatgggtcatattgttcttcttcaacaaatctgttatgtacttggcttgggataagtacattcctgtgtcatccctatacacttcaatgccaaggaaatagtttaaggagtcgaggtcttttaatgcgaattccagattcaatttttcgacaaactgtctcaacttttcagagttgtttcctgtgacgattatgtcattgacataaataagaactagcagtacttcacttgctgttttgtagaagaatagtgaggaattagctttggaatttgcaaatttccagcttaacagagtttgttttaccttgtcaaaccaagctcttggtgcttgtctcaacctatatatgcttttagtcaatttgcatacataatcagggtgtgtcttgtccccaaaaccaggtaattggttcatgtaaaagtcctcattcagagtcccattaaggaatgcattattggtcgagttgtctaacttcccatgactttgaaacagcaattgttagaacagctctgattgtgcaagctttcaccatagggctgaaagcttctccataatcaattccaggtctttgtctgaacccttttgcaacgagcctagctttaaacctttgaaagcttccatctgcattcaacttaattctataaatccacttgttgtcgactatgtacattacaggaagtttaggaacttaagcccaagttttgtttttcactagtg

SEQ ID NO: 72402 - DNA, 1275 bp, Cannabis sativa
tgtcttgagttaaaaaacagagagagtgtttggaaaaaaagaagaagaaaataagtgcatggttatgatctctgtgtaggtatttgtattttgggctctgcactattctttcaaacatgcataatatatataatatactttcttcattgtaattctcaaactgagtataaaatttgtgcactatgagaactgcaatgtattttggaacaagctatattgatgacagcaataatttcttttttgtacttaattgtttttactacccctttgatttactaataataaatacttgatctaatcattttggggcatatgattaaatatttgtactttaattgtatgagatgtgtttattgttcttacctctgtgtttccctttattcatgttaaatagattatgattctttgcaatgtgagctgtgttgtgattgatcgattaatttattatatctagagactataaattgtgactaattgatattatagttggtcagattgtagcagtgtcaatgttgtatttaagatattatttccataggtaaatattggtataaatattcaaaattttaagtttgtaagtgatataaatctaatgacataaatacttaatgttttacaaattgtaatttttttcaaattttgtgagtacatgttatttaccatattttcatcaacaacaaaatttgttatctgttaagcctagctagtaatagtatccacaaccatttagcccatatttaatttggtgtaaccgtaattataatgtacttggaaaaactttttctcattggtgattactatgttttcttagagaaatattactgttaagtaagctccatcactaagaagtgcattgccaatctttaacaatttttcagaattcattcaatgcttaatcatatgctatttgatgtaaactttggttttatgacatactcatttattaactactagacatgatgaacatacatcctaatcctatttgtggttatcttttttctttttccagcaaaataaccagtttgagtgaactgttcaatttaacatgattttgctcccttgaatttgtcttcaaatgctcacttataaatggaaaaattataaatctgttgcctcacaagcttttttagtaaaataatcttcaaggacaacaattgttcagaagaatagataacaatttgagagagcgaaaatttctatcaatagacgatcatgttaagatttataaaacatttaagaaatatataaatcacagatctatacatattcctaaaa

SEQ ID NO: 72403 - DNA, 743 bp, Cannabis sativa
gccacactgctgcatgctgttacaactgatgtgatgcggcctgtatgggttcagatccaaacaattctggcactggaaataaaggaaatcaaggtggggctgttgatttcattgccacaccagatatggtggaagacataacttggtacgcagatagtggggctagtaatcatgccacagctgacgcaaacaacatgacacaaaagactgagtacaacgatgtggaattcttaactgtgggtaatggtaatagacttcaaataactcatgttggctgtggaaaattggtatctattgatcaaacatctcttgttctaaatgatgtgttacatgttcctaatattactaaaaaccttgttagtatttcaaagctcacatctgataataacgtatctgttgaatttttctctcaaaatttttttgtgaaggacttggaaataaagaaggtgctgcttcaagggaaaattaaagatgaactctaccaatttccaaaccccaaagaaggtcgttgtgatcactcccccaagtctgtcaactctagttttctatttactggtttagtgtctaagtcaaaaagccaccatgttgctcagcaaagttttggttcaatcaaggataagttgcgtaggagacttggccacccatccaatcatgtcttcagtcaagtgttgagtcttgttgatgtaaaacctactactaattgctatacaaacttctatgacgcttgtcaatttggcaagtct

SEQ ID NO: 72404 - DNA, 766 bp, Cannabis sativa
gaatcatcccctacggtaggtgcttcaaaagctagagtcgtctggaaagttactaaagtgggctgtggagcttagctagtttgacatccattaccagccacgggtgttgataaaaggataggcccttgctgactttatggtagaatgcataagcttcaattaccttccagaagagctagttcccgagttacatatttggaaggtctatgtcgacagtgcgtccaacgagaaaggggccagagctggggtgattttaatctccctaaaaggaaccagcttcaaagtgctctgtgcttcagattctacgcctcgaataatgaggcagagcatgttacaatgttggcaggttttgttggattctatgccataaataaaacccaattcaatataattagatttactaattaataaaagatcagaaatcattttatgttgcgtggttcacatgattatttcatgattatatatttaatgtataaattcatttaaatctagaacatacggttatttatgattatagtgttgtcaacacaatgaaatataatcatgattatatgttcaaaagtttaagttacataatttgtcagtacactggatttagatggacatgataatcagctataattggcaaagtatgccagtatcggatgtctctagtatccatcagattggatcgatattgaatttggataagatatcataaacttaccgttatatgattcttagtcaatatcactggtttatcttaggttaatagatcttaatc

SEQ ID NO: 72405 - DNA, 612 bp, Cannabis sativa
tttaaaaaatacttgagagatatttttagtgtggaaatctgtatttatactctatatatttcctattcattcaataatatcagttacctcctgtaaagtaggctaattatcgaatcacgtacgtatttttgtatgttttatttttacttctttaatatatcatataccactatttattgttatttattgtttctaagcacaataaattagtatcagagctaaatatagtgatattatatgtcaaatcgaagctctcgacaagacaaatccaatgccaaaagaatcacctcaatcggaggttcgacgtgcctacagtagccatcggagtatttctgccaacaattgagttaacttagccatacaatgatttttggactgagtcaacccattttcaacctagttggacgtgttccaaactaattggatcgctctgaattcaaccgtaatatttgcttctaaaatacgatattgaaatttgggtaaatattattttaagtcataagctcaaaagttctgttattctgctagcacttatggctggcgatagggttgtacatcggttggtttggacggtttatcctatatattttctaacccaatctaaagttcggg

SEQ ID NO: 72406 - DNA, 1503 bp, Cannabis sativa
ttctacttttaaaattttaaaaacaaaaaaaacaaaaaaaacaaaaaactcaaaactcattaaaaaagtgttaccaaacgctaccttatttaacggaacaaagcctaaaagatcaggcgaaaacaaaactgcatagatctcaaaggagatgaccaaacaatgaccaaactaagctaataataaagatggcctaaaacctaacgctacaaaggacaagggtgataaacaccaaaatacagtgaaaagaaaaaccaaaaagaataaaagatgatttggacaaagaaaatttacaaacaccaaagtaaaataaattagacaaagcaaactacaaatggaaactactcactactacaaaaatactttataggggtggttttttttttttttttttttttttttcagaacattaattaaaaagggaagctaaagcctcctaatattcacactaatgaaaaattgacatttagaggcggctactttataaaaaccgtaggtatacaatatcactacacctacagagtcggttttgggatttggtaatcgtgaagggtttttactaaccatatcccgtcgtttattaagaaatcaccgatgacatagacacacaaaataactgacatgtgtgccctatgctgtcgtttatttcctaataaccaacaggatatggttatataacccttcagcacttcgtcttctcccccacttctttgtcttcttcttcttcacaaaaccaaacagtagcagagaacaaactcaaaaccttcgccaaccaccaccaatatcttcaccatttttcaccatttctgcccattttttttttttttaaaaaaaaaccttctattttccatacttaaacctttacacccaaaaagtttagatttttacccaattttaagtgtaaattgaagccaagaagtagttgtggtggttataactctgaacgccagttttagtagagaaaacattgaatctcaacgtccattaaagtataaatatgatttctattaattttagtaatatacatttttttatttttgattttgtaattcttttagggtttctctatattattaagattatgttattgtggttgtgcatggtggctgaattttggttggcattggtcactggattgcggtaataaggtaaaaatttaaaccttaatagtatatttgtatgtagtttgtgttttattgaatatgtattgtgtatatgtattttatacttgtatttataaaaatattgtaattgtattgtaattataattagtttagaaattaaatttttaaaattttgttagtatgagatataatttattatatatgtacatgtaagtttttttaaaaatagatagagaaaaaataaatcttttatttatttttatttacttattaaatttattttttttcattcttatttatttatttttatattttttactaactagttgttatccctgattttgcctcatatacgtggaccaaccagacagggacacgtgga

SEQ ID NO: 72407 - DNA, 1203 bp, Cannabis sativa
atatgttttgttgaatttcagagaatgctcaagattgatggtttctttccatcaaaaggctggaaaggataagaaactgactggagtatacaggaaatacaacacaaagaaatttgggttcgcagttagagctgaaccagcaaactttctaataggtgtgtctactgagttttgagttcctttttcgaatttcaaaccgagaagcaacaaaagttgccccccatccctctcttctttgctctgctaagtcttaaaacaaacaaaacatatatacaccaacggcttttctgagcacaattttagtgggtttctttcttcttttgttgccaaaaacttattatttagcagtgttgatttgtgtgaccatgaatctatatttctactacattcacggttttattttgtaagaagtagagggttagatgtgtagatatgtttctttctcctcccccctcttgtcagaactgaattttatctatacatacaacatcatactctataatgtttaaggaggagaatcaataattcatttctgcccaccgcttttggggttctggtatttgatgttgtgtgaaatattaccaacaattcttccaagggctaagaaaatcaactttgtaaaattctgtataaatcaacttcacaaatatatatatatataattcttcataaataattctttatttataaacaattcattatattttacaaaaaatatgttgatgctgaaaattatctcaaaaataaatttgtatttgcaatttgaattctttacacaatttctcttaaattggcgatgattctctctttgagcagtgtttgcaaactcgtatgcacttttggagatgtaatgtgattaagaattgttccctttttgaatgttggagtctcctatttataggcagtgccgcacaatcttcttcctattattggattggtccacgtggctctattctcctatttccccgtgtgccttctcttctactatacttatcgagctctattctctatctggttctgaactcaattctgctcttctgatttcctcttattttttaaataaaacgatgcgtttctgaccactattgttgttcctgtcacatcaatttattacttctcatgttttaatcatagtgaaatcgtcatttgttaagtctgagctcatatgttgtggaatcagttatccaaaatcattatgcacat

SEQ ID NO: 72408 - DNA, 1035 bp, Cannabis sativa
  modified_base (989)..(1008): a, c, t, g, unknown or other
aacccaagttttaatggcatttttagttgaacattcctaattatttttcttacttttttgttatttttttgttcattgaagttgtaaactaaatttttagttcagtatttttcattcctttagaaaaaaaaattctgaacattgcccagtggccgcggtgaagacatcacggccgcagcgagataggagcactcgccgcagcggatttatttacggccgcggcgagatactcaggcagagaaggctatttttattcgttatctcaccgcggcgaggccatctttggccgcgacaagaatgcccaggcgtgaataaaaagggcatttcgaattttcaaccccaaaacaaccattcttcaaccctaacctacccattctaaattcctcatccccatcaccataaaccttcaatctcatctcacaaaaaccacttctcttccatttggttcttaatcattcatccctaatcacttcaaaaccctatttctctcatcaatccatctcttcctttagaaaccacacttagaatccttaattttcacccaatttcaaaaatccactattcatcaccttctacctcaagaatttacaatgtcttcatcaatggagatagagtgaaggagattctcatcgatgtaagtaatttttcatgattatctatgaaatttttagataattttgaatttttgagaatttttagaaaaatttgaatttttgagaattttgaagggattggtgtgcttttgttattgctttgcatattggtgtggaaatattatttgtgattgaaagattgagtgattattgagtaggtatttacccgggaaagaagaaaattaaggagaagtgctggcaaaatttttcttgagttgtaggacaattaattaagaatcccaaaagataggagcgagtgagagaggtgcctcatcatccaacacaccaaggtcatcggggcgatcaaatgtagatagtgttgggttttatgccctnnnnnnnnnnnnnnnnnnnntaatcatatttacttattaatatagat

SEQ ID NO: 72409 - DNA, 1022 bp, Cannabis sativa
  modified_base (198)..(202): a, c, t, g, unknown or other
aaagtgatgttgcataatattttatgaacacaaaggaagtaatggtgaagaaagttgttgcttaccacaaccttacaactcttgttatttgggtatagttaaacacactacacttgatatggatatcaagataattgattgattgaaatgtacttctagttttttatgttagtgaaagtgggagtttgttgggatttnnnnncctaaataaaatctatttcaatatcatcttatttgttatcaatagaacattagaagtcatttaagttaacatatgattttcatgattatggtttaatgtacaattattgataaatccataacatatagtaattcgcaattacactgatgtcatcataggggaaattaattatgattatatgcttccaagtttatgtcccatgatttgtcagtgcactggatttacactgacatgataatcaacgatgaagtttacttacactttggataagtgttatgtcattcccaaggcattggtcaagtatgctattgttgaccacaaaaagtgatcaattgttaatgagctcgtatagatctgatgcttgccacgtgttacacaaacagaatgaaaaagtataaagtacaccaatttattatagaggttcgacccccttgtgatagcgggtaatgaccttctccccttttggttgtattgataccgagggttaataataatcagatcacaattggtgagatcttatatagcacccttaaggttacaaagtatgagtcaagtaggtagattgcaaatgagagagagggatagccttagaggcatgtgagagaggaagagagagaaagagccccttgggggcatgtaacagggagagagaaagatagactagggttcttgacttagagtaattttgaggctagggattaggcttagtggcttagcccttctaggttagagttaaggtcgttatataggaagcctaaaatcctaatttacaatgaaatccttagatatttacataataaattgattaaatacaaaagac

SEQ ID NO: 72410 - DNA, 953 bp, Cannabis sativa
actaattaattagagagatgttaaagtttgaaatgtcatataatttaagatcagatttttacttattttattttaataatttacaaaataattcgctaattatttataggatatcatcaacttatggtggtactaagtactataataatacctaaacacaatgtttactaatgtgagacttttaaaacataactaaataagaattaaattacatttaacattttttttttgttaagttcacataacatacaaattactactaaataattatttagaacaacttaaatttagcctaacaaaacaaatattgaaaaattttctaaataaaatttgaacatcgaccttctcttttaatgacggagctaagaggaattgaagaatgatgtaccgaccccctattttctttaaatatttttaaattacatgtacaaaataattaaaaataaaaatatgtattggcccccatacttgaggcttgagctacttttctcattttctctttctattgatttttttaaaaggaggaatattttattaagaaagaatacaaaaccaggcacataaattgtaggaaatttttgtagtagatccctttaaagggttattctggtagacttcttatctgttttgacactgaggagaacttttcagttttttttgcatgattgcatacgttctagttatttaagactacttgtgaatttttagaaaattctgaatagtttacagttacgaaaaaaatatttgaatagttacttaccacgcgtataagaaatataattgtgtgtgcaacaaaatatataaattttatttttgacattgttaattatttagattttttttgaaaaatttacatatggtcctaaatagatacaacttatgtgatcatgaaaaaattaaattaaatttttttcataaatactgaaacagataactaatttatcaaaacactc

SEQ ID NO: 72411 - DNA, 1075 bp, Cannabis sativa
  modified_base (50)..(57): a, c, t, g, unknown or other
  modified_base (493)..(494): a, c, t, g, unknown or other
ttaaatgttaagtgtaaaataaaagtaattaaaaaaaaaaagaaaatagnnnnnnnnattttgctaatttcaatttgtcaaaagtccgttttgacaaattttacgcgatggaggtggtgaggaagtcaggtggtgccgatgattttgctagagcagttgcgaaaggtgcagcagagcaaatatgtgcgagtgatggatttcaggctttccagagcaaataattgggcacttgcctaattgatggtttcatctacatcaatattttcatcaataggtatctcccttaagctctaaacttctcgactttatgagtaatgctagatgtcacaaattatcatgaattagcttcttatgacaatatatttattaaaaaataatctaaaaaagtgaaccataaattagtgaaatcaaaaattatggcatgccatgttattcttgatagattttcatgataaattttgatgatgtataacatttttctatatatatatanntatatatatataatttgtattttgtctgctttggtatccattaatattctattgggtgagctaatattaatattatttacgttgctgttcattaagtgtgtgatcttacttgttgctaaggctgggttgttctgtttgagtaagttaaattaaaagactttatataaatttctatatattaatacataccttaagtaaaggttgaactgttctgtttgtagatttagtttaagataccttgctaattgctataacataccgagctgagttaaatgccttctgttttgtatacataccatgaaacatgccatattgcagatgtgtgaagattagtgctattccttattcattcgttttggttatatatagatgttagaactgtggatccaggagttgtcctgttgagaagagtgataaaatggcattttttttctttccataatattatcaaggaacttgacgtatacatcaaacaaagtttaggtgtttttgttttgctctcacatcaataatttgatcaaggcacttaaccttggctacagaatggtttattttgttttttttctcactctatcccaatg

SEQ ID NO: 72412 - DNA, 958 bp, Cannabis sativa
ctgccgtataccactacgctgaatgacggcggctctgtgtactccgagaaggagataggaacagagagagaagaggacaacgagaaagagagagaggtttaggggttctcgggctcatggacttttggtgatgagtggctcgtcgggatggctgagaagaaccacctggttctatgatctcccttctctagcgtcgcgtgaggatcgagcaagagagagagagagggtatcagagagagaaagtgagaagaggagactttatgttagggtttttagtttaggttatactattctttttatacccctttttatttatttttttttaattactgaaatttttgttatttatttattttttcttgttatacctttaagtcttgatttataaccgagactaaggaattttttttaatgtatttttttattaaatataaatttattttattaaacaaaaaaaatatacatatttttttttattataccctttaatctaaaactttttttatgtattttttttattaaatgtaaatttatttattaaacaaaaaaaattacatatttcttttttttttgttataccctttaaatgtcggttttataactgagactaaaggatcttttagtctcggttatgaaccgacacttatactcaatttgtatatttattgtttttttaattttttttgtctcggttatgcttttagtgttggtttattaaccgacactaaaagtcattataggtgtcaattataaatcgagactaaaaagttggagtgatctttaatgtcaaaaacgtccattgaaccgacacaaaaagtctattttgtagtagtgcttgtaaatagatagtgatggctcacacttaagttggatgaaatttttcgtctttagaaaaattgagccacctattctatagtcatagccgaaccctcttccctttcttttcttcttcaaattt

SEQ ID NO: 72413 - DNA, 1119 bp, Cannabis sativa
aaaaaaaaaaaaaaaaaggaacacacactcacaccacagtcgcctcctcaaattgaagaaagaaaaaacatttctttgtctctcgcagactcgcagtgctgctctctttatctcgttctctggctctctggtctcctaagccagaaggctgccacagtgcaaggacagggtcgacgacgaacactcgctcgctcaccctctctttctcttgctttgttccaatcgcttcatccatttcaggtgtcaattctatacatgttttcattacaaattatagtatagggttgtactcactagtactcaacttaaaatcatcagattatctattctttccaaattagttattaattcacaattccatggctgttagaaagaaaagttatatgacattttgctttaaattgttaatttttatataattaattgtatttttacaccacctttggtgatataatattttttatgttcatgaaaagcaggagtatatctagaatctattatagtctgaaaccaaatgttctaccttagccgaattgagcacacattgcgtgtgccacctgacattttgaggcttcctttagctgaagccattaaggttgagcttgagaagctttttttagacaaggtttgtagtattctcttcatgatttaaggaacaccctttgtttctatttcattcttttttttttcccttacattagttcagcttgaatttataatttctaaaagaacctatgggttgttttatttaatgaaggttgtttcgaacttggggctttgtgtttctgtctatgatattagatccattgaaggtggttttatctttccctctgaaggtgctgcaacttacacggtatgcttcaacagttacatctcttcaaaattgtatttaaatcttgaacttgtaggttgcttactcgcttggtaaagtggcttgctagcacatatgcccaatttcttttattttcactgaaaacattactttatgttgaactgatgactgtttttaattttgtaagagaactgatgactggttttattccagttatgtaggacactgttttgttacaattcaattcaatcaccatgttttcgtaatctggcaggtggtgttcaccg

SEQ ID NO: 72414 - DNA, 1116 bp, Cannabis sativa
tcttcttccttcacaatgtttaatttacattattcataaaacgaatgctacatcttattattactctattcacaaaccgcctgtgtttgtaaatatatatatgtatatatacatatataagcttcacttaaaaagaattccctttaatatatacctattatgtagtgattatattactctgtatggtgaggccaatatttttaattacgagtaatggaattgtggtaggttagaacttgttgagaaaaatcattaatggacgtacagttcatatcatcatgtacatctactttaatttcgctcatttgaattaggtcaccgccactttttatcgacctaaaaagccgttctattcatccacattattttctctcttttttttttttaagaaaaattaatgtatatgcataagttctgagctgtacatatataacttaaattaataatataagtaaaaaatgcagtgaaactactcaatttgttacacttacaaatactccaaatcaagatatattttttaaaaccataaattaaaataaatatatatagttaaaaacctacttctactaaaaaaaaacacatattttctattaggctagaagagccataacctgtgttaacatacttggattacaacagatacggtatacgtaccctaaaagacaagttattaattcgtttttttattatttattttaggtatatactataagacccttggaatgtgcatacaatcgtgatcaattaacatgcaaatatacgattaataaacaaaacaatattatactagatatttatatgtatcatttgtaggaagaaatattctatataagtatgtattagttgtaatgtgaactaataattaatatagatccctctcaattcagggaactatacgtacagagccaaacatgtgatactctggaccagatttattgcattgcctgcactgccctatatatgtttcttatataaagtagaggacccattttttattgtcgttaccatatatatttggggtttttttttaaagacattctaataataacataattgatgtcaattaatttaatagaataattagataaggcactatttttttttgtaaaatattta

SEQ ID NO: 72415 - DNA, 2039 bp, Cannabis sativa
  modified_base (476)..(479): a, c, t, g, unknown or other
tatcttaaatagttataacgtacatgaatatgaaaaaaattagactaaaatatttttctagatgccgaaacaagttaaggttgtatgagtacatctcttttaagggggtgcattgtagaatcaccctttttcttattaagaagtcaaccaatagtcttttttggaaaattctataatacacctccttaagaaatgtaccgatatatttctatctgttttattatcaaaatatttttttattcaattttttctcatggtcatgtaaattatagttatttaaggcaacttgcaaaattttaagaaatttgaaaaagtttaacacaccgaaaattacgttcaaacaatgtgttgcatgcgttactattttattttatatgagtgtaaaatagactgtctaaatattattttctctattgtaaattattctgaatttctcaaaattttataggaaatcttaaatagctataacgtacatnnnnatgaaaaaaaattagattaaaaaattattttggataccgaaacaaatagaaggtgcatcaatacatctattttaagggagtacattgtagaatcacctatttttttaaagcaaaattgcaaggaattgttaagtaagatgattttaaagataaaagtaagaaaaattttataatgcactcccttaaaaggaatgcaccgatatattactatctgttttagtacccgaaataattatttagtcaatttttttttatggtcatgtaaattaataaattatagttatttaagacatcttgtaaaattttaagaaattcggaaaaatttaacatgctgaaaattgtgttcaaatagtattacacgcttgactttttcgcgtgtaaaatagactgtttaaatattttttttctgtattataaattatttcgaatttctaaatagccaaacaagtaaaagatgtatttgtatattctttggggtgcattgtaaaattactctgaaatcaatattaatctttggagaaaaagcaaaccaaatatttaaatgggctaagtattagttgggttgatattgataagtctgccttttggtatgtttgttaagtctctcttttgagtgttctgtgcggattcgaaaattgtgttgctgtactggcgttcttgctgattgaatcatggacttacaaggattggaagatcaatgggcatcattggaattggaggaagaggatgaggttggcttagttgcctcacgcgtcgaacaagaagaactggtcattgatactcgctggtgtctaattgggaaacttctctctggaagagttagcgattttgatgcttttcaaaacatgatggcgtttctatggcaaccaggcaaaggaatgtacgttaaggaactaaactctaatctatttttatttcaattttaccatgagatagacatcgatagggtgatcacaggaagtccttggactttcaataagaaacaacttattctccatagattgaaggaaggggagaatcccaggagtgtgaatcttcattttctagatttgtgggttcatatctatgatctagaacatggatttcagtctttgaaggtggtcacggatataggaaatttaatgggcaagtttgtggaatcggatatcaacaatttttcaggcgtatggagggaatacatgagaattcgagtgacaatcgatgtcgacaaaccgctgcggagaagaatgaaaatctttcgtgaggatcggagttggttctgggcaaactttaagcatgagaatctctctactttttgctttatttgtggtatattggccattcggaacgtttttgtcctaaattatttcatacacctgctcacttgattcaaaagccttacgggatgttcttgaaggccaacagtaggcgtacatctgaaaaaatcggagcaaaatggctccggtcaggggctgtaggagggatttccgagagaggggaggggagttcgaggcctgtaactccggcgatggcagggggaggaccgacggaggtgaatggggagttgattgggggatatgg

SEQ ID NO: 72416 - DNA, 674 bp, Cannabis sativa
gtccacgtaatattaattatcaaatattataaaacataatttgaaaaatataaaaataaataaattataattaaaaaaaaattatttatttttctttcttttcttttttttccattttttttccttttattttcttcttcctcctctgaactgaacaaaaagctctagctcatctcatccatcccaaccacctccccaaactttatcttctccactcaattttcctcttgctctctacctcttgagctcagtaactccctcatcgttcacggtgcgagtccggcgagcatctctcatcaatcaatggccaaaatagaggccaccacgggcctcctggcctttgatttcgagacaccgagcccctcctcctccctattttgcctaatcatccccttctctccatcacgtgtaccactgttggatagaacggacaccagcagtggcctagtggccattctcattgtggaaatcaagaccctgaggtctctaagacttaccattcctcttcattttcattttccttttcttcttcttcttcttgcgaactgaacaaaaaaaaagtattaaaacatttgaaagggtgagagagacagatcaaaggagagagaagagggcggatcggggttgggattttctgggtcttgggcttaggttctgtggcccgtgtggcctaa

SEQ ID NO: 72417 - DNA, 580 bp, Cannabis sativa
ctccctctctctcccctttgctccccgtccaacttagggagcttcccgctccctccctctctctctcccatttgctccccgtctaaccaagggagctccccactcccttcctctctctcccctttgttcctcgtccaaccaagggagcttcccgctccctctcttcctctcccctttgctccccatctaaccaagggagctccccactcccttcctttctctcccctttgctcctcatccaaccaagggagctccccacttcctccttctctcccctttctccctattcaaccaagggagctccccactcccttcttctctctcccctattactccccacatgtaccaagggagctcacctttcccatcacttagccaaaatgctaagtgttgctccctctcccaacatttagccaaactgccaagtgttgctccctttcccaatacttagccaaaatgccaagtgttgctccctcttcaaacatttagccaaaaagccaagtgttgctccctcttcaaacacttagctaaaatgccaagtgttgctcctcgttcccttcctctctctctctctctttct

SEQ ID NO: 72418 - DNA, 996 bp, Cannabis sativa
  modified_base (26)..(31): a, c, t, g, unknown or other
  modified_base (874)..(874): a, c, t, g, unknown or other
tggctcactatccccgaatcacaagnnnnnntttttgactttggctcttggataatttttttttttgatttttggtggctcttttttttttcggctctacttcgatcggtttattttttgggggttggatagtccctagagatttttttgtttgtttttgctatgatacagtagtagtttagagaattcttgtatgaaagtaaaaaattctcattaagaaatgaatgaatatcagagtacaatatttatagagtagagctcttacatacaagggaagaaggagaaaaagaaattgttacaacgatacaacagaaagtgtaactaactctaactaacacgtgtccaactaatctaactactaactaacttcagggagtctattaaaaacttaattagtttcaatacataaaactaataattctaaccctataaaacgctaattggaattaaacaaataatagtaaaataataaataaaacaaaactaaatatagtaaaacaaaaactaaaaccaaaactattaacagtaaaagttatgtgagtaaattaaccatacgtacgatatctccttatacttaattttcttaaatgataacacgtacaaccacggaaatcaaccaagtcgttcgatgtctcctttgcctttgcaagccaatcaaccacagatctcaaccaagtcgttcactgtctcctatgcctttgctagccgatcaaccacagaactcaaccaagtcgctcactgtcttcgatcaacaacgagatcatccaagtcgcctggacaagctgatgtcgtttgctgtcttccgacgtgaatcgaacgaaaaatgatacgccggcgccgcctagactcgacttgtaacgtccctgcttcaagnctccattgggtccttacacgcacgtaataatggctcttatacacgagtacgtcactctagttgcttcatggactgatgactgaccctacaaaccaacttgagtatttccagcatgctttgtc

SEQ ID NO: 72419 - DNA, 689 bp, Cannabis sativa
cagcccccgccattccaactaacgattttcatggcagagagcggggctgagagccagcctccgctgtgttgtccatgaaacccatctgatcttcttgttgttcagaaacagtcaggtttgtatcaaccccagtagacaaagttggagagtacgtagcttgtgttggtcccctgcatcgcttcaatgtttgccttagtgaaatattgtcagattgtctcttaataaaacggtttgggggcatattttatttgtccatagactgcctgacagatgaacaaataacaacatcggttgctgtatttgttgatatattccgcggctggaaacgattgtcatgatgtagtgcataagtcaaagtgggatttggaggatatgtaacaatagtaccaatatctggtatgaaaatgtcagagagatcatccacatcaaccgagttaattaagtgatttgttgttggaataatagtcgaggaagagccaattttgctaggattagcatcagattgtttgttgacaagtccacttaagagtgctggtgcgaactttacagtggttgctggtgtagattgcacagatgaagatgacaccatagtagttggtactggtttctcgtgtgaagttagaagtggaggagtaactgtagcagttatagcagaagaaatatttgtgctttgctggttttcagaggat

SEQ ID NO: 72420 - DNA, 821 bp, Cannabis sativa
aaacctagattttctacggttttcctagaacaagttcaagactattgaattttctataatagaaacccagaaaatcaaagattcaaatattaaagaggataaagatgaataacttattcactgtttgaagctttagatctgttcggatgacatggatcagcactttctggaaattcttcgaaggatttgagaggaaaaggtgttcttgctctgaaatcgtcaagaaagaaaatgctaaaagtggtttattagagatttgtgccctatttataagcaaattagtgaggaagtgtaatcaaattgagatttaaatgccacggtttccccccaaaagtaaacgttgggcaatcaagtacctgaagagcaaccgttaaaagcgtgcaaatttttggaagattttgaggtatgaatcaagcagcaataatgagtcgaatatcgaatagactcttagttagaatcacattggatcaccaacagacgcgtcgaacacgcgccacctgttcaaatatggattcaaatcgagtgatgtctacgcgcgactagtgacaaatgttccgaacagaccgcaagcaaaatatctgtacgcacaaagtttgcttgaccaagcagagtaaagggcagataatccgagcaaagagtgaagttagttctccgagccgtgtatcaagacttgactacttcaaagttggtatcgggaagcccaagcacaaaggcaatccctacaatcatgggattgtatcaaagggatacgacaggctgtcctaatccctcatttcatgtattctaaatatgtaatgaatgttcttaccaattatagatat

SEQ ID NO: 72421 - DNA, 773 bp, Cannabis sativa
ccttgacagccaaggcaaacttggtacccgctcagacctttaaagagctaagcatcctcatttcaaaacaaatagacatgctagacaacaatccaatatggatgacacccatagcagcatgcttccaaaccaaaaccttgccagaaagtaggtatgaggaggatagttgctaggtgtctaatcctaaacaacgtagcacacagacttggtatcccaatactacctctacgatgtgctatgaagtaaaaatttgaagagctattgataggagtgcataaaggctctacggaaatcatgttggggggccaagccgactgagtgtagatgggatcaaattgtaacatcaacctagcttccacaaggctggccaataatggcctcagtaggctggccgaccatggaatcaaaaactctgccggccactacctccaaaggctggtcagccatagcctcaacccggctggccacttggcagtaccctggctggcctgatccgtcaatagtctactctcatgcttttggtctactatgaccatgaagtaaaccacatcttgctagcgaaacccttaacaaaagggaaaaacaaagagactaaaccaccttaaagtggcatgtttgccaacacaaattttctaggtacttcgacaaacaaatcaaggaaagaaattcttcgtaagagactcattgctctaaagaattccttgatattaaagatcctgtagcaagcacgtttggacccaattgaaaaagttcgcaccgagttacaagataac

SEQ ID NO: 72422 - DNA, 1263 bp, Cannabis sativa
cctgacagtttttgatggagcagatgacgacccagaatctcagcagaggacgaagcacgaacaagcctcttggatggttgagcattcttggtcttgtccatttttcctttgaaaccctaaataaaatgtattctcgaactgaaaaagattaaacttttagaaagaaaagaaaaagataaaaggttagtgatgatcgttggaatagtgtggggaagagaatcggtagttagacatatacagcactaggaaataaatacccaaaatcagaaaaaagaagaaaaaatgaaacttttataccttcttaccttgagcaccacatgtggataaaaaaggaaatacaaagattttttcaaaaaatttggtcaatggttaccaaaaatgaaaaaggaaaaaaccaacttaaccccacaaaatctggaaaaataaaacacaatacagtaactcacaatctatgccttattcggaaatgccaccaaaaaggaaacaaacaaaaaaaaattattttgaaaaataagtttcctaaaatcacaccaaaaataataaaaggaaacacaataaaatacaataaaaacaagtttccataaataaaaaaaatgaaagaaaaaaactgctcaaaaacttaaaaaaaaaaaaaaaaaaaaaaaaacttccctttttcttgatttttttttttttttcaaaataagccccttttttgtatattttttttgaaaaaaaaaatagaaaaaggcaataacacaaaaaaacacataaggcaccaatcaacatattagagcaaaaatagtgtctaagaaaatagtgaaacataacaaaaaaatgacaacaaaaaatagtaaataaaatagccttgatgtttttgccaacaaaaaatacattatggctacttgtctttgtccttgatgaaaaaaaatcaaactcataagaatagtcagaaattattttaccaagctaataaactagtagaatgaggtcataccagttacgtaggaatagtgtttactcagtcgccaagaatattgtgagaaaatcaagcaatatgtaacagctttataagaccattttctaatatatgaaaattttacaaaaaattatgccaaacataagtgtgtgaaactataagcagagatcattgccaatttgtcaaaaagactttttctaatagtatgtaaccaatgaagacgatatcacactacctcaatggtagcccttttcaatggtagcgtatcctctacataactcctaattacatagtaccaacttact

SEQ ID NO: 72423 - DNA, 781 bp, Cannabis sativa
ataagaaatgataatttttccggtgcatttggccaaacgcgccggcaaaagttaccggcataaaatggttcaaccaatgcccacaatttttagtgaaaacttttgtcggcgcaatagtgcgctaatataggttacctatactgacacaattcatgaattgcactggcaaatgtctcagaataaactgccttatggcgcgagccatttgcaatgttcgtaaacctttttctgacgtaattatgcaccggtaaaaggtctaaaataatttggcggcaattttgccatgtaaaaaatgggttgggagaaaatttttactggcgcatttttgcgccaacaaaaggatatcaggaaaaaaaaattaactttttagcagggaaattagactttttctgatgcagatatgagtcggcaaaagttctaacaaaagtgagaaaattctcgcatagaaatgtggcaggtggggagacttttgctggcataaatgtgtgtcgaaaaaggtattttaaaacaatgtgttttaatttaggataacttattaaatttttatcggcgcaatatagacttttaccggtgcaacgaaatgtgacgataaaagtctatatatatcaaggtcaaagccctttcttttttgccattttgttctacttcttcttcctctgtcttctccatccccaccatccccaccaccatccgcaccaccaccaccaccaccaccaccttcccttttctatctctctctaaatttttctctatcataaaatctccctctctctctctctct

SEQ ID NO: 72424 - DNA, 1278 bp, Cannabis sativa
aattatgtattggtttatttctatatcaggtttttttttggtaaagtgactttaaaatatataagttttgacaagttagtcttttaactgtacgtatttaatgacaaattagtctataaatttttatttttctaataaatacaattgagagattaatttatcaaaatttatatattttaaaaactaatttaatttaagaaccaatatgtcaaaacttatctaatttaataagccttatgtatttaatactttgtttaatacataattggttagaacaaaatgtgttatatgatttatgaagatgaaaggcaaagcaattaagccaaggctcattattaatgaatcactgaggagccaaagccatgcattgctcatgactcatgctcatgatatttaagaaattttttgtcttacttggtaaggctttcacatggctgcatgtgaagagttctatacaaaaaaattttgtgtttgtaattttttttttttttaaaaaaaatgtaataaaataaatgcactctcaagagacatgattttgctatcaactacatcttgtattcaattccgccgacttaccaaaacaaatggagaaaaatcatattatttatttatgatttatgaccatgaatatttctatgccacaacttattttattttcaatttttaatttttaaaattttaatttttttgggtgacaaatgtagggaaggacaataaacaaatggggtatgttagagatggagcaaagtaactatactacatgggaattgaaacttgaatatctctcttccatgcctaagacttgatttcatgtcggtttgtttctttaataaactacatgttgtaggaggtaatcttaacttgtttaaaatcaaccaataggaattcaacatgtcacattataataccaagtaacaaacaaacaagtagttcaaaacttgaccttttaaataagaaaaatagacatgttttgaaatagtaaatgtgtatttattaagccttgtaattacattatatttttttattagtacaaagtgtttaaatatgaaatgataattatatataaatttatatttaattaaatagttagtaattagttaggaaaatatttttttttaattaatatttacaatagaaagttttaggaattacatagtgtagttacaatcattttttatagagtgtgtaattggatccgtatattcgtatattacctcaaattataaaattacggtataattatatagtcagataaacacatcaaattatataattata

SEQ ID NO: 72425 - DNA, 1251 bp, Cannabis sativa
  modified_base (974)..(987): a, c, t, g, unknown or other
agctcactaaataatggaaaggggcaattatatatatagctttgacaaagtaattccctccaaaactaactaacaaaactgtcatttaaaatgacaaaacccgagagcgccacttggcacttatagacttatgttaaaaataccacaatttcaaatattaaatctagcttaataaatttttattattgaccaaacaatgacaattaataatcatgaagaacacttgaatgaacaatgataatttagcttaagtaatgcatttaaaattgaaatactattacataaggttttttaaccatttaattctcaatagcttagctcatagctaaattattaatcataaaccaaatcataaaaaccttatgtgtcatagtattttagtaactacacgatttcttagttatccataaaaatatcgctaattaagatttttacctccaaactttgacaccaaatcatctgaacttttcaagtcgttaaaaatttctcctgaacaattgagattgttaaatttaaaaacattggtctaattttactaacagaagactaacgtaactaaaaatttagggacacgattcgttacatatcaaagttcagaggacatgatttagttgaatatcaaagttcaggggatataattaagtacatagagaatcaagacattagtaaaattgaacggaattaggtaaaagtccttgaatccaataatctcaatagtccgaaagaaatttttaacgccttgaacagttttggagacatgattcagtacatgtaaagtttaaggagcaaaaacctaataatctcaatagtccggaagaaatatatatcaaaactttttattacatattattttaagggatatgattttgtcccgtgatgtactttcacggaatgtatttcgtggtacattagataggtcgcagggtacattaaatgagtgtcaaggtacgtttttactttttaaccctaattannnnnnnnnnnnnntcagccgtcagatcaaataactccgtcatctaacggttgtcgtacttcacggagccgtacatcacggattacaatccgtgaaagtccaataacggtacaaaatcatatcccattattttaatttcaaaatatttattaaatagaatacctaatattaaatattatttctaataattcaatccagtcaaatcatgctgactaaacgatctctaaatataaagttaattcaaatttcataaaaacagtattcaaacgtcaaattac

SEQ ID NO: 72426 - DNA, 1486 bp, Cannabis sativa
atgctagtcaaatctaaaatgagtatggtccatgcagacgatctcatggaatgctttgaagtattcaggaagtatgggatgaagctcaatcccaagaagtgtactttcagtgtcaaatcagggaaatttctagggtttatagtgagccagcgcggaatagaggcaaacctaaaaaaagcaggccttgttaagtatgccccccaaagaagacataaagatgtacaaagcttgaccaggaaggtagttgccctgagtcgcttcatctcccattccaccgacaagtgcatcccattcttcaacatctagaaaaagtgccaaaagtttgagtggacagaagactgtgaggaggcgtttaaaaagttaaaagaacacatggccaagccaccagtgtagtccaaacccgtttacggagaggacatgtatctatatctcgctgtctttgagaacgcgtttagcgcatcactggtttgggaagaaaaaaagattcaacacttggtgtattatgtcagtaaacgcatgataggggcagaaattcagtaccccatgatcgaaaagctagctttctatctccttattacatcaagaaagctgaggccatattttcaggtacactccatcaaagtattcacaaaccacctgctccgacaggtcttatagaaacctgaagcctcagggagactcctcaagtgggcaatagagctaagccaattcgacatacaatacataccccgcatcttgatcaatggccaagcgcttgcaaattttattgttgagtgcaatgaaaccgaggctaatgctaatgtgcctacatcaaaagtgtatgttgatggcgcatcaaaagagaatggatcaggggtcgaggtagtaatgatatctcttgacagactgagactctaggccgccctaaggttcacatttccagcttctaataacgagcctaaatatgaggccttgatagcaggactaaagttggctagggcagtagcagccaacagagtggaggtgtacaacgactgtcaattggttataatcaaatgtcgggagaataccaaacgcgtgagaaaagatggccgcttacatctcagctgtcaaggaattgctacaagaattacaagattgaacggatttcccgagaaagaaatgctcatgcagattgtctagctaagttagcattggatagcgaggtagaaaagctggggcagtgccagttgagtatctcacggagcctagcattaaaccaaaagtggaagtagcgacaaatgagcaaacgccaagctggatggactttattattaagtacataatgacgggagaactgcctcaagagaggactatgtacagataggtacagtaccaggctcacaaatacttgatgaaagatggtattctttgccgaagggggctcagcatgccatatttaaggtgtgtgtcagatcctgaagctagacggattatacaagatgtccatgaaggattttgcggagat

SEQ ID NO: 72427 - DNA, 1195 bp, Cannabis sativa
aattgcgataaaaatccagccacctatagcacacacacatcataatattaataaaatagaaaaattcccaaaaaaatttacaaaaatgaaatatagcagtacattaataaaatgaataaaaatcatatttataccttcatggacgttgagattcaacgttttctccgctataattggtggccggagttatataccactaccttttattttaatagggtcgggtacagtaaagaatgggtgaaaaaataaaaaaattttagtgtataggattagatattgaaaatagaaagttttttaaaaaaatggggtgaaatgatgaagaaataagggagaatggagggttttccacagtggttggcgagggtttctaatgggttttctaggttctacttgttgaagaagttgatgaaatgaggaagacgaagttgtgggtttttttatataaccctatggcttctgttattagctagggaataaccagcaggtgcatgtcgtgtaaagagtgctcctatggcgtcggttaatacctaataaccgacgccatagggttaataaaaaaccctcaaaattatccatcctccaaccgaacatagctataattaaattttatacctacagtttttaccaaaaaactgcctctaaatttcaatttcaaatcaggcaggtaatttaacaccctttaacttccttttttataaaatgggttaaaaaaatagcctctaaaggtccatattgtagtaatgtactaattgtaaatttctcacactatcatataaaaaaattgaatcatccattatttttacacatgctaaataccaataaggctctctatttgtaagaggttcaaccaaaaattattatataaatatatagtgtaatcataacaacctcaatttgtaaccaaaataaaacaattcataattcataaatgagaaaactaaaatgcagagaaaaaaaattgaaaacaaaaaacaataaagaagacaaacaattttaaaggggttcaaaatttcccttgaacttctttgaaggaatccttttccaatatgacaatggtagaataaagagtttggttctagaaagcttgaactgttattaaaatttatgccacaattatttaatttactacttattgagtattatgttctttatacaaattggctagttatcatgaacaattttcaatgaataaata

SEQ ID NO: 72428 - DNA, 690 bp, Cannabis sativa
attcgggttaattgggcggtttagagtaatttataaaccacccaatatattcaatgggcgttttggattttcattgtattatttcaagttgtgatttttatcggtttattcggtttggtttgggcagtttattcgggttgggcagtttgtgaattttgttgaacacccctaatggtaacagcagcctcaactgtgaggggatctctaactgtaagagttgcccgtctagtgggcaacgtatcaagcacaccttctcggacaatataagtccacgagctggggaggaactgccaccatccttggttcaattctgagatgaatcgaccgtagaactcatcgcttattcgttcagaatagcgatgatgtgaaattttaggttctagaaaaccactactggcctcaaaattgctcgaggaactattcgaagaactagaattttggactagatgatggtctttgtagagaaaattgagcaagtctttgtcaattcagttgtcacctcctcaaaagttgcacaggttcatctatgtaaaaaggcaggaggaggtgaacaactagacaaaataaaagacttagtcaaagcacgagtcaactgcctaaacctaagggtattagccaaagctaatttacaaagctgttaattggtaaagtacaggtttcgagtgcaaaaattaaacagacattgaagtt

SEQ ID NO: 72429 - DNA, 810 bp, Cannabis sativa
agtggctgggcgaggaagagaaccgtcaatgaaggcagatttgttcttggcagtaagagccattgtgattcctcgcttccaggactgataattggctccattaagaacggtagagaccaagactaatccgaggtgatctgcggtgctgagaaaaaaaggacttgagacatcttcgtgagctaatcgatcaagagatgaggttcgacgagtcgaaacagggggattagtgattggatctgggaaagattgagctggttcgtcatggtcattgtggcttcgagttcttgaattccgtcgaggtgcaacagcggtgtcaacgacaagttgggcggaagctgcatcaggattggactccgaaggattggtctcgtgtgtagatggaggaccaccatcttgagaacgagttgtgggtcgcgccattgatgcagaggcaattgtttctgctgataccatttgaggaaaatacagagcaagacagagcaatacaaagcttgaatagctttggagtaaatcttttattatctgataaaattgtcttacagtacaaaggaaaagaaggctatatatatatgaagtaagggctgagttagttacaactaactcagcatataacagaaaaataacgaacccagaaggttctggtacagagaatggtaatatcgtgataatattacagttctcttacacccgttactattactggtgttaactcatgaatatggacacgtagaaagcctaaatacattaaatttatttatttttattttaaaacttaatatttttaatatcataaattaaattttaaaaact

SEQ ID NO: 72430 - DNA, 708 bp, Cannabis sativa
gggcttcaactaattcctagtaaacatcaagggggtgggcccgtcatggagaagactcattctgggccaaattgtaaggacgggttggtgaacccgtgtgttttgggcagtgactctattcctaatgggccgacttcattagacaaagaccatggtgggctcgtgggtggtaacgcttctatgtcatccgaattccatggagcccaagagcaattaaatgaggagaaagctttggctcaattttttcaagctcaagagagcttattgcatgacctcaagcactttgggaaacttgatttgtatgaaattcgaagcattggtggagatattggggtcccagcatcctcggaagtcaatgagcgtaccacaccctttaagaaacggaaatttgaatcgtctgcttcgctctgcgtgaggcctcacaaagtccctcgtaagtatcctgatgttgttcgtgattttccatgggacaccacgaataaagtttctaatcctgaggtggaaattgaagacccttcggaggacagctctagttctccgagctgctcgggcatcttgaagaacccccttgtgggttcatttgtgattgatgagtctggttcgtgtgggtctgctagctcccacaaccctgtggaggaggatggagaatctcctccacaggagccatgagaggtattgcttggaactgtagagggttagggcagacct

SEQ ID NO: 72431 - DNA, 940 bp, Cannabis sativa
ttctctgaaacacctgaccaccctgaggatgacggacgtgaagaaccctctgccttcttagccatcaagcttctgaccaaccgccattttaatcctgaagccttcaagaatcggctcaagcaaatgtggtctgaacgattttccatcaatatccttgaaaaagaacccaatttctttactgtcgaatttggttgcttcggggacaggcgccgtttactcattggccaaccttggcactttgattacaaactcatcgttatgatacccttggaagcgggttctgtggtgactgctgaatcgctcactaccactccattctggatacaagtctctggaattcctttcttaaagcagtcccgtgctcttgcacaaagacttggtgaagtcttggggcgatttatcgaagtggacacagcctccctcaaagagacttggggtccttatctccgagtccgaattgaaattgatgtaactcaaccactcccgcgtggtacgggctttcactttcatggaatggctgccccggtttggctcgaatttcgcttcgaaaatttacccgatttctgtcattactgtggaaggcttagccacattgtcaaccactgccatgaattcctagcaaagtgtgactcttcctcagctcctcctttgcttcactatgaccagtcttttaggagccaaaatccgcattacctctaatccattttacattgcctgctctcgaactcggctgcgaccacacatagccaacccgacttcattggccccgcctcctccttaccgtttacaccaagcttccatcatctccgaaggtactttcaatgatcccactacagcctatggtgttcaacatctcagccagccacaaaccactcttatgggcttatacaatgctcaatcctcaccccacattaaccttaaccactcccctccaactacc

SEQ ID NO: 72432 - DNA, 986 bp, Cannabis sativa
  modified_base (38)..(75): a, c, t, g, unknown or other
  modified_base (140)..(141): a, c, t, g, unknown or other
agaaacccctactacaactagcgctgcaaccactttannnnnnnnnnnnnnnnnnnnnnnnnnnnnnnnnnnnnnaaatagtatatggagtaattcttctataatattttctctcatttttgtaccagtttgtaccttannatactattgtacattatatattaaagtaatttcataaaaaaatatacaaaatataatatttggtccaaaatattatattcttattttaaataaataaataaataaaataaaccttacaaatttaaactaattcttcactatgtatttgttcttatatgcatgtattatgtaaaacaaaaaattttaaaataaccaaaaaacaactcaacaatgtatcgaactaagcacctcaacaatctctacaaattatgatttcttacttcccacttgtgctacagctttctctttatatttgttgaactaaaagatatatattatattcttttgtgtgtatatatatcaatttaaattttcagggcctccaaaatagtgaggcctggggcctatgcccagccgccccactctttggccggccctgactaaaagttacattgagtcacaaaaaattatattgtgattaaaaaattatcactaaaagtaacattttttgtattgataataattattctatactagtcttttcgatactttctaatcaatgttaaggtttttatcttagatcgatcagatcatatgtttttagatgtgtagaacttaaaaaaagaaaatagtcaatcaaacgatgctaaaagaacataaataatggcggcatgcatgtgtattcacatacatatataagtgatgattaataataataataataatgcaataattataacacatttaaattacacatttttttacacacaatttggttcctatttatgtattttaaaaaaataataataaatatagtattgtcatgaatttttattggatggattaatattatttaatataatatt

SEQ ID NO: 72433 - DNA, 1062 bp, Cannabis sativa
aaaaaaaagaaaaaaaaattgtgtttggcaacaagttaagtgatctttatttttttaggaaaatagccagcctcataaaactactaacacacctccatgcaaatcacaattgtgaaagggtcccagaactagaaaaacttcattaatcaactgacatcagctataataattaagtgattatatttaattaattaagtactaaaaaaattaaatactgttttgtttgtttgtcttgattattttctttttgttttttgtttttccatatggcttaatattagaagcaaaacaacacaatcatgttacaaaaaataacataaaaataaaaagttacaagtttattgactttttgagttaatttgtatcatatatataatttaaagatcagataaaactgagtttagatttatgtaccgtatatatcattgttgacacaattgaaaaatataccaaatctctcattttggtccatgtaaatattttgttgttgatagcaattatacaatgtggatgcaatgtcaccatgtccaaagctcgtagctatgaacaatggtgtcatatcttggcctccatggatcaagaactcacgtctcataattttaggatgaagaaatatttgaacgatgttcatagctccagctacaacagctgaacaaaaggctgtgttaccttttttgtctcttaaggttggatcaataccatcttctttcaataacatttccacaaacttagattgttttgcacctgcaaccaacacatgaagatcactatatattataacacttatcatcttttcaaacataaaaataccaattaataggtatatgataactaaagtagtaccggctgtcacttgctactatagtgtcttatacaagaaatgtcacttttactagtgcatttcacaaactgcgctggcaaaaagatcaaaattttactagcgcacatttgtagttgttaaaatctaactttaccagtacatttgcgcgctgggaaaaattatttttgccaacgtttttcattttgtgctggcaaaagttctaatactaacattgatttgcc

SEQ ID NO: 72434 - DNA, 1267 bp, Cannabis sativa
catttacttattgaatacaaattaatctaaacaactttttcgataaagtgtcgagtatgtagtatgacacaatttagtatctaacatcaccacaaagtgtcatacaattatttattggtataattaaatattaagtctcataatttttaatttaataattattataagaaattgttaaccattcgtgagatatcgttggtgtttaattataatgctatgaaaaataatctattttgataaatatttaattaatattgttttaacgagtatggaaattcattaagaatttttttattgttcaagcttgatgttcattaaaaaaattgtatttttgaaaaaaaaaacttgaaatcatattttgaatatttaaaattgtattaaaaaaatataatatatgtactatattgtattctcaagagaagaaagagactagtgtgtgttgcaaaatccatataattaattaaaatttaaataaatgattgatttgcatggttctaatttaaaggtaaaaagtaattgtggtaataatgatatgctttcttttatgtatataattaactttaaaattatatttgagttatatgactctcagaaattcaattaatcaaaagaagaaagatattattctaaaaatgaagaaagtgcatagtagaatatatataatcaagacatcattatcaactttttatctcataacaattatttaataaaaaaacaattaaaaatcataatccaagttcattttttgcatttaagatgtgtttggaaagttaatgtgtaactgaaggtaattatataatttaatatgtttgtctgatcatgtaattatgttatattcgtataattgaaagtaattaagggattcccattatactctcatgatcctaatgaaaatcgaatataattacactgtgtaattattaaaaaaaattcattttaaatatccaaatagcatattaagtgtcaatatcattaaatagttcaggaaaaatatgtattacttgcgtaatctattttgacatttggagaaacttttagttacttttttttcataataattatttaagattatttgtaattttttttttaaaaaaaatctaaatagtttaaaatatcgaaaataaaatttaaacaattacttaccacgtgtataaaacaaaaagtcacccatgtaataaaatgtttgaattttattttcagcgttgtaaattatatgaattttttaacatttttacatataattctaaataattacaatgtatataat

SEQ ID NO: 72435 - DNA, 584 bp, Cannabis sativa
actacactctcttaatcaacttatgagcattcatttcatgaataaataagtattttgcgtccctgaactttgtcattaataagatcatgccatttgaattattaaggatgttaaatatttcttctcaactttgaacgttagtattttgtgagacttcttttaaataattaacaattttatctttcgaaatataatcactatcatattttgcccaacgaacttctaccattgccacaccatgcccttaaataaaagggattcgatttagcagtggtaaaaattcgggggacaaaatatgacaatggtcataggtcaaagagtaaaattgctaattaattaacgaaagtcccatatttcattagcgctcaaagttgatggaaaatatttaacttcggtaataattaaagggcatgatttcttttttgggccaaagtttaaggacaaagtacttatttattctttctaaaaaataaataaaattatgacctaattagaattaacatttctaattaacattgtggcatacttaatcattttgtgactaaggtatttagatatgaaatattgatcatgatgaaacatca

SEQ ID NO: 72436 - DNA, 838 bp, Cannabis sativa
attgttttagaattcatataaggatgttaatgaaacatatatggtagtaaatcttgatcctagtaaaatattcccaacaattaaatatattttcttattatcattgtcaaatagaattaggaatttaataatttggtagttaactatagtccttgtgggatcgacctcactcttgtgagtctattatttgggaacgatacgtttacttacgtattgaaaaattcataacaagtttttacatcatggcttttctttaacaaaggctctccagttacttctgctacatgatccacccaactttttgtttcatcatcaagtcccttttaaaagaacagagtaaaatactcacttaaaaaatttagataacatctttctccgagctccttaaatcctcccaagaaaaataaaatgactcattgtgttgttggacaaaattcacaaggtactgctcttgatataacatttagatttacctttcaggtcaaaattcagtaaaacattagtaaaatcaaataaaaagaaactaaattaaaataaaactcaactatcttaatattaattgaaacagtcccttgtaatggtgccgaaaacttacccacctaaatcaccagtgcaattcactttctttcacgcaaatgagctttctctcaacatttatatttttgtaaatataaaactttcatatagtattttaggaaagtaacaatgtaaaataaatcaaaagacttacttatttaagaaacatatccatattaaatttgtacacttcacatgcagctaggaaaaaataatattaaattttatcatctaaaataaaaaataatgcaattgtgcacac

SEQ ID NO: 72437 - DNA, 811 bp, Cannabis sativa
aaaaaaaaaaaaaaaaaaaaaacagttcaaagaaattaactcattcaattaaattgaaaggagaaaaataaattttcttacattagaagaaagctatgggaaaaataaattaattaataaaaaatatatactatttttgcctatatataaatacacgatacactaaattttacttttatattcatcagaaaaaaaaaaaagaaggttctttcttataagtagtgcttatcttaactagattgttcatgatcaaggtgattacaacacaaattttatctaataattgatgtaagtaggagtgcttattggacgtgtttttcgatttatttagattcaatctaattatatattggatactagattttaccatacgatatgatttaattaatttgagtcatccaatcgatttaatatttattagatgctataatgaatcggttcaatccattgtattttatatatatttattgattcaatttagattcattcaatattttagacttaatattttttagagcgaattaaattcatccaatattttaaattcaatatgtattggagaaaaaaagagtaaaattttaatgttaatatttatatacatatgtattttacgtataataatataaaatttaattacttattcaaactaaataaaaatactaattaatttaattgaatattagatgtattaaattttcagatattctattcaatatctgatctgatctaattggatattaaaaaataatatccaattcaatccgatcacaattaaatatttaatattaaattgtaattaaatcgatcagtt

SEQ ID NO: 72438 - DNA, 718 bp, Cannabis sativa
cttcgagaacccactttgcacaaatttgttttggtttacttcatttgaagttggaggtctgggtcctcggaaattaggtctattcttggacaatttaaacaactttttttaatttttttcccgtataattcaattgattatttgttttgaatgtgtatggtaagaattagaactagctttttcagatagaaaggtgaaaacatataattaatatttaatgtctcaactatgattgtactctgtatcgaatgttgaagttcataggatatcaagaaaatagatactatatctctttaattactaggaattatgtgtacctgatgagaacctccctgggattccaatacaacagtagcaaaccagtaaaataactaagtaagccaaccacagagttaacaattcttaacttcttccagatcaaattctatttgtcttatgtcccttttgttatttatttggttgtcttgtcttgtgtccctctctcattgtaacattatttaaattagcataaaattcatgttgaatttgttttgttgacaggataggaagaaattctaatttctaaaacaagttgatgagttcttgaacaccaaggttgcacctcaagagtttgtggatgagattaaggtacttttactatgatataacattcttttgtttaagaacttatagatattaaatccataaatatatatgtttaaattgatgttcaaaatgt

SEQ ID NO: 72439 - DNA, 645 bp, Cannabis sativa
gaggttgcggcatgggcaagttatgccagaaattgtagaagttatgacccttaaaggagagctttcgtggctgaagcatgacttttagagagctagtatcatcgagtccgattgtctagtgttggtggaagtcgttcgtaatttaaatgtgttacaatccgcttttggtggtgtagttgaggattgtaaacaatttctctcttttttaatttttgttaaacaatcaccttatgactagagattctcgtttatatgttgattgtatctttttagattctaatctttcttctgttgttgttgttgttgtcattattgagaccgaattggtctaaaattttcagttcaaaaaataataaaaattacactctacacttattttttattttctattttaatttttacttttattttactactctttaatttatacccaattttataaatcatatctccattatgtatattagaaactctaattttaataagttatgtgaggttatatttgttacttcgattataaaagagaatattcatcaattaaaattattttaaagttatatttagttaacgtttcaacttattccaaaaataataatgggtcttatataactttgggctctcagcccaactctcaaaagcccactt

SEQ ID NO: 72440 - DNA, 780 bp, Cannabis sativa
gcgttgcaaagagcaaataccagaagaaccttcggagaaagtctgttccaaagtaggaggaagggacgattcttgctcaaccacaccaggtgcaaggtttatttctttgattgaagaatcagctgtatccatgtcattacccatatcatggccttttgaatctgaagccaagttaacgttgggccttgggtaaatgagtaacccatccagggccttacgttttttaggccctttgtcatgttccatggatctaaagtcatcaatatccaataagagatttaagagagacgactccctcatatatttatccacaatacccagcccagtgagtgtcttaaatcccttggcccataaatcatgtgaaaagcattggattatctgggtctggctgccaaggaggcaagagtatgagttttgaaatgaattatctgcccccttcggacccaggcccaaagagttggtagtattacataatggtgggggcactttatgatttaaatgttcatttctaaccccttcagaatcagggtcagtgaatcttgacacgaaagaggcaacaaaatgaccgttcttactcacggtggtatgtggcatttgcacaatgccctaatggcgatcagatggacccgaagcagcctgtgtactagacacaaagcctccttccttgtcttgagtctactgtatgcatgggtcgatgtccctctcatgttgaataggtattggttctgtaagtagattactcatagaggcttttggaatcaccagtgtagcagtatcctc

SEQ ID NO: 72441 - DNA, 561 bp, Cannabis sativa
taatcgaagaagcagtagccatggttggagaggaaaggggagtgagcgggtgagtaataaccgtggtgggggaggggtcagccatggtggggacggtaaagtgctcagcgtgatcctcgatagaaggacgggcagtgttggaaagggtaggttgttcctcgaaaggaatagaagtggacagttcgaagatacttttcttgtaaatggatttagcaggggcgcggaggacatctttataacttaggctgggagggaaagggtgaaaatggtggagaaatttaccacacttattaaaagtgtgatcaagcttcccacaatggtaacaatagttttgtatgccctcgtagagaaatttgaggcatttagtgagggacagcttcctgaaatggacattcatgccacggtgcagggacttggtggtgtcgagaagaaccctaacacgcatgaatggggtgacggaatcatacagagaaatcaagtggacctcaatgaggtcaccaattgtatcagccacaaactgggctaggccataggatcgagaaccaaacgaaatgtggtgaa

SEQ ID NO: 72442 - DNA, 1071 bp, Cannabis sativa
gccgatggaggcattataactgaacattgcaacaaagaaaatcaaaaaaagacataataacaaaaccatttaaccacaaaagtgataagatatagaacacttacttttatccccattctcaatatgtggctgcaaaaatagatgtgaaaataatctcaatcagaattaacagattgatttaacaacacttttttgataaaaaattgattaacataatgtatcgccgtgaaattagcaaaatatgagtcaagattaacaaagtgaaccttatccaaataggatggagggtagcatcgatacatacgcttgaacgaggtcctgtggtattcatatccatattggtcggaatactgcaaagacaatgaaaaaagcaattaaatattacatataagagtgtagactcaatagaaaacactcgatgatgatgatgatatagtgaagcttaccatgttgttgaaactatatatagagtttttgttggctcaaagctacctatatagagaaaacatacatttataaggtcaaaatatttaaaattagggtttagaattttaataaaattaagcttaacaccatcttcaatgtgaaatcaaatttgacacaacattaattactaaactatcaaaacaatttagatgaacaaaagcagtatatatatgaactacaactaaaaattcaatttttttttttttgacgtgaactaaaaattcaataagtaataattgtaaaaaaccaattataataatggaaattataaagacagcaagaaaaatcataaagtcaaagactttaaaccaaagattgtttattataactaatgtttcgaaaataataaggcatatatctcaaatatttcacaagcttaattaataagtcaaaatacaattgagaaatataattaccgtaaagagagagaagagaaaattaagagaaagtggctttgattgaataaataaaactataacttgatcaatgattaatgactcttatatatatatatatagtaaaataatattagacatatgacttttaaaattctatcatcacaattgaattataattaaaaaataa

SEQ ID NO: 72443 - DNA, 1535 bp, Cannabis sativa
tttttccttttttgattaagttacgggactaaaacacatttttataggtcagcttttccccaattttttttttcaaatgccatatgatttctaaaactgaaagaaaagaaaatgctttaggaaagtataaaataacaacaacaacgtttgttgctttttaaaatctcatttaaaaaggtttcagtgattatattaaagttactaatctttagaaattctatacctttatttatttatttattccaacaaactcaaaataatattctgggattattgtgtgggacttcaatgctatatttaactatgatgactggtgtgggggcaggcaagtgactcacttggatattttagatgctcaaaataactctagccttaggccaagttgatgttctaaaatgtaataaacatgatcttgggattcgtatttactcaaagttggacatggtgttcacaaatgacagttggatcttttcccctcaactgaagcttttttgcaatgggaagtttgctgatatcattgttattgctctgttaagcagttggaaatagataaggttggtatcaaagtttttcgttttctcaattatttaatgggtcattcagactataagaaaagtatgatacagaactggtgtaggttaattcatgggaggggtctgaatggtattgtcgataagttcaactggctaaagcattgtttgaagaaattcaacaggaatgagattaaggacatcttcttggcgtttcagagtgctaaggacaatttcattattgcccagtctaacttggcaggcaactccactaatgctagtttacaatctaccaaacgtgttgctcagattaattttaatttaccgaacgtcttccctttggtgatgaaaattcaaactactttcatgctagtataaagaaaaggaatgagcaaaatcatattacgtcatgcatggaaaatggtgagattgttgatgattatatgcgagtcagttctcactattttgctcactaccagaaaaattaattcaaacttccttatgtatggtaccaagctcaatttgcaccagcaactccagctcataagacctttttctaataaggaagtgaaggatgcgctgtttagtatccactcaatcaatagtcctagtttggatgagtatggtgttggattcttcaaggagatatggaatgagtttggtaatgaaataacttttgctatcttatcttttttcattgaggggcacattcctaatgagctaaacaagactgttatttccttgatccctaaaaccgatgctctgtcctcgaatgtggattataaacttgttgcctattgtaacactttatacaagtgtagcttaaagatgatatgctctagactgagtgaagaacattcttatcttttaagacttccttaaaggcttcactaggaaaaacattttagctcggtgtttgatgaaaattgattttagtaaaacttatgatacacttaattagaattttgtggttgattcactcaaaggacttaagatcggaagagc

SEQ ID NO: 72444 - DNA, 527 bp, Cannabis sativa
tgggaaatttttaatctcttaccaagttgacatgatttgcatttttcccatagattctttacccagtttggataaccctcgaacaattcatgcatttttcatttttttcaaacatttgggaagaatgtgtcaaagtttttcatgccataaattaacggtgttacctatggcagagtgacaagtaacaacataagtgagagtataataataatcaacagatctaaaccctcacaaaatacattaatttttacgattatgaacatactagtgattaatatcaaaattaattgtgtatctttgatcacaaatttgactactcggccaactagcatgacatttttcagcttaagtagaccttcaatatcaattccaatgacattactagatagaccatccccaaaaataactcccccacattgcattggtctaatattgacaagaaaatatttatcacctgtcatgtgtctggaaccactattaaaatacaacatttgagaagaaaagaatattacagcatgaagtgcaaa

SEQ ID NO: 72445 - DNA, 1345 bp, Cannabis sativa
attcatgacagaaactggttactcgaggagcaactatgatccttgtgtatactataacagcacaccaatctggttattactataagttgatgacattctcaccattggtaaggaaagacgagatcaacaagctgaaacagcaactaagtgcaaaattcgaaatgaaagacatgggggaggctaaaagaatccgagagattgatatcaaaagagaaagacctaccaaaataccctatctcaaaaagattatattcaagaggtattagacaagttctgcatgagtgaatcaaaaccagtcaccacacctttagtacctcatttcaaactttctcaatcccaggccccaaagacagaagaagataaggctcaaatggacacagttccatatgcctcttgtgtgggaagtttgatgtattgtatggtgtgtacaaaactagatcttgcctacagtctaagcatgttgagtaggttcatttcagatcctaaaaatgaatattggtctgctgtcaaatggattctaaggtatctaaaatgcacaatgcatttgggacttgtttacaacagtaacaaccgaactattgaagttgaaggatttgtagactctgattatgctggaagcattgatactagaaggtctataacagggtatgcattcacagtcttaggtggatgcgtgggttggaaatccaatcttcaaaaggtggtagcactatcctcaacagaagttgagtacatttctgccacagaagcaatcaaagaggcaatttggttaaggggtttcgcatcaaaattaggcttaaatgcaaaagacattgtagtacactgtgacaaccaaagtgcactacatttaatgaagaatcctatgtttcatgaaagatctaagtacatagacattaagctacacttcatcagagatgtgactgcaaaaggtgaagtccaagtgatgaagattagaaccaaagaaaacccaaaaggcatgctaaccaagtatgttcccttagcaaagttcagactaaacatacttgactgctaagtttttccaagaccagaacagctctttctcaagagggtgtttgcaactcaaaatgtagagccaaagatggatgatttgttatgtttggctacacatttgaattaccctcactcttggatcaaatcaacttactagctcgaacatgtcataacagaattaactaacattttgttatgacaattatgtcaccaacacagtccaagacctaaaaaagggaccctcacctatcgagcttcattgactgagaccaagctacagagagagaattgagagagaatgcgagaaaaactagagttgagagagagagagaga

SEQ ID NO: 72446 - DNA, 624 bp, Cannabis sativa
gcccttcagggggctcaaaatgctctagcagtagcagtagctgtagcccccggtcccaaaactccttaccctcttggaattgcattaccagctttagatggtcatgtggcaactattttaggtggactccatattgccgaaagcactcgcaatctatagaattggtatcataatgagtgaaaccaaggccaatcttaccatttggtgcagtcacctgcccagcatccaaggatgatgaatttacaccatgactttcacagaagacaatgccatgcacgtgcgctatcctcataatgacccgctggtaatagaggctcaaataaccaacaaaagagtttccaaaatcctcgtggagtatgaaagctctgtaaaaaacattttcacaagagcctttgatgccattagtctaggaaaagccaacttgttaccctgtccgattcaactgcaaggcttcaatggagatacattgatccttatgggaaagatacaactcccaatgactataaataaggaggttcttggaagcaatgttatgtactccttcaagtatagcacatttgtgatagtcgattgccctattgcttataatgctatcctggaaagacaatttctgatggacttcaa

SEQ ID NO: 72447 - DNA, 766 bp, Cannabis sativa
  modified_base (736)..(740): a, c, t, g, unknown or other
atgctgaaaaatttagtaactggtaactggtttctgattcctaattttacaatttttgtcaatttctgattactaattttacgatttttgtcaatactactccaaaatacgttataaatgataaaatcaagtctaaatcaactatattgtattaaaatctataacatcgtattgttacaatttgataaaaacattattttttcgcactaaactatttgactgcagacatttatttaatctaatattatattatgcaataagaacacttatactaaatactaattttttttaaaactttatatttaaactttgaaaagaaaatttttacatttatatttttcctattttttaatttttttttattatttttcacgcttcaagaaaaactatttttctcttctttatattaattttagttagctttggctaactttaattttaagtcacttagtgattttttttttcttttctcttctctctctatttctttttttaatatttttttttccttattctctatctttctttattttttttttctcaaactaagtttttttcttctcaataggtattacttatgaattgttactaaataaatttaattataaatattaattctaaaaatattaaatcatcaaattttattctaataataaatagtaaaagaaaaatgtgaatctttatgcttagtttaactacttaattaaaaaaaatatcaaaaaatatctctttttannnnnatataaaaaatatgttcatataaaaa

SEQ ID NO: 72448 - DNA, 1011 bp, Cannabis sativa
tgattttggagaaatgtaaaaaccgatctgaaatctctaactctaccagtgctactgaatgttaaagttgtaggaaagatagttattcagtgtatggaaagttctatatagttttagcattgtaccaataatgaattaactactagcgttacttccggactaacacagaagtagttaccaaaaaataaagaatccagtatctttagaagagtagacatatagagagaggaatttcccaatattagtattttgttattaaggaaatgtaatggtggaggaaagtttgtattgaataaaacttatcagatcctattacagagagacactactacaaatatcagaattcgagacggtcttaaaacgttttttttttttgggaccgtcgctaaaaaaattaagtaactatttaaaaccgttgggaaaaatttagtattcctgacagtttaaaatcgtagtaaacaaaataggtaaagttttttttttaataaaatgcaattttttaatggacccttataggggacggtttaaaccgtcgcctataagggtccattaaaaaatcatcacctacttcttgccacatttctcacgtgcccacctacttttttcctatttctgacatgcttcttaaaagctaaagtatgtgttactcttctctggtgcctcgctattctcctttagcgacatatggtttcttgttaatacactaaataccagttcgtacattgattccttgcctaacaccttacaatcagcgagttacaaatatactctaatacttacacaattaatgagttattcacaaaaagatattgctctgattcacattccctttaccttgacacgtgtcttccacacgaattttgcgtataacaattgccccttataaagttcatttttattaaaaagagctttttaataattacgaagggcattttcgccaaaattcttttaataatcatattctgcacgattcccagccgttagatttctcaatctttggctttcttgtca

SEQ ID NO: 72449 - DNA, 617 bp, Cannabis sativa
aaatgagctacaaaattaatatttctcaaacaatgtattatttttttcatactttgttagtcaaagtatactagtactaatcaatcaaatatatttttatttttaaaagatgataatgcattgttattaataattataaatagtgtgttattatttataattaagtttttttgttttatttattttaatttaaaaattattgaaaattttaaattatataatattaaataaaaacaattaaatcaaaaagttttaccattacgctcacaagagtcaaatatttattcatcaaaaatgatttttctcaacgcataaatatgagctcgtaaaaagacttttcctaacgcataaatgtcctaataaaagttaggcaattttttcatttgccttggcaaaagtttcaatattaatgcagatttaccaaccccttttaccagcacaaaaatattctggcaaaaatacctctttcacaatataagaataataatttataattagtcacaactttcagttaagtcttcctgtgactaaaaagaagattttttgtagtgattagaagcatatataatgggaaaatagaaaaattgtaacgccctaatgctaaggcacgctacagt

SEQ ID NO: 72450 - DNA, 841 bp, Cannabis sativa
  modified_base (52)..(52): a, c, t, g, unknown or other
  modified_base (610)..(615): a, c, t, g, unknown or other
tattttattatataaataaaaagttattcatgaatttctcataaaccaaganttcagttatataggcacacttaaaatagaatagatatatagattttgggttagatatttaaattttttttctaattaaaaaacaaagaaaaaaaacatacaagaataaaagaagaagacgaaaaagagtgccgagagatatataaatattataaatatatatatatttatatagagagatttagggttatatatgttttaaaaattggagaaaatttagggttagatatttaagtttttttaagtatatatttataaaaattagaaaatttattatttattatttataagcttaataaaaaaaataaaaaagtgagtgaattaaggatagaatatatagatgtatttagagtgattttaaagcgccatgtcaccgtcttatacttctcctttatatatatattgattgataatagtaaaatattaatgtgtaaatttatgttttaattaaatattaaaattgagagaattaaggagagaagagaaaaatagatttaaagaaattgtagagtgccatgttaccgcctcatacttctcctttatatatatatatatagannnnnngatagatagatatatagatagatgaaaaaaattatttaactttactttatccgccagtaataacagtattaataggggtggacatgctccgccggtaatacgtccgcccctatttataatttttcttatagtgtaagatgtatttataaatagatagtggtttccaagaaacactagattttttgtattctctccttccccatcagagaaaatacctaagaaaata

SEQ ID NO: 72451 - DNA, 536 bp, Cannabis sativa
taagtttttcttttctttggatcaaaagggtttgaaatgagcaaaaccaaataccaaaaattttgtttttatttcatactttccttaacacaattatatttttttttaaggaagtcactacctccttcttcttttttctcgatgatgtcacatttattaacagtgccaatgtgtagagtcttccttgttgaaaagtcaaatatgttcaaaagcaaaactaataaaaatttaaataacaacgataatagtaaaataacaacgacaacaaaagtagggtcttcatccaatttaatccacattattttgctcatagtgtatttgatatgcactaagtgcagattttattttttgaatctaatctagtctgcacaataactcaagttcaatccaatcaaatccgtaaaagtacaaatttagattagttactttgtaatattaaattatatttataaaaaatattttttttcacataaccagcaacaaaataaaataaattatagttattatatgtctacaacaacaaattaaaataaata

SEQ ID NO: 72452 - DNA, 509 bp, Cannabis sativa
aataatgatatcaatcagacagaccaaaaaaaaaaaaaaaatcaacaatgatagatttgtgcagcacttgagcaacaataatttaggtctatctacatttatattatagtcgatctacttaaagagtccactgattgtgatcgcttattatggcatcttctccatcatcacacaagagaacagagagtgtaatttcttcatcatcattttcatcacctcctccaaatatatacttctcttctcaacatcacattccaaacaaccactccggctttcaaacagctccttcttcgccggcgccggcgccttcatccacaagtactactttttcggctgatgttttactccaaagtgggcctttaactcaagtttcttctcctctttcctcccacactaccaaaccctttactcctcttcctgctgtacttgatggtactctactctactctactctactgtacatatctctattttactctctacagttaaagggtttttttttttttttt

SEQ ID NO: 72453 - DNA, 844 bp, Cannabis sativa
gtagaaattgcgttagactttggagatattggaaaggtctcactaaataagggaagaactaaagcgaaggaactcttgtttgacaaaaagaaaaaatgaagaaatgtggaacggctgaaggtatttattgggtacttggaaaaggagtctcccacgtgtagcgaatgttcaatttgtccgtttaagggacatccaacggttggaaaagtcagcttccatctcacttcccaacagccagcttccatcattgcatgcatcgtaaaaaaatgcttggcaaatggaaggtctgctcaagtccaatcactgccattttgagctttccttgaacacacacccagcacgcgtgtagaaatcaggaagtcagcatttaacactctgacaaaaagactgaagaaattatacttcccaaatgatgacactttagtttggcagttggtgacgtcatccattaaagagcttgtcataagtcccacgtgcgcgaagatctctcagaagatgatacaagttcccggaccatgatatgccctagaagcttagggggtaaatgttatccgcatttttacaggcatgacatttagatataaataaaggagtcattaagctgcctaagggcctcacttagtgccccaagaggataaatgcaccgacctcggggaagggtgtgcatgaaagggagattccccaaatactagctgcatagaagtcatccgtgaactagtgtctcactctactctgagagacaaacccctttgctctcacagggagaatggacattttccagacaggacgcactagtccggcgtacgcctttgacctacgaaagcttagcccacgcgtgtcaggc

SEQ ID NO: 72454 - DNA, 873 bp, Cannabis sativa
ttgtattttattggacaaaaaaatctatatgcctaaagtgtatgaaagcataatagtaaccacaatattagaacattaattgcagatacaacaatgcatatacatcactcactatataaaattacaattactataataagagagtggaatatgacttgggctttgcaatgactacacctttcgggatacaatatagtacagcggttcatcacttgcagcccactacccgccaacataactgctacctatagtcacatgacttttttttaaagctattcaaatgaatattaatttaaatccaatgtgacataacttttctatgacaaacattttaacctgagaaaggagcatgagtaagagaaacttatgaatagtaaaaatgtattgatataaggaatttagatgaaacaataagtatacatataaacaatggaagacttgttatgaagaaaaaaatttacaagttatttacttatatttcaacaaactaatgaaaactgaatatggtgattgagcaaggcaaaataactaaagcactaaattcagtaatagcttggtcaaactggctgcactacagtagaataaactattaggcaaatgtctattattgataattatacggctaataaaataaagattgtttccacataatttctccaatcaaataatagagagagaaaaaaggcgtcatccaataacacaacaacaatatatgaaactactgataggaaagattacgtctagaaattaccctaaattcaaacaatactaaaatagtggcaaaacctttctttgagtcatttcatcaaaaacatataatatgcataattataaatatgaaattgtcaaatcaatgtatgctacttaaatccc

SEQ ID NO: 72455 - DNA, 849 bp, Cannabis sativa
ttgcatggttatttaaggaacattatgtgcattatggtcttagcaatgcgcgagttgtcttcacaatccataaccttgagtttggggcacatgctattgcaaaagctatggcacactcagacaaagctacaactgtaagtaataagtataaaaagtatgctaaaacttctgatgtcgtttcaacatttgttgcaatatcatagtatccagtaaatttgttttctattatgttattcagtagtaaagtttgtggagaaatacacttttttaatatatgcaaatgaggaataaaatttgacaatttaggactaaaaatcagtcacttattgttaagacagtgttaatagtttgccctttggagtttgatgaagatgagtaaatcagtgaaaactgttcatttttaaatttgcattaatactatcgtgaaccattttactagaagcaaaaatttaatgacatttttttccctttccacaggtatctcccacatattcaaaggagataacaggaaatcctgcaattgctcctaacctctacaagttccacggcatactaaatggaattgacccagatatatgggatccatataatgacaagttccttcctgtaagtagcttattttatgcatcgtaacaaaaaaaaattatataataagttgacaaaacaagttattatcaccaagtttcatatttctgttctttcatggagtaacctgaattagacatagacggttggataaacatgcaagtaaccgaatgtaacaagtgattttctcaacctccaactatcttattttcacataggtggaaattccatcacttttatagttaatatatgttcttatgcatc

SEQ ID NO: 72456 - DNA, 997 bp, Cannabis sativa
tcttttggactaaccaatgctcccacaacttttatggacctgatgaatagggtattcaaggatttccttgatatttttattatcgtatttagcgatgacatccttgtgtactctcaatcaaaagaggagcatgagcagcacctccgaatggttctataacggcttcaacaagattagttgtacgccaaatttaagaaatgcaaattttggctatctcaggtgtcctttcttgggcatattgtcagaaaagacgtgatcaaggtggattcggggaagatagaatctgtcagggattggccgtgaccaaaaatagttacagaagttagaattttcttgggtctgactggttattatttttggttcttagaagggttctctaaaatttcaacacccttaaccgaacttactaaaaagaatcagcattttttggtggacgaataagtttgaagcaagttttttggagctaaaacagagattaatcacagctccagtgttagccctaccttctaataaagagaagttcgtggtttattgtgatgcatctagacagggtatggggtgtgtattgatgcaggccgatcaggttattgcctatgcctctcgttagttgaaagaatatgagcagcagtatccgactcacgatctggaacttgctgtcgtagtgtttgctttaaagatttggcagcattgtctctatggaaagaggtgtgaaatttatattgaccataagagcctcaaatatttctttaatcagaattacttgaatatgagacaaaggcgtttgttaaagttggttaacgattacaattgttaaatcccttaccatcgtgggaaggccaatgtagtgggtgatgctcttagcatgaagggtcccgggcaggtaactagtatgattaagatttcacctcagttagatgaggacatggtcagatcaaacattgagtttgttgtaggcaaacctcataacttgaccctgcaatatgatttgttagaacga

SEQ ID NO: 72457 - DNA, 1142 bp, Cannabis sativa
caagagcagtgtgaccagccttaaagaaaatctggcactgaagtcgattgttattgctattgggaattcctcctcctcgattcccagagaagcctcctctctgattgttgaatctaggcggtggtgattgagaattgaggcttgagttgccaaatcgagattgagtagctctggattggcttgagttgtatgaaggaaaataggatccagatttatatccattgtaagaaggctagatccactggatctaggatagggactcctaaaatttcgattcgaattggtgtagtttgcctcaggaaattcaggatccgtataatccatattgacattaagatctatttctttgtcacttttctcaattctggattcagaagcaagaagtaaagcctctatctcagctacagaataactttcaagttgtgtgttggtggagatcacaaaggtatcatactcactgggaagtcctttgaagatcgcagcaacatgatcacgagtgctgagaacttctccaactgaagcaagtaaatcaacaatttgtttgactcgaagcagatagtcattcaaactgagagatcctttcttcagattttgaagcttagttcgaaactccagtatcttagcagagacttgaagagtgaaatatctctgcaaagtactccagatctgactcgaggtgttgcatccaaccattcaagtcaagagacgttcagacatggatgacaacaaccaggagaccagtagagaatcttgatcttcccaagtagagtaagcaagattgatgttttcagcttcacgatcggcatcagtcaagaattgaggtggagttgaattttcttgaatgtaaggcattagacgattcccacgtatggcaggaagaacttgttgacgccatagaagatagttgtgaccgtttaacttgatagacagagtatgattgaagaacacaggactttgatcatcatcacgattccttggattcatctggtttgtattccacgggtttgatccgttgacagcctgagtgcttgattcatttccaggttgagcttggaagtcgttgccggagttggtgacgacattagccattaatgaaggaaagctgtgttgtgctaccatattagatcttctagacattattg

SEQ ID NO: 72458 - DNA, 949 bp, Cannabis sativa
tgtaggggaaaaaatgactaacacaagcaaaagcggaaaaaccctttatacccctcttcgatatgcctaaaaggaagctcgtcaattatgaaatacttgccaatcaattctctcactgtagcttgactaaacctagaagttcgagtcccacttgagttaacttcagagtcttcatttgtcttggtaaaatgatcagttatcattgcttgttttgtactcttatcgacaaatgagctaaatgggcacttcctacacttgtggttaatgtgactccacaaagtacttgtcccacaattcttggtatcagctgcataatcagcttgacaatagttacattctgctctctccttctccacttccttgccttttactttcattatttttttaaccattgtaaaatgatttcaaacggatgatgtttttaccccttgcctcttccttttttacggtatctcaattttagcattctcattttcttcattttctatagacccagtcgacttctgtacttcaacatccacattttcctcttcattctccataagtaatgatctacaaaataatacatcatacacattctaatctaaatgtatatgataaaaataacacaatataaagtgagatcaaattataataaattaattgaattgaactataacaacttaatgtcatgcttaattcattacaactaggaacagggaaaagtatctagaatcttagtgggagccatgcttaattcattacaatagtaaattgtggacaaaagtttaaatggaaagcaattggaccattcttatatgtaattcatgaatgattaattttaatattagttaagaaattctaaaataggtttattcataatttgtatgtataaagaaagaaacgagctgggaaatttgcattataacaaatacaaacttaccagaaactaacaattctgttgtaaatt

SEQ ID NO: 72459 - DNA, 812 bp, Cannabis sativa
  modified_base (496)..(497): a, c, t, g, unknown or other
tatattttattaagatgtaattattcttatatagaggtatactttggtaatacgagacttagaaaatgtataactaattaggttattcttatttatgtctagcccaaattgggacttaattttttttataacaaattagatgttattcttgaataaagtactcttaagagattctactgtatatatatttataccattaatggaatatttgatcatagaaagagccacttgctaatattaattgactattcatttgtttcatatccaggattgatttacgaggccacgctctatctccaactccaacttgatatatatttatgcatattattaattattatatgaatatagtaaggtcgaccaaaccaaaccatactatttcaaattaataaatggggtttttcccgcattaaataacctcattaataccggcgggtggggtctgtcggtattaataatgccggtattgtcaattttttatatatattttttaatnntttttttattttaaaacataatttataccgacggacctcctaagtccgtcggttataacatcattattaggagcgggctttttccgccaataatagatcggcccctatttttttatttttgttgtagtagatctactccattaatatatattttcggtatttattaatgcatgaaaattatatgtatatatataattgcatgcgtggtggtataaatatatatatatgaaaagaaaatgaatgtgtgatatttgaagtgagagtgagaatgagagaatgaagttttggtagttggggttggtgggtatatttata

SEQ ID NO: 72460 - DNA, 1909 bp, Cannabis sativa
tttttttttttttgtaaagacagatttgcaaggttggatggccaactttgcttatcaatgcctcgtacttttaagtttaaactttaatatgcagatgtttgcttgcgttttattcacaatataaacaatcacatgtattaagtctgttaggggtttccattgcttgtattttcctccgacgctaagtagttaatttcctactttacgcgcgagcaacttatttgcccgtccctcaatctgcgatccatcattgattccacctcgcgatcattagcaatgatcttattttaagcaaattcaaatatattttcaatgaacttgtcattttgtatattttcattgctaacatgagtagttaaattttctacccacgtgtttgctttaagtattttttcaagacactttgatatctcctttaatactttcccttagcgcgagccgttagtattcaactttatgcgctagtcataacctttgattttcctttctcgtcagataggtataaatcaaaaattacagttatttgatccctttctcatcaaaaaggtttgatcaaggcgttataatgattcgactccttttccctcaaaaaggtttggtcagggagttataacagttcaaccccttttccataaaaaaggtttggtcgaggcccttagaaagttttcaaaaaaaattattttttgaaatgatgggtttgcattgtactatgtatttccagattaattccggttaatcatacatatatgcccctcaagtaattttaaagggcttacgcttataattacttgtctgaaagaaatgattattttattcacaactgaagttcaaaatattttatcagcaatgcgatttacaatcattaatctcataagaacttccccaattcaatcatttcttttatcaatcttctaggagcacctggttttgataaaacgggttttgatgttcagggtcaatccctcacatactccctcaattatttcgatatccagggtcaatcactgacatatcccggggttccaggtgaagtaatcctggttttgtctttggctgctactggttgacgaccaactttcctcgtgccagctttatatggcaaccacagcgggttgatatctactcacgacacaatttttttttaaaaaaatatttcttttaccggagtaactgccccttgtattcttgtgacttgctccctctcgagataactaagatgtcacttcctcttacagaggagggttataattctgggtcgctcgagttattgggaagatcgagctgatcatggacattgcactgcccctttatatatcgtttaaagtgtccttgccacatgagaccttctatctcatccttcagctgacaacactcttccacggtatgaccaatatccccataatattcataccgcttatttggatccctcttgcgcctcgcatgtttcataggtcttggctctctaaaaacggcttcctgtacatgtacgaggtagatatttttttgagtttcattgatttcggtatattcgacataaatagggatgtagttgattttcttatccttggatagccttttggaatcgtcttctctctttgatcctgaggcatccgaatcaagttctccaatagtatcttgccccggttgtcttttgggtttcgtggcttgatgacttctgaacttattctccaactcgttcattcgcaaatggagtgactccttttgctttggaccaattcgttgacgaagatcaggcttcttcaagttcagatgctctcgtagatcacttttgtcgtgactacagtcggaccttgctcttcctctcttaagaattgattcaccttattctccctgtatgggtttgtgcaaatttatttctgatgaacctgaagagaggcttggcgatttt

SEQ ID NO: 72461 - DNA, 715 bp, Cannabis sativa
agaggatcttggtagggtcaaggttgcatacttgcacttcctcggcgtcttccatgggttgtacaattttttcggatcccacacggggatccaattcatcttcttttaccaactttggctcaaaattctcacggaccatcaacactggcaagtgggctacgacattataacaatgcctggcctttccctggttgcccctcactgttccgaatctggcctcctaagtggggaatttcaggcacaagtgccgaatggatgtgattgcgctaaaatctaccaaggccgatcggccaagaattgtgttgtacgcagttgggcaatctaccaccacaaaggtgcagtacttaaaagtactttgaggtgtatccgggcatagggtgactggcaaccttacttttcccattgggataagcatggttccattgaatcgattgagttgggaaccgttgggtgatagatcctggtccgtgaggcctatgggtgtgaaggcttctttgaataataagttcacggaactcccattattgatcaatattctagccaaaattttgttagcaatgggagtctctatgaccaaggggtcatgatgagggaaacgcaccagttttgtgtcttcctccgtgaaggtaataggctgatccatgagtcaggtctttgtgctggaagctgggtgacttcccaaacttcgtggtgagggatcgtcccgccggggggt

SEQ ID NO: 72462 - DNA, 724 bp, Cannabis sativa
catctaaagtcaccctccttccttagtggaactcggaccaccgaccattaatcctcaatttcagcaatagaacacaaccctctaaatcggatccaagtggaaatctcggtttcactacgaacaagcgtgggctggtgaagaggagtgtggtaaaattgtgaacaatgtttggcttgatggatcaaattggggttcggccaagggtataagggggcgcattaaccactgtggggaggttctcaatgagtgtaataaaggaaagaaggctgaacttggggctaaaacaaagaaactcaaagaggaattgaaatatctctcttcttcaagtggagagatagattgggtgaatcgaagaagagtagagaaagacctgaatgtagccgaagccaaggaggaactgttatggaagcaaagaagccgagctctttggcttactcatggggatcgcaatacgaaatactttcattacaaggcctctcaaagaaaaaagaaaaacaagatcaatggcctcttcgatgacaatatgaaatggtgcaacaaagaggaagaaatagaacacatattgattcattcatacatagaactcttttcatcttcaagaccgaaccaaaatatgatggatgtcctaaaccagtgtgtaccgaatcgaatatccagccaagacaatgacatgctaatggaagacttcaccaaggaatatgtaaaggaagctcttgatcaaatt

SEQ ID NO: 72463 - DNA, 749 bp, Cannabis sativa
ttacccacattcagtaagactaatattaataaataaaacaaaataaaaaaataaaatacttaatttatcaaaccaaatattaaaaaatatgctacatacataataaattaatttcaaaacaagcgacttttattaattaagatgagttcttaatgtctttgacagtttcggttgagtggtctgccaagcgatttgcgatagttctttttgtatacatctgcccaatctttattcttatcacaacgacatctcgcccactttttatattcttgttccaattctcttaatataaaaggcgacgtaccaagagggttcttcctcatcgcatccacaatatcttcaactccaagttcgctgtacaactttttaatacatctaagattttgaggtgtcaagtaatcttcaatacggatcatttctgcgatgtcgatattgtcgttgatcttctccatgagttgtgccacattcttgattgttactttcacaaactccaccaacatgtcaagttcaaacatctcatcttcgcatttaaacataagtttttcgtatttatttttctcagcatgcctgaaataatactcatcacttttttcgaagtgactaaagcacaacagtcatttaatacttcagagcataatctttcggtatcaattagaaaagtatgcgtgattgcatcaaagaaattcttcagtagaaaatgatagctcgacgtccctataagaatctttattttgaatctagggcgtttt

SEQ ID NO: 72464 - DNA, 906 bp, Cannabis sativa
agaaactcctattgcaactagtgctgcaatttaaattacaacaaaaaatcgtatagaaacccctattgcaaccactttagaaacctaaactgtaaattgaaaacaaaagttaaaaaaaataatatatagggtaatttctcaaatatttattttttttatataaaatgttcatttatttagttgtatgtgaaactatgttttcttatacaaatgtattaaaacatggaatattaagttttaataaaaaaatgattaatatttaaattaatatctaaaaatacttaaataactttaatgatgtttagctcactaaaatgagcagctccttcttttagtattttaattgttattaatagttaataaaaaattaacaaaataaatataacccaagtttatactaaaggactcaacactataagatttcaaaaagtatttggagaagagctagtaatggactaaataaagagcgaagaccaagtagcagacatattcactaaaggactcaacactacaagatttcgaaaactctaaaaacaactcagtatgatgagtcggtatcgagagggagtgttaaaagatcaacacctcctctacaagtatctagaattttttatcattttagtaatattatagaattatctagaatcatagaggttaatagtcattaagaatttttgagaaatttttaagctataataaaataacaaattgttagaacattctagcataataatgcaccattttttagtagtattaatagaggagttggtcttttggtggtgtatggtgagttgagtgataacttgagtgtagtgaagtgtgtcttagcgtgttcaactaagtcccaacaaaactctaaaatagtgtcccttgtgggccggatatataaggctcgatattttccta

SEQ ID NO: 72465 - DNA, 1595 bp, Cannabis sativa
  modified_base (27)..(28): a, c, t, g, unknown or other
  modified_base (1026)..(1030): a, c, t, g, unknown or other
  modified_base (1299)..(1302): a, c, t, g, unknown or other
ttatgctgaaataaattagtaggatcnnaatcccacttattacctgattaattcataatatcaatataaaccctaattatttaccatttaacttatcgggatattacagttgcattcccgacatgggtggcagtggtacaaggatttaaaaatatatattttatgtttaatccattagagtacagcagtcgttacttcaagtacctgataagaacaaataattaataaatagctctcaaaacaaattatcaagttcattaatttctgggatgggctcctaaatattacaggttgcacaatctcttcatgtcagttattagaagccaaactaagtcggttatgaccccaactaaatcttcattaacctggaataagattgatgttgatttcgaccaccatttgattgagtttaaataactagtgaatgtggaagtcggtcgtggttggttgtaatgagtaggggctgctcgtttactcggcctctcagggtgtgttacaggctgtgctcgaggactgagtataaattcaaaagcttgtccctttctgttggattttgtgccctaactaaaactctattttaatgtaatcttgaatattcatttatcaataaagaaacagatttatttcattacttgtttaatatattatttggttcacatgtttatttcatgatcatttgtttaatttataaattcatctaaattcttatagtattgatattcttgattattgtattatcaacacagtagaaagtaatcaagattatgtaattaaataaattcctacgatttctcagtacacaggatttctactgaaatgataatcaacaatttagtttacttacatcttggattagtgttatgtcattttcagggcattgataaagtgagcttggattgaatgtattgttatacatcgcattggactgatattgaacttacataaggtatcataaacttaccgtaatatctatatgagataatatcacctagttgatcttagatcaatgatctcaatcctgagatnnnnnggttctagttcaattgtattatttatgttctttgaattattcattaaagtggaccaattggatcttcctgacacttacagattaagaacatggtagttcaattgagtgggaagatacagaatctatagcttctataaatgcataaaagtgaaatgataatttctttcgagcttggcttaatagagataaattgtggagtactcatttcagtaattatattagtttttcgaaatatcatttaaatgtagctaagtattttaaggataaannnnattgaagggtagaacggtaaatttctccctgctcaatgcagatcatctattgaggatcattgattattcatattataacaatatataattaatagcgtatttatatcttagaacatatagagtattttatataattaagagtgcaatgccaaatctatagtggaatcaagaggaattgataagttagagaatttacttggtaaattagcttgattatataggtttatggtccccacactagttgagataatgctgcttgtagactcagcaaattagttttaattaatcaatta

SEQ ID NO: 72466 - DNA, 777 bp, Cannabis sativa
atgtcaattaacataacatccaacatccaatcccaatccgtacaaacaagtgcaaagtgcagattttgaatttttcaatccaatctaatccgcacaagtgcggatatctacactttacggattagattgaattggatcgtatggattggatttgatctgctattttatgaacacccctactttattgggaataagttgaggaatctttctttttcatatctattaattaaaaatactctcatattatattttattaaaatatactcttttatgagtaagttgctcaatatatcctcactctctatttaggtttaacatataatttacattaacctaaggggtgtaaaagaatcatcatctataaaagtagatatatttttataaaaatgaaaaaatgaaagtaaaaattaaaaaagaaataaaataaagtgggtatacaatgtataatcattctcgtctctccttgttggtgtgcaagtaagaatgtgttctgcggttgttaccccattttccctaaaaaatagactgctcttaagctataaaagatgactcaaattagttggtcttgtgtgcattcatttttgaagtcctaatgatattaattaatagaatatttttactatgcgctctaacaatactaattctatgaggtgatttaatatttcataatagttattgaattaaagaatataattattaaacaccagtagtttttagtattttttaagtgtcgtttgtagttaatgatattctttatgttattattattattatttt

SEQ ID NO: 72467 - DNA, 1242 bp, Cannabis sativa
aaagtacaataacgagacaaaatcgtatcccataatttatatagacttggatatatatagtactttctatgttttagtgcactgttgagggacggagctacattgtatcgtaagggtcctgccccctctccccccaattttctctttttattaaataaataaataaatacattaaattatatagaatttgattcgatacttacttaattgtattaataataataaaacattattattaaacaccagtagtgcttggaatctctagacatatcgtcttgtgatgattagcgatactctctaaaaatattacaataatataagactcaatatttaactgaaccaatatcaatattgacacatttcatggtgctagacaccactagtgctttttaacattaattataacaaaattacacgttagaatcctaaatactaattatgctttttagcatttttgatagtgatttgatgcgaaatttattatatttatttgagaaatgctaaaaggtaccagtagtgtctatcatcttctcatgtgtcaatattgttattagtttaactaagtatcgaacccaatatagtttaatgtaataatttttaaagggtatcgctaactaattgtaagatgatatatttagaaatattaagaatactggtatctaataataatgctctttatttatatatatgattatatggtagcatggatatatattgggaaatttgatttttatgcattaattggactaaaatgagtccacttattcaaaattattcaaaaatattgactggtcattgggccccatcgggtcctatatcgggcctttgtcttaaattcggatccaatttttgcatcacaattcattgggcctgcattggggatgcatcgaacctgtatcgagcctgtttagaaaatacattttctaactcagaaattacagattaaaaaatagtaacctttgacattgagtccgtgggtcgcagtggttgtggagaaaggggtcttcaatccgttagtcacagtcaattgcagtcttcgtgggtggtggagaagggtggtatttgggtcgtgggttgtgatggtggttgggtcgcctgaatcctcaaatagaaaattggtgggggtttaagttttcgtttagagaagataaagaaaccgaaagagaaaaagagagtagaaagacagtggctatttaaaaataaagagggtattttggaaaaaagagaaatgttaacctattt

SEQ ID NO: 72468 - DNA, 1091 bp, Cannabis sativa
aatcagtttcttgaaaaagtgttctgggcattttttccgtcatcagagataatgaagattcaagtaaatttggggagaaaaccacaaactcgaggacttggaaacagagtccaatgcctaggttgacctagtacgctggttttgatcattcaaatgtcgaatctgatccaagcattctctgctgaatgaccaaaaatggggtaggagacctcatccttaagttctagaaccttgaaagtatcaaaatgacattctggaagctccgaaataagcacccaacgaccaagttaataaatggcctggtacattgggttctgcttattcgattatgattccgtctcgaccgttcatctagtttttcacaataattgagagccatgaagtcaaagaattcaaattcacaacttcacatttctcatttccaacatgggaaaatcgctcggaaatgaagagtttgagtctctcatttctgcagaacaacatccctgagaattggtgaccagctttgtcaaaacacaaaaatagactaagtgatgtcaaaatatcatttagcatcaaaaagtacatccctaggacgttttcttacttacccagcgcacaggttgacataagagctgggatgtcaacctaggagctgcgatgtcaacctggacgctggatgttaactggggcgttgggttataaacgaccttcagtaaaacgaccataactcactcaatattgacccgattgacacgattcaacttgcgtttcgaaactatttcaatgctctatcaagtcatgtctcacacttcaatcacaattttgaagttatccatctaaaatttaacctccaagggaattatgaaaataagctctggcttacccggagcagatcctaccgctgcgactcgagcttaaaaaattgactatcaacctcagaggttagtttgaccgtactttcaaaattatcccatttatatatattaatatatatatatatttcatattttgaattatttttttcttattttgaaagagctccttcacctatgaaatgagagattctttagctcattttttatatccaaaaaactacccacaaggtcaga

SEQ ID NO: 72469 - DNA, 550 bp, Cannabis sativa
tagttatgcagtagcattttgggagattggccttgtctcaaagaaggcttgttttgtatcaattaccactagaccggagaaactcatgttagtggggatgttgaagacgttatcaacctccatggcgacatcctcatcattatcattagccatcttaatttcttgctagtgcttttttaatcttaagtactgcgcacactaattaattggcttgttccttttccttgcagttaattaatattaaatcagaggatatagaatagaatagaatagcttttgggctatttacaaaaaaatacggtaaaaaaatggaaaattttgatatatattgcatgtaaaattaattgtattaaatataatattttttttaatatattttacaacataaatatttaagtttaaattcggttgcaaataaatacttaaatttaatttttagtagtaacaatacataagtcatatttttaaaactctataagttttattcgttaaatgtcaagtcattattcaagtttcattttgtatatttaaaataatttttttaaaaaaa

SEQ ID NO: 72470 - DNA, 1395 bp, Cannabis sativa
ataacataaaaattaaagtaaattgaaataaatttacgaattaaacaaagaaatatttaatttatactaattatatatgcataaataaaggcttaaaatataccaatttgatccttaatcagctacaactgtcccaactactccaacatagcttgtaaagtccctattcatacagacattcgcacagggacttgggggcaaatgttatcccaatttttatcctcctaatgtggcatgcttatatggacaaaatcagtgccacatggcagtatagctcaccgataagaaggctaagtttacaccaaagcaaacagagaccccgacactcaaccgggcttcaagtgactaacaacctccctcacaagagctgcccgaccacccctggccgaccctatggtcagccagcctaggggactgcaccatggcaagccaacctaccctccataggggtctggccgacccagaggtgtcctacagggtttcctgtgcacttctacacgtggacaacatcctctgggttgtgaatttggccttaaaagcccaacaaaatagctgaataatatctagattcaatgatattttggtctttgtaattaactaataaaacatacaaatatctagggtttcaagtggtaatctagggtttcggcctcctatataaaggccttaactctaacctagaaagcctaagctcagttaagcctaacacttacctccaagctctaagccgaagtttgacaacttctctcttcttcacttcctctctcacatgcccacacaagcatgatctttacacttgagtttcgccattcttgatcatacattgtatttctcacggtcattaatacaactaaaaggagactaggtcattacccgctatcacaagggggtcgaacctctataacaaatctatgtatttattacctttcattcttatttgtgcaaacacgtggcaagcatcagatctatacgaccccgttgttggttgatcactttttgaggtcaacaatttggatcgtcaaaatggtgcacaaatcccgagagatggagcgatgtaggcttcgacctctagagagaaggaggagcttttaaaattttctttttctagtgaaagaatgaaaagtgaaaagtgaagaggagtttcccttcgtaattatatagcttctgtgggaccacttcttcacttgccacgcagtgttcaactaaaaagcatgtaaaagtgcaatacagtttacttaccacaacaaatgagattagacattgaagaccagttatttcaaagactaatgcaacaatattttgttgggattttatgccctaaataaaacccatttaaatagaatctaatttgttatcaatagaagttagaaatcatttatgtttacatatagtttt

SEQ ID NO: 72471 - DNA, 1381 bp, Cannabis sativa
tgggtcctggtctgggttcagatcattgtttgagtcccatatttggatccctttcacgtgtctcagtctagtgttaacgtctcgtgtccgaggtccgagttgggttcgacaccgagactagggtgcggttttgagtcgcggccccggttctgtgtctcgagtctggttccatttttgggtctgagttcgggtctaggtttgggtctcgagtctaggtcagggtttgagtacgagtcctagtcaggttatggttctaggtctaggtcgaggtctggttatgctgctgggtccaggtccaagtcctagttcggtcctgttcctactcccgatctacgtccggtttcggttccaatttcgggtcatagggtacgagttcggttccaagtttgggtcagggactaggttcggtcctggtctgggttcgggacagggtcctggtctaggttcaggtctggggaagggtctcaaattcagacaccgactgcgggttcagtccaagcctcgggttcaaattcggatcctaatctccggtcccgatctggttccattttgggtgccgagtcacaaactggtacctaggttcatgtctgagtcttgtatcgggtcttgggtcccggtcctagtttcgttgccgaagtccctatcctgattttgggtccagctcccagttctggtttgggtttgggtcccagtctaggtttcggtttgggtcatcgttccggttcgagtttgggtctctgtctgggttttcatttgggtttgggttcaggtttgggtccttgtcgtggtcgttgtcctattcttagtccggttccagttccaattgcgatttccagttcgagtttgggttcgatgtttggtctgggttggagtcttggtccgagtttgggttcggatccgaatctcagtctaggtccggatcgagctctgggtgttggtttcggggttgggtcttgctccaggttcgggtccgagtcccaggtttttatctcgatttgagttcgggtttaggttcgggtctaagtcctcattctgatcccagtctgtgttcaagtttgggtcttggtgcaggacttggtttgggtcttattctaggtcctggttatggttcgagtcccggatttagatctgggtctgggttctaggacctaggtccctggtctaggtccctcatccaagtcgggttcgtaggtcctagtttgggcctaggtttgggttcggttattgagtcttggttttagtccagatcctagtctaggttccggtccaggtctcggtcctcttcttggttcgggttcaggtttgggtccttgtcagggtctgaatcctggtctgggtcgcgggtctaaggtctcagtgcgggtttaggaccatgtcaggt

SEQ ID NO: 72472 - DNA, 803 bp, Cannabis sativa
tctatgcccccgaattcggacatgacgaagccatgatcgactatggtcttggaaaggcggctggtctccggagtaatctgaaaagggagatgagagtgagatcaaatgccttagacaaaatatcgaggaaagaaataaaccacaagtacttactgcagccatggcgttgctgatgtcttgaacctggtagacggagttcaaggaggcacaagcagcgtatcgtttgggtgggaattgagttagattggagacatactcgctggtcatctctgaggcaaaaggagccaaggtgggcccaaggaaacgatggaaccagtccgtcagcgggtccatgtttaggtcccacggattccggaaggcctcctcgttgagagtgttttgttgttcctctcgtaagaccctcttcaaagcctccacctcagcatgccccgactgtactcgttggggcatagttgtatttggctatccgaagattctacctctcctcgtcaccagggactggagtcaacactatgccgtgaggcactgtatattcctccacctcggagggaatcctgcagtcatggctcggtgccagagtgtccaccctccgggggcgcttagaaggctcctcctccaccatcttgcccttgcgcttgcgcacgagggtgacctcttgctgttctttaccttcttcagcttcctcaagaacctcctcctcgtctaccaagacaatagtgcccaaaggggcactggaggaagacctcccgggagtgaccaactgagaagaagcaggaggtggggaagcatcaggactatgggct

SEQ ID NO: 72473 - DNA, 734 bp, Cannabis sativa
tattgtgagacaaaaattaagatgaaataatatgatatttatatataagtagaaaagaaaaaagtttattgaaacagtggattttttcgtgtgtgtttgtgttcttttttattattatatattatcaaaacaatgtcatacattcttacatattttcaaattgtatttttttccctttaataaaacaataaaagtttagtttcaaattaataaaaaattattgttattaagtattagtagtgtccaatattttttaagtgtcgttttataatttgttaccgatattttttaaaagttattttattaagttatattgaattcaatatttaattacatcattaataataaaactgagaaaaatattatgtcttttagcaattctcccaaatgttgtatttagggtttctccaataggacactaaaatcttaaaaatagtgtaatttggacacaaaattgctccaatataacactaaaagctatcctatatatgtaggagtctatagactatactaaattttctttttctttttttaacattaaaataatatgtttatgattaaatttttatatttatatacgtattatagtgtgaaataatttaataaaataatattataataataaaaaaaaaatacattttaatattgtggttgaaattaaaaaaaaaaaaaaaaatagtgttgatttaacactaaatttgagttcctccattaaaattatccatacatgttaa

SEQ ID NO: 72474 - DNA, 1150 bp, Cannabis sativa
ggaaaatttacatttggagcctttattttgatctaatttccttttttgccgtgatctattatattgggtaagtttaccgttttttattaccgttttatatttaattatcatttattgagccacgcgtttcccaagtgacgtcagaccatgtgttgtcacttcttatccatcatcccacgtcttgcatctcacgcgcgtcaggggtatcacgttttttgatattcatgataattgctccctattttgtagacttgtaagtatactgtctagttagagggagggagcggtttatagggttttttagtgggtttcttttttttcaacttcagaaatttctagtgtgggtatttttcagagagagttttgaaattcaaaatttctctctatttagtgtggcagtttcatagagggttattcatttaaaactttctcaaaaaaatctgattgtaaatggttaatactcgttcttccctttctccatctggttcatcgaagcttcttcttgacaagttaaaaatgaagaaaacgatttctgaagatgacaatgaagatctttctggtggttctgagggctctggtgatgtttctgttaaggaagtgaagaggaagcaatataatcgtggaaacaagaaggttactgacgatcggcctttgaaaaaattgaaacaagttgttgaatatgatgaggacttctacgacagtgatgatctagaagttgagaacaatgaatcgatgaaggtatgtgttcttatttttgtttatttttcagttttttatttattttttatgagattttttggattaggtattctttataactttttctattatcgatttaggttttgttgttattttttaatttttttattgatttttatttttcattttggtagttgtttctttgttttctgagtaggtagggtgacacatatatatatatttatattttgttttcattttaggtttgttgtttgagattcttttatttccttttcatattctttgttgatgctatttcatcttcaatttttgggcatattcatttgttaatttgatgttgcatatgtatgagtggattttcttttctttttcgtttttatctgttggtgttaatagtgttgttttggtttgtatatttaagttttagttt

SEQ ID NO: 72475 - DNA, 1798 bp, Cannabis sativa
gatatttatttatgctattttgtatgctttccgcggtacatggtactcgcgtatttcttaatcgcaatttgctttttccaattacagcttggtgtaataaaaaatgctaaggcaaaaaagtttttgaaacgtcgagaaatcaataactcttattataagaaatcgatagtacacaataggccaatcagtagtacaaagtaggccatataccccctatacttagaacatttatacaaataaattgactaagtataaacacacgtcgagtgctattgatacattgcgagtactactgataataaaacttcaaactctcgtcattccaagctcttcggatcgcagtgccatcgagttctgcaagtcgataagttgcatggccaattttttcagcgataaggtatggtccttcccaattgtcactgaaaaccccatgtgttgggtttttcgtgtttggcatgacttttcgcagaaccaaatcccctactcgcagagttcgctttttgaccttagaattaaaatatcgagcagtatgctcctgattggccgcatttttcaaatgagcctgatcgcccttttcttctaaaagatcaaggtggaccaattgcttttctgcattttggctgatgttgaaaacatctcttcgtagggagcccaccccgacttcgactggtaccatggcttcgcatccgtaggaaagcaagaaaggagttttgccagtcgtggatcgggggttgtgttatacgaccagaaaacttgcagaagctcttctggccatacccccttatgctcctcgagttttcccttaatggtatgcttaatcatcttattcacggcttctgtttgcccattactttgtggataggcaactgatgaaaacgcctttttaatccccaactcatcgcacatttctcgcatttccttacaatcgaactgttttccattatccgagataagtttgtaagggatgccaaaccggcagatgatggaattatacacaaactctcgtaatttgacagctgtgatagtcgcaagggcttttgcctcagcccatttggtgaaataatcgactgcgactacggcgtatttgactccggccttccctttgggtaactctccaattaagtcgatgccccagaccggaaagggccaaggacttgttatggagtgtaagttgcttggaggttggttgacatatgtggctatctgctgacatttgtcgcatttttagtgaagttagaagcgtctgctcgcagtgtcgcccagtaatacccttgccgcattatttttaaagcaagggaattacccttggcatggttgccgcagataccaccatgcacttcacggagtatataatcgcactcggcaccatcaatgcatttgaccaacggttggctgaagcttctacgataaagcctgccatcatattaacatatcgagcagctcgataccgcagttttctagcttctattttatcttcgggtaggaataggatttctttccctaagtaatccactatgggagtcatccatgtgacttttctggcagtatttatctccattacttcagttcggctcactgttgggtgagttaacacatcgacatgaattacattgagtaactcagcttctcttgttgaggccaaacgggccaaggcgtctgtatgagagttatgagcacgtggcactcgagaaacaatcaccttcttgaatttttgtagcaactcacaagttagtgcgaggtatcttgccagatgtccacctctggccaggtattctccgttcacttggcatacaacgat

SEQ ID NO: 72476 - DNA, 1187 bp, Cannabis sativa
agtaatattgtaatattttaccctttttggaattttcctgttttttttcctaaaaaaaataagaagtaaaactagtttaataaaattgtatattaaatttgtacaaaaataattacattatatatgtatagtgtataatatatatgttcacttagttcttggtttaatcggtcgggttgccattgacaccaaaatcgaccatgcaaaggcagttttaaccaaaggtaatttttcggttttcaattttttcggcgttggttttattcggtattcggacggtcagtgtactcggtttgatcattttcttagattttttgctcacccctaatgggaagattctacaatgcatctcttaaaagggatacagtgatacaccattatctatctatactagtatctgaaataattttttagtcaaatttttttctcatggtcatatacattataataatttaaggcatagaaattttaaaaaatttaacatcctgaaatagtgttcaaatagtgtgttgcacgtgtagctattttattttatacgtgtgtaaaatagactgtttaaactttaaacactactttctatattgtaaattattttgaatttctaaaaaatttgtaaaatgtattaaataattataacgtaaataactatttaaaaaatattaaattaattttttttctaaatatcgaaataagtagaaaatacttgagtgcattcttttaaggatgaacaataatatataatgtatcttatatgaattcaaaaaaataaattaaacgaaacttatgaattaaatttaacaaataatagatttttttaattaatttgcttttagtatctaaaaaatgaaataaaaaacttttttttttaattttgaataaaaaacacagttctctaacaatttttttttttcctaatttataattattactagaaatgtgtataaatcaattcaattcaatgacaaccgatcgattcaattacaaccgactcccaaagattggatgtccaattatggttggatcagattggatgttatttttaaatatctaattagatcagatcagatattggatggagtatccaaaaatccaatacatctaacatctaatcgaactttttaatatttccatttagttttgatgagtaatttgattttatattgttatacataaatatatatatatat

SEQ ID NO: 72477 - DNA, 682 bp, Cannabis sativa
aatgaaatatttacttaaaaaataggaattaatcatataatattgattcttattcatttgtttattacatttctagtagttttctagtgtattaatgaaaaagttataacgatcttataaaatcaaaaaatgatatcagtttgaaggactctttttttaagattagtttgcaagacttaattcgtgtgtttcacgtataattttgttttcatttcaaaattcaaatgaactgattttttctttataaaactcgaattttttaggatttgttttgcaaacgcgatttttttttttaagatgcaaagatgaatatgtaaaccacttttcttgctgtaaaataactagtgaaagtaacatcgcggttgttataataacaaattgaaaaataaattaatttaatttatgattaagtttgtttatattgttagaccatccccgaccaataggaggacatttgcaaatttattataatttttttttttcaatatctattctatataaaatgtgaattgattttttttttaaataaaaaaaaaataacaaattattagatgttgccgcgtaaaagagtcatcatcatagttaaacttaaatataattaatccacctaaagtgttgcaattaataataaatttgttcatttttgaatgcgagatcgatagattttgaagctatgaaacac

SEQ ID NO: 72478 - DNA, 1355 bp, Cannabis sativa
aggttttttgatagacggttgcctgttcattaaagtttacataattacgattatggaattagctgcttgttgccttttcaaataataaaattagcttttgttgtctaaaatatttacttgatagacaattgcctcatctttaaaagtgaaatttatattcaaatgtgttatcttaataatgtgaggtcttaataatttacttgatagacggttgcctcttctttaaatgttagaaaattacgattatgtattaaaatttacatgtgacaccataaaagtttacttgatagacggttgcctcatctttaaaagtgaaatttacattcaaatgtgttatcttaataatgtgacgccttacgccttaataatttacttgataaacggttgccttttctttgaaggttacataattgtgattatgtattgaagtttacatgtgacgtcataaaagtttacttgatagacggttgcctcgtctttaaaggttacataattacgattatgtattgaaatttacatgtgacgccttaaaaggttttttgatagacggttgcctcttctttaaaggttacataattacgattatagaattagctgctggttgctttttcaaataataaaattagcttttgttgtctaaaatatttacttgatagatggttgcctcatttttaaaagtgaaatttacattcaaatgtgttatcttaataatatgacgccttaataatttacttgatagacggttgcctcttctttaaaggttacataattacgattatgtattgaaatttacatgtgacgccataaaagtttatttgatagacggttgtcttgtctttaaaggttacataattacgattatgtattgacatttacatgtgacgccgtaaaagattttttgatagacggttgcctcttctttaaaggttacataattacgattatggaattagctgctggttgccttttcaaataataaaattagcttttgttgtctaaaatatttacttgatagacggttgtctcatctttaaaagtaaaatttacattcaaatgtgttatcttataatgtgacgccttaataatttacttgacagacggttgcctcatctttaaaagtgatatttacattcaaatgtgttatctaataatgtgacgccttaataatttacttgatagacggttacctcttctttaaagattacataattacgattatgtattaaaatttacatgtgacgccataaaagtttacttgatagacggttgcctcgtctttaaatgttacttaattacgattatgtattgaaatttacatgtgacgccttaaaaggttttttgatagacggttgcct

SEQ ID NO: 72479 - DNA, 548 bp, Cannabis sativa
ttacatcttcatattttgtttattcatggttgtttaatcaatcccattaaagttggaaaattgcattgatttagagagctttctaatctgattcagaatgaaaattgttggtatttcattcaggttttgagaacaaagcataatacatacatacatacatggatgctgaggctgcaaaaactgctagggaatctctagacctggcgtttcacatgtcgaatatgcttgacacaggccttgatcgtcacaccctttctgttctcattgctctctgtgatttgggtctcaatccagaggcattagctgctctcgtcaaggaactccaaacagaaaccctcaactcttcatctcagacttgaattgaacaggttctcttttgcttgtgtcaaaaaataaatagtgaaactcatttggtttttgtgttaatggctaaatgaaactagggatttgaattcgagagtgttgattagaatttatcaatgtcagattggttgaaaaacagacaagaatttatgtacttgttattattaaacttgatgtgtggattg

SEQ ID NO: 72480 - DNA, 1022 bp, Cannabis sativa
agagagaggccactcaccaatgtgaacaatttgagtgagcgaccaaaaaaactatccaagaaggaatgtgatgatatcacatttacggaaagcgataccagatgggttcaccacccacatgccgatgcactggtcatcgtcactaacattggaggagacaatgtccaccgcatactagtggacaacggaagttccgtgaatctcctaaactttcaggcttttaagcaaatgggactacaagagaaggatctgcgaccaatcgtgtcgagtatttacggttttactggagacaccatttctttaaagggaatgatcaaactcccaattactttgggaaccgcacctatcgtggctaaattaatggctgacttcgccgttatcgaccaatacttggcatataatgcagtgattttttgccctatcctgaaggagatgaagattgtgacgtccatctatcatctcaccatgaagttccctactcccgctggggtaggatctgtgcgaggagtccaatcggactcgcgagaatgttataacgcgacattaaagctcgtcggttaacatgatttatatgttagaagcaccaccccctcgacaggaggtgttcataatagaggaaataccgcatgaagacaaaccagacttggatcctagggtcctcaattataccaccaccgcccaagctgcagaaggcaccattgaggtacccatcgatcctttacataataacaaggttttgaaaattggttctaaactaactttttaacagcgagaaaaacttgtcacttttctcaaacaaatctagatgttttcgtctagaaacattcagacatggtcggaatatatccgcaagtcatgtgtcactgattgaacattgaccccgaagtgcgaggtgtctgacagaagggccgcaaaatggacccctcaaggtaccaagcgttgaaagaagaagtagatcgccttttggcatgtggcttcataagggagtcattctacccaaactggttagcaaatcccgtact

SEQ ID NO: 72481 - DNA, 774 bp, Cannabis sativa
  modified_base (40)..(47): a, c, t, g, unknown or other
tatttaggatgttaataaacatgcttgtgagtagatctannnnnnnngtaaaataattcccaacacatatcttgtgtccatttaccaagccacgatcccatgtgttagtgcaacaaatcagacaacattcgtaaccttttgtccttaagcctgataaattactgtaagttagaaaatcactggcaatccataataacactgctttcagattaaaaaattcttttttaaaaccatcataggcctgaacaccattctcatacaattctattaaatcgtcaatcaataattgcaaatatacatcaatattatgtctgagttattgcgggcctgatatcattaaagaaagcatattaaatttcttcttcatcactaaccagggaggaagattgtacataacaaggaagaaaggccatgaactatgaagactacttagagatctatgtggatttactctatccgcagacagagcgagacgaatgtgtcttgattcatatttcaattcaggatttatgtagtttacttttttccaagcttgggaatctgtaggatgtctgagttttccatctttaactctcttggtctcatgccaaatcaaatttttagaatgttctgccctacgatataattgtttcggccgcggaatcaaaggcatgtaccacatcactttttggggcataagtttctaattctccttactcttgtttactttatggcgggataaaccgcaagtcgggcaataattcatgtctgcatattccttacgatataaaatgc

SEQ ID NO: 72482 - DNA, 1092 bp, Cannabis sativa
taggtggtattgaatacaagcgagactgttgggttagattagtggttgctggcgagttctgttgttatccaccagtgcgacttactcgcaaaacatttgagggggccagtggcaagccctgtacaagtgggtcgatcgggataggcacttagagcctcaaacacatcagggctgaagcaacaatccccctgcaagactatttcaaggacttcgtaaaccatctcgggcttgccccattttaactaactctaatttcatacagaatcctcgcgagcttgaaggttctgtacaaaattttgaaatgggagtaccccacccccttggaaatagaatatctctactctgtcaaggctattccagggaggaaaaatgcagcaaggggttttcattatctcgggattcacacaggtgatcgtaagatcattgtggattcaccaaataaaacttcctataaggataaattcttctggaggacaggcctctccccaattagaacaaccactttccgtataatacataagtgattatttgcacaagacttggttaaattagtccatgtcttttattctggtttaactgactgtaattttgctttgtttttgacagttgtctcgaaaagtcctgctcctacccctgagatggtcgagcgacgcaagctcttgttaggtctcccatacggtcttaggtcgtctgagttccttttgaataaagtcaacctgaggtttgtgggtgtccttaccgacaaggagtttacttacgattataaatatcccaagtattcttcttggcagcaggttctgcgtcccaactgaggaaaaagctcaggacagtgtggctcgggcacaatacctccagaatactgcccctcgggaagctgaagaaggagcatcccaaggtaatcaatgtggttgatcatccacagtgcttagggccaagtgtaacactctagtttcattttgagatagctactataacttttatacttggcatcccctccttgtagattgccttacgcataggtttgatagttggtatccaagattccatgtccaaattagttgtactgactcgtactacgggatagccgagcag

SEQ ID NO: 72483 - DNA, 1332 bp, Cannabis sativa
cttactataaagataaatagtattcttaaaaattatttaaaaatatgtatttttttatttggacccctaaaatgagtgggccctaggcgcaggcctagcccgcctatgcctagggtcggccctgctaatactggactccattacatttatgaggcaatcaatgcaccactggaccaccaccacaccctcttctttcaatcttatcatgtgttataattatgaggtattatgtgttatttatttttactcattttattgtggaattagttttttttttttaatttatgtttagtattttagaaactgatttcctttttattttttaattataaccgggttgagttattgtgtgttaattatttatttttattcattatgttataaaactagttctatattgatttatatctaagatatttaacttcggtaacttttttgacgatgagacaactctagtgaatttttcaatgattttttcggcgacgataattttttcggtgacttttctaagaacaataacttttttggcgccaatgacttttccagtgccggtatcttttccagtaacttttccgatgatatttcttattttaaattttataaaatttatttatggtcttttgtttggtttctcgatcatattttaaattttaattatttatttttttaatttgatattatctttttgcattatttatttatgtaaagttagaattctaagtagaggtaacaataatattagggtgtggacataatccaatctaatccaattataataatttggattgatttgaatgttaaagttaaattctaattgaattggatttattatagaatgttaatctcaaaatttaattaaaaaccgattcaatttaattatatttaatatatgttaaaataattatttatatataatattaattaatagtggtttatttttggaatattgaatttgtagtactttgatattttgtctattcattttcataattaatgttttaattttattacttagcaatgttgttattttagttattttaaacgttttgttaaacttgtaaggattatattattatggagtattaaacttaaatgaagagtgatatatatagtttttatgtatttttattcatgtttttaagttaatattaaaaattaggtgtgtaataaattgaaccaattaaattagtatttgagtaatacatgatatataaaattgtagcatagtcaaatattattaccatgaggtgttgaagacgatcccgccatgcatgtataacactgtgctactattggagcaccgccaccatgaccttaagcttatttttcatc

SEQ ID NO: 72484 - DNA, 735 bp, Cannabis sativa
taaaattcttaagccatacaaaatggtacaaaatttcaaatgagctcatcaaaattaattttagaatattaaagaggtcattcacctcacaaaatttcaaagaggtcactaacctcacaaaaatttaaaaaaaatggtaattttacctaaaaaaattcaaaagtgcactaaaatttaaagccataataaattaaatgacattccaaaaagagatcattcacctctcaattaacaaagcatcacaaaaatatcaaattgaattacgtttgatttggtttctaaaaaaagatacgtagacaactaagtcgctaagattaagtgcagtcatcaataccacaaaatggtataaaacgcaaatcttaaaattccataaaaggtcatctacctaggaattttttctaaattgtcaaatagaaaagaatgtcatctaccggaattcttatgttcaaatttaaaaatatagccgaattacaagtagcttgatccttcacaaagaaaatatgtagccaactcagttagtgtttcctttaaacaaaataattgtaattaagagattatttttatattcttgaataagttaaaatctaaattaataaatccaaaaagaggtcattcacctcttagttgacaaagcatcacaaaaatatcaaattgaactacgtttgatttgattcctaaaaaaagatacgtaggcaactaaatcgctaagactaagtgcagtcatcaataccacaa

SEQ ID NO: 72485 - DNA, 598 bp, Cannabis sativa
atatataatattaacatatacacatatccttatataaaaataactagtaaataattcatgctttgcaacgaatgtttcaaaaattttaaattatatatataaaataaattacgtattttatttgatgataataactaagtaataaaattacatcaaattttagtattagtaacttttcatatcactgcttcaatatattatctctcatttatatgtataggtattgataagaattattatatttatattaatatattttttattaatttaatgtttataaaaaaaatccaaagtaaatagtgtggtgccaaaaaaaataatattattattatttaaaataaaccaagtagtaaaatagttatcattttatacataaaattagaaaaaaaacataagtttaaaaacatatattttttttttatgatacaaagtttgttgttattttatgatcaatattttaaatatatagatatataaaatattattgggatatataatatatatacgatatataattttttttcttcatattaataagattttttttttaaataaaggatgatagtttacaacagttttttttttatttaataattta

SEQ ID NO: 72486 - DNA, 826 bp, Cannabis sativa
gggttgacttttgggggtgggggcagggacgggggttgactttcaggggtgggacgggtatgggttttatatattcatacccgagttagaaacgggatgggggcgagggaatatatacacgcccaaacctgccccgatatgatgtatgtataaatttaagttttaaaaccataagtacctactataattaaaataacttcatgttttaggctttttattgattatactctttgttttttactatacacactattccacttaagtttattgttttattcagtttttatgattattttttttaattctctttgagacatcttcttttttttcaaaaatatatatgtaatgggtacccgatgggaatccttctcccgtcgagcaatccccaccccgcccccgctttaatttaaacgtgtattgaggtaggtatggaggtgaatttaggaagcgggtatgggggtgggggagcaatccccgcacccaccctgcctcgtttacatccttattcaaattctgagattgtactctgtactcaataaatatccctaataataaggactcgtggagtatgtagattttaaatataaaattacataaaatatttggtgttatctgatcgtttattacttatatatttttgtagagattttattacgtaaaggctattttattttagttaacgaaaatctacactaacacttaatattccaagccttgctcaaaggctataccaggaagaatatctcagcttggtgtcttatgaagatagatctcagtaaggcttatgatactgtagactggaaatttgtggctgacctattaaagg

SEQ ID NO: 72487 - DNA, 2329 bp, Cannabis sativa
  modified_base (71)..(74): a, c, t, g, unknown or other
aatagcaggtttactaaggtaacttatagtcttctcatatatataaatctcaattacatgcaaattttctnnnntcgtgataaattaaacatgtaataggcattaaacacggaaacccaataaactatctaaaccatacatgtactcttgtcttatattgaaatttagttctatttcactatatcataattaacactcacttttcagatctcgcattgaaatcataaaataatttattgatggccagacaattaaaagtaattaagtacgaatgaaatagaatacgtagaaactggggggaaacatcatattaaaaccataaagcaatgtcaaaaaatatccatctaaccctaattaagtgcttagcaactcatgttcatgtaagaaaaatcacacatattaacttaagaaaagagaagaaaataatgctgaaaaccctttgaagaatgcctccagtattgatttcggtctttaaaattcatactcctttgtcggctgtttatttccctcctaattgcttcctcaaaactattgaagtccacttcttttatagccaaaagaaatgataaaatacaataaaaattgctgaaaaaaaaacacttattctgcttaggattagaaaacctattctgcttagattagaaggggtggtgagttttctactgcattgactgatagtattttggctataactctctcgatattactcagaattggacaattcaagatgttcaagaaggataaaagagaaatctagaacttttatgttagaatttctctagattattaagagatccaagtcgaatttaggctttaacttttagctttatttttttgcacaattttctctattttatagttcatatttttgtgagatctttttattttttatctttttatctttttttttttttttttttccatattattcctttgatattatctaatcttattttattttaaatctgcaaaaataaaagataaaaaagcataaaattactccaaacaatagtagaactaaattaaaaacacactaaaaattaacctaaaaataatacttaaaacaacctaacaaattcccttaaacaaaacatttactcatcctcgagtaaaacactaaatggaaaacaaaagctaaacaagtcaatctccagaacatgagtaattttcaagtagcttcaataacatgattataaaaagtgcatataatcaaaatttcagttcaattacacctttgacatacttcaatttattttcatttagctcatgaaaccatagaatgcaattaactaataattgaaccactttatgcgtgccaattacaatcatcaatctactaatccaaaatttcatatgcttgcaatacttactattctccactaatataaattaatgcacaaccaagaatcagaaggtctttctaggtttgtagtgttaggcttaggtaggggtaaattacatggccatttaggcttgactaccccataagcttctccaatcatgtcacttaaaatatttttcacacaatcccgatacccctttatctaattacatgagagatatttttttctctttacttttcaacaagattttatttatcttttttttctacatttcacactggttgtcagatttttctttctttttctttttctttttctcaagttgctgtcaatctttaatttttgtcatattctctcaattttcacactttttctcacacacatacacaaatttcccatccaaattcccccaaactaaagatatacttatggtataattagggttaaatttttgaatgtttacgggtttatcttttctaggcccatatgtgtcgaaacaaagaataggttaaggctcaaaaaaaggaaactaggataaaattacagggatggcttgaaaggcacaatcgatctaaaaaaatacctaaatcactttcctagtcatgcataatttattatttcatctcaaatagaaagcaagcaagttctagaattttccaaacaactttccacaagtcacatttagcatacataaattaattcaattgctagaaaattacctaatatggttctatgttagcacaaaattgaaactagtcaaaagtataacatcaccaagcacacgaatttcttaaaataaataaacttttcaaatcatgctatgtacccttctttcaaattaactcatattaagaaaattaactcacattaaaactaaaaaatttaattttagaaacaaactttaagttcaccctcccaaactaaagtgacacattgtccccaatgtgacattaaagaaaaaggaaaggaaacttacctgagcgcca

SEQ ID NO: 72488 - DNA, 754 bp, Cannabis sativa
tttttctaacgaacatgtactatcaacttttttatatgcacttctaaaaatatttttaaaaatataataaaggtgataagtatgtatacattgttttaaagaaatataaattgttgttacactatatattgtattatttttctaactataatatgaaatttttagatttaaatggtataatatacaatacatattttagaatttacaaaatttatatttactatttatattaaaatttaattctaatatgcacacaataaatttaaaaaaattataactaatttggcaagattgagatattcaatttcaatcacccatgacaaaataaaataaatgtaagactattttattgatagcttagaagcacatcacacacatcattttgcaaaccatgtgggatttttactaaaaagaaaaaaagaaatcacaaaattacactatattcactaattctaataaaatagataaaataggtaaaaaaaatgatagaatgtcacctcacttactttatactttcttttataaggttatatagatatactagtagaatgctacgtgtgaggcacgtatactaagttttatgctaggcgtgtcttactttatttaaaaatgatagaataaaagaaaaactacaccaaaataaaaaatagaactaatatcataaccatcgtagccaaaaaaaagtagaataataatctaaagcacataaacaataaacactgataagttctctccaaatttctaacttctttct

SEQ ID NO: 72489 - DNA, 1255 bp, Cannabis sativa
aagtgaatattcaaccgacacaagaaattacgaaaagcaaagaagtgaaggcggaagatgatgatccacttgggagatccttccctcctttcaaaggaaaacaatggtatctcaatcacgaagatgaaatagttgttgcgtcttacaaagtagtatgcgaagtggctgatttcaaagtacaaatcaataaggttttaaaaatattcacaaacaccattctatttcataaaaaggagactgacacacaaggggaaccaacacctccatcttcttctggaacaaatggaaccggcgagataggttgtttttgcaagtccgtgtaatatttttatataattatttacttttgtgatgaagaatggatccaagttaactttgatggcgagcagttgcttgtcgtttgacttctcgagactaatattgttttaactctgataattatattttctggtgtcgagatgatcttcctcgcatgcataccttcttctagcgagataaacacctctctgtctcttatcttgactcgccacactatccacactcaatttgtataaagtgtaatatacgctgtgtttttagttttaccgtttctctcccacgcagcgaggttgtggcctcgtcatgcacgcgtgcacccacatggtttctcgtcaatgcagaatgtagcagttcgtacgtttctgcctcacagaatgctgttcagccagccgagttataaacataccctgcgaattatatttttaactagtcgttccatgctaagtgtactttttgtttgcgtgtttcagttctttgttattcccacctcgacacgtgtcttcctctgatgtggttaccgaattttgggtataacaattaccccttaaaaagagctttttaatgattacaaagggtattttcgtcatttttcccttttttgaaaagacacatatcctctgattttggcaattttgcggttttgaggtacatcataattaaatgaccatcttttccacttccacttttaatcatgtccataggatcaaatatgagaaaaacctttttccacttccacttcctcattttctccatttcaaaaagtctgagaaaaacctaaaggttcttcgtcaaggatcaccattaattttattcgagaatttgcatgccatctctgtgcttgaccgttttcttgcaagtttcctctgacttcatccttttaaagcgatccttgcttcgttcgaagatttgcagacggaattaccagccattgccccaa

SEQ ID NO: 72490 - DNA, 1037 bp, Cannabis sativa
tcatttaaatctctaacacttgatgcttcctgtcacagagtatgatcaagatctaaactaggatctttttttgttgttgtaatcttcacaatcttccacaaaggcatgagtattggcttgaattatgtggcaattcctcaattcacttaagattcaaaaatttcatgagaaaaagaatagggtttcgaattctaagaggctctgtctttattttttaagtcgtataacaaagtagtttgataaaaggataaaacatcttattctatttataggattttatctagggttaggattagaatcatatggaattaaaaaagataaaataatggcttaattaaacattaagtggctaaaccctattgtgggtcctacatgtttcaattttgccattttatttaagaacttatctttcctttcacaaatgtcatattttaattctaactctataaatatcaaatctatctatttaataattatcaaataaaattgttatttaacttatttgaccttacaaagtctcttaatcaacaaataaactctaaatcctctttcttctcaaataagcccttgcttagtgaaaatccataaacaatacatagtcttatttagaattctatatgattaattaaaaccaattaattgagtctacaagacaatattatcccagacaatgtggagactatgggcctatgtaaccaagctcctaataagtagatctgaaatttaccaagtaaattttttaacttattaatttctcctaactccactatagattcggaattgtactcctgattacatagaatgctctaattgttctaaatatagatacaacatgaattatctattatttcaatccaaataatcaaagatcctctataggtgatttactttgagtagggacaaatttaccattctactattctgtaaaatcttttattgacatatttaataaaataaacaaaactaatatttgtggtatttttaaaaacagttttgtttattgttgcccctgactttgcccaaaatacgtggaccaa

SEQ ID NO: 72491 - DNA, 1783 bp, Cannabis sativa
  modified_base (48)..(53): a, c, t, g, unknown or other
ttttttttttttaattttttgtttgagtgtagcgtaatggtttttacnnnnnnatattagcttaatagcttaaaggtcctgggtagtggcttatgttttaaaacatttaattataaggaatattatgaacgagaatataattgtagggaaacgtataaattatgtttgaccgtggaggatgttgactcaaaaatttggacatagacttctaagccatacctgctcactagattggcaaggatgaaatatttcttaagtaaaagtaaaaagtgaataatttatagaagttcaccccctacatcgcaacaataatatagatacgtttacttcaaggttttagttctcaagagatggtattattgaaaaaggttgtgtcaaacctttaacttctagataaagaaactagagagagaagctctaatcttgtgtgtagttttctaaatgtgaaaaatgaattaagagagctctcttttataggtgaatgaggcccttgaaaataagaataaaataatgaaaaaatacaagttggcaattttccaccatagaggatgatctaacggtgaaaattcactcatgagattgatcgtcagtttttggagctcgggtcgtgatggcgggacccgctccgagtaagttggagcttatttttgtaactcacttgggggaaaaatttgggacggataacttatgaattgggattgaagtgtgagatatgacttggtagagtattaaaatagcttcgaaacgcaagttgaatcgcgtcaatcagataaatattgagtgagttatggttgttttactaaaggttgttcatgacccaacgcttaagttgacatcccgcgctcaggttgacatctcaaagcccacgttgacatatgacgtcacccttgatgctgggtaagtgaaaaatgtccacgggatgcacttttatgatgcctaagtgatattttaacatcatttagtctatttctgtatcctggcaaagctggccaccagttctcggagatgttgttgttctgcagaaataagagactcgaaactcttcatttttgagtgttcttcccaagtcagaaatgagaaatgtaaagttgtgaatttgacttttttgacttcatggatcttagttattgtgaaaaactagatgaacgatcgaaatagaatcagaattggataagcagaacccagcgcaccaggccatttgttaacttgggtgttggatgcttattttggagcttccaggatatcgttttgatacttccaaggttctagaacttgaggacatggtctcctaccctgtttttgaccattccagatttaatgctcgaattatatttaacatttgaatgattgaaatcagtgcactaggttgattgtcaacttgagcactgggcccaacaccaggttaacctaggtgctgggctttgcttccagggtctcaagttcgtggttttctccccgagtttgcttgaatcttccttattttttatgacaaaaaaaaaatgtctgcgacacttttttgagaacttcattggaaacagaccaagttaacaatatgttaacttgggcgctgggcccagtgctaggtgtcaacctaggcgctaagtcccatttatgatccttcgggagtttcgtttggtcctcgataatagttgaatctaaatctttgctgaaaacggagaagattcttggaagagttctcagaaaacatcaatgaaatcggcccaagttgacaaaatgtcaacctaggcgctgggccagccttaggtgtcaatctgggcactgg

SEQ ID NO: 72492 - DNA, 1028 bp, Cannabis sativa
agtagttacccgagcttcagaagcaaagtgtatgagatgtggaacaagcgggtatatgggactaagatgtaccaggtggtctctaaacttaaatctcttaaaccggtcctaaaagagattaacaaagctggtgtttctgatatacatacgactgtacagagagctaagggtgaattagaaaatgtgcaacaacaactacagcaagacccttttgatgttgtgaagattgatagagaaatagctgctagagctaagttaattcaagtgcagcaggactattcagcctttttacagcagaaggctaaggttacttggatacaaaatggtgatctaaatactgcaaattttcatgcaagtattaagaaaagggcacgacacaatcagattttctccatagaaagcaagaatggcaccagaatcaatgatccaaatctgatctctgcagcctttgttgattactataaggatttgctgggaacaagcttgactaacagaagaccagtgctaaagaagcttctgagcagaggtgcggttttgtccacacaacaagctgagaacctgatgatgcaattcactaaagatgaggttaaagctgcactatttgacattccttggaaaacccggattgttattcgagtttcttttttcaagattgctgggagatagtgggagatgacatctttcaggcagtgacatcttttctggaatcaggtaatatccttaaagagattaatgctacaatcttgacattagtgcctaaaatgaaatgtcctaacacagttaaagattttagaccaatagcttgttgcaatgtgatttataagattgcaacaaagcttttgtgctctagaatcaaactcattctccctaatttagtctccttgaatcaaggaggtttcattaaatggagattcataggacataatataattatttgccaggatttgctgagacactatgggaggaagaataataagccttcttgaattatcaagttagatctgcagaaggcatatgacactatagaa

SEQ ID NO: 72493 - DNA, 1045 bp, Cannabis sativa
  modified_base (980)..(986): a, c, t, g, unknown or other
atgatttacattcatgaaatatggatttaaaacgatgaatcttgtttttgtgttgatttggatgtgttcatgttggtttacgtgttaatttgatggttgaatgggatttacgaaatttttccattaaaataattaatttggattccttgtgaaaaattaagcaattttggtatttatggaactcaattccaattaaaactgagaaagttatgaatgtttgaaaattgggattcaatggtgtcgagattgggtgcttacgcgcaccagcatctcggacaaagacaccacatgcgcgcgcatgaaggggacaacccttgtctgatgctcgcttgtcctctatttagacacccaccaggcgcgcacaagaccatgcaggtgactgagttttctcagtcaggcaccctgcaactcccacgtctacgcgtccatgaaggctgcaagcagcctgttgcacgcccaatgctggcagcaggtgcactttcaccaaaaattcgattttcatgggatcttttcccaattttcaaaccctaattttaaaataaaatattatgtttaatatatttaaacttaaacatcaattttaaattaataatattgaatttttaatagattattattaatttttgatattttgaggtttaaatttacaaattaattattttatttttaaaattatgttgagattttaaaaatttattaatttctttaacatttatacaatatttaattataagatcagatattttaatattagacatattttaaattaaatgatactcttatcttttaatttgaaatattatatttaaattatcttatatgataattaaataattaataaatttgaaattaacctacctatgtttatagatattctaaccattatattttcaaattcaaaaatttgatattttgttaaatatttaattgtttataaattatcagtttgaaatatgatatttatgctattttatatcatnnnnnnnattagaaatttataaattgtattttaaatatttaaataaccttgatatttttgtagaaa

SEQ ID NO: 72494 - DNA, 1296 bp, Cannabis sativa
  modified_base (600)..(600): a, c, t, g, unknown or other
ttgtcatttataaaaattgaaagtttgatcgctaatttttgtaaaacacaaaattcaaaatgatatttatccaaataataataattattattatatgaatttgaattattttataattatgaaaagaaattattgtattttttttcttttactgacatttatatattttttaattctctttgatttaagtttttcttttgtatccaaatttcattttttaaattgttaaattaattaaacaataagtttaaagttgttggagcttaattttaatatcatatcttctttcttctcttttttatctgaataaattatttagccacacaattttagtgatgacgtgataataataactattttttgtttgttataaatttttaatttttacttcttattttaaaaaaaaaataattaaaaataatgaatttatttaaaagttgaaaaaaataaaaaaaataaaaaacccaaaaaaaaggctaattagcaatttttccccctgaactttgacatgtactaaatctgtcccctaaacttttttggccgttaaaaattcccctcgaactaatgagattgttaaaattaaggacttttgtctaattntagtaaaaaattctaacatggatgaaagttcaaggggcatgttttagtacatatcaaagtttgaggggcatgatttggtagatatcaaaatctagggagcatgttttagtacataaataattactgaaacagtaaaattgaatgaaattatacaaaagtccctaaatttaacaatctcaatagttcggggggaatttttaacggccaaaaaagttcagggggcacgatttactacatgtcaaagttcagggggttaaatttcaagttagccaaaaaaaaatggcagcacagctcatggatgtgctttgcaactagtatattataagtttatataagaagaaacaatacgaacgaaactctcattctctccttttgacaaaactttttctccttatatttattttctttgattttcaacccaaaacctagcaatctaagctctggtagtaacgggatagcagatccttgaagagagaagattaaggcatgatttaattatattttaagctaaaaatgattggttttatatagtggctttgtgaattagaatagttatggagattttgactttgtagaattgttctttggtagttatgggattagttttgatgtttacttgttaaatttgagatcattttgagttagaaatcgagtttggaacttcttaaagcttagtccgaacgttaatggtatttt

SEQ ID NO: 72495 - DNA, 925 bp, Cannabis sativa
tttcttcatcagttgtgggagacttttctttggtcagtttgaaatgtggggctagtggtgtctgcacaggtttagaatcactcattccatacttctcaatcaccttttctaggtattctttctgagacagagtgatagtatttggtctttgtctttgtatatcaatgcccagtatcttcttagcttcccccagatctttcatgtcaaactcatcattgagttttgctttcaagttgtcaatttctgttctgtcttgacccacaatgagtatgtcatcaacatacagtagcagatacaggtgtccatttgtgtagacacagtagtcatagctgctccttgtatatcccagtttctccattgtttcattgaatctcaagttccactgccttggagcttgtttcaatccatacaaggatttctgcagcaagcatacttcttcaggatcattgctttcaaagccctcaggaatggtcatgtagatgtcttcatctaggctgccatggagaaatgcagttttaacatccatttgatccacctcaagatcaaattctgcagccttggccattatgattctaatggattcttgctttaccacaggtgagaatatgttagtgtagtcaatgccctccttctgagtgaatcctttggctaccaatctggccttgattctgacctgttcaaatccagggacgccatctttgaccctaaagatccatttgcatctgattagcctatgtccaggtggtcttctaactattctccatgtcttgttcttgaccagtgattgtttttcctcatcaatagcctgcaaccacttcttgccgtctttgccattcactgcttcttgataggatttgggcactgtgttgtcaacttcatctgtgacagacagagcatatgctgaaaaatcagcatagccaaactt

SEQ ID NO: 72496 - DNA, 959 bp, Cannabis sativa
ttggaaagctaaaatcatatccttggcttttgtgttcaccttgtctaataagataacagaagaagttaattttgcttgtgatttccttagctaatttattattacagttgctggtgagatttttggcttgaaaaccatagctgcataccgcagtggcctagaaatcaacccgaatgtttcaaaaatagatgctgaggaaggtctcactgagactttattaggtgagtacagtatagtaggtggattaagatttctcaatgatcatctcttctgtgctaacagttctttgtttccagctagtaaacctattcgcatagaaaataaaaacttcatcgactttatattcacacaaagtttggaggttgctgaacagtttgacttgccaatgcagatacacacagggtatgatttttaacactacttgtttggaggtatgagaaaagaattcaaaacatggaatcaagattgctatttggaaataaaaatgaaatttttaatgtcatcatggtgaaataacttacaacatatgataaagtttagtctcgctagtgcatctcaaatatgttattgagagaaatgagtttgctatggttggttcgctattgagaatcaccaataattttcaaagtttccaagttactatctctttatcctatgctaactataactaagagcatcaggcacttaaagatgttcttattttaactctgcttttgtttatttattgataaattgtacatttcacctgtaactagttttggagacaaagatctggatatgcggctctccaatccccttcatctccgggatgtcctcgaggacaagagattctctaagtgccgtatagttttattacatgcatcctatccattttctaaggaagcctcatatttagcttctgtttattctcaggttaaacattttctcctgtaaataacatcttttactgaattttgaaa

SEQ ID NO: 72497 - DNA, 685 bp, Cannabis sativa
ggtgcccaaaacaactttttcctaggcgagccacccaaaggcattccaagatatgacataggccaattccctacttcacatccaatgtgtatatatatatatgtatatttgttttttaagagattaagtgctcgtaaccagctaagtcctcaccttcccattagaaatttctcatcagctgttgtggccagtttttggatatggttggaaataaagtttagggtctttcaagatggggaagatggtctttcatccatttggtctttaaaatgaaggagctcaaagttttttcttttccagtgcaacataatgattggccctttggttgtaatcttagatgacatcttttttttttttttttgaaaaagagacattcaaaaaagacagaggtcaaatgtctttggctgacctccacccaaatttattagaaacataaactctcacatttgacggaggaaaaccatggtaacatgaagacttgccatcttttatattgctgtacaatctatcgttttttattaaagaaaattacaattttataattcacaagaaatatttctcagatgtttgtgtttgagttgtaggtgtcacgttggaagatcctcatattgaagacctcagccaagatgttagagggttcatattctctaaaattctggtttgtatcctttacggttataatttt

SEQ ID NO: 72498 - DNA, 705 bp, Cannabis sativa
gaaggagggtctcttaacccctgaagcagaggccaaacccttaccacaaacagagaaatcaggttgattcatattgagaccaaattccatttccatagaatgagagttaagagtaaaactcccatcatgagaaatgaaataggattttgagaaacagaaccctccaccaaaggctcagagcttaccataggaacagtggcaataacaatcacagaatcagtggaataaggagtaaaagcagaattactcaaagacaaaccaagaccagacctatggaagggtgggatcatctcatgcagattaggattcacatgagttgggatcatgatttcagtagactgctgagggtgagtaaatgataaagcagaggtagtattaaagttaagaaatgaagggaatcgaatagtagaacccaaagagccactagcagaaatattgagattgacatggggaacatccaaaagagtcatagcaggtgggtgagggtactgaaaaggaatacccttatcagcaactttttcttttcccctcaagagaatattatatggacaaggaggctcagacaaagtgtcatcacatttctgcaaaaacgcatggcagtaccttttagtgtgatcaagacgaccacagtaaaagcagaaatcacgtaaacgctcatatttgaaatctcaccacttaatcaactccctccccatgcgaataaac

SEQ ID NO: 72499 - DNA, 742 bp, Cannabis sativa
tacaacctgcatgtcctaattatagatagctattagctctcttttgttgagagaggacttgcatcattattttatagaaagagaatcagagagaatattaagccatagttacagacatgagatttcttggaaggatgttaaagggattgtcaattcttgaaatagcttccctgatcatgagagatgaatatgtaatcctagttagggtagtttagggtgctcgatccattgatttctctctggttttgtactaaaagttcaacaataaaagcttcttcattgttcatagtaggtttgatcatcatgaaacacattgtttcatagttcagtctactcaaattctggtgttcttcttccttttctgtattattcatagctttggttattcaattcttgtttagtttgtttaattctctattattgatcttgatcaagggatgttcattcacaaaaaatggtatcagagccgaggttagcttgacgagatcatgaactactcaatcaaagttcaaagaagccaagaatgtcaatgatcaagtttgaaatggataagtttattggtgggaatgattttaggttgtggagactcaagatgaaagctatgttggtacaccaaagtttgtataaggctctagatacaaaggctcttgcagctattgaagaccaaaagaaaaagaaagaaattcagatcaaggctcatagtgtattattgttaagtattgggaatgaagttcttcgagag

SEQ ID NO: 72500 - DNA, 1077 bp, Cannabis sativa
  modified_base (662)..(664): a, c, t, g, unknown or other
tattttgagattctcaaccaatcacatattcaattttttaaatctcaaaaacattaaatcacactacaaccaatcacatatttaaaaacaatttttcactcacaataaatttttgtttccaaaacacatttttaaaaaacacaatttttgaatcacaaaccaatcaaatcctaatatatttagagaatgttttctctttggttctttaaagaacttattacaacttatcaagatctttcttgtggcgttcaaatccttgacttattactctcaatccttcttttattttttgagtgcagtatcttatatctttcttatacctttgttttttatttattaatagatagtgggtgatggtccttgttttatagaatctgattttggaacgatctaaggcatccttattctcaaaaaaattgcgattaaaccctctcaactattattccacttgcacttaacccttcaagctcaaattttagcagtaaaatcctctaaactactgaactgctagcaaatttcaagtgtcatttatttttcacagttaactgccaacatagactgcttatgtgtacactcttgaacacatggcacgtttatattaatacgcctaatattttaatttcaaaattataaaaaatatttataatattttttattttttnnntttataattttatttaatttaaaataaattttgaaataaaaatattaagtataccaatataaacgcatcacatgtacaagagtacacgtaaacagtccatagtggctataaaccagataacaccttaaatttgatgatagatcagtagttgaaagattttactattaaaatttgagcttaaagagttaagtgcaagtaaaacaataattaagaaaatttaggagccaaaaacttctaaaattagttttaggactcattattcttgtttgggttcaaatttttgaaccatttaggatcacatcatgtgacaagatacaatagtacacttacctgataaaatgacaaatgacagtgaaatctggtattcactgtcattaaaaccttccaaggatcaatttagccattttaaatag

SEQ ID NO: 72501 - DNA, 818 bp, Cannabis sativa
cttggttaaactgtcagcaatctggtcatgtgatggcacgtatctgatctcaagttgcttatcgagaaccttgtttcttacaaaatgcacatcaagttcgatgtgttttgttcgtgcatgatacatgggattggcagccagtgcactggcactcaaattatcgcaccaaattactggtgtggaggcacatttgaactattcgcctaacagttcttgcagccatgagatctcagcagcgagttgagcaagtgctctgtattcagactctgtgctgcttttagcaacaacagtttgcttctttgatgaccatgaaatcaatgtgtctcctagaaacacacaataaccagcaacagacttcctatcatcagggcaacaagcccagtcagcattcgagaagccaaataagtttagattggtgcttggaggtatatgtaggccgtggtgcatagtccctttaagatacctgagtattctctttgctgctccccagtgcacatcagtgggctgtttaagaaactggctaagtttatttacagcaaaagatatgcctggtctggtgtgactgaggtattgtaatgcccctatcacactgcgatagacttttggttcactcatgggtgtgccatctgttatagacagaggctttcctgcagtaattggagtgacactaggcttggtattctccatattaactcgttgaaggagttctgatatatacttgctttgagtcaagtagatgcccgtattgtctctatatacctctattcccaggaaatactgcagaggacctaaatcctttagtgagaaagattggttga

SEQ ID NO: 72502 - DNA, 624 bp, Cannabis sativa
gaatcaagacttgaaagacactccacggttttggacatctcaatgaaaatggctgcaaatcttactttaggatcaagaactcggggtaacagatattttcacaatgctggaaagggtcaacaaacagaaaatgctggaaaaactggtaaccgtggctatggattcagatctgtcaacaaaaatagacctttgtgtcaagtgtgtatgaggtttggacacacagcagctacttctcactatcggtttgacagaaattgggtcactcccaaagctccccaccctcagccccaagcaaatattgttgagcaaaccattgactatgatcctcaagcttttcttgctcaaacagttcttgattttggtgatgatgaaggctggtatgtggatactggtgcaacaaatcatattgctcaatctactgataatctcaagtctgtcatcccttattcttgccaagaaactgttgctgtggctaatggtaagaaattgagtatttctaacattggtacaaccactcttccatccaaatcttgtcctttaaatcttaattctgtcttacaaattcctactatcactaaaaatttagttagtgtttcaaagctcactaatgataataatgttttc

SEQ ID NO: 72503 - DNA, 752 bp, Cannabis sativa
agtttttctaactgtgatgatcttttttattactgatgctccttctcttcctaattattctactagagtttcttcattcgaaacttccctaagaacttcatcccttaaattcagaagtatggccaataaactttatctgaagaagaaattatacaccataaggatgtatgaatctaaggatctcaggaaacatctagataagtttaacaatataattttggtcaagattgaagatgaggatcaaggatgaggaagaggcggaatgggtttagggtcgatggttctagaagaaaaggagaagaaaaagaaagaaaggaacaaaaatatattttataatttgttttcatttttaaatgatttttaaaattttaaaataatttttacggtatttgaatagttaaaatgatgtggacttttaaaaattttccacgtatacacttttgtacatattagcactttaatttggcacttaacatctcttaattaacggaaaagtaaaaattaaaatagaagtgaagtttagagggttttactattaaaaaataagtttgtggggttaagtacaaatcatataattgaaataattttgttactgacaatatctcacttttatagaaaatttgtttaattggtaaatggtcattttaaaaaataaagattaacattgagtattttcataaatatttaaaatttataaaaatgtcgatgtacaatttttgtaatattttttacaggtttaatatatatttttt

SEQ ID NO: 72504 - DNA, 1270 bp, Cannabis sativa
acaaaatcttaacaagctaaaacatcctaaaaaaatttacaaaatcaaaaagaaaccaatgtaccttaataaaattattagagattagatttataccttaactgatgttgagattcaatgattctacaccaaatctgatgatcagagctacagctaccacaaccaccacttctaagctcgatttacactaaaaaactaagaaaagaacgatcaaatactagggacatatttttgggtatgaaaaataaaagattttaaaaaaatgagtgaaaacggtgacaaatgatgaaatgggggctgtatttggtggtggacagcgagaggttcgtggtttggtgctgctaaaaaatgaaggaaatgaagagacgaatgcacttatcaaggttttaataccctatgtcgttagttattagcaaataaccgatgacataagtgacacacattatgtgtaaatcttgatttcccaatatcaaccacgactaaaagaaaaaaaaaatgtagctacataaattaggtatactctataactatagtttttataatataattgccattaaatgtccaatatttaatgggacgggaacccaaaaataagtcttagttgttttagcttttttttttattaatcagttaaaaaaactgcttctaaaagcttgtttgtagtagtactagaagtgtttgaaagaacactaataccacatataatttgtttgtattaagtttttatattctgtactatcatttttattttattactgtaaatttatgttcagcaataataaatttctaatttgttattgcagatttttaccgttatattttttttcactgttattaaagaaactgatttacatatgcaaaaacatagttttcaatatataagaagtgtatgtacttttaatgtgtcaaaattattatttattatattataaattattgttaaactaaaagaaatagttttttttttttctttaaaaaaaagtatttctcctcaagaaaaagaagaaagaagttttatgtaaccaaatcaataactattatggatggagattaggaaacatttaataaatttgaaaatatatttataattttagtatgaatcccacttaacaaggcgctccatcccataactatagacaggctttaaagtttaaaatattgtttttattattattattgacagtttagattctagaacatttttttaaaattatatatacatataaataaatattattatttagaaagagagagaaagtggtatataatt

SEQ ID NO: 72505 - DNA, 1597 bp, Cannabis sativa
ttggtcctcgaaatctaacctgaatagctctggatattgagttcttatgttggactccaactcccaagtggcttcttccactttactattctttcagagcaccttaaccaacactatggttttgttttgaagaactttttcctttctatccaggatttgctctggttgctcatcataagatagatctggctgtagttctagggcttcataactcagaatatgtattgggtctgatacatatttcctcaacattgacacatggaatacgttatgcacaactgataatgctagtggcaaggccaaccgatatgccacctgaccgaccttcacaagtatttcgaaaggccctataaacctagggcttagcttgcctttcttcccgaagcgtctaatacctttcattggtgaaactcgcaggaaaacatgctctcctgcttgaaatgcaatatctctgcgcttggggtctgcataacttttctgcctgctttgtgaagcaagcattcgagctttaatcttgtctattgcctcatttgtcctctgaactaattcagggcctatatacttttattctcaagttttgtcctaaagaattggggaacaacattttctgccataaagcaactcatagggagccatccttatagtactctggtaactattattgcaggagaattcaactagaggcaaatatttactccatgaacccccaaagtccatgacacaagcttgtaacaaatcttcaagtatttgaattgttcgctcagattgcccattcgtttgaggatgaaaagttgtactaaacttcaggttggtacccatggctttttgcagactcacccaaaattttgatgtgaacttgtgatccctatctgaaacaatagattttggaactccatggaggcgaattatttcttttacatacaactctgcatactgatccactgcatatgttgtttcacaggcaaaaaatgtgctgattttgtgaaacggtgaactatgacccatactgagtcatacatccccgtggtttagggcaatctaaccacaaagtccatcgcaatgtcttcccacttccattcaagaagtgttaatggctgaagtagaccttctggtcgctgatgttttgctttaatttgttggcaggtccaacatttaaccacgtattccactacatccctcttcatcccataccaccaataatgaggcttcaaatcttgatacatcttggtggtacccggatgcagtgaataaggtgtagtgtgcacttcatccattatctcttttgtaaactcaacatttctcgaaacacatacacgggtcttaatcagtaatattccattgcttgaaattgagaagtccttagctttaccagctaatatctcttctcgaaccttaattaattcaggatcttccaattgtgtcgttctgattctttctagtaagtccgagtggagtgtcagattatgcaattttccaactacaaattcaatgcttgccctagctatatccgagtctactgagaaaaaatcattgcggcactgaaggcttggtcaagaccctttcagctcaaggcatctgctaccacattagcctttct

SEQ ID NO: 72506 - DNA, 1472 bp, Cannabis sativa
  modified_base (256)..(268): a, c, t, g, unknown or other
  modified_base (1301)..(1303): a, c, t, g, unknown or other
aataacatgaaataactcaaaccgattataactaaaatataaccggttatataacataatgaatacaaacaagtaacacgcaataactcaagacgattataattaaaaaaaaaaagggaaatcagttcctaaaacactaaaacataaattaaaaacaaaactagttctacaacaaaatacctcataacacataatacctcataaaaccggttataattgaaatataattaactagttttgtaacataatgaataannnnnnnnnnnnnaaaataactcaaaccagttatgattaaaatagattcggttccataatagtgttataatgaataaaaaataaataacaagcaataactcaagccgtttataactaaaataaaactggttatataatataatgaatacaaacaattaatacgcaataactcaaaccgattacaattaaaaaataaagagaaaataagttcctaaaacattgaaacataaattaaaaaccaaattagttccaccacaaaatatgtaaagaccgcttagctttaatttggaaaattattagcagataatggggtttaattatgaaacttatttattagctctgaattattaatttacgatgatttatttgaattcataatgcattttatatgtcatatatagaaatttcataattttgcatgttttgtgcccggcaacattagaacgcggtgtttgactattttaatcacatcttagtatttttagtatagcagggcagtatagtaagacattgggaatgtcgagaatagtcaaaattttagaatttctcaaaatacccctaagtgaccttttagggttgttagtgtagaaggagcaaaatggtcattttgccaaattaggttttgtctttttgtgagtttatgttaagttttaaatctaatttttaaggtgaatattaagctgataatattagataaaaccaatcttttatttcattttattaaaaaacagaaaatttgacaaaagaaacacatctctctctcattcaaaccccctagaccagctagggtttgatgttttctctgtaattcaagctagtttagcaagtatttagtgatttctatgccaaggttagcctcttgtagctttctcttaagtttcttaaattgtatgaaaatggattttgcatgattttgagagattgagttatgtagttgctgttagggtttgatttagttttctggagtttatttatgttagattatgttgttttgagctagttgtaatggctgatagtggatttaactaagttttgagttttagaannnaaacttggagctttaatggtgaaatttgattctgtacttgtagaagtgttttgttgctttgaatatgttctatgtggtctaaatagcaagtctgaaagttattgtgctgtttgtagttgatttgaggttgtagtgaattattgtgtgtttcctacactgaactggattt

SEQ ID NO: 72507 - DNA, 751 bp, Cannabis sativa
ggactcggacccgaacccgaacccccgacctaggcccgaacacagatgcagacccagacccggatccaaacacgaacttggacctagaccgggacccgaacccagacccgacctgtagttggtattttacacaatctattaatacaagtcaataccaaacatagtactgtattaaataatactaatacaatataatataatacaatccaacacaatacaatacaacataccaaacgagctcaatgtctaaatttttgttgaaaaacttgaagaattttaaataatagcttatgaaataattaaaaacttaattatttttaaaaatttgagattaactatgcataatctatatctattctatataaataaattttggtttaatgttgttatttcttattctgttaatttaaaacataagcatttaaacctacattaactctaaaaaaaaaattaaatattaaaatattcaatataaataaaaaaatacttaaaatctttaactttcaaaaaaattaacatttaaaaataaataaaaaaataacaaacaatagcataatttatggacctaacattaagtctaaaaaaattaaaattttaaaatattactagtgaagtgaagtaccacgtgcttcacacgtgttagtatatgaattatacattatgttaaattatatttatggtgatgtttagttgttatttaataaaatagaatagaatggaaacgaaaaaaattctcattctatttttttaa

SEQ ID NO: 72508 - DNA, 900 bp, Cannabis sativa
aaccattataaaaactttggtgtgattctttactttattaaacaagtttatcatttaacgacccatatagtctgagtttattctttttatttacaaccttcttagatcaattaatgacgaaaaattgtgtcaatacataccatgatggacatgtaaattgtaattattcacaaccataagagaaatcctaacatatatcactatagtgcttagcgtccttcctggtattatatcgttattggtacaattaattatcgggtctcatataatttgatataataatttttaaaaaatatcgctaaccaatcgtaaaatatcaccgaccacgtaatatttaatttatactaggtgaagctaacacgtgcaatgcacgtgtctagctctccatgttacattttatttatagttttaattataacaaaaattcatataatttaaatttcacatattataaattttcttaacactgcttgttatattgtaaattattctatatttctcaaaattttgtagaatgttttaaataagtacaacatatccatggtaaacaaatagactaaatttttttctaaatgccgaaacagtaagaggtgcattggtgcaccatttttttaggggtgcactgtagaagtttcttatgatatatgatactattaaaattttaatccccttatctatattagcatttagaagagttttttagttcatttttttatgatcgtttacgttgtagttatttaagactacctgtaaaaataaaattcagccaattggttatcacgtgtataaggaaaaatatcgtgtgtgcaacaaaatatttgaatctcatttttagtattataaactatatgaaattttgtgaaaatttagaggttgttctaaataactacaatgtaacga

SEQ ID NO: 72509 - DNA, 1747 bp, Cannabis sativa
aagataaaaggaacgaggagaagaatcgacaaggattccatggacgaggtatcgccttcttgtcaaattttctacgtagatggctcacacacaaccaaatatttaaaagtgacttactgcaagtttacaaccccacattttttcaaaaggtgaaacaaaacctaacttttcttggggaagtctattgatcgcatgagctgttgtcttcatactttcggcccaaaatcttcttggaatattcttcgcacgtagcatgcttcgacatgtctttacaaggtggtgattcttcatctctgctactctattctattgtggcttatttgcacacatgaattgatggcatatgtgacattctcgaagatactcagaaaaattcatctgaggtatattcgccaccgttgtctatttgaaggcatttgattttcttgccaacttctccttccgctatttctttaaattttttggatttaaaaaatatttcgaatttttctttcataaagaaaacccatacatatcttgagaattcatcaattaatgtaaccatgtactgcatgccactgattgatagttgtttgacttgcctaaacatgttagaatggaccaattccaatggtgctttggctttaaactttgaatcttcatacggtaattgatgcgccttaccgtattggcagccaccacatacggtctctattcagacctcgagttgacgaagacctttcaccatagacttattcatcatcacattgagtttgtgataactgacatgtcctaaccttgcatgccacaaatttattgtttcgttctttcgagtcttgtctacataagttgactctgctgacattacatagacagactctaagcctcattctctcatcattgttgttccagatatttcaagatcttggtagatcttgacatcttgaggaccgaatacgacatggtggcttgatacggtaagctgcaccaatgatagtaagtttttcttcatcccaggtacatgatagacatgctggagtgaaacttcttttgggctgaatctcgacatgattgttgttttgccgatgtgagcaatcggtagtcttgagttgttggtcgtcactactacacgaccacctttttactcgatcttgtctcagcttctcttcatctctagtcatatgatttgagcagccagagtcaactatccaatcatcattgtagtcgatctttcctggaacagtagctgctagagctaattcttcttcctccacagtaaaagatgcttctgcgtcccattcttcgtcacttgtcttttctgcatttgatgtggctgcattacattctgcaattttcttcttgaatcgacaatttctagccatgtaaccatactttctacagttatagcatttcccatcaaatttattattattctttgactggccatgctggttgtttttcttttgagctcccccggtgtgggagcttctatgatgactatcattgtcatcatttttcttaaattttttgctagcatgtggtcgagatcgacctttcttatcaccactaaagagtgcttcttcatcactctttaataagacttcagatgtttgcttagctcactcttcttggtcagctaacaagttttctattttaccaagagatggttggcttggccaaccttgtattgcagcaataaaagttctaaattctagccttaatccatgaataataattcttctaattctagcatctgacatgccagcac

SEQ ID NO: 72510 - DNA, 569 bp, Cannabis sativa
  modified_base (525)..(534): a, c, t, g, unknown or other
ccaagaatattgcatcacctgatcaggtgagtccgtatattatgcccatagtatcatcacattatcattgcctaatcagacaattgataattttaaaacctgtcatgccatgtggtaaattatacttttcttacatcaagtttcggttcaggaatgttggccgacttaattggagaacgatcgacgatccgggtcctatgtcataatagctatagaataatgagtgtttttcccaaaacaccaacgggtattaaaattttaaatctaaacttttcctatcgacaaacatggtggacataacctaaaaacccaaaaatacaaaaaccgaatcgtccccaaaacaacccaaccggttaccaggtgtacatatgttgggttttgtgccctaaatattttattttgtttatttttcattttaaaattattttaataatttttaataataatataccaatttaaaatcaacttgtggtttttggaggacttaactgttgggttttgtgccctaaataaaatctatttcannnnnnnnnnatttattaattaataaagatcagaaatcacatttt

SEQ ID NO: 72511 - DNA, 1179 bp, Cannabis sativa
ccagtttgaagatgtgtcaatcatttcaatctctaccatgccagtgatactaggtttttcaaggaattggatgggattagattagccttatcatttatatttttgctcacaagttgggctagtgcatcagcagatgtgttttcttcttttggaatttgcttgagggcatagctcttgaattgtgcgagcaggtcatgtattttgcttaaataggctatcatcttttctcccgagcttcgtacttcatagatacatgatttaccactaactatgagttgctgcagatttcaatatgtttggcatgaagttcccgagcaagttttagagcagaaatgagggcttcatactctgcttcattgttggatgctctaaacccaaatttgactacccaatgtagatgttgccccccaggtctgacaagggcaatccctgcactgaacagttgatctttagtcgacctatctacatgtaactttcaggtgggcttgtctttgctgctgctcggctgaggttcttgtactggctttgagttgttttttgaagtgctctcttctttgcccatacactcaactacaaaatctactaaggcctgccctttaatcgttgttcggggttgaaacatgatctcatactggcccaactccactgcccatttgagtaaccgtccagaggcgtcatgtttttataatacttggcgtaatggttggtcagtatatacccgaatagggtgagcctaaaaataaggccttagctttcttgttgctaagattaggaaataagtgagcttttctataatatcgtccttcaacttcaatgagtcttttgctgatgtaatagaccggatgctggatattattctcttccctgatcagtacgacacttccagcatgctctgtgacagccaggtatatccctaactcttctccatccagaggttttgagagtacagggggttttgcaagttgcctttttagctcttgaaaggcattcacgcattcctccatccattcaaattttttgtttcctcgaaggatgttgaagaatggaacacacttttctgttgactttgaaacaaatctactgagtgcggcaatccgtcaagttaaaccttggacttctttggtttttgtaggcaatttcatatccaggagggcttgaattttttctggattggcttca

SEQ ID NO: 72512 - DNA, 2044 bp, Cannabis sativa
tttattatctcggtactcactctagcgagcctaaaattattgtggacttgccaaacaaaatgcctttcaaagacaacttcttttggacaactggcctcttcccaatcggctcaaccaccttccacaaaattcgtaagcgatttttttcattgggctcagttagattgatccatgtcttttcattctaagtttcttactaaggttttgtttttgatagccctctcaaaaagacccgtccctatactcccgagatgtggtcaactgacacaggctcttgtgcggactcttcctcatagccttaggtcgtgtgactttattctgagcgaggccaatctgagatttgtgggcctccttaccgacaaggagtttacttgtgattataaatttcccaaatattcttcttggtagtaggttcccattccagaggaggataagggctggaattgcgtggctcgggcacaataccttcaaaacactgtccctcgggaagccggtgaaggagcatcgcgaggtaatcaatgtggttggtcacccacaatatttacggctgagcgtaacacattagttactttccgagatagctgccttaatttttatatttggaatcccctcctcgtagaccaaattgctcataggtttgataactgataccctagattccatgttcagattaattgtaacgagtcatattatgatatagccgagcaatatggcaagtcatatagacacgagctgggatttagaaccaatcaaggcatttgatatattcaagattataggttgtagggattttagcggatactatggtccttctaccccctcttctagtgatagctcgccttctagtggctttggtaaattccttaggtggaaaatcatactccacacttctctttcatttgcctttaaataatttgaatgttttattttgcctcgcaaacatgcattttgaggatgtcatggaacagaaagggaagaaaaagggaaccaatctagggccttctgcagataccgaggtggagccttccaaaaggcaaaagaagaccattgcccacaaaaagaagaagatatcggagcctatcgaccttgaggtctctaaatctgagactcgtgaacaaactcctcctctgatcgatcccaataccaaagcgcctcctcctagcacaactcatgcccctgcttcctcgagcgaggccattgaaacattatttgtcgtagcagggaagactcgttcggaatttgcccagttgtttgggactgcctgctggcgctaactcaaggctttcctcccccacgattgggatctaatcaatctcgagaatctgaaggaaatgctttcgaggagcttgcatcatgcccgcatcgtaagtttactgtattaatccatatatttcaactttctttttcctccatttttcttatattcatttgctcgtaattctccaggcttctttcctctctttttcctcccattggcgaatcctggagaagctcaaatacctggagagcgaggtccgaaagtcactagcccaatgtgaggtcgtgattaaataatggaacgacgcttagcatgaaatcacccgtctcaaataagaagctgagaggtcgaagaaaagccttgaagaagccgagaaggccacaaagatcaagactaatggatacaatgaacttatgaaggtgcttgcggggaaagaggctaaaaccaaagagcgatgcaacaaggtcggcctttgtaccgtttatcgagccttgatggcgaatcctaacatggacacaagattcttggaggaggatgaggaggagattttggcttattgtcaaaaggccaggaaggaggaggaagaggccgaggcagtggtagaagaagatccatccaagtctcctacaatgtaggcttggtttttatttatctctttcttcttctttttttttttgtggaaatgactttagagctgagacaatggtttccccttgtggcactttttgtaaagacaaatttgcgaagttggatgtccaactttgctttttattttatcttttaatg

SEQ ID NO: 72513 - DNA, 702 bp, Cannabis sativa
agatgatgatgataattgatttaaaagtatttattattattgattagtacttacacaaaaagttcttatttatagtgaatggaaacagttataattagtaaattgcaaccaagttatatttatagatttaaaaagtgaatttatagctaatttgaattaataaaataggagagtacataaaaattacaataaaatagggagggaaacataagtaccacagatttaaggggtgttttcttgaacatgtttgaatcatataagctattattagattttcattaattagtacaaacattaatttctatatctgcaagtatctattatatataacgagtttcaggaaccacatataaatttttatctgttattctacacaaagctcaaagtaaaaacatgttgtgtatttttttttttcaaaaaaaataaacaagtgcttttttaatcctttttttttcttttggttccacatctttaattctaaaataataaattgaggttttaagcattttctttgtgaaaagtatgtaaatttactaccaaacgaatatataaacacaaaatataagaattgaatataattttaattattacattatattaaatttaagtttaatatataatttggataggtttattagctttagatagagaaaagaagagagagattaaagaaaatgaactttgtagaatatggattgaact

SEQ ID NO: 72514 - DNA, 1126 bp, Cannabis sativa
taccagaatcataggaacaaaaccgagccttcaagcacaaaggaatggtttcatacaaccaaaccaagaatacaaaaggtaaaccaggtagtttataagaacgaggaacgttttccaaatgttttcctttaaccttaacaagaggcttagaaacaccttttgcctttttaacacccctcagtccaatctttaaattgtacaaagttaactcaaacactggtatacctatgggaaactaccatactcgtcaaccccaattatgtttagaatctcaacatgaacttttttggagtaaacgctactaatcaaacatttagtaacaaggtacaaaacaaccatcttcacagcatatatactcatctgacttaaaatcactatacataaacatatgctcaacagcactaaccgtcactgactgatcacaaaaatatcgatcaacaaaagcattttctctgtgtatacttactcaaatcagaatcaccaacacacagtataccagacacaacagcaaactcagctaaactaaatctgaaatcctcatcaccaaacttaaaccacattttctccctatgtaaggcattatgaattagttgagactgaaagccaacaggatagctatctaaaaaataaccgaaacaagtaccacgaaaaatcttacgttgatctttagtcagcttggatttggtatttttaacaacaatgttatcttgattagggaataacatgacttttccctgaatcttttcaccaggcttgaaatataaatctcattcctgtaaaaacaaaatgatatccaagaaatccacacattaaactaaaaataaacgtcaaaaaacaactgcacagtatacaataatcattaaaatttgtaaaccaaattttacattgttaacaaggaaaaatacacatcaaaatactaaaaaactaaaataaaccataacataaaaaaaaacacaactaaactaaaaaaaaaatagtataatgtaaaaaaataaactaaactaatgctaaattcataaaacaataaacagtaaactaataaaaaacgtaacctaaataaacaaaatcgaaaaaaattaacaaataaactaaaaaaaaaacacataaacagtaacctaaaaacaaa

SEQ ID NO: 72515 - DNA, 618 bp, Cannabis sativa
tttttttttacaaaattctacatagaaactcttactgtaatttaaatcgtaacaaaaaatcgtatataaatttttattgcaactagggctgcaactattttaaaaatctaaacagtaaatttaaaaaataaaaaattaaaagaacaggtggtaatttttttttttttgttggattggcattcttttgttgattttcagtaaaacatatctttcactgctggatgatttattaaaatataaagtcgtttattttttggtgcaatagagtgacttgtaattgtaagcacgtaaatggttgtaattgtaagcacatttcatgctattgtattttgtttcttggatttttcttttttaattaaaatagatggttgtgtatatttaggaagagattgagatttttttctttaacaaaaaaaaagagaagattgagatctccgattacttttttatatatatctattctatataaaatgtggctataacaaaatttttgtttatgagaaataattaggtgacttttttttgaataaaaaaaataacaaattattagatgttgtcacataagggtcagcatcatgtagttagttaaagtaataatccacctaaagtgttgcaatt

SEQ ID NO: 72516 - DNA, 1114 bp, Cannabis sativa
  modified_base (46)..(48): a, c, t, g, unknown or other
  modified_base (252)..(257): a, c, t, g, unknown or other
  modified_base (847)..(850): a, c, t, g, unknown or other
ctcgcgccaaggtcaagcaaagcttggctgacttcatgagtcccannntggcatgaaatggtgggacaaccaggatctttgtattttggcggtgtcttttgttcgattaccgcactgacttgttcagtcaacaaagcagtcttcttgacatgatgctttctcttaccagtgcacaaggccttgatgattttggcataagctcaaacttgttttatgacgtgaagcaaaggaagattaatcttcacttgtgtnnnnnnctcaaggagttcagctcgatttttaagaattttcccaacaagtctaagagcctggggaaacggtattttggcttgagcattgagtggtgcactgtcaggaacaacttttagatttgaagtagtggttttgatagatggatcttccaaagatttaccacttcttgttgtgatggcgttaacccccttaacaatgggatcattagagttggaggtttcagccatttgttgcccttgtgcattaaattgaggctgggaaggaagtctacttttctcgaaaatagccaaggatgcggtcaattttgaaaattggctttttatttcttggacatcttcccttaattggcgattgatttttgcttgttcctcaatgaatgcatgaatggtgctttcaagggagttcccttttgttgagaattgtatttaggcgtaggatatgcctgtggaggttgagcttgattctcatttctccattgtcctccagatgtctgagcttggttggagttatctctccaactgaaatttgggtcgtttctccaaccggggttatacatatgggagaatggcttgttatattgccctaaggcattgcnnnnctcctcatgaacccccctcatttctttgtaaactaagaaatctttagccaaatgcgcattttcttcacaaatgaaacaaggttcgagtggtcttgtttgtgcttgggcaaccatgcgccctttttggccatctttattcgtaaggttttcaattggcttttttaaagcttcgacatgggcctttaagttgtcctcttcccaaagttggtaaatcccagttggtcgatttctgttggtgctttcagcagcacttggaccagtcca

SEQ ID NO: 72517 - DNA, 1116 bp, Cannabis sativa
atatatatatatgtggggcaaactgtttacaggacttagatgatcaaaggtaccaacttgaagaaatatgtaaattcaaatgattaaagttttgagatatttagaaagatataatatgaccatatatatgatcaaaaataatgaacagggaaagagtatatagtcccagaaattaacttgattgatgatcatgtgatcataataatataagatgatatatatttatatatatatatgtgagattgatgagtaggtgtgatggtcatattgaaattgtagtttgtcgttttgtgtatacaatgtccatttcagcaattggaaagagagatataatacaactttttataagcacatattggctggtcatgtctctctctatccatatatactatcatttatatatacatatatatggatatgattttgtcccgtctactttcacggaatgcattctgggatgtacggcagccgtcagatgaggaacttatttgatctgacgactgagattgatctaggggtaattagagttaaaaagtaaaacgtaccctgacactcatttaatgtactccgagacccatctaatgtaccacgaaatacattccgtaaaagtacatcacggacaaaatcgtgtccctatatttatttatatatttgcttcaaacttttaattccaatcatatgtaactacgtatataaatatacctagctaatggtgctacttttgtgttttcaatatttggctaattatatgatttttggttttccaaattttgatacgtatgttttaaatttttaagggcggtaatttttttttttttgaattattaaaattgttagatttaaatttttttatgtaatgtcatttaattttactattgtggtaattgtctatatgttatttagtacgtagtgtatctctcaaaatttgatatctattaaattttgtctcttaaaatttgatattttgtaaatcgtgtctctgaactttgacatgaacttgttaattcaatttttgacatatttaattaacaaagatattttattatttattgtatatttctatattaaattggtgtccatattttgtgtatttaaatttggaaggaaagttgtcta

SEQ ID NO: 72518 - DNA, 791 bp, Cannabis sativa
ccaagtttgtgtactttaaggttgcgtgtagacttcatctgagctgcctttgcatttgagtgggtgacacgtgttagccccgtctgttcgtgattcgatgtgaggctgaccaggtgtctcttcagcttttggctaattagtgctctaacttaattagtgcctcgaaactcagtttttctcctcacgctttgacggttacacttgaataattttgatttcccaatattttcttttgggggggaattgaagcgtctaaggcatttcgaaatgattacccgttttcaccagattgcctataaataaggctggattttcttcataattttacttttactgatttctctaacaaacaaactaagagcaaaaaaggatttttactccaagtctgtcgtgagatttccaccaaaggcatccgagcaacttcgtctagactacacttaggcgtcaaaaaatgagtaagttatctcctcctcttttaacttcgcatgcttaatttctgggtttccattgtagaaaatacatgcgttcttgacttgttgtagaagatagatagaaaatctaggctcaaaactatgagattttttctgtaatagtccgtacagcttcacggtttacaacgtttgcctttaatcacacattgttcgtcttcaccttgctcattcgaagcttcgtaaaatttaaccctaaacccaaaaatttcaaacatctgggtttcgacttgatttctgtacatttttcatccttttaatctgttgagtaatcttggtcggtatatttgcctgtttattgtt

SEQ ID NO: 72519 - DNA, 1385 bp, Cannabis sativa
  modified_base (441)..(442): a, c, t, g, unknown or other
  modified_base (1317)..(1325): a, c, t, g, unknown or other
ctatgaaaagttctatacagttttgggccttattccagtcatggattaactactaatgttacttcctgttaacacagatatagttgcaaaatagcaaagtatccaataccttaagaggagtaaacatatagaaatgaatttcataatatcaatgattttgtgactaaggagatgtaattgtagaaaaggttgatattgaatacaacctgtcacattccattacaaagataattttatatactacactatatttggatatcaaggtgttgagattaattaaaatgcactttcagttttatatcaatacaattgggagcttgttttgattttattccctaaataaattattttaatataatcagatttaataattaataaaagatcaggaatcattttatgttgcatggtttacatgattgctttcatgattatatgtttaanntataaattctattaaatcatgaaattattgttattcatgattatagttttgtctacatggtggaaaataatcatgattatatgcttcaaagtcttttctcccatgatttatcaatgcactgaatttacactggcgtgataaacagcgataaagtttacttacacattaatatgtggtgtgtccttttcatggcattagaaaatatactagtatcggatatattgagtatacatcggactcgaccgatattgatagtagaaaatatatcataaacttattattatgtcttttctaagtcaataatcacttactattagttgtattctttgacttgttcattaaagctgacaaaatggattggcctaatactcacgtcttgggaacatagtagtaaaattgagtgagagcgctaatcatagatatgaaatctatagattctataactattagaagtgaaacggtgattttgttttagcttagcttaacgcgataaatgatagagcgctgattttagtaattatattagtttactaaaatatcatttacaagtagctaattgttttaaggattaaatatattaaagggtagaacattaaatttatccctactcgatgttgatactctatagagaatcttcgattatttggattgaaacagtgaacaatttatagtgtatctatatttggtatatatagagcattctatgtaatcaagagtataattttgaatatgtagtggagtcaggaggaattaataaggtaggtaggaaatttacttcgtacatttatttcggatctacttattggaagctttgttagataggctcatggtcccacattgtttgggataatattgtcttgtagactcaattaatnnnnnnnnnttaatcaattaaaattctaaaaaagactatgtcttgttcgggaaatttcactgagcaagg

SEQ ID NO: 72520 - DNA, 887 bp, Cannabis sativa
gattgtgttcattgctgccagttggaggacattaaatttagaggcagttattttacatggagcaacaaaagacaagggaatgaaaggatatggtccaagatagatcgagtgcttgctaataggaagtggatggatgatttttctaatgctgaagctgttttcatggtggaagggttgtttgatcatactccagttattgtctcaattcatcctgaaattcgaagaggcaagtcgcctttcaaatactttagaatgtggtcctcacatccccgattcttagagattgtgacccgaatttggaaggcttcggttgctggcactaaaatgttccaactggtatacaagttaagaatgttaaaggctgaattgaaagagttgaatagaagagaattttccaacattcaagaagcaaccaaccaagcaaaggaggacctagtcgagattcaaatgaagattcaggctgatccgctccaacacgggctgcttgaacaagaaatggcagcaaggaagaaatatagcttgttactcaaggggttgtcctcttttcttcagcagaagtctaaagtagcttggattaaggaaggggatgaaaactcagcgatttttcatgcaagcataagggaacggaggagacaaaatagtatactttcaattgaagaccaacaaggaataagggtagaagaccagaataaaattactgaagcttttctttccttttactaccaactattaggtagtaaaatggagcaaaggcgacaggtaatgcagagtatcatgcaacaagggcctttggtcacacagcaacaagcagagcggctaatgaaagagtatactaaggaagatgtcaaaaaggctatttttgagatcccagggattaaagctccagg

SEQ ID NO: 72521 - DNA, 750 bp, Cannabis sativa
aaatcgagagtttgcattttctaatccttaaactctttacttttaagtttgaatatttgttataatatattgcttgccacattatttgtatttatttgattaagtgtttaattatttaattttgtgttagaagttttaatttaccgaaattagtttaaattttcaattcaccccaccccccccctcctcttggaaacatatcttgggctaacagaaggcgtcattagtagaaaagtctcatcgttgccgaaaaaatcactaaagttgtcatcatcgttgaaaaagaaaactcagattgacctaacaaggaagaagacaaagagaagagagaagctataaaatatggtttttcaaaattattttacaaaaatatggcgggtaacccataaaatgcatattccaaatgcattaaaaatatatactataaaaaagtaaatcattaattttttttctaaactttgtgtaatttctacccttttttttcattttctttttcacaaatcacaatatattatcattatgttattatacattgtgggtgtcaccatacgtatttctttttttttttgataaatttgattacacagcgaatatttatatctaattacaaatttttatcataggattgagattatagctatgagtataattataaatttcataaataactcacacaagtacaaaacacacaagtttgctttttaaatgaatttaaatcaaagttcatagacatagtacttagtggccata

SEQ ID NO: 72522 - DNA, 1138 bp, Cannabis sativa
  modified_base (32)..(40): a, c, t, g, unknown or other
  modified_base (1070)..(1084): a, c, t, g, unknown or other
tttaggatgttaatcaatatacttgttagtannnnnnnnncctagtaaaatatttccaacatttctttcaatattctataccatgaggacatgaagcaaactagtccaggcctcgggagctgaaaacacacgaatcatcacctcagtagtcaacatgggcacctagggtttcacctagcacctgggttgacattctcatctaaggtttcagtttgtgggaccatcttagtgcaaatgggtcaaactatgcattgggcatgaactagacataccacgaacatatttgtggcatcagaatcagatttgaagaactttcattttttagcacgcgaacagctagtgcccgggcaccccagcacccaagttgacaatctgtcaatctgggccacttccaagcatcaaataaaaaatttgactcctgcatcttcttcgttttcatcgaaaattaggaaataagtgctttcggggaagaaatagcacatcctgggtgctagaattgggccagttcgaaggatgttttccgagaagttttccgagcatatattctctattttcaagaaaaattaagattcaactatttctagggccaaacaaaacttccaggtggcctcaaactggacccaacgcctaggttgacatattgtcaacctgggctatttctaattagtttctcaaaaaaagtgttttgagaatttttcccttatcagattagtgaaaatacaagcaaactaaaggagaaaccacaatcacaagggcatgaaaattgagcccaacgctcaggttgacctggagatgggcttagcgcccaagttgacaatcaacctggtgtgctggtttcgatcacttaattccaattttgctctgagaattctctcctaaatactcaaaaacagggtaggatacctcttcctcaagttctaaaaccttgaaagtatcaaaatgacatcctagaagctccgaaataagcacccagagtccaagttgacaaatggcctggtgcgttggaatctgattatctgattctaacactgtctctaccgtttgtctagtgttgaccgagattttcggcnnnnnnnnnnnnnnnattataataaagagctgtaagaaagtgagatgaagattttttacgtggttgggg

SEQ ID NO: 72523 - DNA, 853 bp, Cannabis sativa
actaagcactagaactataatttttataatagttaaactatatatgtagaggccccaaaatttgatttcgccttacgccccatataccttaggaccatccctgatgaggagaaggaaaatgagaaggagaagaagaagaagaagaagaagactctaatgatgatagttgatgatgattgcttggaatctcttttctcttgctcttcaatgtgttttctaatttcaaagttttttttttatttctctcctatcgtccaaaatcgaattacatcattatttatataggcttaaaaagataggaatgatgccatttcgaattaggatttaaatttgaaaactgtataagacgatatatatggctaggtgatatgtcgcttggaccatatctttgggatcctctatcttttttatccaacacatgcaaagattagtctatttcgtgaaagtgcgacatgtcgcctgaaccttattttctcaacgttcatcttttttttttcaaaaaatcaacatgtgcctaaatattcacgttttgtaagttagacgacatgtcgcccaacacctagacgacatatcctaaaaagtattgccaattcttgacttctttcgtgcacgttttgcttcctgactttaacatatattttgattattattatttttgtgcactaaattcatagtattatcatctttaaagctcaaaactacacaactacataaaacacttcaaatttgaacaaaacttaataaatcaatactgattcatctaataaatggctaagaatgagtgaaaaatgtgcactctaggtgtcttacttagagactgataggtatactttacaggactatttataatagt

SEQ ID NO: 72524 - DNA, 923 bp, Cannabis sativa
tactctacgacaaaaaggatcaagggttagagatatgaatggaaggagccattacattctgctgccaccaatataagattttttataaatttatatgtttttatttttattattttagaaaaatcacatttaggatgttagattatagtcctataatcaatatacatgttagtaaatctagatcctagtaaaataagctccaacaactggcaatagagccatggtaataatttattttcatgaaatatagatttaaaacgatatttgtatgatttggatgcgttcaaattggtttatgtggttaattgatgatttattgcgtattacaaaaacttttataaaaaataataagatttttgatctgcaattattttatttagaaagttggtaaaaaattaagcaaattatttatttatagaacttaatttcgattaaaatttaaaaaattatgaattttttaagattttgataaaatgaggggaagggtttcaccctgtgcgcgcggatgtggctggccacttggtcatgacacgcttttgaacaaagcgtgtcagagattccttagacaaggccttgtctgagcctccttatgcgcatgtcgaaagctgcatgtagcctcctcccttggtcaaccatgctcattttgtgcatgaaaagtatgcattgcatactatccgtgttgcttgctttttttcaaattttcaaaattttgtcttttttccatggattttaatttcgattttttagtagattttttatgtagattttttttcaaattttaaaactaagtatcatatttaaattaattatttttatttaattaatctagatattagaaagctttgaatttaaaaatatatattattctacaaattttctattttggttagtttattttttaaattttgattttttattatttt

SEQ ID NO: 72525 - DNA, 1194 bp, Cannabis sativa
tcttttgatacatccttgcagtacatatatgccattgtcaatgatagcttccataagcttttctgacccttttatcacctttaacagctccttttcaatctttactttgaacccttcatgatcaagcattgcaacagaaataagatttctcttaagatcaggaacatgtcttacttgcttcagttctactacttttccattatcgagctgcaacttaatagttccaattccttgtatggagcatgaatggttatcccctaacttgacagtaccactatttcttgattggtagttagagaattgactcttatctggacaaatatgaaatgaacatccagagtcaataatccacaccttgtccctgtcattcttggtaatcacaagaacacttgcactgtcatagccatcactatcatcaccatctgagacaacaccagcatctccatctttcttcgaattgtaactcttgagaattggacaatcctttctcaaatgtgtaggtttgttgcagacataacatctcctcttagtctttgaatttcctttccctttacttgtacttccctgtgccttgtttcccttcttttggaattttcctcgaaccagtaagccatctccagcattttcctcaaagttctcagattttcttttgatctcttttgacattaaagcagtaacaacttcttctaatgtcaaagaactcttaccatacatcatagtgtcgacaaaatgctcatactgttctgaaggcagcgaattcaaaacaataatggcctggtcttcatcttcgatcttgattcctatgttctccaaatcaagaacgatcttgttgaaatcatctaaatgatcttcaacacttttccctggtatcattcgaaaagaatacaacttttgcttcaagaataatcggttagctagagatttaaccatgtacagattttctagcttgagccacattccagctgctgttgtttctttggacacttccctgagaactcgatcaccaagactgagaatgattgcactatgtgctttttcgagaatctcagttttctctttctcagatagagttgcagagagtttggattcccccagcaatgcatcttgaagtccttgttgaaccaacatagctcgcatcttgactctccatagcccaaaatcattcttgccagtaaacttttccagatcaaactt

SEQ ID NO: 72526 - DNA, 698 bp, Cannabis sativa
agagagagagagagagaaagaattgaatgaaataattctgttattattattgaacaaggaagattacaacagtgtttatattcaccaaagcaagagagaaaaaccagatgaaaaaccagtagaaggttgttacaagatgcaacagtaattaactaactcctaactgatttaactaactgattttatccttaacaattccatccaagattgagactaagaaagctaagagggtcaaaattattcttgatatatatatagaagattagcattgctaatgaccatgataaaatgtttaaggctttagattaatcacttcaacccacaagaaagacaaaggaatgagtaaagggagagtcccttgccacaggaaactagcatgcgtggccacacctcacctcacaccaggtctcgtgtgaggcctctacccgcctcacatcattcagggtggagaaggcaccacctcgctcactacgcatgagggaagcgaggtccttatgggtagtaccccttcaccttgcgacacatggtggccaagcaaaggtccccctaaccacgcacgctcccagaccctaagggccatacacctcgttccacgaagtctctcctgcctcacaccgtacggaggccatgcgaggtgaccacctcattgaggcctcccccaccttgcgttgtacgaaggccatgtgaggtgaccccca

SEQ ID NO: 72527 - DNA, 525 bp, Cannabis sativa
ctattgattgtcacagttaattttaagactatgtaggtatgaaatacacagttgaagatgacttaaatagattgatagatactacctatatttttttcttttgaaaatgaaacgtgcatagatagaaattagacctcacgatcattacataggatattgttcggaatagaagaaacacacaaccgaccataccgattgtttatgaaagcccacttgatcacattatgggtcatataaattacaagttctgctaacaaattgaaaattacaacaagtaaaaagttgagagagtcttatacacaacttaacgtagttctcaatatcccaacgaaaatctaggtcgttgagcgaattgataaccaccctagaatcactctctataatatacttctagctttcctctttagcaacatccagcgccaaacaacatgcagccgcttcaccacaaagagcatcagagtactctaatctagctgtatgtaccccacaaaccactccaaggtggtttctagccacaactgcaat

SEQ ID NO: 72528 - DNA, 1002 bp, Cannabis sativa
aaaatactttttagtaacttatcaagttgtttggtacattaattttgtttaagtttaaagattaattacttaagaaaatataaacgaaactaaaatgttaaatttgatttcgataatcttctttagtgacggcaaaaaaataatatattttccacatattaaaataattatcttaaaaaattgattgcaataatataactctttaaaccaaaacaattatttgtgtaataaaaaataattttttcaaaacttgtaaaagaaaagagagagaaaaataagtatatgaagttggaaatttatttgtaaagttcttaaaatatataaataaaacaaaataagagaaatatttagatgttatgccattaaaagaaaaagtaacaaaataaataaataaagtaaggactgccaagttaatgttcaaaagaaaaaagctttaaaaataaaataaaaaagaaaaaggaagagagtccggtatacacataccaattttgttaaaaaagtttcggtattggcagtattaaattattgaaaggcatttagataaatattttaaaaagtatgtattgcgaagtaaatatgtttttcaaatttatgctttcatttatttattttaattttcacaatatttcattcattttttttaagatataatattttattcattaatatataattaaacaaatatgaaataaaaaattaatgtatctaatatttaaaatcacacgaaaggcagctatattgcctagtttaaaaaaaaaacaaaattcatatattttgtttttaaaattggaaaacaaaaatttttaccaaacataacataacatagttttgtttttcgtttttaaaattaatatacaaaagttgaacacatttttattttttaaaaacaaaaattccactttgtattaaaacattagaaaaaacaaaaatattaccaaacactgtgtacgattttcgtaaacttaccgtaataatagtagagactgcctaaagcgtagaagg

SEQ ID NO: 72529 - DNA, 1272 bp, Cannabis sativa
tctttatatagcctaaagcaagcaacgagagcttgggatactcgaattgacaagtactttcaagataagaatttcaccaagtgtcgatatgagcttgcactctatatcaaaattaagaatgaagatatcttaattgtatgcttgtatatgtggatgatttgatcttcactggaagcaactcaagtatgttttgggagctaaagaaagatatggcaaaagagtttgagatgattgatattaggctcatgtcttattacctcgacattaaggtgaatcaagaagacgaaggcattttcatcactcaagaagactattccaaggatgtacttaataagttcaagatggatgattctatccaattagcacacacaaaaaaaaaattcaaagcatgacgaaggaggaaaagtggatccaactcttacacaagccttgttggaagtttgcgctacctaacttgtacaaggctagatattctctatgttgttggaatcattagtcgctttatggaagctccaaaaacaactcatataaaaactgcaaagagaatactaaggtacattaaaggtacgactaattatggactattttattcatcctctaacaattatgagatagttggatatagtaatagcgattagagtggagacttggacaatagatagagcaccaccagattagtgtttttcatgggagatacaacatttacttggatgtcaaaaaagaaccaatcgttaaactatcaacttgtgaagtcgaataaattactgcaacttcatgaggttgttatgctatttggctaagaaaattgcttaaaaatttgaacgtgccacaagaggagacaactgagattcgtgttgatagcaaattaacaattgctctagcaaataatccagtctttcacgaaagaaccaaacacattaatacccgctatcattacataaaagaatgcactggaagaaaaagaagtaagagtagtggaatatgtcaaatctcaagatcaagcaacaatcattattatgaagccactcaagagagaaatattcatcaaactacgaagtattattaaagtcacaaatcaagtttaaggggagtgttaaaatattaaacttgatttgatatagttaatttctagaatttttttgttgttactaaagtttctaggctattcttatatttactaaagtgtctaaagttttctattgtttgtttgagtacttttaaattttctagaattatctttcatttttgttaatagtgagaactatgtaaaaa

SEQ ID NO: 72530 - DNA, 921 bp, Cannabis sativa
atataaatgtatatatataaaaatttacacacttaaattacatatttaaatactaaaatatatattattctcataataataatatgtgttttttacatttggatataaatttttaaatagtatactaaagtgagaatttgattaggataccatttttttaatatatatatatactaaatgggagttacgtggcgagccacgtaaatattaattttatataagttctagtggtttttgtttaagaattttttttttttggtgaatcagtaatttcattgctcaacaaactttcaatacagtctaaagaccataaaaggtctgtaaaatgtctatacaattgtatctacacgcaaattacaaagaatcaaaccattcataaactatttgagctacttttttaggcatcacacaagtgatcctagttttaacttgccactttacttcttgaatcatctgctgcatttgagtgttgtttccctgccataaaatagagttcttggttctccaaatatgatagactaaagctgcagtagcagccgcatatacagcctttctgaacttggatttcttggctctatttaaccacctaatgatctcttgcagtgatttggttgtagcaccccagccgaaccatgccttgacttgttcaagacactccttcgagtatttgcagcagaaatacaagtgctcggttgtttcatcagattcattgcaaagaatgcattttgcatctgttgcaatctgaaatctgaccaatctttgcctgatctttaacctgtcttgcacagctagccaaagcaaaaagctatgctttggtatattcattaaaatcatcaaaacgatatagcaatacagaattattaaaatcaaagcataagaacataatatcaagtacaccgaagaacaaacaaaactaaaaaa

SEQ ID NO: 72531 - DNA, 548 bp, Cannabis sativa
cccccagccatggcttatgggaatccatggatggcgtttcttgcttattttagtcatatggatgttagaaaaccactttggtcacattagttcttggccaattacttaggagaacactgccaccattttgccaataaaaaagtggcagtggtcgcataaggggtttatgaagcctcgggtgacttgtctcacttgtatttgatacatggatattggaaatacaatttagccaatgaaaatcctccttcgagggagtggccgaccactgccaccaattgtcccaaaagtgtggcagtggtcagccaactggtttccataccacttggtagcttttttcacttggttttgacatataattggtaaaaatatatttttggcaagaaatctcatccccttcttcatggctgaccactgccactcattgtgcgataaagatggtagtggtcggctaggcttgttccttttatgctattttggccttatgtgcaaatctaagccttttcatgcccaaataagttaagtctttgttggttttcttgatggattaa

SEQ ID NO: 72532 - DNA, 799 bp, Cannabis sativa
cccgtgccaatccttttcctcaaaccagatttaacaatatcctttgcagcatggatactactccaaataaaactaggattcgacccaagttgagcagaaagatagctccttgcgggtagtatctctctttaaaaactttgccaaccaaagagtcatgtctaaacaacaatctccaaccttgtttgcctaacatagcaggattaaagtctctcaagcttcggaatcccatgcccccatcaagcttatgcttagtcaatgtttcccaactcatccaaatgataccacttccgttaccgttggagttgtttgatttccaccaaaaactcgccatcattcgctcaagttcgttacaagtgccgattgggaaaaggaaaatattcatagcgtatgaagggagggcttgaaccactgacttaataagaacctcttttcctgcccgagaaagaaatttacccacccacccattgattctcttcttcattttctctttaaggaagcccaagacagcgtttttgttgcgtccaacaatactagggagcccctgatacatactatccacccctacttcttggatacgcatcatagaaaaaatacgatccctagtaaccgtggtggtgttggaattgaagaatgccgatgatttgtggagattaaccttttgacccaatgcagcctcaaaaagctgaagcagagagagaacatgattgacttcatcctccgaggcctggcaatagatgtaactatcatctgcaaagagtaaatgagagatagtaggggcactccttgccactttgcaacc

SEQ ID NO: 72533 - DNA, 613 bp, Cannabis sativa
  modified_base (27)..(30): a, c, t, g, unknown or other
actaatcagattgtaaagagttttatnnnnggcataaaacccaacatgaggtgccaacaacaccgctttgttggccttggactagttggtggagttgttttaaaaatttgtcagttcacctacccctttcctctggctcgtgaagtcacttctccatctcaccgatgcgatcgttatcactagatctctttcttttctgatgttgattttttttccttccactattaccatcccatctttaacatgcttccgtaacacatactacattaaaaataattattagtaagaatttgaagaacataaaaatgttatttagaatttaaagaacatgaatggtaaatgaaacttacaatccttttcgcaaccttttgtgcagggccatcaagcttgcccttcttgttagtttgtaatttgatccacaagttacatctattgttgtagtaagttggtggcccaactctttttccatatcttctccactttcttaacaccacctcgtttcttgtggatgaatatccaagatattcaaaatcttttaaataaatataagttttagtacttttccttctccaataatataacgttttgccaagttggatgtaaccacacaaaa

SEQ ID NO: 72534 - DNA, 1036 bp, Cannabis sativa
tttagtttggaagaatttggatggaaagtttgtgatatgtgtgtgggaataagtgtgaaaattgagagaatatgcaaaaagtttgattcgcaacaagtggaaaaagaaaaaaaaaagaaaaatctaacggtaagtgtcaaattcaaaaaaaaaaaaaaagagaaataaaaataaagtgttacaatgttgtcgaaagaaaaaaaaaaacaaacaaattttctctcatggaataagaaaaaaaaaaggagtatcaggattgtttgtacaaaaatattgggtgaattgattggagaagcttatgatataagtgagcctaaatgaccattctatctacccatacttaagcctaacattacaagcctagaaagaccttttgattcttggttgtgcatcgatttatattagtggagagtagtaagtattgcaagcttatggaatattccgagttagtggattgatggttgtaattgacatgtataaattgtttcaactattagttaagtgctaattatggtttcataaactgaataaaagattgaggtgaatcaaggatgtgactgaactgaaattctagattattataggtgaaattttattcataaccatgttatttatcttccttgaaaattactcatgttttggttgattgacttgcttcatttaggttgtgttatttttagttgttagtcttactggagggcgagtaaggatttattagtttgggggaatttgcttggatatttttagcctattatttatgttatttttagagttaattttcttcttcattgtcactttttagaaaagattatatttgtattctttaatttcaagtttcaacacttagaatgtataaattggtcaaatatcagaaaaatatgatctataaaatagagaaaattgtgcaaaaacaaaagaataaagctgaaattttaagcctgcattcgactatgatttgataaggttttggagaaagttaaaacataaaagttctagatctctctttcagctgtctgaaacatcttgaatcgtctaa

SEQ ID NO: 72535 - DNA, 742 bp, Cannabis sativa
aaactaaaaccctacaatctaactgggggtgaatttagatccttcacagcacttcttgaaaattttgggattgtgcacaagcttgcttgtccacacagacatgaacagaatggtgttgttgaggggaaacacaggcatattgtcgaaacagggctaacattgctagctcaagtctctcttcccttaaaatactgtgatgaagcttttaggacaaccagctatctcataaataggatgcccacacctgtcctacacaatctcactcccattgaagcactatttcacacaccaccaaattactgaatgctcaaaatctttggttgtttgtgttatcctaacctcaggccttacaaaaaacagaaactacaatatagatccacaccttgtgtgtttctaggctatagtatgtcccataaaggctacaagtgcttgtcaaaagataaaagactctacatctctagaaatgttgtctttgatgagaacaacttcccttatgctcacactgcagctacacaaaccagttctaattctcaacctcccacagtcactacaggtctaccacctgttcctcctttgctccaacaattcactccaatgcctaattctatgtcctacatcccatctaccaacacagattcttcacaacctcagtttgtcagtcacattcccactactatcagcactcacaccagtgttcctactactgttacaccagtgcaaaccaaccctatttaaaccaaca

SEQ ID NO: 72536 - DNA, 605 bp, Cannabis sativa
gtaatataggcattattaagaaaatttaaatattttatcgctgaaaaaagaaataataataataaaaaaaaatttgataaaggtaaaaaaattgatttttcatttaaatatttttatataaatatataatttttgataattcaaattttttgttttatgattcgctgtttttttaaatataatttaatatttttaaaattaatatttgtagttaaatttatttagtaatttacatacatatactctccatattttaataaatatatatacaaagatgtttatgtaatttgtcaattaaagatattagggcatccgacacctatttgttaattaaagatattagggcatccgtacgtatgtaggtatgttactattctaatctagaaattaacaaagttaggtattattgatggccctaaataaagtagttacaacaaaagataaaaacttatgaccataaagattctattctttacaaaaagcacgtaaaaaaggcacgtgattttatgtttacaaagatatttggagtttggttacaaaataaaaatggaataggaatgtgaatggtattaggaataggaatagaatagaatgaaatttctatt

SEQ ID NO: 72537 - DNA, 939 bp, Cannabis sativa
ccaacatgtggtcctgataaaattgatcagttcagtataccttattaatagaataaatatctgattgattcttcttctagcttcttcattgttgaaattgagttattatcactaaatttcaccatggagattgaaataccatctttgccaatccttttcttctcatacatattcttgttcatggtgataaaaatactcataaaaagctcatcaactaattcaaaactcccaccaggaccatggaaacttcccattgttggaaacattcacaatttcattggctcttccttaatccatcatacactaagagatttagccaaaaaatatggaccattgatgtacttaaaaattggtgaagttccaaccatagtaatctcatcaccagaatatgccaaacaagtgatgagagttcatgatgttaattttgcatcaagaccctcaattcttttttcgaaaatcatgttatatgatggtgctgatcttgcttttgctccatatggtgagcattggagacaagtaaggaagattttcatgcaagagcttttgagtacaacaagagttcaatctttcagatacataggagaagaagagatgttcaacttcatcgactcgatttcctcgaatgttggcggtgttattaatcttaatgaaaggcttaacatgatgatgtataacattatttcgcgtgcagcctgtggtaggacaaggattcacaacaaagagtttgtacctgtgttgaaggaagctattgaggtatcattagggtttgaacttgctgatttgtttccttcttttaagctattttatcacatgagccgctctaaacctaaactagagaggcttagagaaagggtagcaagaatatttgaagagatcatccatgagcataaggagcaaaagcccaaagagagaagtgatgaagatttggttgatgttctt

SEQ ID NO: 72538 - DNA, 1057 bp, Cannabis sativa
ccagcctgtaaccattggacccttgccctctgttgccagaagacctcctcctttaatagcaactcattgagtttattctccacttgcctagatccttcggtagaacatcctttactttgcaaattgtgcatttgaactacttttttctgcgtatctttaatttctcgaaataatgatccatacttattctgatgccaagtatccagatttgtagcacattgttgtatattcttaattgttgaaatcagtggtgtattttcctcagatctccaacaattcttgattaaactcttacattcttcgtcaccaatccagatattctcgaatctgaatcttttcctcttgttggaacctatctgcgaatccgtatcatcctttactttaaccaacagtgctctgtgatcagaatgataataatctagatgcgtcaagcttgtataagagaaagagtcctcccatgcttcattcaccattgcccaatctagtctctccttgatactttcatgatctgcactttttgcccaagtatatctctctcctttataatgcaatgggtgtagtgcacacaattctaaagtactacgaaaatcttcaatttgtgattcatttctatatccgcttttatttttatcatcctgactcaaaatttcattgaaatctccaatcactaaccatggtccttcatacactatccgtaaatgctccaacatatcccatgtcagtcgtctcttcgaaacattgggctccccataaaacccacagaaatgccattgtattggtatattctctaacttcataaaacaactaatataattaggagtagaagtaattcccgagaccacaactctttccttccacagtagcattaatcctcctcccatacccactctaggtacttcatagacattgtcaaaagatagttgtcgttttatttctaggctcttaccttggactaatcttgtttccatcaaaaaaagaacatctggcttgaactctcgaagaagtagcttaacatgtcgtattgcatccttactattcaaacctctaacattccaac

SEQ ID NO: 72539 - DNA, 570 bp, Cannabis sativa
acttgtacctacctggtacccttttaagtgtatattcctctcaaatatattataatatatccccatatataatgtatattctttctctttctcttgttctcttgttcatgtacatgttatagtcttccaactatttgggttaataattatttggatatatctattatattcttgaatatgtaatgcataattattatttattttcagatttttttaatgatgtgctatatttctcctaagtgtgaagaggagagatatatcttcattgaaagatatatttgtgattctattttattttatttttattttgacaaaatttgtgtattatttaatatcttgaatctagtaattaagtctttttcttttttttttaaaaaaaaaaataaataaataaagaacatcacttatgtatttaatgtgtgataagataagttttgttatgatagttggtgtaaattaattgacattcggtatttgttgcattgaaatgacagctgttttcttttttagtcataatttattgtgaatttaactgatggttaataaaattatacaagtaatgcatactat

SEQ ID NO: 72540 - DNA, 1118 bp, Cannabis sativa
ggacttggcgaggccatccacaacctttagttgaactcgatgtgacaagatgtgtcttgtcgcagccatcgcttgagagaggggaccaaaaatggtgagggtgaatgagagggagaacgaggagtgagaggaggtggtttggggcgagggagatcgacggtgatttaggccgaggagagcgacagtggtctcgtctagtctaggcgatagtgcaatctgaatattagaaagagagagagggagatggagagaggtagttgaatgttaaaggaaaaaaggacagacaaaaatgaaagtactgagaaaaaaagaaagaaagaaggaaaaggaattttttttttcaaatgattttttttttatttgaaattaatttttttaaaattttgttttattttaaagtatttatttatatcggccaatttaattatgtcatgtgtacattgtgtccacgtagacaaaacactgtgtacacatggaccctccaacataacacttaacacctaaaaatagatggaagttgtaaaatactaagagagtatagattgagttttttttgcagctaaaccctcctaactatcattttacttacattgaaccctacatgctcaaattttggtggtaaaatccttcgaaatactgaactgttagcaaatttaaggtgctatttatttaccaccattaactgccaacatggatagttgatgtgtacaatcttatacacatgacacattcatattaatccacataatataattatttaaaaatgtaaatgaattattttaaaataaaaaaaaaaaaaaagcttggagggttttaagtttattaaaaaattgaaaacattttttttttcatttttcatttttttttctttcttcgttgaaccataatctcagtttttttttcttatgttcttcctcttcttccacctaacaccaccaccacccccacccgatagtcaaaaccatcaccaccacaaacaaacaatagtgagtagttactgagttcggtagatgaattttttgatgcaccacacgaagcttcacggggatctcaacagcagcagatttgatcatggagaactcacagatctgggcgagatctcacagatctaggtgaga

SEQ ID NO: 72541 - DNA, 605 bp, Cannabis sativa
tggaggcttgaagcggggacgttacatagtctctctagagtcttctctaggatcgttcaagaatagagacaaaggacccttggttcttcagatttgtcctctcttgcatcctcagttcgcccatcttcttccactcctaatcctaaatcaaagaaaccaaggccctcctgcactaattgtggtaaaccaggacattatgtggacaaatgctattttctccatggatttccaccatgttatggtgacaaaaagatgttttgaaaaggcaaggctactgccaacaaaactactacgagttccaaaccagaaaacaccagcagtaccactcaagctgacctttcttctcaatgtcagcaacttatctccttactcagccaacaattgagccaaggaccaactagggatgaccccaatcatgttcttacggcttccaacatggttggtaagcttttttttacttcaaaacttgtcctggataattgatagtggagccacacattacataagctccaccaagtcttgtttttccaactttactaatgatatttttcaatttcaagtgcttcttccttatggcactaacatccctgtccatggaataggta

SEQ ID NO: 72542 - DNA, 1020 bp, Cannabis sativa
atctaagatcctggtaaaatatgaaaggtgataatagtacaattagaaatgacttgggatttatcctttggtacttttaactttacttcattttgtgcccgagtgtaccattatcgattttcatggttgagcctatgttatttctgctccttttgtttttaattgctcgagtgtacaattagattgtgtgtgtagaaaacaagcaaaattttcttaaaacttgattttctttaatgcatatgagagaaactagaattctagcagttctgagattatttatatttgtttgatgtttatcatgtacacagtgctcttatgaagttttttttttataaaaattatttggtgggagagactcactagaagaaaggctctctgctatgaataaaatgccagcagagctttctgcatcagctctgatgttatttatttggggagtatgcaaaactatttctagcacaaacttactcctattaagctagaaaggcaacaaaaaactctcccaataaataacatcccttaatatgatcttaaaaatagttttgtttgggtttatgatcagagctgatgcagaatgctctggtgactttttattcacagcagagggcctttcttctagtgagtctctcccaccaaataagttttggcatgaattgcgtttgttttgctaattcccatgagactatctttgagaagttatctatctttgaattttgattagataattttgtagggtgattatgatttattagttttcattggtttgtaacttttgaaattaattttattattattttttatatacattttaggattagttttgtaattacatgtagattgaatagatgacaggaacagatagtgaggtggttattgttgaaggctcgttttcctattttcgagcaaatgccttcatattatctgaaaatacagaattacattgtgattgcctgttgtggatatcacaattttataaggacaaatgcaaaagaagacattttgatggagatgaagacattc

SEQ ID NO: 72543 - DNA, 777 bp, Cannabis sativa
ttagtaaaattactataatcattataaaatattatgtccagtatcatcacgaggtttgcaaatgcttagtaatttttataataattattaaattaaaatatgaatctgatattctttaaaaaaaaaaaaacgtgatcagaatcacattaagatattctggagaaaacttcaacaatcggtgttagaacctcttcaaaccagcataactcattgtctagccaaagggcaatatagttcttcaatttttaacttactctaccctcttatactattgtttggaattaaaactttataaatagcactcttctctactttattctttaaaatacatcattaaaattttattttctttattttacttcaaactcttaaattacaccatatatccacttctttaaaatacattactaaaattttattttattttttcaaattttaatatattttattcatttcaaacatataatatttatatttatatatatattcctacataaaaagtaaaattaaaactttaaataattaataaaatatgtttaaaacaattaatagaattctataaatgtagaatatgagtagtgaattttaaagaaaatttaaaatataaagagagtttaaattttaaagtatctgataaggtgtttttagttaaaaacactaatgtgattttctattttaaaaacactaatgtgagtgctttggctagttatttgttcgattaattgtattttattaaaatgaaataataaaaaaatcttgatttcattatagttttca

SEQ ID NO: 72544 - DNA, 696 bp, Cannabis sativa
ccatataaaaaactaaatcaaggaaaaatacatcaaagaataaaccatcaataaaaaccacataaaaaatctcaaatctaggttgcaagttgcgagtttaaagagagaggcttgagggtggttcatatctgattgttgtcgacaaagagagcaagagagaatgagatgacgagaccaactgtggtcttggatcctttcgccaggtaacgtagagagagtcgtgcaaggggaagagggccagaggggtttcgaggctatcaacattttggggttctcagggcttttgggattcttgggctagaaagttgtgtaggtagggtttttttagggtgcagcatgaagaagaagaagaggtagaagaaaaaaagaaaaaacaaagaaaaaatttattatattttaattttttaatttttttaattttattttttttcttatttttaattattaatattaggtagaccaataaaaatttgccacgtgtaacttctatacaccgtggcagaccactttggctcttaacaaactaaaatggacggaaggtatgttgaccaaaaagattgtggaggatgagaagttttcccataattttttcagtttagggtttgatcatgccaaatgtcaaagttcaggaaatttgaccgcaaattaccctcataaaaaaaaagtaattgaggaaccaaaatatttaaattatgt

SEQ ID NO: 72545 - DNA, 1047 bp, Cannabis sativa
gaccaaatcaagattctcaaagccaaatctcaacaaaatggtaccaataactatagcacatttgagattctatcaactcatatttggagatgtgcatctaaagcaaggtcacttccaagtaaccaagttactaaattgttcactctaattaatggtaggactaaattggacccaccactccaacctcatttatttgctaatgttttatatgcaacttcaactgttgttaccattggtgatcttataaataacccaataaattatggtgctagtaagattcgtcaaactttggttaaaatggataatagttacttgagatcggctattgattacttggagcttaggcccaatctcattcatgggcctggtcgtggggctgatgtttacgaaagcccaaattttgggatagtttgttggattgggctgccaatgtatgattctgattttggatggggtcggcccttttatgtgacccctgttgggcttcgtttagagggtaaagcttacattttacctccaggcccaattaataatggtaacttatttgttgctattgctttgaaagttgaacacatgaaagtgtttgagaagttgttatatgatggtgtgtgtgttgggaattctactctttaatgtatatttttgttttgttgagaaaaacctaataaaaacaataaaggtttatgtctttttaatattttgtattgctagttgtttggaccatgtgatataataaagagactatttcataaatatacaaaaatgataaagtttttatatttttacagatctattgttttgttttttcatatttctccgatttttttttacaacggtattgttttctgttgtttttgaccgttgttttgaagttgttcttacgggaaagcaaagtgtttttttttcaacaatatgaaatgttgttttataagaaagttgttttgacattgttgctacgggaaggcaacaaagaagcaacatttttctctaaaaaaataagttaaaacttgtaaaaaaaaattaaatctgtaaaaatgtaaaaaaaaa

SEQ ID NO: 72546 - DNA, 907 bp, Cannabis sativa
gttaagtctcggttgaaactcaaggcacggattcgttatgccgaatctcacccattcctttctttccagtacaatagggtcagtatagtgcatgtccatacttagccaatgtcatttttttctacacatcaaatcatatatcactacccaaaaaaaaaaaaaccaaaaaaactattttagtgacaacaccaaattatatatagtaatttgcggcgtaaatacctaagtttatctcaaagttgcagataaatacctaagtaaaaattttggcaggaaaaatacattcagttaggattttgaaacttccgtaagtacctttccgttaagtgacatgtaagtgtccacgtgtcattttcacattggtcaacatcatttaattattatttttattaattaaaattcattaaaatatttgaaaatcattttaaaattaaaaaaattaaattaaattaaaattaaaattagacctaattataaatttaaatatacaaaataataattataaattaacattaaaaattataaacaaaataaaaaatcaaaagaaacctgaaactaaacctccgtctcatctctctcttctcacaggtttcatatctggggcacctccgcccgacctcggtgaggcattctaccacaatcgatggacgagattcccaccaccaggatcgcaagcatcagagcacaccgaagcttgttctccctctcgatctcgcttgagttctctccactctctcagtccctctctttctcgatttctccctactcagaaccggacggagaaactccgaccgtccatggcccaaacaaacttttaccacacctaacggagatacaggtgaggcgccgacaagaaacttggtcttggttgagatctatgcatcaacgggatctattgtttgtttaa

SEQ ID NO: 72547 - DNA, 1349 bp, Cannabis sativa
ttttacaaaaagagacatagttatcaagctcccaacgggactccttcccattaagagcgttgatcaccaccctcgaatcactctccaaaataagagactcaacaccacaagctttagcctcctctagggccaaacagcaagctttcgcttccccacagagagtattagaaaattccagcttcgaagtagaaacccagatcaccttgccaacgtgatcccttgcaaccacagcagcgcatatgctatccaaccccactctgatgttgcagttgagcttcaaccaatcttgcagggggggactccaagataccgtcggacgcgagatggggcaagggagcaagaaagcatgatgatctgtaaaagaaacccgaatagtgtcaacgcatttaaaaatatcaactgggtaattattgtgtaccttatcattccgagtccgccagatcgtgtcaatagtgagcgatgcaaaaagaaagacctcatgttcattgatgcctttctttttgaggtcacataagaatttaacccagtcccacattcttataccagtgtcacagatggagaaaattccccagggagatgaccgccataagtgagaagcaacattacaagataggaatagatgctccaaagtttctacttccattccacacagggggtagctttcgtcctctataggaaatctttttcctaacaccgagctaacaggaagagccttagaaacaccaccacagaaccttgagtctctctggaattttactattccaaagcttgttccacattgagggggcaacctcgcctggactcgctctatccactgcctgggccaaataggctgatttgcaggagaaacgaccactactttccaaagtccagaaccaactatcttttcctaggccagcaggaatgccccctttcagaatggctgagatagtctcctgatcaaacaatccgttaagtttttggatattccacccaccattatccaaaaggagctcagctacctttatctccctattcaatacccgcccatttggatggggagtaaagccttttaagtgtgcaatccatggatccaaccaaatgttagtatcctgaccatcggccacccgcttacaggcacctttgcgaatgatagctctagatttagccacattcttccaaaatcacgagtccgaggctttcggttcgcagtcaagaaaggactttccttaaggtatttggcttcaagtatacggcagcataaggactggtttcctgtcagaaggttccacccccacttggcgatgaaagcctggttcatttctttaaattttcagaagcccaatcccctaaagacttggggaggcaaa

SEQ ID NO: 72548 - DNA, 932 bp, Cannabis sativa
  modified_base (898)..(898): a, c, t, g, unknown or other
ttcgtcgtacaggttggtggaagcaagagagaggagagcaattcagatctagatttagtgatttttttcttctttttctatttttcttcatttcttgtttgagatttgagattggagttttttttttttcttattttgtatttgatattaattttcagtttcattttagtttgcgtttgaatctgaatttgagattgattgaaataaattccggtcgtttttgtggtggtcgatggccgtgctattaatggttggtagtgggctcactggcctgtaatggtgatagtagtatcaaagaaaaaaagaattgatattgatttttttaaaactattgagaagatgattttctcttttttcatttatgatttatgactttgtgaatgaatgggtgcttttacaaatgggtgtcttgcgaacggccaatggttgtcttggtctgtgaaatgaatttaaggtgtctgttaaagttaacttatttttgagcatattctgttaaataactgttaaaagacacaacaaaaaacgttacatacaccctcatttttcagattggatcctgtagggaatcgtttgcattagaagcatgcacccaagctaatgttttagttttagatcatcacgataggaaacaattaatattatagcaagaatttattttcattggttatacagcttttaatcaaaattagcattaaaatttttattttcttctttgattatgccccctatattaacttattttctgaagtctaggaaattaaagagaaatataaaaatcatcaataataaatttgacagcataacaattttttattttttgtttaagatttctattttcctctttgattatgcactcccatattgatttattttctgaagtctagggaatcaaagaganacataaaaatctatgaaaaattggacagcataac

SEQ ID NO: 72549 - DNA, 1805 bp, Cannabis sativa
gtttcttctactttatatgtgtttatttcatatcattttagaagttcatatttaggatgttaaataacatatttgttagtaaatctaagatcatggtaaaataattcgaacagaaccttccaaaaaggtgaaaaccgaggaaccccccattacgttcacataggaagacgagaaaaacgtgtgataccctcatgttgatccgttgatcataactatacaactcgctaataagaggatcaagagagtgttaatcgataatggaagctctgtaaatatattttataaggagactctaaagaaaatggggctcgaaaagggaaagttaaggccttatatggtgaatctctacggattcaccggagatagcatcgccagccttggcataatagagcttgcattaaccgtaggcgatgcacctttaactactactgttatgcaagacttcttggttgtcgacctgccctcggcttacaacatattgttgggtcgcccaacagtgatcggactaggggcaatcagctcgatcaagcacttgtctttaatgttccaaaccccagaaggcgtgggggtggtgcgtggcgaccagttgctggctcgcgattgttatcgcatagagctgcaacataggaaggccgatcatcaactgatgacgatcttggcaggagaacacgagaagaaaaatgaagatcttgatcctcgagttcaagatgaaagaaacctgctaaaaccaatcgaagaattggaagaggttattctctacccaggaagtccccccaaatgtgtgtacattgggaagaacctggacgagcaactcaaatagaaattaataagctttttgaaggagaaccatgatcaattcgcctggagtcatcgagatatgatagggattgaccctaagattatctgccatcacttaaatgttgatcccacctacctaggaaagagaaaaaaggaggcccttggattctgagaggcaaggggcactaaaacaggaagttaacaagttgttggtcaatgattatatacacgagatattttatccctcgtggatagccaatccttttctcgtcccgaaacctaatgggacttggagaacttgtattgatttcttcgatctgaataaggcgtgcctgaaagactgttttccacttcccaggatcgaccagttagtggatgcaactgctgagcacgagcttatatcttttatggatgcatattatggatataaccagataaaaatgtatgtcctagatcaagaacatacgagcttcgtaacaaacatggggctctattattataaagtcatgccattcgggctgaaggatgctggggcaacgtatcaacgactagtaaatgaaatgtttgcaaatcaaatagggcggaacatggaagtttacgtcgacgatatgttggttaaatcaacaaagagtaaggatcatacctcagtcctcgcgaaatgctttgaaatattaaaaaattataacatgaagctaaacccaaaaaaatgttcctttgcagtctccttgggaaattttttgggattcatatttaacgcgaggggcattgaggccaatcttaaaaaaatcaaggaataaatagatgtgccatccccgacaaaggctaaggaagtacaggccctgacaggaagaatggcggcacttaacagattcattttgaagtcaattgataagcgtgtacctgtaaagaccgcatatgattaataccttgtattattaaataattaaggtttatgtatgagattaattaataattatgaaatgaatattttggaaatatatttaata

SEQ ID NO: 72550 - DNA, 881 bp, Cannabis sativa
  modified_base (814)..(854): a, c, t, g, unknown or other
ttttctaggttgagatgttttatggttgtctggtttgagatggttgaaggcaggtttgggtggggttgtgtggctcacgactgccatggtaatatcgtggaggcatttaatccgggtcatgtagggagggttcaacctgaagttgctgagatggttggcatcaaagaagcattaagttggattgatcgttacaattggggacaagtctctatgtcattttcttttggtcttttagggcatgatgttcgtgcattgcttttatctttcgacaatgttgaattgcgttttttcaaacgatctgcaaacaagctggctcactgtttagccagagattcttgtttctctccaggtcgtgtgcttcagttagaggattgttcctctaaagcatgttctatttgtttttaacgatttgattaattaataaagatactgatttgagtcaaaaaaaaaaaaagtttaatagtttaactattttacatttaaatatcaacactattttacatattatagtgttgacatttgaattttgtattttatggagagctggcccaatagtggagcaagttgggtcatcgcctaaggttcccgttcaaaatttgttttaaaaaaatctacattcatttttcaaaaatgccatattttaagtttcaacactatttattgaagcaaatttatatgtatataacatatataatttaaaaatacccaatttgtttttttagaaatgctatgtaggggaatttcaaattataggttttacacttattatttgcaaaaatatgagcaaaataattttggggtaagttgaaaaatnnnnnnnnnnnnnnnnnnnnnnnnnnnnnnnnnnnnnnnnntatatttaattgaaacatacctctttt

SEQ ID NO: 72551 - DNA, 874 bp, Cannabis sativa
aacaaagttacaagttctactaatattagagaaaatacaactaataaacaagggagaatattacagaaagagacatattcaattgcccagtgggactcctacccattaagagcattgataaccaccctcgaatcgctccccacaataacaaaatcagaaccaatgtccctaacaaccgataaagccagacaacaagccaccgcttctccgcataacgcatcagtaaactccaactgagatgtttgaacccaaatcaccgtaccaagatggttcctggtcactactacaatacacatactttctaactccacttttaacatcgtaattcagcttaatccaatcctgatggggaggatgccagtcctccttcaggcacgaagtaggggaagggaaaatagaagcatgtaaatctacaaaagaagtacaaatagagtcaatacacttctttacatcaacagaagaatgattgtgtaccttatcgttgcaaattcgccaaatggtgtcaacaataatcaaagcataaaagaaaacctcatcagcaggaattcctctatgtttaagatcccaaataaatttgatccagtcccacatgcgactaccggtatctcacacatgataaataccccaaggagaagactgccaaaaaagaaaagccacttcgtaggacaaaaaaagatgttcaacaaactccttcaccaaaccacacaaagggcaactcacatcctcaatatgaaaccttaccctgatcacaacccaagttgggagagcgctactgtaacgccctaaataattaggcacgctacccaatatacttatgaaaccctaatcccctaatcggaaattaaactttttaataaacggaatggaaataact

SEQ ID NO: 72552 - DNA, 806 bp, Cannabis sativa
gatattccacttatctaagtgtaattaaacttcattgtcgattatcatgttagtgtaagtctagtgcactatcttaacttaaataatttgaagcatataatgataatcattttccactgttgtgacaatactataattatgaataactatatgtttaagattaaggatttatatattaaacaattaattataaaataaacatatgaaccaagcaatagataatagtcaaaaataatctccgatcttttattaatagataaatatgattacattgaaattgatttttatttagggcataaaatcacaatataaactcttccactccttaatttcttatatttttagaagggagtgtttctttttgtaaatgatagttgttatattattcttcggtgagttcgtgtgtctttgtaattacttttgtgtggagaaatttctcaaagtcaagaatgcgaagaacaacctttgggagaaggttcatttaagctttgcgcatcgtgagaaagcaagcaagcgttgctatcttcgggagaagatttctacaagttttgtattatgaggaagcaagcattcatcaagtagtttgaaattaaggagctcaaatcttggcgtcttaatgagattcattcagcaaataagagtatatcaagcttgcagcaaaattatcaaagagagtttaagttttgtttaagtcaattattttgtacttattgaaatttgactaattatatttggccatggtcctgtgaattagtagcaatttgcaaaaattactaaaactaagtataaaatatcgtgtgttattt

SEQ ID NO: 72553 - DNA, 1072 bp, Cannabis sativa
  modified_base (814)..(841): a, c, t, g, unknown or other
  modified_base (876)..(894): a, c, t, g, unknown or other
tcaccatcttcatcatctgacgcttccttttcagtacttttgaaagcaatagtcttttccttttccttggagatacccggtttctcctttgaacgaattttttgatttaattcaaaggtacgaagggaccctgtcaatttttctactttcatagtattaaaattcttagcgtcttccatagccgtgagctttacattgaacctatcaggaagtactcgtactatctttctcaccacaacagaatcatcaagtttctcaccaagggcaaaatattcattagaaatgcagataacctttcaataattcagatagtgtttcaggctcagtcattcttagatcatcaaacgtagattgtaacatgataaatctagatcttttaatatcttcagttccttcaaactgagtttgaagaatagtccatgcatctttagcagaaatacaagtagaaacaagtttgatgaaactttcaccaacaccgttaaagataacatgaagagctttattattataactagataacttctcttctgtagtagtccataaatgtttagattttacctttgtgctaccatcatcgttgttctttgtgggaggtgaccatccagacaaaattaatttccatgatttttcatcttgaggtttaatggaagctctcatcctcactttccagtatggatagtttgtgtcattgagtagcggaggacgaaatactgaagttccttatgcaaagaaagacatttcacacaagaaaccaattgaatggaaattaaacacaagatctcaataagagtttagtgaactgccctgataccannnnnnnnnnnnnnnnnnnnnnnnnnnnagtgaaattatcaaataatttaaataatgcggaannnnnnnnnnnnnnnnnnnacataatttatctctgttctatcaaacacagaatctaacaaaacagaaatatactgtagaaagtaaagtgcgaaaaattaaaatgacacacaacatttaatacgtggtatcaacaactcattcgaattgctcctagtccacagggccacgcccagagaaagaaatttattagatgaat

SEQ ID NO: 72554 - DNA, 962 bp, Cannabis sativa
aagtatttcatattatcttggacaaaaactcagaacggtgaacaaaatataaatataacagtgaactccatttgtttcaattcatattctttccatgctgtatgaaagaacaagttgctaacaccaagtatttcataatattttctattttcattagtgaagcaaaatgataagtgaacctttttttttttaacaacaggttgagtcgtccaaacagagcaaaaggacaatcacccaaatctcatcaaccacaagcattttacctcttaaaaaaagttaaggtaaccactatatgtgtatatacatataccgtactcaagaaagaaaataagaaaacatagagcatgagcaacttccttatatacataaatattcaaacgtgtatataatctcctctctaaattaggaacctggtctaaaaataacaacagatttataatatatcttacaaaattattagagtattagtaaactacaaaaatgtacacataataaaataaaataaatatatttatatatatatgcttcaaaatacaaatgtaactggagcagagccggtggggacgattgctagagtcgaagatgattgttgaaggcccggaaccgaggacgactaccgattgaaattgttgaacctggaaggccaaaaaaacaaagaacttgagagaaatctaagtgaatagaatttttttaaagaaaaattaatagcaaaaattctagtttgatacatttaagcataataataagatctatgagaggagagatcttagaggttaagagaaaatatatatatacttacagtgagagaaatggacgtgagaaagaaatattgaggagagagagaatcggcaggggttctactttagaaatttaggagttttacataaatttatacaatttaaaatttttgggtttagagagaaatgaagaagatgaactgatgaagaaaacaactatgtata

SEQ ID NO: 72555 - DNA, 1309 bp, Cannabis sativa
cttaagctaacaaattataatcacactaatcaaaaaaaaaaaagaatcaagttaagaatattaatacataaattagatatattaatacctaattgtgtagcctttgagctgacttagtaagtctttgatcttgctcaagtaggccaccattttttcacctcaaattgtgtatttacctaggactattcatgactaattgagagtcactgaatatgtccaggtggttagcccggacttcatgtgccagcttgaggtcgattattaaggcttcgtattcagactcgttgtttgaggctttaaagtcgaatttgattactccgtgcagctacttgccccaagggttataagggcaatgcctgcactggatagttggtcagtgcaacttctatcaacatggagtttccatgttggctcttcaagtttttgctactgctcttgctctcgcttcttctctggctcttgtttttctcttgaatcataagagatttcaggatatgagtttgtgcactcagctacaaagtttgcaagggcttgaccctttatgaccattcttagttgatatgtgatgtcaaaccggccaagctcaatggctcacttgagtagtcagcttgacgcttcaggtttctgtaaaacttgttacaacggttgatcggtggacacctttatagggtgtgcctagaagtatggccttacctttttggaagccaagagcaagctataggccaacttctccatgagtgggtaccaactttcaacgtcaattaatttcttactgatgtagtatataaggcgttgtatatcgtcttcttctctagtgaggataacactcacaacatgttatgtgactattaggtacacgcctatctcttcattatctaggggttttaagaacataggtgattgagccaattatttcttcgactcctggaatgcgattgcacattcctctgtccactcaaattttctattgcctctcacaatgttgaagaagggtacacatttatctatagacttggacacaaatctacttagtgtagttatgcatcctgttaggctttgtacttccttgatggttgtgggtgactttatgtccaaaagggcttagatcttgtctaggtttgcttctattcccttggcattgactatgaagccaaggaatttgcctaacctactttgaaagaacatttgagggggttgagcttcaggttgtagttacgaatgattttgaagcattcatctaggtcctccacatgcccccagcctttttggacttgacaagcatgtcgtccacatacccctccatgttgca

SEQ ID NO: 72556 - DNA, 674 bp, Cannabis sativa
ttaattatttaattaattcaattacgtaaatatctaatttggttagtggttatagatatttcaaggttgttaagatattctttcaagtggttgagagattccctcataaatatcagttactgaattcagttatagatatttatttatttacataattaaataattatttaattaaagagatttaactactataaataggagcctgatttgataaatcagattcaattctttacactgcaaatttcaaaatctatagagagaaaaataaactatttttccctcaattgttcttgctcatgtgttgagagctcaataagaacaagattatacactttatcttaataactcacactatttcttgtgtgtggtggatcaatttgaaaaaaattagcgtgagtccaaattacatattcctcatcaactgggttaagggatacaacttacgagaagtttcgagaatacactaataggattcaagaggtatactctaaactaattgttttgatttaatgtacacacatctagagatcttagaggctatggtataatgataatcaaataatacactattttgctgcgtacctgatttagtaccataaaatcagcaattggtatcaagagcagttccatgaatgtgtatacattaaatactgtgtaaattttaaatatttaca

SEQ ID NO: 72557 - DNA, 600 bp, Cannabis sativa
cttggataacatttacccccaagactttcgggacgggatcacggaagcttactattgtctcttacattgaccgttgatacgtgatgcaggtttagatcgtggacacaccctcagatgcgttgtaatctaccgagggcatttgtgacatttgcttcctcctgtgtggtaaccacgcgacttgttaagatttggctcttcctccttttcttgtgtggcaaggcgtgtttagcaagaaaggtggagtatcactggcgattgagtgacgtggagaaaggaacctttacatttttgtggggcccaggtcaatcacatgagacccctcatctccttagtcgttggattcactgtacccatttcgaattgttgatctctcatagtcctctctcctttttagaataaaaactgtctgtggtgctgtcatttttattctttttactcaaaacttcacattttctctgcaacttctttttccctttttctgccatcatttgcatgcaagaagcattagaggatctgatcaagcgcttactcatcattcgcacggaactcttcccagatgttgctccccttcagctaaaccagcgaagttcttcctcaaga

SEQ ID NO: 72558 - DNA, 1447 bp, Cannabis sativa
aggaggggagggagatccctcaacctcaaatggatagattcttatgttggaatgtaagggggattaatggccagcagaagcatgatgagattaagaaattgatcttctcgaaaggtgctgggtttgtaagcctcatcgaaacaaaggtccaaaataaaaatatgggaactttatatactagtcttttttcttgttggtgctttacaaataataatccttggttggataaaggaagaataatagtagcttggaagcctagtgtttactctgtggatatttgatattgctctagccaaataatacattgctatgttgaatcacagcagcaagtggggaaattctttgtgtcattagtctatgcttttaatgatgtgaagaagagagaggaattatgggatgaattagaggaagtagcacacaaaatcgatgagccatggttaataatgggtgacttcaatgagattttaaaagcaaatgaaagaattgggaaaagagctcagagtctaccatcacagagattccgggatagtatggagaagtgcaagatggcggacctgaaattttcagggtctttttccacatggaacaataagcagacaccagaggaaaggatcttttcaaagattgatcgagcaatggttaacacacagtggttgaatgtctttccctgctctgaagccgtttttttgcttgaaatgaattttgatcatagtcctatcttggtaactatttacgaagataaaagctatgggaaaaaaccatttaggtactacaatatgtggaagatggctcctgagtatgacaagctggtggcaaagtcttgtgaagaagagagtagaggctcgaaaatgtttcgaattgtccataagctgagaagatttaaaacagttttgaagcagatcaacagaactgatttctaaaattcaaaaggcagaaactgcagcaagaacacagctagcagagatacaaggagatctgaaccagaatccagggaatgaagacttgatgatgcaagaacagatggtaagggagaaatatgcagaaatcagcaaggcctatgctagtttcatgactcaaaaagctaaaataaattgggctaagtttggagatgacaactcccaccttttccatgcttctctaaaattgaggagaatccaaaataagattttctcaactgaggatgagtatgggaactggtgtgactctccagacgaagttcaatcttcttttcttgagtattatcagaggctattaggctcaaaaataccagttagaaggaaggtatttcaatccattgtggatcttggcccgaaaataaatgattgtcatagggagatcttattagcagagtacacggctaaggaagtggaatccgctatgttctctattgacaaggataaagcacctggacctgatggatatagaagtgcctttttccaagataatt

SEQ ID NO: 72559 - DNA, 735 bp, Cannabis sativa
ttaattcgcaaagtacggatatttgcatttgtggggattagactggattagaaaatttaaaatttacacttgtgcggattaaatgttgtttgacatataaaagtaaccgattcaatccaattcacgcatatttatatatattttttaaaaaaattacatatacaattaatattttaatataaaaaatataataatttaaaaatctaatatatatcatacaaatatatgttaattaaatttatattttatttttatatgtaaggagaatataagttaaaataaaattatgcatatttttttacatataattttttttcttcttcttttaaaattgttatttgttatattattttattattagttatgtgaataaagatattttttttaataaatattaaataattcaatattaaaaagtaatcaatccaaaataatcgatccaatctgcacttttgtagttaactatagtaaagtatgcttctgaactatatatctctcttatattaaatgtggttaactaacgaaaattgttagtttaacgttttttattttatttttccgttagaattcaaggttaaaattaacattgttaaatcaatcaattaaataattattttttaaaataatatgtagtttcaaatatctaaattttttaatttaaaaataccaagaaaatttgataatttcatataccattttttaattttttttcaaatttaaagtttgggttgctct

SEQ ID NO: 72560 - DNA, 633 bp, Cannabis sativa
  modified_base (582)..(600): a, c, t, g, unknown or other
taagatggcgtttggttggaggtaatggaatggaatggaatggaacaattttcatttcattcttttgtttggttgcatttaaaaccattggaatatcattccgagggaatcgtctttccatcattttggtagaacgactgtttcattttaaaatagaaaaaaaaaaaccattccaattaatgtaagatttgaaaaaatttcataattttttttattatttttttatgcattttaaattttattttattccattcctattctaattctcattcttgttcatattcctatatttttatttctcccaattaaacgtcacctaagagtatttctaggaatgcttatatgagaggaagagagagtcgccaggtcttaagtgattaaggaccacgtatttcaggttatgaacttaaggtgatgatttagccgtcagagaatgtataaggctgaggcaatcccagccctttctctaaatctaaaaattatgtgtatatacacgtagggtttgtaattgagaaatgctaaaagccaccagtggttccttgcacccttctatgcgttaatatcgctattggtccaactaannnnnnnnnnnnnnnnnnnttaatataatagcttttaaggagtatcgctaac

SEQ ID NO: 72561 - DNA, 675 bp, Cannabis sativa
agtttttgcttaggatccatgggtattttgctgggttttctgcctatgaaacctgaatccttaagtaattggagagtatatttgcgttggcaaagaaacaagccttccttagcatgggaaatttcaaaactgaggaaatacttgaggtctccaagagctttgagtttgaattttttatgtagggatgtttgcagctggtgtagattagacacatttggacccgtaatgatgatatcatctatgtacactagaagggctatgaaagtgtcttcagatcctctagtgaataaggtataatcgacttgagattgcttgaatccttcttggagaagagcatcagatagcttcttgtaccactgcctggaagattgcttcaggccataaatcgatttgtgcaatttgcataccagttttgttcctgcattaagagaagaaggcacggttagaccttgtggtatttccatgtaaacttcctcgttaagatctccattaagaaaagcgttattaacattgagttgtaaaatgtgccaattcttaatggttgatattgcaagaagtaatttaagagtgaccatctttgcaacgagagagaaggtatcaaagaaatctagcccttcttgttgcgtgtaaccttgcgcaacaagacgagcatttagtctttctatgctcccatca

SEQ ID NO: 72562 - DNA, 927 bp, Cannabis sativa
gagagtttagcctccatttcatgaggttgcaaggtaccaggcattggcttagatagagcagccttaacatgtccccaagagtcccttataattgctccaaaccccattgtattgttggctgaatcaacagccgcatcaacattcattttcaactttgtttgaggaggagctttccatggctgatggctcgcaacatgtgaaggttgctggacaggtttatgaacacgggaagcctgctgaaaattgcagaaatgtgccgaagctttagcagcaattgcctctggtttttgtggatccttacaatgtataatgttgtttctatcaaaccaaatgtaccacaaagtgcataatatcttttctaagtcagatttggaataagtttgtgatagcaacattatataatctccctctgtcattcggctagcagcttggtaatcaaattggaattcagttgaacgccaaactgccttggcatgtttgcagctaaacaaagcatgccccaccgattcccaagcgtttgaacataaactacaagcagctgatgtgatgatttttcgctgaaacaaagctgcagctacaggtagtgaatgttgaataaccctccacccaaagattttaatttttgatgggatattcagaccccaaaaagacttccaccaagagcagtttttaattgaagtggaggattgttgttgtgtctcaagtgaacaagcaaaatggtaacccgattgtacagtatacacaccagaaatatgatgattccacatccaagaatcacctgtagctgaagcagcaagtggaatcgatagaatcctggcaacatctactacagagaaatctctctgtaatgaagccaaatcccaagtaaaatcagcagaaatataagtggagacacgattatgtgttgaaccagtataacatactggt

SEQ ID NO: 72563 - DNA, 2376 bp, Cannabis sativa
ttgttgatcagaggtaaaactccaaaggaggaaagtaagggtcagaacaattctagtaaaggcaaccataattcaaagttcaagaagagatgctttgtttgtaacaaaactactcatctaaggaatgattgccctgtcctaaagaactacaactccaagaaagatggtgatgctgatgtagtttcggatggagaaggtactaatggatatgatagtgctagtgtcttgacaatttccaagaatggttcagatggtgcctggataatcgattcaggctgttctttctatatttgtccagatagaaaccagttttctagctatgccacagtcaaaactggtttcgtaaaacttggagataatcgatcttgtccagtcttgggaattggcactgtcatgttaaatctagaagggggaaatgttactgaattaaagcaagttcgacatgttccagacatcaaaaggaatttgatttcagttgctatgatggatcaagatggttgctcagtcaaggttgaaaatgggacattaaaggtaatcaaaggatctatgacagtcatgactggaataagtaggaatggtatctacatattgaatggatcttcagcaaagaaccatgtcaatgccaccacctctaataacaatcgaccaaccatggtttggcacagaaggcttggtcatatcagccttggtggattgaaatatctgagtaagaaaggggtatttgggaaggatcagatcactcacatggatttgtgtgaacaatgtgtgcttggaaaatcaacaaaggtcaagtttgggacaggaaagcatgtttcaagcaacaaactggactatcttcattcagatctgtggggaccttcaaggactatttcaagaggtggagcaaggtattttctaactattatagatgactataccagatatgtgtggattagtgttctgaaaaataaaaatgatgcctttagcaagttcaaggaacttagagtcatgcttgagactcaagctggtagaaaaattaagaagcttagaactgataatggtctggagttttgtgcagatttgtttaatgattattgcaggaagtttggcattggaaggcacttaacagttccaagaaatcctcagcaaaatggccttgctgagagaatgaatagatctattcttgaaagggttaggtgcatgctgatatactctggtttgcctaagaatttttgggctgaggctgctgtcacacacagcatgctacttaatcaatagttgtccttccttcattcatctgcaatcaatttcaaaactccaactgaaatgtggtgtggccatgttaccagttatgaacacttgaagatttttggctgtgtggcctatgcacacatcaaacaagggaaactcgatcctagagctagaaaatgtatttttctaggatatcctaaagaaggatataagatgtggagcatagaggaaggcaatcatcaaagaaatttcatcagtagggatgttgtgtttgatgaaaacaccatgtacaaggatctagcaaagagttcacacactgcaaatgagaatttcaaggagaaagttcaaattaaggtggagcaaactgggaaaattcagataacagatgatactgttgaacaggaagttgaacaagaacttgaagagcaaattgatgaagaacttggaaatgatgatgggcatcagaattatcagttgactcgagatagagagagaagaaatatcagaccaccaagcaggtttgggtatgctgatctgattttctatgctcttaatatctctgaacttgatggtgaggaacctggctcctatgaagaagctatggtgtccatttacaagctggaatggaattcagcaatgcagcaagaaatggtatcattaaggaagaatggcacttgggaagttgttaagaaaccagtagggtgtaaggtgataagttgtaaatgggtatacaagtacaaagaaggcatacctggaatcgaggaagcaagattcaaggcaagacttgtagctaggggtttcacacagagggagggaattgattacaatgaagttttttcccctgttgtgaaacacacctcaatcaggcttctcttaagtattgttgctacagagaatcttgagttggaacaacttgatgtaaaaacagcttttcttcatggagatttagaagaagaaatctacatgagacagccaaaaggttttgaagaagagggaaaggaagatcatgtttgtttattgaaaagatcattatatggcctaaaacagtcccctaggcaatggtacaaaagattcgatgaatatgtgctaagaattggtttcaagagaagtgcctatgatacctgtgtgtatgttagacactcaagc

SEQ ID NO: 72564 - DNA, 1224 bp, Cannabis sativa
  modified_base (1030)..(1031): a, c, t, g, unknown or other
tatactaacattgcatatataattattttcagaaaaacattgcatgcatatataattgttagcaaagaaaaaaaaacattacatgtatataattattggtaaattgacttttcccaagcatacgactattttataatgtttgagtatcttttatcaattctatctctactctcatcgtttcttttatccatttttttcttttggcatttaaaaaagagagattcgaacttcaaatctctttctatgtattatctaaacttttatttagattaggcaatcttttttttctctttgataaaagagtgagtgattttacaatagaccttcttttaatgtactgatgcaccttttacttattttagcatttcgaataattttttagtctaattttttctcatagtcatatacgttatagttatttaagatatcctataattcaaaataatttacaatataaaaaataatattcaaacaatctattttacacgcatataaaataaaatcggactcaatacacaaacaaaatcaaacttgtatataatgtaccattcatgaaaactcaaatcagttagtttgagagaaatttaccttagtgttattaattagcgaagaagaagcaaaggatggctgacacttgcagtgtggaagaccgtcacaatggtggtcgacaaaggcaggtgaatcttcagttttctagggttagggtttgttgggcttggcccatggctaaagtggaagagagaaaattggtggatttgccaaatgagaaagaatgaattataattccaccaaataaaaaatgaaaaagcaattcagttagtttgatggaataagcattacaatggaattttttcccaaaattattatttccaaccaaacaaaagaattaggcccattagtattccattctattcatttttggcccattaccatcaactaaacgagcccttagtttaatgaaatatattctagatagttatttttagtaactaattatattttctaaatatttaattaattagaaaaatanntttaagttaaaaattaattattttaattaattttagatctacttaaattaaaatatttttcttaaatattaaattagaattaataattaagttgattctactctagaaacttttaattatttgtttcttatatttaatatatatttaattaaatagaaaattaaatatttaagttgattttattctagacact

SEQ ID NO: 72565 - DNA, 2321 bp, Cannabis sativa
tggtggaaagggaaaagccaaaaccttctactgaagaggttcccactgttaagctagcccaactacctgagggtttaaaacatgttttcttgggagatggtgatacctttcctgttatcatctcgtccaaacttgatccttcacaggaaatgcaattagtcaagctactaaagaagcataaacctgcaataggttggacgtttgctgatattaaaggtattagccctttaatttgctcccatagaatcaagttggaggagggagcaatccctcgaagagatcctcaaagaagactgaaccccaccatgaaagaagttgtgaaaactgaagtgttgaaacttttggatgctaacatcgcttatccagtggctgatagcaaatgggtcagtccaattcaggtagtacctaagaaatcgggtgtaactgttattgaaaatgataaaggggcccttgttcccacaaggactgtgacaggttggcgcatgtgcattgattatcgaaagttgaatgctgccacccgtaaggatcatttcccacttccatttatcgaccaaatccttgaacgtgtggctgggcatcctttttattgctttcttgatggctattcaggctattatcaaatcgagattgcattggaggatcaagataagaccacttttacatgtcctttcggtacttatgcttttcggcgtatgccatttggactgtgtaatgcaccagccaccttccaaaggtgcatgatgagcattttcagtgacatggttgaaaaatgtatggaagtatttatggatgatctaacagtctttggaagttcttttgaaacatgccttcttaatttagaagctgttttaacacgatgtattgagaaaggtcttgtactcaattgggagaaatgccatttcatggtatcttcaggcatagtcttgggacacattgtctccgaaagagggattgaggtagatcagtctaagattgatctcatttctaatttgcccactccaaagactgtcaaagatgttagatcttttcttgggcatgctggtttttataggaggttcatccaaaacttttcaatgatttctcgtccactgtgcaacctcctcgccaaagatgctaattttgagtggacacaaaagtgtgaggatgcattccgaacacttgttgcaaaattaacgtccgctcccatcatacagtcacctgattggaatttgccttttgaaatcatgtgtgatgcaagtaattttgctgttggagctgttttgggacaacgaagggaggggaaaccttttgttgtctattatgcaagtcgaactcttaatagtgctcaaatgaactattccactactgaaaaagagttgcttgctgttgtctttgctcttgacaaatttcgagcttacttgattggttcacctattacgatcttcacagatcattctgcccttaagtacctcctttccaaaaaggatactaaggcgcgcttaatacggtggatccttctattgcaagaatttgacatcacaatcaaagacaagaaaggtgttgagaatgtcgtcgcagatcacttgtctcgacttgaatttagtgattctgctgatgatccacctattcgtgatgatttccccgatgaacaactgcttgctgttactaagttaccgtggtatgcacacatagttaactacttagtaacaggtgaacttccttctgagtggagttcacaagatagacgcaagtttctggtcgaggtgcgcaatttctattgggatgatccatacttgttcaagtattgccccgatcagatcatgcgaagatgcatccctgatgatgaggtgtctagtgttttgaacttttgtcacaatgatgcttgtggtggtcacttctctgtgaagaaaactactgcaaaaatcttacagtgtggcctttattggcccactttgttcaaagacaccaacgaattttgtcgttcatgtgtgaggtgccaaaagttaggctcactatctcgtcgtcacatgatgcccttgaaccctattcttgtgattgagatatttgactgttgggggatagatttcatgggaccatttccatcatcttctggttacctttacattctccttgctgtggattatgtttctaaatgggttgaggctgtaccttgtcgaaccaatgataatgcaacagttaccaagttcttgaaggaaaacattttgtcaaggttcggtacgcctcgtgctatcattagtgatcaaggcacacacttttgcaacaagtcttttgaggctctcatgcggaagtacggtgtgctccataaggttgctaattcttac

SEQ ID NO: 72566 - DNA, 775 bp, Cannabis sativa
agtattgtacccaaattatcttcatacaatcacataattaagatataatttcaaacataatagatttgtgttttttgtaaatggatgtgtaagtttgtgaaaaagttgaggtaaaattttaattagtgaagaataaaaactatcgtgaagtggtagaggtaaaattagtaaaataattgaaaaaataaggaaacataatatattttgaaagagagtatatattataaaagcatcaagttaaaaaaaagtatgtagtgtaatttcctttttgatagacctcatatcatatttttggggtagggcttgggtatgggcttgacgtaactaactatgcatgtttgggtttgcaggctcttgcttttgaactaggcccagaagtgcgagtaaattgtgttgcttctggagttgtgccgactcgctttagcgagataattacaacaagtgaaactttggtaagtagaaacaagtagtaagtgttttgtattagtagaaagatatgctgttattggaatgaaaattagattttgtaagattgcttctcaaaataaatttaacatcatttttttaaataactataacataaacttgttcaaaagaaaaaaaaaactatcattttgtagctgaagtattttaccacattataatgttctcaatgatcttattaggtttttctggagttttatttactgaatagttgatatttttctaataattgaattagttttgccaacatactctaaagtctaataatctaaaccacattattgacactact

SEQ ID NO: 72567 - DNA, 1441 bp, Cannabis sativa
gccactgtaaatgtacgctggtaaaactttgacctctttgccagcgcagtttgcaaaatgcgctggtaaaagttacttttaccagcacaatcgtgaactgtacaagtaaaagtgacatttcttctagtgcgctctctttaagacgttcgcggcactgtcaagagtgtgcaagcattcggaattttccagtcgtccccagggtaaaacagcccagtcgtattgtattggaatcccaatgcactgtagagcaccatcgaatacacccaaggatttttgatatcgcaaatggaatctaatttttgtgaaaactctgttttttttcgatatgaaaaagatttatacttcccattagttcaatcacattctatagatgaatggattaaaaaatcataatgggaagaacaacgttttctaaattgtggggtgcagttgattgaacgtgtcccattaactgatacgactaagtaatcagtttcaattaaacacgtttatcttaaataaaaaaaataaaaaataattattttattaaataatttttctgtaaaaaaaataaagtgtcacaccacaccaaccaacccaacacggattgaatgaacggacggacggtacgtgcgtgtgtggtaggtagtgtgtaagtcctcacccatttgcacaaaactgggtacccgttggggctcaaacctaaatgccaaagttgcactctatatacccttgtaaataagggttcatatcccatgtgggactctttccacttcacacacactagaacacatctatattttgttaaaatattcatcaaagtttcaacaatcccccacttgaatttttttaaaaaatatttccatctactagtatcattcaacagtaagattgagcataaacaaaggtctctttcgatttaatcctctgcgtagtgaatacgatttagattttactagagtgacctgtagtcttgaactctatctctaacattgtaccacgtctatcccagtatagtgaatgctctagaaattatgcccgaaatttcataggaagcggccccactcccacattcacataagtgagtctatcatgagtactctcgtagctcggtactccactccacttggagtatagatctcattaagagcttctattaactcagccttaaatcgcttcaggaactatgcttcacttatcgtataattatagcatgatctcgcttttatcacctcataacttgttattacccattgaacctatttcctgggatctctggtctataggtcgggttgccactatgagtgattcatcaatctaagggcaacaatcccattccttttgatgttttaatgactttctctctggctaaacctttcgtcaaaggatcagccaagttatcatcagtgcgtacacgacccactctaatagctcttgttgagagaaactctctaacagtgtt

SEQ ID NO: 72568 - DNA, 1172 bp, Cannabis sativa
aaaattaaatgtagtcatatatggacaattttaatagatatagatttaggaaaataattttagagtgttttatggatagtttttcaaattttccttcatattttggttaaatattcacagttatgtatatgaggtatttattaataattttaagagtttggtttataggcacatatatattatatagttttgaaatatataattaaatatggactattattattatatatgagttgcattggaaatatataatcatatataatatatgtgtatatgtattaggttcatgataaaaattcaagtccaaattaaatatatatatatatatatttgtattattttaagttcaaatttggcattctaaaatattaaaatttgtctttcattctaaatgagttgattgaaacatgatgtcgccaaagcaacctctcttgtgtagattggttatgaggaatgttagatgtttgtgtgtgtgtttctcatgtaagcattgatcggcccaaagaaaggttatacttattttgagtgcacatatacttgtagtgataaatgtgtgacaattataaaatttctatgtaaacaatatgtacagtccaaagattgacaaattatttgacaggatttattatcaatatttaattgctacaacaagagtaccgcttacagttaatattattgtccaaaacttgatattaatggtgtgtttggtatcttgagaagggatttgccattatttgaatttattttgttatgtggattcttttgtgaacctttgtttattttgttctctttttagctcatgttttagttatatctaccaacataaagttaattctcatgctaaatgagataaatttttaactaaagaaaagagacaaacatgcttctttagctatcttgtttaaataaaggataaggataaatataaaattcaatatgttgcatatggaacactgttaaagaaagtacaaaagatattagatataaattatctatgatttttagaaaaggaattaaaataaggttaaagtgttccaagtatgtaagtaggcatatctaatgaaaataagtttcccactatggtttgttttgtaaatgatttaatttattgtacctaactatacttaataagtaaatttttatgaaatttcttatgtaagtataactatgga

SEQ ID NO: 72569 - DNA, 929 bp, Cannabis sativa
  modified_base (632)..(651): a, c, t, g, unknown or other
ttgagttgagtgcattagcatgttgttaatttaacatctagtgtgtacaaaaggttgggtcaaacccaaaactcggaacagacaagaaagtatacttgtaaaaataaataaaaagtgaccaagagtcataagtctgctcggtcacgtgggggcacctatacttgtacaaagcatttggtaaaaaaaacaaatacaattgcacgatgattataaacagagatgaaaatcattaaggatagcaaaagcattcaaacccaggattaaaggctgcctggtcaactagctgttcaaaaaatgaaaaatatattccaagttgaaagattgcttggtcggtactttgtcttaaaaaaggccttatggccgaacagataaaaaaaagatagaaaaagggagcattcaaacaactagagtcctatgctctttgtacaggtcaactgggttagctggagctagaggatcatttgtctgagcaggaggaacttcaacactttgataaatgggagaggtggaaatggtcgccttggattccacgtaggccgcctaagcagcatagtagtcgagaaacatgtctttggaattgcccaaataatcaaaattttccttggggttggccttccaaaagtcataaaaannnnnnnnnnnnnnnnnnnntaaggcattcaccttccctccgagccttgccacttcggacttctgttgctcagcctctgacttatgcttctcaacttcggccccaagctcctcctccctagctttcttctcttcctccagcctggaaaaaaggtgtggagaccctcgatttcctcttgaaggctggtcacttccttagataaagaggcaatatcggcttcaagctactcagtagatggcgtgtcctgcagctccttcgtcagttcgaccacttaattctcagcagcaaggagtttctt

SEQ ID NO: 72570 - DNA, 658 bp, Cannabis sativa
taaccattcttgggatgttgaggtaatcaatgacttgtttgatgagcgagataaaaatctaattctctctattcagcttagtgatcacagtccgaatgatagatggtcttggaacttggagtcctccggcttgttttcagtaaagagtgcctatcgattcttgcagtctacacaagggaattggactgatatggttgttacttcgagctggaaaaaactttggaaattggaagttccacccaaagttcttcattttttatggcgagcaattactgggtgcttgccgactaaagtgcaactgaccacaaagcatgtaaatgtggatctcttttgtccgttctgcaataactgttatgagaccatttcacatgtgctcttggagtgttctttctcttcttcttgctggaacctttcgagcttgagtgctattcaaggttttaacatcgactatggcagctggtttttcaccatccttgatactaaaccaactgagactttggttgaagctgcaatgttgagttggaacatttggaatgctcgaaacgacgtcttctggaagagtaaaaatcgaagtgcagctgctgtagttatctcggcccgatccattctgcaccagtggagtgcagcgcgtgttgagaagtttgggccgctgctggtg

SEQ ID NO: 72571 - DNA, 919 bp, Cannabis sativa
ctctctctccaattccttgcaaaataaacagcaattggtgtttcttcagcttgtttctgtggattttagttggttcttggtgaatccactgaaggtaacccctctagcactatttccctttgttttcttaagtgttaagttaaggtttttgcttgattttgtgagttagggttctgtagcttttagggttgtttgaatttgcattctgatgttaaattaaggttatttatgctggattgagttggttttaaggctttttgtgttggttgagcaaggtttgaggttatgaactcaagttttgctctctaatggtaatttattattctggatatatatgttgaggtgttttattgtttggtttatattctttatggtgtaaatagcaggtctggatgtttgtatgaagtttaaggtcgaattgagtggtttgggaagtttttggtgtttcttgcattgatccggtcgatcggtttaaggggacctgtaagaaccgatcgatcggttggtccccaagaaaccccacagagctagaatttcgattggagaaccggtctactggttggggcattttagggaatcctaatttttcctatttttacgatatttagagtatttccatgttatccattgataggaaaattttagtttcaagtttaagtcctcgaaaagtgattagtgtgtcactcaccagttttgcgaataatgtgaattaagggcatgtagatcatcgaggagctgttccactcaagttggccggcacacctgaacctaaaaatgaggtaagaatagtataatgatatgcatatgtgttcctagtcttgtcggtcaaaatcaaggagcatttgttaagggaagatctattgctcataacaacatgattcttcaagatatcttgaagaattacaataggaagaatgtg

SEQ ID NO: 72572 - DNA, 789 bp, Cannabis sativa
tccaactgtccaaggaattgtgcgaagaggtcttaaagttgaagcattgattcagttcattcttgagcaggtaagccatattcctatataatgatattattattgagccttatatatattatgttgttggatttctcatatttgactagtgtagtattattatatgtggattaaggtgactcgagttagaatcatttactgaatctgaatgttgatatatttacagggagcttcaaaaaatcttaatctcatggagtgggacaagctttggtccataaataagaagataattgatcccgtgtgtcctaggcatacagctattattgaagagaggcgtgtgttgttgaccctgactaatggacccgaggaaccatttgtccgaattattcctaggcataagaaatacgaaggtgctggagacaaggctacaacatttacgaagagtatatggttagattatgccgatgctgagttaattgcagcagatgaggaagttacgttaatggattgggggaatgccattattaagggaattgaaaaggaccaagaaggaaaggtaacacagttaacgggagttttgcatctcgaaggatctgtgaagactaccaagttgaagcttacatggttacctgaaacagatgagctggttaaactctcattgatggagtttgattatttaattacaaagaagaaggtatgtatgtgttaatcaatttcaaatatacttacttggtgcatatttggactttgatgattaagtgattgggtacttttgacttatcattgcag

SEQ ID NO: 72573 - DNA, 1632 bp, Cannabis sativa
aatcatctctttcggagtatcaaaaagtcattcacaaaatttttctgtgtggccgagtaccccgcaaatgaaacaaaaagtgggaagatcctcatacttgaaagtgacatgacaaaccagtcccccttgcatttccaatttcttctttttcttcaacggcttctccaatggaatcttcactcgaattctcaaataatcccgccaaactccggagaaattgtttggatccgatttgatgaacgttccaatgtaatttccaacccccctaatgaccttttcagacataaagccaatagatagattgtgcagttgaacccaaagctcaattttattcaatggtattgttctgggattaactccatgtgataccatttccataatcaaaagcgccctatcgaacgtccaaggacttccctcaatgactctctctatatccacctcatggtaaaactggaaaagaaagaggtttggatcgagttctttcacatacagaccacaacctggctgccatagagtcgcaatcttgttttgcattgcttgaaaatcaatagatctattagttagaaaccgccccaccaaaagccatctatcatcgatttctgcaagcccatcctcccctgcctcaaacaacaatccctcctcatcctcatcatcaatcgtaaacccagcatagtcctctgataaattctgaaaccttgtctgactgttgttcattgtacacaaaagaaacgacaaaaactcacagaattgaaacgaaacaaaacaacacttttctcactgaataaccatgtcaatacgacaagacaacattattatacatacgagtataagagtatcggaaaagagtaaatggaatattaaatgtatgaataaaaatatatcatattttctataagaactaatatatgacacaatattaatttaaaataaaataattccaattgactaaatcataaaaatatcttaaatatatctatttatatttatttccagaaaaagatatctacatatatttatttatgccttaaaatgctctaaacaactttatttttattctaaaataaaatttaactttaataatttattaatgttcaataatatctattaaatttgtacaaaagtatatccataagtaaattatattataatattctttttttttaaaaaaaatatatcttattataatattcattttacaaaaaatcttattttaatattttaatttattttcaaaacaatgggaaaaaaacggtagaacaatacttatattttttcataacatatatatttaataatttttttttaataatataacatatatcaataacaattgatgtatacatataataattttttttctcacatattgtagtagagaatatatgttattaagggtaaatagcagcatactcaaattaagttttaagtttataaagataaataataattaatgtatacatataatatttgttctttcatataaggcacacatttttagatcattgagtctagacagaaacatttccaaattttgtcttaataaattcaaaatggagtctaacgaaaattaagaaaagttataattttatgcattaaatacttatgatactaaaaataaatgttagatttgta

SEQ ID NO: 72574 - DNA, 915 bp, Cannabis sativa
tgcagactactgacatcacaatcgcccgccaatagatttgtagcctctctctctagacgcccttttagggccctgtttacctctttctccctctacatttcaaaagggtcaaaagggactaccctcttggggaaggtgaaccccacggtaggcgttctgaatggggccggggggagaactctgggttggcccagcttcagttgggcgtaaatgggttaggggtgatccctgatctccccatgccaaagtctgacaccacaccacctcggaggggctgaactttttaggagcaaacatgatgtacctatccacatattggcacaacaaaaagaaaaaggtcatggcttgaccccaaaaatcctagaaacaacactgttggtcccaaaagctggtgcaccattcaaggtacccttcaactcttaaacaagtaaacagagaacttaccgacagaaagaggggtgtcagaatcgaaggttttggtgctacgttgatggaagtaaaatgcaactgagaggaagggaactcgagaagctatgacttgacaggcagaagagtgaaaaatggattgactactgtaagtatttatgggactactggaaggggcatcttttacatgaagcagatgctccagttcaccccaagagatgtccagtgattggatgtgagaagctgaaaggatacctcacttcccaacggatggctcccatcattacatgcatcgtaaaaaatgctcaaggaaaaaactgcccaagcacaatcgccgccatttcgagttccctagagatacgcgcccaacacatgcgaagaagtccagaagtcagtatttaaaactttgacaagaaaataggagaaatcatgtctcctacataatgatgctttggtttggcggccgctgatgtacaacattaaaaggct

SEQ ID NO: 72575 - DNA, 1108 bp, Cannabis sativa
tattagttaatattagtcaataaataaactgttgtaaaaaccgttagtcagttagtttctgtttcagttagtactaactaacttgtgctttagttgttgtaatctcagcctataaataaatcagctactcatcttaatgagttaagcttttcttgctattgctatgtttcctgttcttaattgagttttactcttctggtttataccttctctggtttttacctcttctcagcttgaatagcttctacaccctcaaactcagaattggatgatcaccaattttgagtttgtccctgaaatcagagaacctttgactcgaaattgctttggtgaagccatatgcaatttgatcaaaaaaaaaaacatgatacattggttacaaaacttttcctaccatgtcatctttcattctttctttcttttctttttcctttttacatttttttatacacaagcatgacatttacaataaaagagaaattttaaggaggtaaatattgctgaagacagtgtttaacttttgaaaagttacaggctttgaaaatgcatttgctgtcatctgcatcttcatcttttgagttagttggtttgatttcagttgggaaaaaacatatgcatgaatataagggatatattgtttctctcacaatatatataattaatagagaactcttgaactgaaggaaagggctgttgatttgggagagttggagttggagttgtatccaatccattgttgcccctcttagttgatagctctgtgatacttttcaatatgcatgaagatcttattttatttatattccgaactttagtttgagttttagtaaatccattactcatgtgtttaaatgtatgaaaaatgttctgtttatcagctattctatttggagcatcaattccaattttgtaccaggtaagcagactccacttttttcttgttcttcatttgtcttacaataactttggttgtagatgtaaattcttattctgctagagttctgttctctcatgtcctttgattgacacatctgtgaattacattagctacccagcctgccatgatctcttgaggctagctggaagtggttggtgagtgggttaaagg

SEQ ID NO: 72576 - DNA, 1039 bp, Cannabis sativa
tgtagcgtgccttagcattaggacattacattggtagtggttgctcaacacccattttaacttcaagggtgttggccattatcaatcttgctcttgaagtagagggttctggaggatctttctcgggacctaagtcctttgattgatcactctcactaatcaaggcattttttaaaaaaaaaattgcattctttgattccacaattcttgtgctatgagatggacaataaaacttgtaacctttagactttttagcataccctataaagaatctgcttatggtcctttagtccaatttcttctcttgtggattatattgtccaacttcagatggacatccccaaatgtgtacatgatttaaacttgttttccaacctttccataattcaaaatgagtttttgagagtgcctttgttgtaactcaatttaatatgtacattgatgtccttagagctttagtccacaatgatttagaaagattagagttgttgttaagcatactccggacatgtctattaatattcggtttcttctttctgcaacaccatttttcttggctgtactaggcatggtgtaataggcaacaatcccattttcttcaagaaacttcgcaaatggaccgagtgcttgtccatcttttgtgtcaaccataattctctccacctctatctgatctcactatcttgatttacttgttgtattgtttttccacttctgctacctaatggttcacttttgttatgaactaaatagagaaacatgtagtgtgagtaatcatctatgaaagagatgaaatatttttgatcatgtgaatctatatttggactacatatatcggtctgtatgattattaatatttcagaaatcctatgattattaatttgagagaaaattaaaaaattatgcaaatgaagaaaatgaaaaagaactcaaatatactgtcaatttatcatgtttatactctcatatatatattgattgatattgatatagattgatagattatatatataggtgttttattaaataataaaaagtt

SEQ ID NO: 72577 - DNA, 547 bp, Cannabis sativa
cgaggagctaactattgcgaacccttttactccaaaagttgctaagtccaaagattctcgaggaagaagctcagacaggcctgagcaatcaaagggtggatccgagttggccaagaacggatctgagcatatgcgggctcctactccacctttgccagtgcatccagaggccaagaaaggcaaggagatgtcgcccatttcatgaaccggttggttcctgaggtaagtgagcagctggccgacgatgataatgaatcttctctggagctgctgattggaggagtcttgagggaattcacaagggtaagtttttcttgatagtttcctttaatcctttttaattggctctaattttaaatttttttctctgtgtaggctagtctaaagttggcttacacttattcctggaccaagtctgccgcctccaagaacgctgctatgtccaacactattagggcagaggtggacttggccaggaaggacgctgatgacaccaaggtggaactcagagctgttcggattaagctgggtgaggtcaacaagaagc

SEQ ID NO: 72578 - DNA, 1207 bp, Cannabis sativa
tatttagggcgttacaagaagtgtaagatttttccatatgattgagattctatatatcctaataagaatatagattgaattttaatcttctatcacatgaaatgaaaagagtaattagattgtatttcgccatagaaagttgatgcaattgaagttaaagttcctatatttctaaattattcttattttcttctcttatttattcatttatttctattatttttgttactatcaacatcacacaatttgtttgccaaatataaacaaagattcaattatttagtacttagctacagtccttgtgggatcgatctcattcttgtgggttattacatgtaagtgatatgtatacttacgtgttagaattttcacaacacattgtaactaagtgataccacctatccacaaaaccaggttatcttcctggaattggaacgtactgcaagttacccaaccttcgtacctttcataaactaaaaaatctattagtgtttaaacacaattttgcatacataacatttgaattttccttgaaatgcgagattttttccttagaatcttttacatctgcttttgatcacactacacatgatactaatccctatggggtatattgtttgaactgatatatcactctaacttatccctttgttcccaattcgacaaagcctatggtgggtctaaatctccactcatattgcttaaactacaacctatgctatggcaacaactagaggggaaaatctaactgttttgaccatcatcaaccctaattattataccatgattcctatcggatcaccttaatttgcgataaaaaatcaggtaaattaggtgatggtcctaatcgtattcttataccacataacatggaaacttaaacatgcttttattctgctcacacagctaacatgcttcctatcatgcttatctaattttaaactactaaagcatgtaaatacttaatggaccatgagtcgagcttgtctctgatgatgattgtacatatcttgacgatcattaacaagcaacctagaggttccaataccaaattgtaatgtcgtactagcttaggcacgttactatattttcttaattagtgtgctaagctttgttattcaaagggtacaatataaaatcctgtttaataaaaacttaatgataacaaaatactttcataaatatacatcgtaaatacaaactattt

SEQ ID NO: 72579 - DNA, 1159 bp, Cannabis sativa
aattaaaacactcatttttcttttaaaaaaattaaaaattaattaaaaaactcttttgacattttattacacttatgctattttaactaatcacttcacaattttttagttaccaaaactaaattagtaataaataattatatatttatttttaaaatttcacatttcattttcttaagtcacataacagatttaaatttttttataattattttttaaacaattttttttatttatattacattaatagaaattataattttttttttcatttttaaaatggtacatttttaattcaattgcaacatacaataattagaagaataaatttttaattgtcttaaataaatcacactaaataaatattttaatcattattattaaatattaaatgtttaattatactacttcattactataataaaatttaattataatttagatactcatatttctaaatgtaatgtttaaagggcaattagttttgatttattttttaaagtattagatcattcatttttaacatttggcttggtaggcaaattcatcaaagattatttacaaaaaaaactgtattttgggtaaaagtttataattttactgtcatgtagaattttttacaaaaataatgtctttttataaaacaataaaacaaaataattaaaacaacagtagaacaactaaaaaacaatcaacaatagtgaaaacttaacaagtacactgtatttttgaagaacgaaaaaacgtcccacagtaaaaaagtaaaaaagttgaaaatttcagtatgttgtgtaaaaacccctatattgtagtatttatatatatatttatgtagatagaattattataattgtataaatatagtatattagtcatgtttgatttgtgtattctattattttttttttttttagaaatttatagtaatctatgtattatacagtggtggatttttaaaactgtaaaaaaatatgtctcatttaaaaataaatataaagttatttataaatggaaatttacaaattttaactaaaaagttatttttttttttaacttttttatcgttatccgcatcttttttcgtttttattttttcttttcttatttactttcttatgagctcaggttctttgggaaatggagacctgatgcgtggagg

SEQ ID NO: 72580 - DNA, 545 bp, Cannabis sativa
tctatgtagacatgtggatactattcaattatattattttttaaaaatattataaattattagtgaaatacatatgccatttgctaatttaagagattgcaaaagagagtataatctagagtgcatttagcatttctcgtctcttaattgctatttaagtttagtggatgtgcaacctcctccccctcttcttctttagtttacatatccttgcatctttcaaatagaccgactttcagtgaaattcatttgtataattttgtcttttatataaatatatatagataatttagtaatttaatacttaattactaatttaagatacatatatctgatttgttaaaaaaaaagttacatatatctgatgattatcgtaattgttgtgctattgtcttttcttagatttcctagctcgaatagggattgcatatctatgcatatttaattattttatttcatttatggatttatggcttaattattttattttattgatggatttatgaaaagcatattattttttctgtgcatatgctctctttttt

SEQ ID NO: 72581 - DNA, 1058 bp, Cannabis sativa
  modified_base (27)..(40): a, c, t, g, unknown or other
  modified_base (783)..(785): a, c, t, g, unknown or other
gggattgcacagcttacccggtatttnnnnnnnnnnnnnncgggactactgactgtcacaccggccttagggataggcgggctaagtctgtgcctagggctcacctagcctaggggcccaaaaagatctttcccttttgaaattatataatttttttactgattttgaaagataccacattttttttttttctaaataaggatccaaaataaattttttttctatgacccactaaatttcaaggccgaccctgtgtgttaaatatatattaaatcaattaatatatatttttttttcaaatatataaaattattaatgtattttaaaaagatataaatataattagatgataaatagatttgttcgattaagttatttattggattcgatccgatctaattggattttcaaaatttacatccaatatcattcaattatgattggcatataattttattaaataacttaaaatttagttgtaattagattgaatgactttttacacatgtttgtgattgagtgtggttcactgagattgctcaatgcatggatagatagatgtatcctgggcagtggtatcaccagctagatcatatctcatatgttttggattcattatttgacaatctaatgagtcataatattcatcatcatcatcattgcttacgtgtcttgtatttatatttatatacaatatacattcaatataaatggatgttgtattgttaagcactctcatatgtgttaatattgctattggtctaattaagtatcgagtctcannnaatttaatataatagcttttaaagagtatagctaaccaatcgcaagacgatacgtcttaagagtgctaggtactactaatgcccaataacaatgctctttataataacgtatctatcttggccccaaaaacatttttcaagactaataatgaataaatgactctagttgttgtgcttaccttgaaaacttatacaattccaaagtatcatggcatggcatgacttaatgcatttaatctctatatattaactcaagtgttatgacgacacata

SEQ ID NO: 72582 - DNA, 775 bp, Cannabis sativa
aggagtatcgaatggctactttagtgttttagtggcctgtaatgttttctgatgtgtgatttaagtcaatgcaaaaccagtgagaatcatttaaatgtgtaaccaatcgtggattcatctctttcatcccaatgtggaagtagtgtagcaacaggaactagagctaggctttttggaacacatatttcaggtggtgtgctacgtgctgcttcagctcatggtttgcctcccttggccttagtcgtttgtattcttatgaagcaggtaagaaaggatattgtttctttaattcttccttcttagttgcagttttccacaatgtactttgttgtattttttctttaactaaatttgtagcatcttcttccaacttcaaggacaggtttgcttatttatgcaccataatgtcttgaatgcaccatcggcatgaaggattggttcgctcgtagattttgcacctgatcctgcacttctcacgcaaagtcacggcaagatttaaaatatgagagtgattctgaatacatatgtcgggctcctgtacctggcataactttggagaaaaagggaaatgcagctgaaaaggaaaaggacaaagagatgatgtagttttttgttgatttagaacatgtaatgtgaaaaatgaatatttttgcagaccgatcgatcaaaaatacaaaaaactaattgaaaaaaaaaggcagtaatgattttttatatatagtgcaatatttgtgatttatagacaattttcatcatgttctacatttttcaatat

SEQ ID NO: 72583 - DNA, 926 bp, Cannabis sativa
atataactgggagcctgagtttaaaatatatacaaaaaaatatgacatgtttattacaaaagttgtcgcctagcgaccattcaaaatatagcctactgtcacaaagattatcgcactcactgttgtttagccttgccttttcccttacctatacatacaaacaataattatgagtcgatagactcagtaagaaaagcataatcataatcataaatataactcggattacaattaggcgcccatacacccagctgtaatcaaatccccgcgccctaggtgttactgagtctagaacattcgtacgacaataccgattaaatatcagcctatactcaatactctagtcgtaccgtcatgatggtcgaacaatggctgacattaatcaagacaatcctaaattttatgggtgtcatcaagaatgatcgggtgacctgtgccacatttcagttctaggaggacgctcttgtgtggtgggagttggtatccttcacccgagacgtcactataatgacttgggaagagtttcaagaactattcaatgccaaatattacaatgagtcggtctgcagtgctaagcgaaaagagttcactaacttggttcaaggagaaaatatgtcagtaactgaatatacaacaaagttcaatcgattagccaagctggcttcaggtgtagtgcctatagattttagcaagaaagaaaaatacttggcaggtttgaatgccaagattaaacatgatctggtgattactacaagtgatacaacaacctatgcttagattgttgaaaagactatacgagtcgagggtgtagtgaaatttctttaggagctctaagagactccaagtgttggttggaccaccactcttcctacttatagttacggtagggatggtggtgatttcaatgttgatcaaaagaggaagac

SEQ ID NO: 72584 - DNA, 1612 bp, Cannabis sativa
caacaaagctcgatactttatactttccagcgtggtagacaccttgaaaacaaggtttgcaaacactgacacggctgcaggaatcatgacggagttaactattctattcggaatggcatcaatcaaatctcgctttgaagcgataaggaagtttatcaatgcacggatgagtcctcatcagaatgtacgtgatcaccttctccaaatggcaagttatttctaggaagctcagaatcatggagctcaaatggatcagacaactcaagttagtctaatcttgaatagtcggactccagcttttttgccctacacctccaattatgtcatgaataagaaggaacaagactttcacgagttggttaatgaccttcagacatttgaaaatttgattggaggaccactgaagaaagggtctaaagctcataattctggatatggtaatggagcgactaaggctgaggcaaaccttgcgtctacttccaaacccaagaacaagaagaaatggaaaaatagcaaaaagcctgttaaagctgtgaaaacagttaaaaagaaaaaaggctgctgatcctggtgatgcaccaaaaggaaaatgcttctattgcaatgaaaagggccactggaaaccccaatgccctaacttgctagcaaagaaacaaggtatatcttttgctataaacaaatctgttttagtgaattattatccacttggattattaattctggacctactcaccatgtgtatttgttttcttcttatttcagccacaactgcttgaactcagatgatatcttagcgagttgagtcggatagttggacagaaggtggagatagtcgaaaatgatgatgaagctcagaatcttcttataatttttgaattaattttgttttagtttaagaacaatttggatttcaattttttagtttgggattttattccctattttttttttcatatggttgcatacaattcctttaatgttggaagatttttataataataaagttttctattttggaaattgcatttatgagttgagcttcatctactttatcttatgtaacaattaccaattatagttatatgtttgtatgtgtatacgtttttattattgatacaaattctatagtatcttaaactcttcaaagagttaatactacataaacactaaggatatattttctatgtttgtgaaaaattgttaattctataacaattattaagaatttatttaataaaaagatcttttgatctgataggggtggaggaaaagttaagaataatatgcagttcaacgatcttttatatcttttttgaactctggattatattcgaaactccacataatctctattacacttagagaaccatgctctctatatcctttacgggtggatcataatctctatacacttaggggtggactatattccatagtactctttgtgacacataattttaagcatggaagtaatataatgaattagctattaccagaataaatccttgatcttgattatatgttccagtttaatatttattgttataatagaaaatgataccaataaagttctttgataatgtatcacgctaccttaattgagtgggagaat

SEQ ID NO: 72585 - DNA, 1231 bp, Cannabis sativa
  modified_base (410)..(429): a, c, t, g, unknown or other
aataaataaattaacaaaccaaatttccattattctaaattaatttatatatcatcaatcatctgtaatatatatttatttgtattcatattttaattgaaaaagagcacttacacattatatagactatatatgagaattaaaatatgatatattattcagtgtaaattagagagaaatgccaatacatagtcatataaatatatatattgtgtaatatatacatatatattaattgctcaattaattaagcttgatcttttaaataaatgtatatataatagatcaacatcgtacggttgtctttcacgcgagaaggagaaggatcagttggtgtagtgtattattaatttgtgaataaattaattaatcattttataaagtcaatttatttattattattattattnnnnnnnnnnnnnnnnnnnntattattattattatatttattttgtgaatctctggagcgtcattctccgcgttttagagtatactctggtgttgagtacagcaagaagtatttttaaattaatcatcaattttaaattaaattatatgataatattatatatctaattaatatatataattatattaatttcaagaatattcaatatactatgacagttagcacacgagtgcatgcagtttatattaattatatatattattgtattataatatataaaactatatgtatatattaattatatacattattgtattttagtatattttaaatctatatattttttcatgccgattttgttagctgatcaggggatgtattttgtttaattactccacaataatcagattaatatttagtgatatcaaattatttattaatcattagaaatataaatacatcaaataaagtctaaaatacattacatgtaatatatagataaaacaattgcagttatatatatatgtaatatataataaggagattatgatcaatatatatataatttttcctacaaaaaagttaaaatataaaattgattatctatatataaaaataaagatattcatttgagcacaaaatatattacaaaaaactgttacattggtgacaattttttaataacaacataattttttttgtgacttttattagtcacacactactacaagaaacggccttttatcccggtttttaaggctttttatcccagttttcgctaaaatgaaaaccgggatgtatgccagtgggataaaaagtatt

SEQ ID NO: 72586 - DNA, 1133 bp, Cannabis sativa
cgctgcactaggaggaaggtcaagcttgtaggctacttcaccaacgcggctcaagactcgaaatggcccatagtagcgggctgccaacttctcattacgacggacagccaacgttttctgtcggtagggacggagtttgacaaacaccaagtcaccaaccgcaaaatggacctcacgacggtgggaatcagccgtggtcttcatgcggtgttgagcacgaaggagatgcattttgagatcatcaaggaaggaatccctatcttccaacatttggtccacggtcaagaccgccgacccgcctgaaggataacgcactaaagggggagggtcgcggccataaagcaccttaaaaggtgtacaccccaaagacgaatgaaaactggtattataccaatatttcgcccaagacaaccacttggcccacacctggaggtttctccgaagcaaaacaacgcaagtaggtctcaaggcagcggttaactacctccgtttgaccatcggtttggggatggtaggcgtactatgcttcaaaatcgtgccttgctgcttgaacagttcagcccagaagtgactaaggaaaacacgatctcgatccgagacaatagagcagggaataccatggagcttgacaacattgtcaatgaatgcttccgccactgttttggcagtaaatggatggcagagagtaatgaagtgactatacttgctcaaacgatcaaccacgaccagtatagtatccaccccttcggaacgaggcaagccctcaattaaatccatggtgatatcatcccacacctgagcgggtaagggtaacggttgcaacaaaacggctggagacatcgccatagacttgttgcgttgacacacctcacaacgacgaacaaagtcaacaacttgctgcttcatccccgtccaaaacacatcagcccgaaggcgttggtaagtgcgggattccccggaatgtcccccgatgggagtctcatgatattccttcaaaaactgaggtaaaagagaagaggtggcagcaagcactactcggcccttgtacctcagctggccatggtcaaaggagaacccggaaacctccttgtgttgctccaaatcagcacaaatcttagccaagaaggggtcgg

SEQ ID NO: 72587 - DNA, 1218 bp, Cannabis sativa
gttgtgttattaggtactaatgatgttcaccaccatcatgacatattgtcttagtaatggttaatgatattctataatagtattagagggagcccgaatttgtaatgttaagtgtctctaatatcgatttgatcacaactatttgacatagtctatgttgtgcttaagagcattagagtcccatataatatattggctggtagtagggttgtacactggttgggtttttaggttttcgggtggttgggttcgagtttttggattttgggtcttggaaatgcacaaccaaacccagtttttgggtggttaggtatggcgagtttcaggtcgggtatgcgcgggttaggcgtggtcgggttcggatgttattgggttgagcccgaatgtcatttttgggctcaaatgaattttaatttttaaaaatgccatatattttttttatcacattggcttttgggttcccaagaaaaggctcagacaaccaagtttcatttatcacattggcttttaatttttatcacattggctggtttctgagaaaagtaggtggatttattatcattgttactataaagatctgtcgtaatcatgctcttcagttcaggacatggttttattgttttgaaaaacgattcatctactatagccatttgttttactggttatcttggtcttgttcaaatagtgagtattgagtaggtaggtattgaatgaacagtaaaaagtaaagtgtgataaactaaaaattaatattattaattttttaatataataaaataatattttttttgctgtattttcaggtcacgagttagaacccgactaaaaaaaaacactttttaataatcgaacccgaaacccgtgggggtaattttgggttgaacccgacccgaccacacgggttttaatgtttttttattttttaggcagcgagtcagggcaggtgaccgagtttttcgagttcgcgggtctaaatggtcaaatagtgagcatttattattataaattaaattagaatatatatctgcattcttagaactaatacatttatgttttactataaatgctcatgttatttagattggcttcttaaaaaaacattcctaataatttaaataattaggaatgtgtatttttttttcataagttttaattcggcatgtcttttctttttgaaatgtttaaattgggcatcttgattgggaattgggaaaaaaa

SEQ ID NO: 72588 - DNA, 1025 bp, Cannabis sativa
  modified_base (565)..(571): a, c, t, g, unknown or other
cattatgataacgtgcgataatttatggttgaatgttttcgaatcttttgttctatttttggctaggattaatttgtttgtattttcaggaaaaaataaataaaaattggttgtgttgatttgttctatttaaccaccttagcttatctatgtatataggataataatgtatattgaaagaatgaaaggtatgagtgacttttgtagcaaaggactatgggtgtcataaaattttaatatttaatttttttattttttaaattaatttttattttgtcttaatttttatgttttgtctaggagaacaaaatttttgggtctgctcttataagaatttagatttcttgttaaaaattggtgtcccatgttaaatctattaaaatttaacacgtcaactaatttaaattatattaaatatattaactatttctgttaactttattagatatttaatttttttataaataaaaaattaattgacgtgtcaaaatttaattggtttaacaagaaatcttgattccttttataacaaatatatatcttattggaaaattctacaatgcannnnnnnaaaatggatatattgatgcatccctatctgttttaggatccgaaataattttttcgtcaaattttttctcatggtcatatacgttatagttatttaagacatcttgtaaaattttaaaaaattcgaaaaaatttaacgcgccgaaaactacgttcaaacagtgtgttgtacgcgtgactattttattttacacgcgtgtaaaatagactgtttgaacattattttctacattgtaaattattccgaatttctcaaaattttgtaggatatcttaaataggtataacatgaatatgaaaaaaaaaaatagactaaaaaattcttctagatgtcgaaacaagttaaaagtgcatcaatatatccttttaaggaggtgtattatagaatcaccctaccttatttgacctaatgattaagaaaaaatggatatatactattttcaaaggtatatattg

SEQ ID NO: 72589 - DNA, 2502 bp, Cannabis sativa
  modified_base (1690)..(1725): a, c, t, g, unknown or other
tatatatatatatactactgatatgtatgtagaagtcaattgttagttatgtcttattctgtgggagagaaactaatttgaatcggagcactcgataagacatgaggataatgttaaagcatttcctctctgcttccctaactactattcttgttctcacagctcttgttcttgctcatgctcagactcaaacaggtcttttttttttttttttaatgcacataagaaacaacagttaatgtagaaaatcccatcactgattttttaatttcttttctcttttatgatttggatcttaggcttcatcagtatagattgtggaataccagagaactcgacttacaccgacaaaacaaccggcttaatctacgtttcagactcaggttttatagatcgccatgttggtgtaagtaatactatttcagttgagcaccattctgatactcttgagcagcaattttcaactttaagaagtttcccccaaggacacaaaaattgctacaccctaaggccagcagatgggaaagggaacaagtacttgataagagcaaggttcttgtatggaaattatgatggaaaaatgatagtgccagggttcgatctgtaccttggagctaacaaatggggttctgtgaaattggataatgtttccatagtggtgagcatggagatcatacatattccaaaatcagattacatatttgtgtgtgtagtgaatacaggccatggcacaccttttatttcggctttggagcttaggactttgaagaattctacgtatgctcctgttgaagctgctgttctatatcggcgctatgatgtaggctcaacaagtaatacatacaccaggtatatatgtatatatatatattgactatatcacatatccatgcaaatatattatttagcataattaaattttatatatatatctttatctttatacgtaaatcagtaaatggaactatttaactgtttttgttattttaacatcactacaaaattttttaattttagccataataaaatttgggactaaaaataaaaaaaaattatgactaattataaaacattagtcttatattataactaatagatctatgactaaaggtattagtcacaaaaattacaatttgttatgactaaatgtatttttagtcacaagtaacattttgttgtgactaaaaatcacatttaatcacaaaaaattaatgttgtgactaaaaaattgtcattgaaagtaattattttttgtggtgcatttatgttattcttcagttaataaagttagaactaatattatccttaaattaattagttaattaattaattctatttttagaataatttttttattaataattttgcttgaaatatatctaaattaaatgttttattatataattacttaatccagttgactttttctttttcataaaatggtagataatatttgttttttagaatactacataattttttttttttgttttatatattaaaaatataactcatataattatttttaaaaaataggctagacaattttttatttaagtctaaatttaaatatgaatagaattgaatacgttttttttttttaattatcgtttaaattaataatttttttatatacataaaacaaaaagaaagggttaaggcatgtaatattaatattattattattatnnnnnnnnnnnnnnnnnnnnnnnnnnnnnnnnnnnntattattattattattttacaaactcttaattttggtatattaattatttgtaattatgttaatggaatgtcatataaacaacaaataaattgtaaaggatcattgtgttgaattaatgccctttatatatatttatatgatttatattatatttacttttgacttaacttgctgatctataatatggaccaatgcatgcagaaaatagcaataaattgattatatatacttataaattaaaattaacatatatatcattctaattaaatttatgatttattgattacatattatttatgttatgtgcatatataaatttatcttctttttttttttatttttaaaatcgtgaagagttgttgcatatttattaaattatttttaattttaattaattaagaaaaatagcatattgattattatacattgcatagtttattatttgaaattttttaataattaattttcttaatgaaaataaaatgataaagtttttaagtagaactaaataaacatgcaatatagttgctattacctaatatttaataagactatgtcaagttcctataaattatcataaagttttaaataatttaagatactaaatcaacattcaaacagcttggacacatgtttgtttccattctatatagtctagctattagagttgtgcaattgtatacttatattttatatagttgatgttgtattatacttttgatgctaatgtaaattatgtgatatacttcgatgaaaaatgaatgtatattgagcaa

SEQ ID NO: 72590 - DNA, 1424 bp, Cannabis sativa
  modified_base (126)..(130): a, c, t, g, unknown or other
  modified_base (1080)..(1084): a, c, t, g, unknown or other
  modified_base (1186)..(1186): a, c, t, g, unknown or other
atagttcgaagaacctccctttcttcctggaggtcggtcacgtctttggacaaggaggtcatggtagcctcaagtttctcagaagcctccaaatctttggccagcttggccactttcttctcggcnnnnngaagctttttgttgacttcacctagttccatttggacagctccaagttgaaccctggcttcatcagcatccttgctggaccgaccgattcatgtagtgggtgagcatctccttgcctcttttggtctccggatgcagtgatggaggtggggtaggagcccagatatgctcagatccgcccttcaactgctcgagcctgtctaagcttcgtcctcgagaaaccttggacttagcagttttttggaggagaagggtccacaacggtaagctcctcggatagatcaataacagcttcaaccggtgtcttctctctggacggggtcgtctcgccgcccctagacttcttggccagaggagacgagcttaagcttcctcccactctcttcttcaaagcttcgagcatcttctgagacatgtctgcacgagataaaagcaacatggttagagaaaagcatgagaggtataaaagcattatgattaagaagattaaaaacaagacggagtattttgcgaagcattttcccgagcaagacttgaaggctcatcatcacctaacaagtctcttatctctgctaggatagctttcgcctttcctagtacagaagtggatggctgagcaggtaaactgggctccctgattcgaattgcttgttcatcaagcctgtgctcggcatgaagtttcttcctccttttgagcggggtcacctgctcttcctcagccccatcttcaggatccagaggctcatgcgcatactgttttaccccagcacctcctttcaacttagcctcatgcttaagttgaatgagttcatcctcctgatgagctccctcagcccggccaacacgggatttcctctttttctccttcacaggctgagggatgaaatccttcaagtagagtccgtactccacgaagttgtcctcgtaggtcaacaaagtgatattccgggnnnnncccggcagctgagcaagcctttgagctctatccctaagagcaagtgtgaagggtgggccgtggtatatagggatctgctggaaccgagtgtaggtggtgccnatgccttccaccatgaaatactcgtcaataaaatgcccaattttgctaacgtccttatccccaatgcccgtcaaccacttgtagtctggctgagagaaatagaagtaccccgacctgccttgcttaagggtagacttcaagtcaaaaaaccagctaacctcatggggagagggcatatccaacttctaggaggcatagagaatgaacatggcatacagatacttaatgcccttgggag

SEQ ID NO: 72591 - DNA, 898 bp, Cannabis sativa
aaattatatatattttctaataattcttttgattagctaaaacaccctaaatataaaaatatttaagctagctattcagtaattaaacaaaactgagaattgagattatatcaatcaatgatgaaatatgataaaagtcaaaagaaaaagaaaaagaaaaagaaaaagaaaaagaatcatgtattgtatacatcatacatgctcttaaatacttgttcataatatcaataaatataggataataccaaaacaataatatacaaatgttttatcttatctttatctttttgattttgaaaaaaaaaaagaacacttatatatatggtttaaagtttcgaaaatgataacacgaaacttttaaaatttttatatatacgagtgtactacaatatacataattaaactgtaaacacttattaaatataataatatgtacatactataatagttaattaagtaagaatcacatcatttacattaaaaatataatagttacaatttttgtatgacatactataacagttaacttataaaacataaaaatataagaaaataaataaaatcaaattaatgttaggattacagaagtaatttattaataatatacttttatttaattttttaaattaattacaactacgtacaacaacaaataaaattaaatataatcattataattatatttgatattataactattaaattttcttatatatagtaattttaaatggattgtatttatggaaaaatggattgtatctttttttctatttttttttctaggaaaatgttctcaaccactaatactcagagtaatagaagttctacaacgcggggagtgagaatatattcaaaaatagcattcgctattaataataagttttgaatacaagtaaag

SEQ ID NO: 72592 - DNA, 1066 bp, Cannabis sativa
ttttacggaatttcacacagaaacccatatagcaattaacggagcaaagtaaattgtaaccaaaattcatatttaacacacataaaaaccacagaagcaactcaaactgtaaatttaaaaaaaaaattaaaaaaaaataatatatgaggtgattcgacccctaataattattattgaaatatttctgaataaataaaaatgatatgaaaaatagatgaaataaaatattatattattaggcgatacggaaattttcgccacccttaaagaatattattattagagatgctcttacaatttattaatatcttaggagctggcatgcccaatcatatggcagcttgagtcattacacaatattctctatattaaaatgcccattttttttatatccttttatatataatataataaataattttgtataatgtataggttacataataaatatttataagagaaaatatgtacttaggcaatctccaatggttaaacttaaatttagtgttaaatcaacaacaaaaaattattatttcaacactattttttttgcaattccaatcacaatactaaaaattacaccaaattttatattatttaattaatataataagaatattttaatactacatatataattatttagtttttccttatttaattattaaaaactttttttaagaaaatagtgtggtctacattgccccactaaaaagtaaatttgatgggacactgtagacaaaactatgagtatagttttagtgttctattagagtaaatatagtgtgaaactacactatatgggggtgtttggaatgcgttaatgttagcaagggaatggtaatattaaacattaccttgtttgtttggagggtttaatcttgaaatatcgttcccttagtaatataaatacccttgaagagggtaatgttgatacattaaaatagggtgggattcattatatattcccttccattatattaatttaaataatatttttaaattaataaataaatttaaataccattaatattataatttattataaacaaaatattatgatata

SEQ ID NO: 72593 - DNA, 939 bp, Cannabis sativa
tgcaaaagatcacacgcatatataaatatatagatactacatatattatatatattaatcatctaatgtgtaataaccaatatatatttatttcggtgtctgctttgtcccaagaacgacaatgaccaatgggtcagcttgcattaattgatgcatgtaatattaatgtaacctttgactccataccttcacttttcactatggattatggacgtggattcatcactatatttgattatttagtagtgtgcattgttcatgtgataaatttatacttattgatgtggttattgttacaacattatatatacggtgataacttaatgatttaatttataaaatataattaactagtaaacaactcgcgctttgcggcgaatgtttaaaaaattttagatcaatataaatatataaaggaatattttagaaaggtgatgtggcatcttatgtgaattttgtttgcttttttttttctcattttttcactttttttcacatttttttatgtttttggtaatatgagatagtcatgttaaaaaagtcccacatggtttaaaaatcattgtattaataaacttaatcttgcccaattagttgtaatttttttaaaagtaaatgcaaaatatgtttttgtattttcaatatttgtcaagtttaaaatataaatatgtaaaggaatgttaaaagataggtgattgtggcatcttatgtgaattttctttgcttttcttttttttttttttttctcattttttcacttttttttttacatttttttatgcttttggtaatatgagagtcatattaagaaagtcccacatagtttaaaaatcattttgggtgctacacttttacattatatagatcaccattcttttgcttttgattgtcccaaagttagtataatttattttcttatgtgggtgattaataaactta

SEQ ID NO: 72594 - DNA, 1468 bp, Cannabis sativa
tctattatgtttgacattgtatcttagttatatgtgagtgtgaggataattaaagtacaatactcataaaaagaggtatagcgcgtaagtgattgacactatatcacgtttaccacgtagcttgctatcagactatatggtttctttttcatttaacttctctttgtctacttttttttctttcataattttctcttattaacttagatttttgttaacaataaataaagtattgcaaataaataattaatacttataattaatatatatggaacacttaagaatttttacgtgattttgtagttaaaatctacataatctacatactccacaagtttattatttatgagtatttcttgaaaatatacttagaatagagaggaataattatgaaactttactcaatctcacaatgtctctctttcctaaaatgatcgatcctatttggttttgtccctatttataaaggttcttggaataatagctattctcctttaatcttatctaagtaattgttcataaaacgtggacaatacccacattttatatttacaacatgtagataaaatgaagtacctaatgataatcgcttttttcgtatgtggaagtagttagtctctaacgagataatacattccaactatggctcgtatcattcgacagtgttcagggatagttggtcgtattttgcgagactagttaaaatatttgtcctcgctatagccttttcagggcaaactcttagaattagtctttcaaaataagttgtattatgcttatttcccttagtcttttaatatagtcatgagtatatgagtcaataagttgcaagcttttaaagaactcacctatctacccattctacttaactcattctttcctgctatttaccctcctcgttcatcttagtaaagttctacgaatttaacttgtaatcctattatcctcgtaaatcattatattgataaggccatgcgaggtcatcacatctttttaatcgtagtttatcccggagcgagacatttattcattcctcgcatttattattctcttcattcttttacacttatatgatatgtgttatgtccatattcactcaaattatgggcataacaattaccccctaaaaaatatttttcatttttgaaaaaaacttttttaaatcattgttatcacttgtttgttgtgtaacgagaaagctccttaaatatttgctttggcgatttttgtctttccaataaaaagttaatcatggctttggtaataaatgcacgtcttttcaactgatccgtaattaatcaccattgattaaatatttcttttaatcgtacaatgcttacgattttgcttataagactatcatttttatttctcaccaccattttcaccactgttatccaaaaataataagcacaaaattgataacatcccctgtgtatgccctcaatgtctttttgctttttttttc

SEQ ID NO: 72595 - DNA, 1448 bp, Cannabis sativa
cctaaataattacaaacgtacactaacataaaaacaaaatagaataaaaaattctctttgatttaccaaaacaaataatggtatgcgagaatgaccatttaagagatgtactatatgttaaaaaaaatatttttatatttattacgtgttacacaatttattgggtaattttatattaaatcttctaaaatgactgttttggaacacccttaatatgtttttacatcaaagataattttaagtccaaattattttcatgattatgtaggttgtatttatgtagaatcatttgtaatttcttgcaaaaatttgaattgtttaccgtgccaaaaataaggttaaaaaattttgttgcacacatgatttttttttttaatttgtgtggtaagtaattgtttaaattttatttttaggcaccgtaaactattcaatttttttaaaaaaattacaaatagtagtatgagaaaactacaaagtacacaatcatgaaaaaaaaaagactaaaagactttcttagatgtcaaaacaaataaaattgtattgaaatatttttttagctaggggtgtactatagattttttcaaataaaaattaatagttgccccccttagtaattaggtcctggctccgcccctgcttgcaatggtatgaaattcaactcacacgaagaagcatatgtattttatttgaaatatgctaagattataggatttggcatcttaagaagatctagtgtcgatcaaagatttctaatgagtttattgatgttaagtttgtttgtacaagattgggatcaaaacgagaaagtatttcatgtaatccacgtccttgcttgaagatagattgtaaagcaacattggatcttaaaaggaaattagaaggaaagtggtatgtttatttctcatgtcatagaagcatcaaaccatcaaacaaggagaccattaacactttacatgcagttggggtaagcacaactaaaactttgctgctatggccaaattaaataatagatatgaaaatattggatgtttggagaaagatataagaaatcatttggacaaggaaaaacacttggcactagctttcggggatgctaatgcaatgcaagagctttttatgcatatgcaagaagaagattctaatttcttttatgcaattgacttggatgaagagcaacgccttaaaaatgtcttatgggtggatgcaaaaagtcgagaagattataaagtttttggagatgttgtctcatttgacaccacatacatcacaaataaatataaaattccatttactccattcataggtgtaaacaagcattttcaaacttcattgcttggttgtgcattacttgtagatgagactaaatcgacctttgtttcgctaatgaaaacatggcttagagctgggtgggaaagctccaattttattgacaaatcaagacaaagcta

SEQ ID NO: 72596 - DNA, 1410 bp, Cannabis sativa
caattcagtttgaatttgtcacatggtcaaattgttaagggtattgtcttattaatgttgatttgagtcattaattcgttgatgggaatcagattagtgtgactctgcttttcatattattacctttttaaacaaaataaaaaaaattattcatttaatttgataaatttctaacagccattcacatatcatttcatcaatagaaatacaaaggcactctagtgaataaaccagcagaagttcttgttagaagtgttgcagaaacacagttacctagatcatctacgattttggtggcttactttgatggtcaggttaggccttttctatacttggttgactttatcttacaattttccttctataattgtgtttgtattaaatatttgaaacggtttctgtttcttgaactaaaatgatgatatttaatgtggtagaaatgtacacagtaaaattttctataactatgccatatccagtatttcttctatatagttgaatacagtgtaattatatgagtgttatgggtaagtaatgcagtgtcatgaagttcacacaatcagaacctgaaatatactgtagatgtgatttcctctgataaaaccctgctgctatttgtgaagaagaggaagggtaaatgaggagatagtattagtggtggagggatttgggtactgagctggccgtttattagggaatgtgtactgcttgagctgcacacaagtagtggaagggtgtgaaaagggttggtcaagtaattgcagggtaatttacttttgggtggagttggatcccaaattcagaatggttttcttttctcttttcattttcttttgttgggaggattgtaatgacttttctctggtttgttttgtttttctttcttgctgtattattcaagtctaagcagggtagtgtcatatttcctctgtaaaagtataacagtgcaaagtataacagtataaaaatgtatggttgaaatttaaaactgtttacaaattcaaattcatttgatatattacatttaattgttgatgttaaataatattgagttgattaatgatactaaatgttggcatatttgcatgctaataggggtgacattatatttttagggacgattttttttctcctaatttgcataaaataggggcaattttaatacttataggggcgacaaaaaattgcccttaataatcacttttagaggcgatttattttgtcgcccctaaaaaggagcattggggacaaagtagtagaagcgacgtgctagtggcgacttatcgtccctaatacattttagggacgattataaaggtttttaggggcaacttttgtcgcccctactattatcttttcttgtagtgtgttaatgtttactttttctttgagttcttcttgataggatgc

SEQ ID NO: 72597 - DNA, 1400 bp, Cannabis sativa
atattagttaaagagagaggccatacttgatcattacattagtgctaattattttcaaccggtacatacgtaatattatggatttcttctaacctttctttctgtccttttggtaataataatattcttatctactacattatatataatacttactgcgtattaattaatcttgagaaaaattaatgtaacagcaacattctcacacactagtttacaaaaagttttactttttccaaaagaaatgagaaatgagaaattttgttgaaacttaactcaaaaaaccttgtccagctaaatactagcatagggtctattatatgttatcttgaacattattaaaataacatttttttttttagggtcaaaatcaaaatttggggagctatatatgagctttatactatgtcggaaacacgtgcaaaacgaagaagcccttgaattaagagataagagttaagagaggaaacccaaaaacagaaacctgggtaaggcagtgagatgaagatcagagatcagagttagaggaatgagcgtacgtggcagggcaacttcaaggactcaagctagcttagctcatgagtcaaaacgagtcatcacctactctagctagctacaagtgatgtatacacgttatttattattttcattggagggccaaacttcaaaattatgacatggcaacaaaaaagttcatgtgtcacgtgacgtcgacatggctggctcacgtgactagcttcttctagtttttttgggtacggattgtcctaaacacaaatataagaacacttttattaagggataataaggaaattacactttgagattttaagggatgttacgataaatatggcacatttaagtttgattaatttatatggtatttttttgtttttaggtctttttatggtatttgatatgtcatatatatgtaattaggttttcaaatcccatatttaatatttttatttgttaatttaggaagttttatttgttactgataccggaatagtcactggagtttgctgttggtgccagaaaactcattggagtagtggttggtgctggaaaagtcatcggaatagcgttcggtgtcggaaaagtcgtcggagttgctgtcggcgccaaaaaatttgtcaaaattagcattgtcgccggaaaaatcactcgaaaaaatcatcaagaaacctgtttcttgatgaagaaatcactttcttcgtaatttttccattgacaatgctaattctaacaacttttctgacgctagcagctactccagcgacttttccggcatcgacagcaaattttagaaaaatcatcagaattggcattgtcaccggtaaaattaccagaaaaatcttggtgatttttcctgtgatttttcatcaagaaaccacttt

SEQ ID NO: 72598 - DNA, 861 bp, Cannabis sativa
tctactgcaaccttctctttctccattaaccaacaagttcttggccatgttctgccttctggagcaaggggatcccctctctccatatttgttccttttgtgctttgaaggtctaacctccctgattcgccttaaggctcaacagccccagccccgtaaacagtctctgggaatcaaaattgccaggaccgctcctcctgtttctcatcttttcttcgctgatgatagccttctcttcagttctgcttcccctaccgctgcggccgtcattaaacaaatcttaaacgactatagccaggcttctggtcagttggtcaattttaccaaatcagccatgttcttctccccaaataccatgtctgaaatcaaaaccgacatcactaccatccttgacatccctattagagacacttttgacaagtacttaggtcttcctcaaacttttggaagaacgaaaaaggatgcgttcaattacatcaaggatcgggtttggtttcacctcaacaaatggaattccaaatttttttccaaagggggtaaagaaatccttttgaaatctgttgtccaagctataccctcttatgctatggcttgtttcaagctacctgcttctttccacaacaagattgaatcaatgatggctcaattttggtgaggaggtttggatagcatagtctcagattgcaaagttttagttaattatatttgtaacaaagacactcataataatcatctcaacaaatttgtaactgctattaacagcttgatgtcatatttccttaatgctttcattagctacattccaagaggggcaaatgaaatggcccattctctagctaagaaagctctaggccttgacca

SEQ ID NO: 72599 - DNA, 557 bp, Cannabis sativa
cttgtccttctagtctcgtggcactgaacatgcttctagatatgactcgccgaatgcggagggctttacgaatacgaaactcatatatgtgtccggagggatgtattaaaatgagctcgacctatttttcttttaaggagtgttctactgatgaatcttaagtactgacttggaattcacatccaataccgaaaacgcagatgacaaaaagttttgatacttttgatattatttcaatttattcaataaacatatattcaaaaaattaaaaaattaaataattgtattatgaggtggattgttctattacattttatttttatgtataaagttatcattaaaaaaagtgaagtttacatatatttttcttcatatatatgtccctatatttttaaaatatatatttatttatatagttttgtttttttatttttatgtttcacttaatttaaaaaaagctaattagtaatttttctccctgagctttgacatgtactaaattatgtcccttgaacttttttgcccgttaaaaattcccctcgaactattgagattgt

SEQ ID NO: 72600 - DNA, 620 bp, Cannabis sativa
acggttatagaaaccgatggaaatactttaaacactatttaaaaatgtcgggaaaactcatttttgtagaagtggagggttccaattacactctctaattcgcatagctcgcatgagaattgaatataattacatgtaaaaacttcattttaaacattatataactactacaaaatattatttttttcgtgtaattactaattattttaccaaacaaaatattaagaattcatatataattactaattcatatctaaatatacattgtattttaaaatatagtagttactaacctgtgtaattatcaccctaataattacactatttagtaattaaatagttacttccaaacacaaccttaatatttctcattttaaatttatttataataaatattggctgcaaaactaactgtatttgtgacacttaacctcacaaacacattttgatagtaaaacctcacttatactatgtgtacatgtgacaaatgtttcatggtccacatcattttaacttttttaatataataaaaattatttaaaattttaaaaagaaattaaattacaaaaaatatttagtattgttcggtaaccattaaaaaatcaattttttgattaatt

SEQ ID NO: 72601 - DNA, 800 bp, Cannabis sativa
tgggatttgtcaagcattatttatatgttatgcaatgttgcaagaacttagaagggatgattattgttttgataaaaggattaatgtttcatccagaaaaggatatctatccattttgttttaagataatttataatacagtgtaatgttcttcaaatacatgtttatgcctcggatcaaattgatatttctttcattgtgtggtaagcatatttcaaaatgttattaacagaatacttaatatacaaaattacaaatgcattctttcaaaaaaaaaaaaaaaacattgaaattttcaattcaacctttagtttccatagaagactaaactattccattgaattagcaaattaatacaaattcagtcattcttctttttattcaaaagtatataaattttttaaatgaccaagatatccttaccaaattgtttaacaaaaaagagaacgaaaaagaattaaacaaaaaatttggcttctctcgaaaatcttcttattagttttgccccacctactaccatttttttttgttacaagtatgtatttttggtagcactatcattttgtatgccaattctgactagagtagatgagaaaagaaatttgtattgatttgctaatctaagggtttttttctaaaaaaattagtatatattgagcttttcaccttaacccaaaatatgcttacgaattatcctttttatggaattcactatttgaaacaatgtttctttgacaaatgatagtattggcagtaaaaattgattctaaacaaattgtgatttatgattaggtgaaaac

SEQ ID NO: 72602 - DNA, 1612 bp, Cannabis sativa
catgaatctgttgatgtatgcccgaagtggcttgcctggtcgttgcttaacttcgaccaggtctcccaaatgcaatgggagttggcgtgaggaggagaattgtgcatggaattccgatgagaaggttttccatgaactaaactttccaggagccaacttgaaatacctttgctgagcggcttctgaccgagtggcagggaagattctgcagaatacatctcctcataccccttgcaaatccatttgcattttgaagtacttgagatgggaaaggggatcttctctccccgtgtacattttccacgtcagcattttgaacttgtggggcagtggcaggagattgatctccagtgagaaaggtgttccgtgtgctcggtctagctcaagatcattatttctttgtccaaccacgtcgtaaaaaatatttttcagttcgtctagctgagcctgtacggctgggctgacctgctcggcattctagtcaatttggattacgtcagcatctttttgagaggggatttgagtacgagctccgggatgcacgattgtcgtaacatgctgatcgtctgctcccctccttctgtttagatcattccctaggtcatgggttgtccctaaccttccgaacgcagaagcgcctggctaccttagcagttgattcgcttggttgacgggtggaatggcacaattgataaggttgaaaccatcacgtatgactcctcctgatgaattaccagacaaggtttgctcgcctaccgctgggcccactgagcacaggcctgttgagcatgcaattcgaatcaaggagcccaatctacctactcggccatccactcctgtactaggaatggggaaagctgtcctggtggagataagagacttgtcaggtgatgatgaaccttcaaatcttgcacaggcaaatgcttcgcgaaatactccgtcttgtttttaatcttctcgattattatgctttcatacttttagtacttttctcttaaccatgttgcttttatgtcgtccagacatgtctcagaagatgcttgaagctctgaagaaatgagttgggggaagctcaagctcgtctcctccggccaagaagtctagaagcggtgagtcaacgaagtccagagaaaaggcaccggttgaagctgttatcgatctatccaaggagctaaccgtggtagatccttctacgccaaaaactgctaagcccaaggtctctcgaggaggaagctcagacaggcccaaacagtcgaagggcagatctgagaagatccgggctcctaccctatctccatcactgcattcggagatcaaaagaggcaaggagatgcttacccactatatgaatcgatcggcccctgaagggaatgagtagctggccggagctgacaacgagccttctttggagttgttgatgggaggagtcctgaaggagtttatgaaggtgagtctttcctgacactttcctttaatccttccttacttggctcagattttaacgttttttctctgtgcagactggcctgaataatgagggcggaagttgatgttgggttgtatgccctaaataaaactcatttcaatataatccgatttacttattaatata

SEQ ID NO: 72603 - DNA, 678 bp, Cannabis sativa
  modified_base (88)..(94): a, c, t, g, unknown or other
  modified_base (388)..(402): a, c, t, g, unknown or other
taaatctcgtaggctataccgactcagatttacatgcttgtcttgatgataggaagtctacatttgggatggtatttactcttggggnnnnnnnagttgtttggagaagtgctaagcaaactgtaacatcagactctaccatggaggccgaatacataactgttgttgaggcagataaggaacaagtctggctaagaaagttcttcacagaacttggtgttgttccgaaaaaggaaaaaccactggttttggtttatgacaataatggtgctatagccaactgtaaagagccttgaagccacaagagaagcaaacacattgagaggaaataccacatcatcaaggaacatgtggctagaggggacgtactagtggagaaagttgatannnnnnnnnnnnnnnctgatccattcaccaaaattttgaatgtaactgcatttaaaaaaacacagattgaatctaggattaattgaaatgtactgattgttttatgttagttcatgtgagagtttgttgggtttcatgccctaaataaaactctagttgaaggtaatctattatattcatttattaatatagaaaaaaatttatttcattacttatttaatatgttatttggttcatgtgatcacttgtttgattttaaattcatccaaatccttataacattgatattct

SEQ ID NO: 72604 - DNA, 977 bp, Cannabis sativa
tttactattaatcagaatactatactatgaaattgaaagacaaggtttagatctaaactagctgtacccaaacttttttcacttgtccaactgttgttgttgagcattttttgggtatgaaatgagcctcctttgaaggtagattttcgatacttctcttctattgaaaataaattattctctaatggttgggtgccgtacaagaaatcaaatgggcaattgtgctttaaataacatgtcaaacttgattatataaaaaatagaataaagaaaagaatgttcttgtacctcacctagaaaaaaaataaattataattcgtcggacttcttgacacggcatgaaattagcacgagtatgacacgataagtaaaaatataaaactgagcacgacacaatatgatactgtaaattggcacgacttgacacgaaaaataagtttaaacacgatacggcacgataagtccaaagacacaacacgtaagcacgaataaactagtctaagaacaagacacattaaaattttttataataataatatatatattaataaatattcaacttctaatcattttaattaactttttatatgattatgtataaaatattattgaaaaattacataaaaacttttagaacaaatacatatagtttagtaattaactcattaattctaaaaaaaaaataacaaaaaagatgagacacaatttgatccacctgaaaacacgtcggtctgaataaagggtgacaagaaaatataaacttacatgctgtaccaaatttaccctttaaaatgttagcaattaacatgacacgataatacaacctatattattgcaggttggcccaatactcattgttactatgaaactgaaagaagatgtttagacacagtaccaaacagacctctccaaaagaaggtagagtttcaatagttttcttctattgcaaatagattattctcagataatggcaggtt

SEQ ID NO: 72605 - DNA, 656 bp, Cannabis sativa
tttggatggagacgaataaaatgcttaggatacttcttcaatattgtgattggaagcaccccaggttgataatatgtaaacctgagtgctgggtgcactaggtgctcaaaattgaaagtgtctgattctgattctaatacctcaaatatgttcgtgaaaagtcttattcatgtcaaagtagaaagtttgaggcatttgcactgtgaagaacctaaaaactgaaaccctagttaggaagttaacttgggcactggtgaaaaccctatgcgactaggttactttcgggtgttgtttcatctcttttcaacttagcgagatccactacccattctagagttcccagaatcaacctgagcgcagggctagggaaccctcccaggtcgactactatgactcacgactactcaatttcgggaattttatttcttgccacgtgtcaaatattgatgtccatgtcaccagagttagttgtcgggtaaacagaactcaattgggtcccaatcattagatgcacatttttacattatttttaacattacatttaagtcattagatctaattgtatctacgggtccaaattaaattagtggaaaataaaataaaataaaaaccacaaaaagagaaaaatcctaattgtgacttccctccattgatcc

SEQ ID NO: 72606 - DNA, 2301 bp, Cannabis sativa
  modified_base (797)..(798): a, c, t, g, unknown or other
aaatcctttaatttgataatttgatgatcacttgaatatgtaactctcacctctttttcactcttaaattagtaaaagatgttactaactgtttaagaatgtgaaataatgatagctattaaaaatatagcttttggagacttgatttattcatttgtaaggtgtataaatggttcaaaatcaagtggaagtgatttagacactttggagaagaattgactaaagctgaaaaaaattgtaaccagtaactagttactgtttttttagtatacaagtacaaacgtttgtgagtctttctagcagcctaaaactcctcaaaatcacccaattaataccataaatgcctaatttatgattggtaatatccaatgactttatggtggtcattcatgttcatatgagaatgaaaaactctataaatagaggccatattgttcacttgtaagagaagtagttaaaaatcatttgttgtggttagaaccttgtgaggatatgttcatccttagacactaggctgagcatatgaggcttgataaatccttaagagcatttctagaatttccctagtgtccatatgagggaggaaatgacttttaggacaaaggtccttaagccttggtcaagctttttgtgtgttattcttcttcttctgctctagctttcttgtaatcttgatgaaatacttttatttgtatttttagtattttgattgtaattctcctattctctcttgcaatgagaacttttccaacaatttaaaagtcatttcgatggcatattcttctttctaaaagacnngccatggaggtcatacaatcaaaggaaattatccatggaggagagcatcaatcaagattatgagaaggaaaacatgcggtaagagattcaagtcatccatggataagcatggtggacttattttgtaatatacaatttatttgataataatatattaacatattcatatgacgagatatgatattttggtataaattttttatatgttaatatatatgatatgtgtgtatattatattattatatatagtgatatataatattataattgagattacaacatattataatgtgtatatatgtgagagatatatatcatataacatgtgatatatgtgagtcatatgtatatgagcatgagatatatttacatatatatatattttcgtgagaataaatacgtaaaaacaataatttctatatacatgcatatatgatatatattatgtgtatatgatatatatatatatattgtgtatatgcatattaatgtatttgtatgttatatatataggatatgtaagatatatatatttaattgtgaaattaatattggtattttgtgtatattatttatgatagtatggtaacatatatgcaatattgattaatataaaattacttgagagttataattttatggagttatatattaattttgtgtattaatatatgtatataaattattatattaatatatgtactataactatgagactatgataatggaggtcatgatgataagaaaaatgtgttcattctatcattataactatgagactatattgtgattaaagataattatttagaaatgaagttctattttggtgataatcatctcattattttatgagataagaaaagtgaactatgcgagttacacttttttgtgttttttcttgtcatagcaagagcaaagtgatcaaagtggatttaaattgtgaaatgagctcataaaattagaaagacagttttagactcaaagaaagtagatcacgtcgattcaaataatgagataaaagattataaaattggagaagtaattttgaatcttaataagtaaagtggtgaaacaaaattgatgagaagtaattttgttagctttggactaatctcagtgaagagataaccataaaattgaagaagtaattttataattatgagaatgttgtgttatctattaacaaattttaagtataattttgttaataaaggacaaataatggataaaataattctattaatttgtaagtggtttattaagagattatcatgtgatctttaaaggttcatgataattttgagtgcacattattttaaaagatgatgtgtagagaacaaaataaaataaagaggttttattttaaagtgatatggtattttcacttaatggtaaaatgtgggggtaagatttgagtttaatcaaatttgttgagaaattattgattatatatatgtggttttgaatttaatattctaaattaatattttgctatgtgcatat

SEQ ID NO: 72607 - DNA, 2518 bp, Cannabis sativa
  modified_base (1004)..(1005): a, c, t, g, unknown or other
  modified_base (2458)..(2459): a, c, t, g, unknown or other
ttgcacatattttgtaattaattaaaataatgtatacaaaattgtaaaatgtcctataataatagtgtaagtggtaaaattattttatatcaagtaaaataacatgaattcaaccctctcaaaagataagattttaaattaatttaataatatgaatttctttattttttttaaacattagttcatttcttttaatatttactaatatagaacaattcttatacttaaaaattttaaagtttgtaattattgtggtggaaagtcttaaacttttatttgttaatatatactgatggttatattacataaagtataatagtgaacaataaaataacacatgcaataataataataatcaaataaaaagtttgtcaaataaaaattgaataataaattttgtcaaataaaaaaaaaatacattataaatagatgaaaaactttgtactaaaaaaatatatgcacgatttcgatttaccgtcgatctcatccaaattttatagtttatgacaactttaattataaggtgcttcaaacatactataaacgatcgaattgctactcttgtaaagacatgattttttttattatttataattaatttaacttttaaattaatttaataatttaaaatttttgttttaaacaataatatatagaatatactatataaattttaaggttgtaattataatagtgaacaataaaataatacatgcattaataaataaaattcaaataaaaaattatggctctttgtcaaagaaaattatgcataataaatagataaaaagctttgcactaaaaaaaaatcaaaattatcttggttatcgttgatctcattgaaattaaatagtatatgataactttgaataactatgagatttttcagatgtacagaatgatcgaattgctacccttatattttaatatcaacaattacacaatataattgttatcccaaattttacattgtatgacatgcaatcaaaattgtaacatgtagnnagacaggtcatcataaaattatacctcgtcgatacattaagattgtacaaagaagtatttcccttcagggcaagttttcgtctggtcggtagagggacaataattgcacaatataattgttatcccaaattttggccttgatgacgtgcgaaccaaattgtaactgttattcgcgtttttggtattggacatgtggactctaggtcagcaccgcaaacctatcagtgggactctcagcaaaggagaagtgggccaatcccacatggatatgtccttctatgaacatatcttggttccgtactcgtaaagccttccgccttcagtaatttgtacccggaagacatgtctagtaccatgagactggagagataaaaccgtgcgttcccagatggcccttcctatttccctttatatttcaacacacaaataaggaaactacaattgttagatcacaatagagtatcgtatcaagattaaaggaaaaactttctataacaaatattagcaactaggagtaaccaagcttgtggtacttggtttgatcaacatgggacaaccaggataagtaatgactataaactagaaccgttattacgtttcctacttgccggttatctccattaatagtatattaattaaacttgttattatgggacaattcttatatatattttaaattttgtaattattgtatacaataaaataagacgtgtgataagatatcaataatatttcttatacgttgattctaaaaatatgaaatttgcatttagtgcgaaatggattggatgaacacccctattaagaatgataaagtggagataaaactctttaaaaaaatgaaataaaataaaatagaataaatttctcactagtagagtttgagaatctcttttgtttttggaacactctgtccactttcttaaaaccttctcctaaagactcaaaaatatttttgagttttaactctacttgttgttcctgaaattcattttcatcaagaactttttcttttttcttttctttttccttttctctcttcttttcttttttctcattagcaacatatatttcttccacacgtttttctataactattgaactaagttgtaatgttccaacaatagtagtaagtgaacttatctcttttttgatagacaatatattgttctcaatacgttgtattgcttcattaagatgaaatattttatttggtccagccatcaaatcttcatcagaacacatctaaacaaaaagaaaaaaccaaagaaaaataagttgtacacaaaataaaaaaaaataataataataaaataatattatatacatatacaaataaaaaacacataccttgctaatgttgttgatggcgtgatccaaaaaaatactttttttctattattgagaagaaaatataattatgttaaaaatgtgtactactaactagttcatnnatgctttatatagatagtgtaattaaaataaatatttaattcaatatctagaaatttta

SEQ ID NO: 72608 - DNA, 625 bp, Cannabis sativa
tgcatttgttattttattgttcactattatactttatgtaatacaaccatcaatatatattaacaaataaaagtttaagacttttataaaatagttgaaggatataagttgttatgtcccaatgagaatcgagtcaagtggcgtaagaaagtttggggtagacttaatactcccaaatatagctttgtaatatggcttgcaattcaaaaaaggttgaagaccaaggataggctacttcggtaaaatgttgtagcacatatgcaatgtatgctaagtgatacaggacaagtgatcacctattctttgactgtacctttgctttgagctgccttcaacaaatgaaagtgtggctggggtggaaggctacagcaacatggttggacagcctggtgaaatgtatagggcgaaagaagtgttctggctttcgaaaaaaggttatggctgcaattgcagccttggtgtacttcattgggaaagccaggaatagaaaattttggcagcaaatagatgagaacccgaatactattgtacaacaattaaaaaacacttgtaaaagtagaatacatagtgtatggcccaacaaagtatcatcagaagatttagcttggtttaatacattgtaaat

SEQ ID NO: 72609 - DNA, 895 bp, Cannabis sativa
agtgttgtttttatctgtctgaaacgcaaaagccatattagagttggaatcagttgcagagacaagattacctttctggttttcttcctgagttactaaatgaaaaactcgattggcttcaggcagtggatccatcaaaagaatgctgcttctaatctgagaaaaatgatccgaaagtcccattagaaaggacatgatgtactccatgtggtggtgttcttggagcttctttacaccaccacaggtgcatccattacaggtacagtttggcctatagttggacaattcttcccatatagtcttgagacgggtatagtatatactgatgctttggttttcttgtcgaagattcattaaactttttctgagattgaatatgtgtggcccgtttctttgatgaaacctaacctttaagtcagtccaaatggcggctgcagattcatcatagagcaaactagaggaaatttccttagaaaccgagttaagaatccaagatatcacaatattattatttctaatccatgcattatagagattaaaatcagaaggattaggtttagaaatagaaccatctaagaatcccaatttatttttgactgaaatggcaagttgcatagctcggctccatgatatgtaattgtcttgtccagttaaaggttgagaaacaagaatgttaccagggttgtctccatggtggagataataaggatctgagggatcctccaaagggcttctttgattgatgaattgatttgtagaaacggcagaggctgcaactccagtttcagcttcgacttcttgattgttgttcgacatagcagatcagaagagaacactggaaagaaaatccaggggagagaggacacgatttcacgaaagaaatcagcaaagaaca

SEQ ID NO: 72610 - DNA, 1386 bp, Cannabis sativa
  modified_base (465)..(465): a, c, t, g, unknown or other
gatgccacgtcagagtgccaattctgggataacaggagtcatccatgtgacttctctggcagtatttatctccattacttcagtccgattcactgttgggtgagtccaaacatcgacaggaattacattgagtaattaggcttctcttgttgaggccaaacgggccaaagcgtctgcatgagagttatgagcacgtggtactcgagaaacaatcattttcttgaaattctgtagcaactcacaagttagggcgagatatctagcgagacgtccacctctggccagatattctccgttcactttgcatacaacgatctgggagtcgctgaaggcttgtaactgctcgatcctcatccaagagcgagtttcaatcctgcaatcaaagcctcatacttggcttcattgttagatgcagaaaattcaaatctaagtgcagcatgtaccttaaaattactggggcttatnagtattataccaccgccggagcctccgctattggaggctccatcaacatataaagtccatccttctccgtttggtacatcgggatcgattttttcttctataagtgccacctcggtgctcgggaactcaagtataaagtccgccagggcttgccccttaatcgcagatttaggtttatacctaatgtcgaactagctcaactctaccgaccatttgaacaatcttctcgatgcctctggttttgccaaaacttgcctcaaagggtagtttgttaaaacttcaatgctatgagcttggaaataaggtcgcaattttcttgacgctattaccagagcaaatgccagtttttccatctgggagtagcgagtctcaacgtctaacaggcgcttactaacataatacaccggatactgtcttccctggtcttcgcggtagtactgaactaattgcatattcgaacattacgaggtagatggataagatttctccaggcattggtttcgaaaggattggggtttgccccaaatgtgatttaagtgcttgaaaagcctcttcgcacttctcagtccactgaaacttcttattaccttttaaaattttaaaaaattctttgcacttatcagaggaacgtgatataaagtgatttaaagcagcgactttacctgtaaggctttggacttcttttagtttagttggagatcgcatttccaccaatgccttaatcttcggggggtttgcttcaattcctcgctgatttaccataaacccgaggagttttcctaatctgactccaaagacacacttaagaggattgagtcacattttatatcgtcgcagtatctcgaacattgcttgtaagtgtgtaacatggtcttttgcatgttgagattttacgagcatatcgtcaacatatacctccat

SEQ ID NO: 72611 - DNA, 1453 bp, Cannabis sativa
tatgtaataaatatttttcattaacgtgctatttaccatgaaagtgtcattcatatcacaatgatgatcattagtagatcagcctaaatactaagtatacatgaacacctatttgtgttcattgagttctttatatccactcagtttcttagagaagatgattcatacaacttttattttgggagcttaataacttgagttactaggaacatgttatacaatagtggaatctaaactttcctaacgaatcaaatattagttacgtaccttatagtgttaattctgggagtgctaatagttggatccaaatctataataagttatacattatctgttgacattgaattaatggcacataaggaataaagagataattagaagggtaaaatagtattttgaccaactctcattatgaactaataattggagggaaaactatttatattgattatatcaatggactacaagtgaaaattttgtaaatataatttatattgtcaaagtgtgtaattccatatttatagtggggtaataatggaattcgtaaatcggattattctattgatgatatcgataataattaagtgtttattggagcttcaaatataggtccatagtccttgagtcacctctatacaacagtgtacatggaaagactctctttgatgaatgaattttgagtgagaattaatttctatggtaaataaaattttgagggaaaactattaatttgtaaaattattgttttgattaattatgccaattatgaatcgtataattaatagtatttaactatttagttttatttgataaaactatgttaattagttaaatataatatttttattaaataatattaaggagagaaatatattattttagagagaataatatttattttaatccttgtgaaatgagagattaataataattaatcaattattattttttggctgaataaataataaatcttgtttatgaaaaaattgagaaattaattttggaccttaaaatatggcccacacatgtaggcctaatccagacgtgtaggatgagatataaaggcccgggattatttggtttaattattttattagttaaaataatttaaattaaattaagctaattatctttgaattattaattaattaaattattggataattatttaattaaaaagataataattaaaataaaatatctaactgatatttattactgttgtttatatttgaattttgatcctaattcaaatcaaattagatatttactttactttaaaaataaaagattgaaagggtttatttataacactatatatagaatatataataacataaattaacaagcatgaaaatagaaactaagcaactgaaagtagagaaaataagattgatttttcactccctattctctctgtctttcacgtctacctatctctctctctctctct

SEQ ID NO: 72612 - DNA, 541 bp, Cannabis sativa
aaaaaaaaactagctgagtgaaatgtgccagagttggttcttcaacccaaggtttttttttcagtctaaaatcacgtcaatgaacagaataaaggaatgtttgatagagttggcagcgttccggtggtgtaacgacactagatgatgatgaccggtggtagtagcttgcagttggcgatggtaatattttttatgggtgatgggtgagttatgagtgactgccacagtcacagaaacaagagtgactgccaccaataagtaagtactctgttttctctcattgaaacagaggagaccatattgttatgagaaaaataaaaataggtttatccttttaatgagagaaaaggggttgttttatagctagccgtgatagagggtcaccattggttacctttcttaatgactcattgtcgaagtgattttgtgactcaactaattaacccaacatgttactattgttagacaaatgggtcaccattgttgacaggtgagtttaataaattctatttttttcaaaattctgtaatacaaattatgc

SEQ ID NO: 72613 - DNA, 1246 bp, Cannabis sativa
tctaggggtcttagacaaggtgatcctctttctccctatctgtttattctctgtgctgaaggcttttctgctcttcttagggcaaaccaagctgctggcttacttaatggtattgctatttctaggaatgcaccctctttatcacacttgttttttgctgatgatagtcttctcttctgtactgctagtcgttcttcttgtgctgctctccaaaatgtttttgatatctattctagggcttcgggtcaggtcattaatttttctaagtcttctattctcttttcccctaatacccagcttgatattcgtgctgtgttcttctcctcttttaatcttgaagatagaccttttatctgtaaatatttgggccttcctcaatgcttagctcgttctaagtatcactctcttgcctttttaaaagatcgggttaattctgttcttaggagttggtcttctaagtgtttttctcgagctggtaaggaggttttgttaaaggcggttattcaggctattccggcttatgctatgtcttgttttcgcttgcctgtcaaactttgtaaaggtattgaagctgtgatggccagattctggtggggatcatcagggacttctcacaaaatccattggaagtcttggaagtctttatgcaagtctaaatttttaggaggcttgggttttcgatctcttatccattttaaccaagctatgctggctaagcaagcctggcgaatttttaagaacccttcttctctccttgcttctgtccttaaggctagatatttccctcgtaacgcgtttcttgaggctaaacctggtcacagcccttcttttacttggagaagtattctctggggtagggacttgctgcagtcgggtcttttatggaaggtgggaaatggtagtcatattaggacgatcgaagatcattggatccctaataacagagtcaagtttttctcttccaaccacaggcctccttccccttttttatcctactttatttctgagaatggggattgggatgtttccaaacttactaactgtttttctgctcctctggttgatgatattcttagtgtccctcttctgggtgattttggagaggatgagcttgtctgggggcaggatagttctggggagtgtactgtcaagtcagcttatcatcttgctttctcttctcatgatattccttcttcttcttcttttgctgactctaaaaaaatttggtccaaactctggactttga

SEQ ID NO: 72614 - DNA, 915 bp, Cannabis sativa
ttattaggggagagatataggggggcgagtgcgaccctcatcggcctcgtgtctcatggatgtttaagaaatcatagataatatcttccatttctaacttgaagcaaaatagctttttttttttttccttctcttctataccatctccaatatgtaaatattatactaaagttggcacaaaaatcaataaatattatatttagcacaacatttgtaaccctactctaatatacaataatatatgacattttaagaggcaaagaaaaaagtaaaatattattaattattatcaataaattaaatatttaaaaattattaataataatattacaaattaaatatatgctttaaatacatcgttaatgattagtaacaaaagtataattaaaaaagtaaatatgtgtcaaatttagcataaagttatattgtgtgtcaaatttagcataaagttgtttagttgttgttgttgtgttgttgtcaggttgctgcacagttcagtgtcctaagtgattttcacttacactgtcatattgttgcacaccattgcttgagtagttacctaaaaggattgttattttatttttctgtgtagttgaatgtattcacaaccaataaatatcatgtgaaatcagttttctttgttaataactttatgtaaaataacaaacttttatcatccttgatttagagtggttggcaactttccttcagttggtatttcaattgtatttgagttgtttagggttgtagtctaattcctgcaatattatctgcactaattcaacataagtgtaatctcttgatattaattctccacttattcgtaattaacatagtgcttgatgtcattctaatgatcattgctctgtactaatacttgcagatgttccatatataccttgaaattttttatat

SEQ ID NO: 72615 - DNA, 897 bp, Cannabis sativa
tttaacggccaaaaaatttcaaggggcatgatttggtatatgtcaaagttcagggaaaaaaattgctaattagccagaatgacacataatgaataaaaatatttatatttacagacatttttcgtgactctactagcattattccttagcataatttatatatatataaaaaaaatcgttctattatataaatttctaaacttaaagcatctctaatggagatgtaaataagtgatggaaaactaaaatatagctcatttaagaaagattgtgctctaatagtgtgttaaaatgtgatgtaaatttggcacatagtaaattttgtgccaaatttgacacaacatttgctataatgtaaaatttacaccataataaatgtactagttttttattgggaaatttttattaatatacgtataatgaataaaaatatttatatttacaacatttcaaggggcatgatttggtatatgtaaaattaaagtcttttatgtaatttttattagtgtcttatgtgcagaagggctctcagctttgttgagacgatatgaaagaagaggttggcttcatggttgtaaagtagctaatggcgcgccaagaatttcccacatgcttttcgccgatgacagctatttatactgtaaagccactgaagatgaggcaaaccgagtgaaagaagccttgcacaagttcgaattagcatcgggtcagaaggtgaatttctcaaaatcttctattttctttagtagtaacacttctgaaagtctgagaaatcgcctttgtggcggcttgggtatggaaccagccttggaagggagcctttatttggggctacctagttccatgggaagaaacaagacagctgcattgaattacttaaaggagaaagtgaggaaa

SEQ ID NO: 72616 - DNA, 1682 bp, Cannabis sativa
acctaccatcagcctacaacatactattgggtcgaccagagttaatttgactaggggcaattagttcaattaagcacttatccctgatgtttcatacaccgacaggtgtaggagtattgcgaggtgaccaaatgctggcttgcaaatgctaccgcatagagctatagaatagaaaggacggtcaccagctaatagcagacgtgactgaagaaggtgagaagaaagatgaggatcttgatcctcagaatcaagacgaacgaaatatactgaaacaaattgaggaattggaagaagttgttctagatcctagaaatcccacaaagtgtgtattcattgggaagaacatggatgaataattaaaatagaaattaataagttttttgagggcaaaccaggatcaattcgcctggagccacgcagatatgatgagcctaagattatctgccaccacttgaatattgacccaaattaccaagccatgagacaaaagagacgacccttagattctgagagacaaggggcactcaagcaggaagtacataagttgttggttaacgacttcatacgcgaggcgttctatttcttgtggatatccaaccttgttctcgtcccaaaaccaaatggaacctggagaacttgtatcgacttttcagacttaaataaggcatgtgcaaaggattgctttccactactaaggatcgaccagttagtggatgcaactgctgggcacgagcttatgtcgtttatggatgcatattctggatataactagataaaaatgcatgtccctgatcaagaacatacaagtttcgtaaccaacatgggactttattgttataaagtcatgctgtttggtttgaaaaatgctagggcaacatatcagcgacttgtgaatgacatgtttgcgagacatatagaaagaaacatggaagtctacatcgatgacatgtttgcaaaatcgataaagagtggagatcacacaatagacctcgcagagtgctttgagatatttgtacaatatgaaacttaactcgaaaaagtgttcctttggattttcctcaggaaattttttgggattcatagttaacgcaaggggcattgaagcaaatcctgagaagatcaaggctttgataattatgacatcaccaactaaaccaaaggaagttcagaccttaacaggaagagtggcagcacttaacaaattcatttcaaagtcaattgataagtgtctaccacttttcaatgtattgcgaggcaataaaaaatttgagtggatagaagagtgtgaggagccctttaagagcataaaaaggcatttgtcaacacctctagttttggcaaaaccaataactggagaaactctactcctctacttgactatctcggacaatgcgattagtgcagcaatagtgcgagaagagagaaagcaccaaaaacatgtttactaagttagtaaaaggttactggaggcagaatcgaggtatctgccttatgcctaatccacgcatcttgcaagttatggccttacttccaggcacatccaattaaggtgttaactgattaacccctgagacatgttttatcaaaatgagatgcttctggaagatttataaaatggtcaattgaattgggacagtttgacataacttatcacccacgaacgtccatcaagggccaagcct

SEQ ID NO: 72617 - DNA, 829 bp, Cannabis sativa
  modified_base (431)..(432): a, c, t, g, unknown or other
ggtaaaataaattccaacaacatgaatatgaaaaaaaaaattagcctaaaaattttttttggatgtcgaaacatgttaagagtgtattaatacatcttttttaagtgggtgcattgtagaatcgccccaaattttattgggtgcaccctaaaatttggatgtaaaaatatactttaggaaaattctacaatgcacaccctcttaaaatggatatattgatgcacccctgtctgttttagcattcgaaataattttttagtcaaattttttcttttggtcatgtacgttataattattcaagatatcctgtaaaattttaagaaattcggaaaagtttagtacgcctaaaactacgttcaaacagtgtgttgcacgcgtgattattttattttatacgagtgtaaagcagactgtttgaacattattttctnnattgtaaattatttcgaattttttaaaattttgtaggatatcttaaatagatataacgtacatgaatatgaaaaaaatttagactaaaatattcttctagataccgaaacaagttaagggtgcatcagtacaacccttttaagggggtgcattgtagaattgccctatattatttatgatagtgtatattataattatttatacatttaataaataaatttattaatttcttatgttagaattattgatatatatacgaattatttattattttaatcaaaataattaattattctctatagacagtttacaattatttgagagtaaaattattgttttacctcttaatggatttttttggggttttttttttcatttttacatttcaaaacagttt

SEQ ID NO: 72618 - DNA, 1222 bp, Cannabis sativa
atcccttttgaaaaaacactcatttggcagttttgtggtttcgaggtgtattagcaattaatgaccgtcttttctacttctctttcaaattctacctgtaggattaattatcttcatgatctaatggagattaacctaggagtataaaataggaaaagaaccacctttgcattactctttctctttcagaaactctagaaattttttcaagcttttctgtcaaaaaaccattcccaaatttgctcaaaaccttgcatgccatctttatcattaacatttttcctacgagtttcatatgatttaattttcaacttcaaacattcggagggatcttcacaccgttcgttgattcgcagattgcaaagctgttcatcatcccacaaaccaactccaaatagtaagtgacttttcttctcattttcttacatgcttttgatgttgtgtttctggatatcctcttacttttccttctaacttttcagacttacttacacattctttatttgtcttcaacaaacttttctttccttcgtcgcccaacagcatggtatggaaaaactgaaatgcttggaaggcgatgttcataactgggcaagttagcgcgagactatgaccaaaaaatggcacgatgcgaagttggagaacactcgcctaactaaggatgccaagaaggtgaagaagaatcttgaggctaagcttgcagctgtcgagaaggaggcaaaggaaaagaccgaagaatgcgagaagctcaaaggggaacttgtggcaaccaaggtgactcttgatgggaaagaggtcgaaaccaaagaaccgttgttggcctccgccatttaccaagcttggatggcaaatctgaatatggatacaaatttcttggaagaatctgaggaggaaattcctgctttctacgagaagaccaaaaaggaggaagaagacgaggaggcagccaaagaagcagaactatccaagtctcctactatgtaggcttggtttttatttttattttatctaggttgatggccctaaggccaagacaatggtttgcccctgtggcactcactttttgtaaagaaaaatttgcaaggttggatggccaactttacttttattttatctttattaaatgctctgtatttctatatttgaacttaatatatatatatatatatatatgtttgcttgcatttttattcacgatttaaacaattatattttgatcaaa

SEQ ID NO: 72619 - DNA, 1051 bp, Cannabis sativa
aagtacattgaaagagttttgtttagggcataaaacctattagttttatttatagaaaagttaaaaaaaaaggaaaagattcgttgtaactttcttcttttgctatatgtacggtaccttactaatggtaagactcactcactaggtgatcatttgattttaagttaccattcttgatttcgtagtgtggtgtttcattagattttgatgaatataagttgaaatcatatgcatgagcttcactttctcaattcaatgaaatcccattctcccaaaattgcaatacagacaaaaccatgaattgtagcttaacatttcaagtaaatcccattttcccaaaagatgaaaacaaacgggtatttctttcctccactaaatttgcattattataaacaaaaccactaacaatacattcaattcaatcccattttcttagaagatataaaccaaagatatttctctgtctttcaatatattaaatcataatatattaaacatattattacaccttgttgagattctatccaataaaaatccaattcaataaaccaaaaaacaaaagttatcactttgaagatgagaaaaagagagtgaacataacaccaaaagacaaaccagcaacacaacaattgagaatagaacctagatacacaaacgacaattgagaatacaacaaaaattatggtttgaatacaaaatccattgcttccatgaaattggtataagcaaatatatattaagataaaacaacaagaaaggaaagaaacctatcaaaaacttgtgacaagtgaatgaaataaataccagggcaatgattggcatcaaaagctgtaaccgtgaatgaatcgattgccccaccgatcaatttccacgaacaaagaatgatcaagctgcaaaaagcacagaagaaattgaaattaaaagacgaaaaagagagggagagtagattaggaatgggaagaaggagaaaaccttgggaggagggctttagtgagagaggtagagtaaattgagaaggagaagtgagcggtgattccagtggagtggtctt

SEQ ID NO: 72620 - DNA, 1592 bp, Cannabis sativa
  modified_base (847)..(849): a, c, t, g, unknown or other
tggttttacatcaaactttgtttgcaatccctgttgagacgatcttacttatcactttattacttgtttgactacgtatacttgcgtacacaattctcacatcaagtttttggcaacgggattgcaaataaagttgttagcatcaacggcatgtggccttatacaggatctgacccttgtcaaattatgtagcaaatagtccctcatgctacgaccattagcctggtcttctacggctcctccattgttataattgttgtcggcgttggcgttgtcagccatatttacttcgtgttcaatctctattatagctttttccaatcttttccttcttctgttttgtctgcaagtcttctcaatttcaggatcaataggtaatttagcagtttctccttaacgtctcataaactagttgaacctgagaaaagagaaattttttaaaacaaatagaattagtactaaaattgaaaagaaaaatcaaattagaacaaaatttaatttttaataatataactaacaatctccggcaacggcaccaaaaacttatagtggtaatttgaaacactcaagtatacgcatcattttaacatgtaataatcacaaagagtgaggtcaatcccacgaggattgtagttaagtacgtttaaattaaattcttatttctatttgactaaataaaattttaaaaggaaatttaaatcagaaaaacagtgaaagtaagaagcaggaaatcagtaaagaaattaacaatgaataaaagttagggcttttgatttcaattgcatctattcattatggtttaatatgattctattcctattaccaatttctatgcaatagcaggttnnntaaggtaatttatagtcttctctataaatctcaattacatgtaaattttctactctcgtaataaattaaacatgtaataggcattaagcacgaaaaccctataagctatccaaaccatataggtactctcgtcctatatcgaaattcggttctatttcactatagcataatcgacactcgcttctcagatctcgcatcaaaatcataaacagttaattggtgatcacgcaattaaaagtaattaagtataaatgaaatagaatacataaaaactgagggaaaattaattcatattaaaactacaaatcaatatcaaacaatctccatctcgatcctaatgaattgtttagctactcatgtttattgtagcaaattcacacatattaatttaagaaaagagaagaaaatatagaagaaaagaatgctgaaaactctcttaaaaacgcctccagtattgagatccatctccaaaatttgtactctattgagtgcttctgatttccttctcaattactttctaattaagagtttctgagtttttttagctctaaaaacatcctaaaaacactaataataatgtgtttatataggctaacacggctacctaaaagatactaaaaggatttaaagtttaaacttaaacaagataaaaatcgcaactctatcattttgtctcgctatcttcgtatcttttttttttcataaattttctgctacgatgattgatagtattttagccataa

SEQ ID NO: 72621 - DNA, 889 bp, Cannabis sativa
ctcgggaactgcatgttgaatacactgaggtcgtagtgattcacaattggtggtaaattatgtctcaggagagtacaaggcctagggaggaaaacgatagcttatctaagcaagatacaggatctgctcgcacaattcaagcgttacaccctcaagaaaattccaagagaagaaaacacaactattgatgcactagcccggcttgggagcagcacaataatagatatggccaatctagtccctattaaattcttagaagaacctagcatcaattgtgtggaagaaaacgaaatgatagacacatcactaaactagatgacacccatagcagcctatctcaatactggagaacttccaaatgacagaaatgaagctcgaaagatgatgaggaaagctgtacggtacatcataatggaaggtgtaatgtatagaagaggattctccattccattacttagatgtgtaacaaaagaagaagccgcatggctcctgtccgaagtacatgatggattctacggtaaccacgcagcatggcaaagcctatcaaagaaaatactaaggcaatgataattctggccaaccatgatggaagattcaaaggcctatgtaaagaaatgttacaaatgtcagagatttttgaaaaataacccatgcaccagccaacgagctaactaagatgcagagtccttagccttttgctatttggggaatagacctgatcagacaattgccgaaacataagggcggggtacaatatgcagtggtcgcagttgattattttacaaagtggacagaagtcaagcatttggcaacaattacatctaaaaaagtattggactttgcgatgaacaatataatatgtccgttcggactcccgcacaaaatcgtc

SEQ ID NO: 72622 - DNA, 644 bp, Cannabis sativa
gaatttaatttagtcatcctttttatgacattccatttaatttagtatcagtaggaagaacatttaacttctaattaaagtggcaatgggacacaagaaatattcgaagcaaagaaaaagaaaaacacaattatgttacatagtgttttcatcgattgaaattaagagatatgcctaaaagtggataatttatagtttatagcgtatattctcttaacttgcgtaatgacttgtctttctaaaatcagttgtaagagctatttagagtctttagacaaaccatttgccaataaattatgtctttcagggtgcaattcctgatatgcttcagaatactaccaaggagtactattcaaaaattgttgcgattgtcaaagaagctgcagagacatgctactctaaaataaaaactaatcctttcattgattgtccacacaagccagaaggctcaatgtttgtgatggtaagtagcattaagtaatttactgtaactctactgttttagccactgaaattatcgttctgaagcacctaagttgtatctcaggtaaagcttaatgtttctttgttggctgacataaatgatgatttggagttctgtctcaagcttgcacaagaagaatcagtcatagttatgcctggta

SEQ ID NO: 72623 - DNA, 642 bp, Cannabis sativa
ttaaataataaaataacacaatatagcctaaaaatagaaaaaagaaacaaagaagtttcttctaataatagtctatttttttttagacaaaaaaatatatgtttttcacatattaaaatagttatttttattatttatatatgtataaaattctgaaataaattttttaatagaagagtaactaattgatattttatttacatcaaaagcaactaaataggttctttttttaaaactcaaaaaagcaaaaatttttggaaatgacattttttcagttttttctaattttggcaattgttttgaatttcggtatatatgctgacgtagcacaaccgtatttgtgcaaataattctcttaaaggtatttttaaaaataaaaatcaattttaggtataatattgtaaaagtcccatttatatatatagggcccaatatgttctcttttgcaaaggaggaaattagactctatacccttttcatattgtcctcctttatttttatcctcttttttaaagccaaccatttttacctctttttttatatactttaccaattttacccctgtcacctcaatataaactcgatataactcctttatgtcagggtattttaggtacaatacatataaaaagaggtatgttt

SEQ ID NO: 72624 - DNA, 813 bp, Cannabis sativa
agttctttgttgtgttagcccatgatgatgaatagttaatgagcttagcatctgtgtgtaaaataacacaattagtcaatgctattattttcttcggttatataaagtttgattatttttgtactcattatgattgtaaccgaaaggagctattaattagttggatattgtgtaatgagcttttacattgggctgggctttttttttttttttgatagaaagggtgcccactagaaagaaagaaactcaataaggtcacatgggtcatctccaatccagatagcgacttcatctaaccccaaagcccggtacgccagcttgtcagcaagagagttggcttcgcgattgacatgagagagccgagcagcagggaaaagagataaagtatccttgatttgacgaataagatctccaaaaaccgagatgtcttctttatgatgagacaatgcatcagtaatagctttgcaatccgtttctacctcatggaccagaaaatgttcatcgatgcaccaacgcagtaaagtgaggagagattttgcttctagagtggcaacagctcctcctccaatgtagggttgagccagggctgcaactagtagaccttcgttgtttctaataacgccaccgaaacccgctttccccttgaccttggagattgttgcgtccacgttgagcttgagaagtcccgcagctggaggcgaccaagatgaggagaccaaattatgactgggttggacggtaggtcctgaggccgtcagggaggaatggtaatcctccatgaaacaatgagccaagttgagaattgcatgagtt

SEQ ID NO: 72625 - DNA, 851 bp, Cannabis sativa
agagatagattaattttactactttcgtttcgtttgtacaaaataaacatttccttaactatttaggctgtcctgagtagcaaaccaagctccctcactgagaatgtaaaagcagccatttttgtttttgaatacacaaaatcttaccataggaatataacaaaaacattgcagttgtacaaataaaactataaattaaaaaaaattaagattcaaaaaaggacattccaaaacctcctttcttcatctatgttataaataatgttgggcaaattgtatcgtgattacaacaaacaatatattttgtcccaataaaagcactctctgccaccaagcaaaacaaaccatgggaaattaaaagagaaagaaaaaaaaaaaaaagaattacaaaaatatttggtaaagaatagtaaaaagacaagtgacaaacccaccttcaaaatgcattcacaccatatacaaaaatacacaatagaatagatcaaaacctcaaacccacaatttcttctccctctttttttcggaaagcaaaccatctaagcatggttggcgtctatggctgaacctgttcgggcctgtgagattcgattagcataaatagtcaccaacctcaattgtgtgctgttcagcccctccaagtacggtaagaaagctttcccgagcatgatatatatatccacaaggcagaaaacaacggtctgtaccgcatcaccaaaggtcaataatcagataactcaatcgcataaatcaaaatcaaaatgacggcagctaacaacacttgtctggaactagttctagcaagaaattgtcagcatttgagatatattattaacttatttaccttacgaaca

SEQ ID NO: 72626 - DNA, 861 bp, Cannabis sativa
  modified_base (26)..(32): a, c, t, g, unknown or other
agggtccaatctgtaacttttgcaannnnnnnggtccaaaatggtatttacccctcaaactacaccatatcgtaaggtttgggaaaaacaattcactgatcaacaaggggctctaaatcatatgttttatagtgacagtttgatgaagccctaatgtcagatacatacacatatgtagatcaataaaatcatgtcgacatgatatcttcattgtcacttcaattaaaatgcaaatgttaaaaaatgactcgattgagagaaggtatttgtttgatagaaaataaagaatgttctttatttaacattgcgactactcaaaatataatgtatatcttcaatattttacgatacaaattgaaataactaaagacataagtcttcactatcctactcctaccctattagatagatgtggaggcatacgtgtgtctttggttatttgaaaatataggtctatataaaattctaatattatatttgaaactcccatttcttctttcttctccatctttttctcaatgaaaaaatgccgccaccatcacccttaaagctcattttctccatacatgcaccattatttttccacatttttattttaattaacatcctgttctaaagtaaaggattaagatgttacaattgagtgaatgaaaaatttagtgaaatagtttgagaaaaattattgaaataagatattgaaataagaaatatatatatttatatatatatatatggggaaggttctaatacttatattaatgtgctgtttggaaaacaaaaatttgttttgaattttttttttaaaaaaatttaattttgaaaaacaaaaatgtgttttgtaacaatttttgttttttcaat

SEQ ID NO: 72627 - DNA, 1509 bp, Cannabis sativa
  modified_base (1055)..(1056): a, c, t, g, unknown or other
atataaatctccgtaatttataaattacgcttatttactcactagaaaatttaaattttatactaaaatagattagtaagatcataatcccactaattacctcattaacccatagtacaaatataaaccgtaattatttaccattaggcttattaggatattacaatcatcccctccttatagaaatttcttcctcgaaattcgtttaaataattcaagatattacccaatatttatggttctaactctcaaattattgtttctattgtgctgtttttctatagcactttctcaactagtagaattgtctcatttcatagtatttcctttttctagtccaaaacctggacaagatgtttttcccatataataaatatgtctgaagtttaacatcgtcacagttcagaatatgggtcaagtctgatgcatattttcttagcatggagacatgaaacacattatatggtccggacaacacaggagttaaggctagttaataggctacctggcttatttactccaataaacaagtatctaatatttttctcgtaccacacttattaaggtacctaaccagtggtacatttaattatcacttttagtcaaacactttgtcaggggaactgattattctaagataacctttatgaaatatgctcacagcatgtttctaatattccattattcttctcaggttacccacctttcaagaataaagaatcatactatttttttgttaatctccatggttctcaataaccttctttaattcttaacatcattgccaaagatatcaaccttggaatttcacaagattagactattccttcgtatgaattccatatcctcatttattgtataaattctctatactaatagacatcatatcaactcggtatgtccaattgttactattcagctgaaatcataagacccaacaatacataattcataattatgtctttccattccttatatgagacctcttaagttgacctactgacctagcttaataacaatttaaaagttgtgtaaatctttacttgttaacacannctttcctcttagaaatctctagaaagactatcgattttgcatcataatatgaatctttctagcgtactttgtcctcacacctacgctttctaggatgaatccccgaaagatttctcatcttgagattacccaagttaagtatgcttaactccaagataagctcatggtgggttattagaaaaaagatgctttttttgtcgttctaaattttatttcttgctttcattcttttgtaaaaagaaaaaaaaaatcaattcccatcactcccttcattaacctcttgcgattcctcatcgggtttgttcacttaaacttgaggaattcccatctcattgtcaacttaaatcatgttcatctcaacttattttaacttgtatcaatttcccttgaattgacacaacttttaatttattttttttccaatcatttacggttaaccaccattataaagta

SEQ ID NO: 72628 - DNA, 1595 bp, Cannabis sativa
  modified_base (32)..(57): a, c, t, g, unknown or other
cgtacgacatgtacgagaccaatgcccttttnnnnnnnnnnnnnnnnnnnnnnnnnnaagattttgaggatagttaccatgaacattctcatccgcatgttgtctcttcctttggttgtcaaaatttctttctaaggaattatgaccatttcgtctagggctaaacatttagacccgcgaacccgaaaaacccagccacctaccccgacccgctgccaaaaaaactgaaaaacattaaaacccatgtggtcgggtcgggttcaacccgaaattaccccacacggatttcgggttcggatattaaaaagtggttttatttagtcgggttctaacccgtgacccaaaaatacagcaaaaaaatattttttttattatattaaaaaattatatgatgacgtttactttattaatgtctttttccaagaaaaaaaaagctccacactaatactgtaatacactatattagagaggagagcttagagacagttacaatccctactattacgattaagtattgtcttctttggtagtagggaccacctacttttcttggaaacccaaaagccaatgtgataaatgaaacttggttgttgagccatttctcgggaacccaaaagccaatgtggtaaaaataaaaaaaaaatatggcacttttaaaaattaatattcatttgagctcagaaatgacattcgggctgagcccagtaacatccgaacccgaccacgcccaacccgcgcatacccgacccgaaacccgccatacccgaccacccgaaaatcgggttcgattatgcatttccaagacctgaaatctgaaaacccgaatatgactacccgaaaactcgaaaatccgacccgtgtgcagccctaatttcgtccacctcattggccatgaccatgacctcttccttggcttcggccacgaccatgacctcgtctttaattattatagtttgtggcatttatttctggaagtgccattgaaccaataggtcgtgattgatgattcttcattaatagtttattatttttctttgctacaaggagacatgtaataagttcagaatatttcttagaattacgcatcctatattgttgttgcaatgttaaatttgatgcatggaatgtagaatacgttttttccaacatttcctcttctgtgattttctacccacataattttagttgagaaacaattctgaacattgctgaattataatcattggcctttctaaagtcttgaaaaggtagaccgttccattcatcacgcgtggctggaagaacaacatccttttgatggtcgtatctttctttcagatctttccataatgcacttggatcttttatagtaagatattcatattttaaactttcatcaagatatcgacagaaaaaaattattgtctttgccttttcttgggatattatattatttatctccttaatgttatctgtaaggcccattgaatctagatgcatttcaacatcaataatccaagacatataatttttctcatgatatcaagtgcagcaaatttattcttcacaagatttgacatggtagcaactacaacagaatacaaaaaaaaaaaaaa

SEQ ID NO: 72629 - DNA, 702 bp, Cannabis sativa
ctatggtatgctagcttctttatctaagtttttctttcataaaaatctccattttctcgatctctcataggcatgggtaagggttgatattcctcgatttcatatttagatctgtgttttttcccaatcaccccaatctctatttttttttatttatttagatctgaataagtattctacaatatttaagtatttagaaatctagagtatacacaatgcctaaaatttatgtgagactgccatttatgtcagagagagaatgatttaggttattatatgtttagaaatctcagaaagtagaactttacggcctattagtgttttgtcggtcttatttgtaaagatgtaatggttaggtttttaattgttggcttgttacgtattagatacaagtccccaaagaatgtgaaccttcaacttataaccaacagtttcctttccttgttaaatcctcttttgttgaataaactactagcaaaaataaaagaggaacgatattaccgaatgaaaaattctaggttgagtcgtagactaggtcactctctttaagacgtttgcggcactacccaggagtgtgcaagcagttagaatttaccgctcgtccccaggataaaacaacccagtcgtactatactggagctccactgcactatagagcaccatcgaatacacccaaatatttttgatatcgcagatggaatt

SEQ ID NO: 72630 - DNA, 941 bp, Cannabis sativa
agcgtttatatattacaactatattttatttgggactcgaactcaggacctctgagacacacacccatttatggtcacttgagctagcctcaagtggttgtacctttacatgaactacacatagcgcttaattaaccaaaaaaaaacattaaattatttaatttttttccaaatgtaaaagtaaattaataatgaagaaaattccatgcaccgaaaataaaatgtacgttttgtttgagaattttgagaaatgaaactacaaaaatgataaagaatatttattattatggaatatatataggaatattagtataggctatatatgttgatgataatattgggggaccaatcgtatgacttattagtagaattaggtgctctgaaaaactaggaaggagttcgaagaagataatataataaaaaacaaatatggaacaaaataattgtagccatatgcatgaccaataataatatatctaaatgtatatatatgagttctattattctaatttatattaaattattaaaatatgaaaaataaaatgataagaattaattagtgcgtcacatactatattagtactctttttatcatatacataacacaattaataattaatgtttgtttactctatgtatcacaacaataataaaacttattttaagttttttatttctcacgagatgataattacagaaaagactaagtgtcagaagtgccaatttttaaaaagagatcgaagctctgatcttttgggtagttttttggatgtgaaaaatgagctatagctctccttttacaggtgaaggagaccaacaaaaatagagaaaaataagaataagatatttttgacctttgattatgatataacggtaaaaattagtttttagtggtgatgaccatttttcgaagcctggcgggtaactcagagcttattttc

SEQ ID NO: 72631 - DNA, 680 bp, Cannabis sativa
taaaaatagcctaacaaattccctaaactgaatctttactcgcccccgagtaaagctaagactcgaactaaaaaaaacaatgtagtaaataactaaactttcaaaagattgaactgctaccaccacctgcacaacttcaagcaatcaataaccagaatttcaactcgataactctaggaaccaacttggatgcacaattcagaagtaagcaattcatgcaaacacaaaacatcacatttgacattcatatcacaaccattctacacttttcgacattccgctaccccatgctcaataagtttagatgacatacctctctccactaatgttgacaactttttcttcggaatcaataggtctttttcggttataacaacatggcttaggtgcacgggtaggtaaaaagtcatttaagctacattataccataagcacaattataccaaacaagacccacacttttccattttttttctttttcatataccccaaagaagatagtaagagattgcaatttttttcctatgtgcctacctcattgttcacaattgattctcaagaagaaattgtcacatttcatttttctcttttttcaatagaggcacaacacataacaactattattttttttctcaatttcttactcccaaaattattcccccacttacaacatttcatcc

SEQ ID NO: 72632 - DNA, 956 bp, Cannabis sativa
  modified_base (872)..(878): a, c, t, g, unknown or other
aagggtaatacctttggctagtttatttcttagaatttttgttgttttttaatgttttagttttattgagagctagtgttataaagtgtgtgttaatttttaaatttttatattatttttatttggaagattgtcattctaatacaactgtattttttggtttggtgttgtaattttttcagtttcgctttgctctgaagacaactagttaataacgggaaggggggttttcaatgtgatgtggtgctatttgaagacgttataactttattgtctaaattttttgggacagttttgtcccatgtggctcgggatgagaattctgtagcgcatggtttggtaaagcatgcccttcggttagacgatgagatatcctggttcgagcaggtgctgccgccgattgttgtgttgtaccacaccacaaaaagatacggtcttgggacaacaaggagtaatatcagaaagtaaaagatttagagagtggcaggcacaaggagtataaaatgctctaggattcatttcaagtagcctagtttgtacacctttattcttttctctcatattagatccattatcatatcattgtcctcttatattatcaacatcaagtccaagaatattcaacgcatctaaaagttcattaagaaaaccaagccctgacgtgtcataaatttttatgaactctaaaaaatactcatcaacaaatattggactttctaaaacattcacaccttaaaatatgagatatttgttcatccttacttgcatctggagtacaatctagtatgactgaaaaatattttgtttctttaattctactaattatgaaactttttacctcagttgtcagtagtgttggaatttattttacnnnnnnnttagatctactcacaagtatgtagtttaacatcctaaatatgaactttctaaaacaataattaaacacatataaagtt

SEQ ID NO: 72633 - DNA, 873 bp, Cannabis sativa
tttaaaaacaaaaaacagaaaacaatatcaaacatgctcataatttcttactgattttaaaatactacatattttttttttttcaaaataagggtccaaaagtatgtttttatttatgaccgactaaatttcactgcggaccaatagatcattggagaaaaaccatagttaccttacccgtaacagttaatagtaattattttctaaaaagtcattatagtaatttaatttaattttgataaaatttaattaaataacattttaaatgcctttcaaactcaaatccaactacatatatatttattgttaaataatattaaataaacacattattgacatcaaaacattaaaaaaaatcacaataaccataaatttaataaagttttaaaaagtaaataaaaataagcttttttcatttttacacttcaaaacagtttttttttatatatatatttttacgaaattctacataaaaatccctattgcaacctaaattgtaacaaaaaatcgtatagaaacccctattacaactaccgctgcaaccactttagaaactcaaaccgtaaatttgaaaaaaaagttaaaaaaaaatagtatataagataattccccaataaaaattatggtatgataaatcaaatatataattaataaaacatattcgtatatgtatatattgagcaggtatggggtggtatatgctaatatcgtactcataagtcataactatacctggtatatgtgcattgtggtttactctttgccttagttatttttctcatttgaatagttattcctcttctagttcatatggaatgattatgaatacctataactatagattttatataataaatatgtagaatactaagt

SEQ ID NO: 72634 - DNA, 1117 bp, Cannabis sativa
  modified_base (446)..(448): a, c, t, g, unknown or other
agaagtatgtcaagaccgaccagggtcagaacaaccaagatttgctacctccaatggtagatggacacttgcaagtcattattggaggacctcacattgctgaagattcaggcaaagctcgggagaggtatgcccaaacagtgcaacacgaataagaagaagttatcttggccgtagaagaaaggaagcccaaagttctacgagcaggagagtcgaccacttcaacgatgaaaatgccgtcgaaattaaatttttgcacaacgaccaactggtcgtggaagtccagatagccagtaaaatggtggccagaaccatgatcgataatggagcttcttccaacattttgttcaagactgcttacgaaaagatgggactccaagtcaaagatctaacccctaggaaaaatccgtctacccctcactattggacaagctccgacgagcatnnntatcatggcacagttcctaatatttgatgttccttcagcttttaatgtaatgcttggccggccagccttgtatgacttaaaggttgtcacatcaatatttcactcgtttctgaagttcccaacaaagaatggggtagggtgtctgagaggaaaccagcaatctactcgggaacgttataaccttgcagtggccaaggctaagaaggaagtatccttcagccagagcacagacaagggaaaaaaatttcccaagtagggaatttcccaaggcgtagatgaaaatgtggatcctcgacttggggacccaagctgtaatgttggatcagtacaaaaattcgaagagatcgaaatcgatccagatatcccgacgagaaaactaaagatcggaaaaggtctgttgctcaaagtaaaatcaaaattgataaaatttttgagagcaaacctagacgttttttcctggtcacattcggatatggtcggaatcgatccttctatcatttcacatgttctgaatatcgatcctacctttcggccagttcaacaaaaacgaagagtgttggacaaagaatgagcagtagccttgaagtatgatgttgaaaagctgggcaacaacaacttcattattgaagctttttacccggcttgggtcacgaatcccgtactcgtgcc

SEQ ID NO: 72635 - DNA, 778 bp, Cannabis sativa
ccaactaataaattaacagcatttcaattccccgttaattttatttaatcgcacatgccacatctttttacacattttttttaaacggcatcgttttatacattcttcattaatatattatcttttttttttttttttatagaaagaatgtttaaattactgggacccactgtacattctttatactgaactatttttttttttttttttttacgaaactgtttatatcattcttttttctttatctgtacttaataattgtttaatttttttttttttttttgtcaataacaatataattatttactttttttgtgataaccatataattgcttactttttcttagataaaacatataataactttatctactctattagataattactttttttttaattataatatatcgtcatttatgaaattaaatactaaactaatagtttaatatataattattaatatactctcaattattattataatcatttagtttattggtaaataatttagtttcatatacaactattaaattttaaattttttaaagaaattactaaaaaaaaaaataattgatttaagaaacatatcaaaaaaattaataaattagctaaatataccaaccacctggtaaatattcataaataactatataataatcttacttaaattgtcaaattattattattgtatgaaaaaatttcaaaattagtttaatatagtatttaaaacctagtagcttaattaattttaaaattaaagttaactttgtttatt

SEQ ID NO: 72636 - DNA, 808 bp, Cannabis sativa
tatatgtgtaattaatcatatatttaatatatatctttatttttattctattctattttattaatgactttaatatataaaaataaaatctaaaaaaaaagattttatttttgtgccatatatatatatataagataagattttatttttgtaccatatataaaagataagatataattttttatatttatatataatagttcatacaaattcacaaatcaattttctactgtcatgcatcacatcatgtcttttgttatttagctatcatttatttcatttgtattttctataaattaataaaagatcggagtgcctcatatatgacaataattaccatatatggtagccattcatatactattcacttgtattaccaataaatttcatcatcaagaaacttctcctttggtcttagtgactttgtcttctattaattacaggagttccaagctagttgaaaatggaatgcaatcaataaatatgatgatgaactaccctctatgccctcaaagaagtaaaattataacttattataaaataagttagagtttacaagtaaaattatatcgtcttccaatcaaagaaagccttctaataaagtttacattatttaatatgaataacatattacacaattttaagcataaagacactattactttactagtaactagtaactagtaatgcatcttttgctttgtagcaaggataaaatcacctcaagaacaatctcttgatttattattttattaaagaaatatcttaataataaactgattattgatttaagtccttcagtacatgt

SEQ ID NO: 72637 - DNA, 1062 bp, Cannabis sativa
  modified_base (1016)..(1021): a, c, t, g, unknown or other
attttcttaacattctttttgggtattcaaaactcactataaatttgcatcaataatatttatttcaatgattatttagttatattcatagaaataaaatatttactttaagaaatatttatccaaatctataataatattagacatgatttttattgtcatcaaagaatataagaacatatatatccgctcttttattatattttagtcaattatatgatgaatattatgtttgcataattttctaaatatatgcaagattttatatagaatacataatcttccaaatatatgcataatttatatatattttttcttacattatatgcacaaattatataaaatatattataaataataagaagacataatatatataaagatgagaataaaaacatatacacatacataatatataaataataaagaaaaagaagagaaaagtaaaaaggtttataaaattatttcagtcagatgaatatatatataaatatatattttgtgtatcacgaccttgaaataatttaagaactttaacaaataatattacattggacagagactcgtgctgataacgtgttataaattattatgaataatataaaataaataaaaaaaaagaagaagaagatgaaaagagaaatagaactgaatgaaaatttttcaacacttcattttaataaggtgatcccttatttatacaaatatgtgagtcaaagattaaaaaactaaagagaggaataataattataattaatggcaataaatataaaagatttggatgaactgcacatccatatatataatatttcataacaactttaaaatatttaaagaaatatactaaaaacacaatacatcaaatgttctatactctttcattttaaagcttatttaaaatttactattcacgttctacatttataaaatattatttattgctctaaatatattttattatatttttggggttttaataattagttttgtatgaggatatgtgtatatattaatannnnnnatttaaaataaataaattatattaaaattataaaaaaaaaa

SEQ ID NO: 72638 - DNA, 816 bp, Cannabis sativa
tataagatgccttgtcccggtgagactttgaggtagcgaagaaggtgatgcaaagccgtcaaatgaggtgttcatggtgaggacataaactggctgagagtgttgacgacgaaagtgatatctagccgagacaaagttaagtacaggagacgtccaataacttgtctatagtgtgaagggttgtgaaggaggtcgccatcttgatcattgagacgttaacgaggatccattggtgctttggcaggtttactgtcagtataccccgtgtcttgaagtaattgaagtgtatacttgcattgagagagaaagagcttagagttggctcttgcaatcttaaaaccgagaaaatacttaagggggccgagagtcttaagtttgaatcttgcttgtagagcatcttgcaaatggtgtagaagctgtcagtttggtcttgcaagtattatatcgtcgacatagactaaaagtacaacaaaggtgttgtgtgttccttgagtaaaaagagtgtaatccgctagtgattgggtgaatccttcttacaaaagagcatcggtgagcttcttataccattgccttgaagatttacgaagaccatagatagatttgtgaagtttacatacaaggttggtgcctgtgatatttggaggaagggtgagaccttgcgggatttgcatgtaaacttcttcttccaaatctccattggggaaagcattattaatgtctacttgtaaagtatgccattgtttaatagtaacaatagccaataagagtttgaaagtaaccatctttgccacaggtgagaaagtatcaaagaagtcc

SEQ ID NO: 72639 - DNA, 762 bp, Cannabis sativa
aaggttgtgatattgtttggttttatagagaataagtttaacaaatgtatttatatgaagatcagtgggagtcgttatattttttttttattttttacgtggacaacattttacttgacagtactgatttttcattattaaatgagaccaaaaaaaattttgtctaccaattttgatattaaagatcttggagaggcatctttttgttttggggattgagatttatcgtgacaagaatcaaaaagttcttggcttatctcaagaagcttacattaatcgtgtcctcaaaaaggttcaacatgaatttgtgtaaggctggttctgttcctattctaaaaggggatatttactaagcaacaatgccctaagaacgacttggaaagagatacaatgaagaacatcccatatgcaagtagagtagggatttttatgtatgcttaagtttgcactagacctgacattacttttgtagtcaatgttcttgggagatataaatttgatcttgggcatgatcattgggttgcagccaagaaagtcatgagatatttgtaaagaataaatagttttatgcttgtgtacaagcatatcgacaatcttcgagttgttggttattcgtatttagattttggtggttgtgtagatgattcaaagtcaatttttagatgtattttcacttggactagtgtagctatatcttgaaaaagtattaaatagactttaatcacatcatatacaaaatatgatgagtttgttccgtgttat

SEQ ID NO: 72640 - DNA, 960 bp, Cannabis sativa
aatggtgtatgccaaggtagggaaggctggctcggagtttgcccaagagtttagggctgcttgctggcgccaactcaaggctctccttccccataattgggatttaatcaatcatgaggattgggaaggtatggttacaaggggtttgtctcataccctcttggtaagtttattgccttagtctgtatacatctttcatctcttttcttcttccccctcattttttatacatccttgtttgtgaatcttcacgcgtctttcatctctgatgcctctcagcggcgaactatagaaaggataaaataattggagagcgaggtccaaaactcactaggccaacgtgaggtcatagtcaagaaatggaatgatgctcaacaagaaattaatcacattaccaaagaaatcgggaggatgaagaagagtcttgaagatgctgagagggcaacaaaatctgaaactaatgaatgcgaggagctcaaaagagtgctcgaagggaaaaaggccgaaaccaaagatcgatgtaacaaagttggccttcgtactgtttatcgagctttgatggaaaatccaggcatagacacaagcttcttggagaaagatgaagtggaaattcttgcttattgcgagaagactaggaaggaggaggaagaggccgaggcggtagaagaagaggatccatccaagtctcttacaatgtaggcttggttatttatttatttattttttttgtaaggaaatggcccttaggccgagacaatggtttgccccttgtggcactttttatgttgtaaagacaaatttgccaggttggatggccaacatggtttttctctttatttaattcctcgtacttttgtgtttgaactttaatacataattgtttgcttgcattttattcacaatttaaacaatcatattttgatcatatacaatgtgctttaggaaatttccattgctcgt

SEQ ID NO: 72641 - DNA, 1099 bp, Cannabis sativa
aaaaaaaaaaaacataacaaagcaagtctttgaacccaaacaaagataaccaaaactaatacattaatcttttaatttgcaatcttgtcatcattatctcattttttgtcctgaaagcctcttcaatagataatttggtgaaacaacaacaacaaaataaattaaaagatgaaacagttatcaaacaacttatacacaacgttaaatcaacatagttatttaaagtctttagaaaaataactttgccaccttgtgagagaaatggacatcaataagcattagatttcaaagttgatatcatttgaaaaaaaaaaaattaaaaccaaatctaaaggagattgttgaataataaaactctaaatttgagttttatacctaacatttagatttgagcttcaccaacaaaaataaattaattgaaatgcagcagcaacaacaacaatagcaacaatataaataaaaaagatgatagcaactacaaaacaacttataaacaacaataaatcaacacatttatttaagatttgaagataaaattactaatttattaaactcagttctacaaaataaaaataataacaatattaggaagaagcttaacttaaagataaaaaaatagcacaatggaagatgtcctctttctttagactaataaagaatattaactatgttagacattttgtcaaacacatggaaggtatgcccttgtatacatataaacaaaaagcttaacttacaaaagaagataaatttcataaaatttgtgggtaaatgggtgaatttaacaataaagaatcacaccacaataatatttttataaaactttcaaatctaaatttttattgatgtaatttgaaaagaagattgagaaggagaaggagaagaagaacttacatatcagagcttgaaaaaatatcaatagctaattaatatgaatttagggccaagccactatcaaaaattctcgctaactacaacaaattcagcaagtccacctctattctgacatatcacataatcaattaaaaccacattacctctaccaataacccaatttattatctataattctatgattatagggctcgtttggaacgcc

SEQ ID NO: 72642 - DNA, 1070 bp, Cannabis sativa
gggcaattgcacctatgcctagtcctgaacactggcctgataaaggcaaaaatccaatccttccaccaccagaaactgttttacctagtaagcccaagaaatctagaaaaagagaagtggatgaacctccacctggtgcaactaaaatgagaagatttgggcagtccaacaactcctctaattgcaaacagcctggacatacaaagaaaacttgtaaggaaccattacaagatcaggttttttcatttcttaagcactgataattaaaatacattttccatgtttaagtttgtaatctgacaataacacttgtttatgaatcaggaacctccacaaaagaaaaagatgggtcgtcctcccaaaaaaatttagaccctgaaactgtaaagagaaacattaggagaatgaagcaaaaggcaagagaaacaagttcaagccaaccaccctctggactaaattagttgttgttctaaatctatattgtaatggacaatatgttttttgttgaattgttaagggttgttgttgtaaatgtttttttgtaatctgttgaattgtcaagggttttttgtatgatgcagcatgttttttttgttgaattgtgcaagggttcttgtacttatgcaactgttattagtggttgttttttattgaaatgtcaagggcagttcttgcacctaaacattaagctattgtaatttcatttaactatgttggtggcctattttatcttatgatatgcagtaaatttacttgtcatacttgttattaatgcataattatatcatcaattgggttagattagtattctttgctgataaaataagaaaaaatctgaaatgtggttttactaacacgttgaccaaaacagcaatgttccacacctcaattacatcaacaataacttagattcaatgaaagtaataccatgacaaataatttgattcagagaagacaatctcattacaaactatttgattcatagaaggcaatgtcattacaaactgtttcatacaaaaaaaagacaatgccattacaaacaatttgattcaaagaaggcaatgtcatta

SEQ ID NO: 72643 - DNA, 650 bp, Cannabis sativa
taatattaaaaaaaaatcaatgagcctataaaatttttaatctgacatatttattatacgtgactgtgactgatgctttttgtcttacttttttttttctcattttatatttgaactgattttttttttaaaaaataataataaatcaagaattattgtttttaactttaaaaggttaaatagttttatcttttaattgtaatacaaggtggcaaagaatagtaaaatataattaaataaattttatatacaattatatttttacatatttttttgttgttttgtttacaagttcagaaaaaaaaaataattataataacactaaagtttttgaggaagttgaaagaccaaagttcaaatactcttcctacttgatgacccaagtgcgtgcaaatcaatatatatgttggtagtattgatcatgaatctgcatcaggaaaaataacaatattaagagaggtatacatatatatatattccagccaaaaaaaataaatacataaaacgtggaaaaatttagggtttctatttttttctaaaattttcaacaaacccatttatagaaactaaaaatttctaaacattaagatttaaaatcatattaaaaaaaactctaaaatcatcatatctaaaagattaaagtaaattag

SEQ ID NO: 72644 - DNA, 1580 bp, Cannabis sativa
ctgaggtgtgaaagccatcttttgagtaagctagaacattgtaattaatagttatgatgaggatgcactaccatagaaaagggctaccttcagcatggtgtgatagaatccagttgtgggatccatttgaaaaaggcaaaaaataaaaatcttgtcaaggacaatgatcctattttcactacacacacttatgtctgacaagtgaattcaagtgtgtaagtctcctctactcaacaaaaaaaattatcctgattcacatcatttgtaacatgtctatttttcctcaacatctgttaagtatggttggttcttgagatactaattagttattctcttttaaaagcataacatgcatatttgtcatctcttatgaaatttgattagttgcttgctctagaataccttatatttattgtacacattttatttattttgggttttttcaaataataaaataaaataaaaaaagagggaggcgctagtgacttgtcttgtgggctaagtaattttgtgctttgtttggtaagtatcaacatttaatctaaattgatttattttgataagttccctttaaaagtttgataccatattcattgttttttgtctttgatcttgaaagattttcttaaatttcctatttttggaaagtatcatggttattttagtttccttttatttctttcggaaaaaaaagtggggcggtttgtttaatgttcgtgagctggtggtttttcaaatttgaaattggtttccttttttgctccactctcccatgattatttaaactaattttctttgtcatttattctcaccacccaccaaattccttttctttgtgttcttggttctttgttttctcattttttccttacaaaaattcatggctaagactaagaacctagggcatccaagcaagatggtggaatccgaacctgcccccttgaatgctccttctactgctccaatcttgctccctactgctgcaactgctttaaacccaagagattcatcgcttcctcagtgtgaatctcagactgtgaagcccaagccaaaacgaattccaaaacaagtggctaggaaatttgtgcgaccccacaaatttttcacttcatcgtcttcatcgtcaaaggagtcttttcctcgcgctactacatcgcctcctactgcatcagggaaggatgttgttgcatcaacttcaacaggcccctcctctcgcactcgtgcccatcaagcgtctctcaagaaggaacttcgcactaaacgaagccatgacagaccagctcctccatccaagaagctaaaattgaatccccccttggcttctttaagttctgaagaagaagaaccaatggaggtctcatctgatgattcctagaccaaatccgtgtctatcccttctgaaaaagatctttcagaagattttggagtctcctctgacagtgaggaaactgatctcaaacccgagccactattgaccaaatctgctctagcacctcctcgtgcatcttaagcagccaaagcctctgcagagttcatctcttggtaatatatctccttctcaagctgtcaattctagattt

SEQ ID NO: 72645 - DNA, 583 bp, Cannabis sativa
acattacttcggatcccaacatttatttctccatagtattaccatatacattatcatccattttcccgttaaacatacattcatctagcacatgacttgacttgaccccttatttactgaaactatatgcatatattcatcacattgaattaagttcttcgatcgcaatgattttttggtgtttgtgtattatttacggtgattggtgctgagcgtagagaatctatcgatcctgataaaagtacctcaaattacaggttcagatttgaagatttttttagctacttaaagctaacccatacatgattttcttccattttaaggaagcaaaacatattcaatgaaaaattaataaacattaaatgccttacgagtatgaaattgaatcatagttcaatacatctaagagagagtgatggagaatgatacttggtaacgaagaggcgacggcttcgagatttttgataagctctccaacgcagaggtgaataggtgactatatggcgatgcagcagagattatgttttgagagggggagaaatggttaaaaaaaagattgtgttggtgtatatatataaactag

SEQ ID NO: 72646 - DNA, 807 bp, Cannabis sativa
  modified_base (251)..(256): a, c, t, g, unknown or other
  modified_base (448)..(471): a, c, t, g, unknown or other
gatccacgtgtcccttcctgactggtccacgtatattgggcgattttaggagcaacaagggctattttgcatctcaacccttgttttagaccatgacctgcttgtttggtttgaggtaatgaaatagagtgaaatagaaagtaaacaacttttattctatttttcgaaaaataaaatttaataataatccgaattaaaggtattatgacaaaactgtttatattttttgtatctgttcgtgttaggaattnnnnnnaagttggttatattaaaaagaaaagttgtcaaaaattaagctcatggtcctatttttaccattttggaaaatacatggtccattttgtcatttaataaaacagaaggtccaatcgataacttttgcaaaatacatggtctaaaatggtatttactctagattttttctaaaccttattattattattattannnnnnnnnnnnnnnnnnnnnnnnttatttattatttattattatttagtaggtaagtactattttgaattatatgttctacaaaagttatcggttagatttcatgttttgttaaatgacgtattagaccatgtatttatcaaaatggtacaaattagtactctgagctcatttttcgtcaaaataaaacttaataataatattatttagaagtattaatactgattacattttctgcatctattcatgctaaaaattattttcaaatttattatattaaaaaacaaactgtaaaaaattgagctcaagtactattttgtagggctatacaaaaaaaaaaaaattgtaaaccgtccaaac

SEQ ID NO: 72647 - DNA, 770 bp, Cannabis sativa
ggagaaaggttaatcaaatcaacttcagttcccatagcctccccccaaaaggacttaagtagcttggcatgggaaatcatacacctaatcatttcttcgattgttttgttcattctttctagcacaccattatgttgaggagtttttggaactgacttctcaagcttgattccatggagtctacaatagtattcaaatggatttctgtacttaccaccattatttgttcgaacacacttcaactttcttccagtttctctttcaattttggcatgaagttctttgaaagcatcgagcacctggactttagatttcaaggcataaacctaaacttttctagaatggtcatcaataaaagtaacaaaataaaatgcacatctaaaagttctagtttgcatagtacagacatcagtgtgaaccagatcaataacattagatcttttagatggtggatgcatacgtatgaaaagagctctatgtgttttccagctaagcaatgatcacaagttttaagaggtgtaccttgcgattttggtaagaatttctttctagcaagagtttgaagtcctttctcgctgatatgactgagcctctggtgccaaagatcaatgtttggatctttttgaactgcattaatctctcatttgtgtagcttagcttccatgacataaagagtattcactttctctcctttcgttactacaagagaaccattggtgagcttccatttactttcaccaaaccagtttatgaacccctcatcatcaagt

SEQ ID NO: 72648 - DNA, 1381 bp, Cannabis sativa
atactcagagatatcattgtaagaactctaagagaagaatcacttcattctttgttcttaagtcaatacaaatcaaggggagtaggctattaccgaacttctcggagccgaacctctctaaaaactatatgtctttatttattttactatattacatctatattatatcacttgttgcttacaattaagactcattgtcattggctaaaagcaaggtcaatatttttgtactttcattgagagccagaatcacaaaatcgctctttacttcaaatttaatcataaacacgatggtggtacagattcgtagaggcgtggtcgatccaacaaatctagcggcagtggatcccgcactgcgaaatccaagaaatgcaggggttccaccagccacaaatcctgaacaactgccaaccgtaggttagggtgtgacgactcctttgagtggaatcgtgcctggtgtgcaagagactggaaatactagttcagcaaccaatcagggtattcccagtactagtgttccgctagcaacaaatgtttgaacaactgttggagatgacaccgagatccagaacctccatgctgctcttggactcatgcaaggtcatactaataccttgcatcatgaccaggaggagctccgtgctgcagtgaaccttgcatttgaagagcaaaggcgtctgtttgctaaatggagagataaagaggtggaaatgttgacggctcagcaagcggccattgacgaccaaaaaagacaggccaccatgctgatacaaagagcctaccaggctactaatcagcaacctacaaccatcatcccgttgggcgagtcagacgaagatccaactgtgaacgcttctcaaatcctgaacggtcagccgcccaatccccgatcacaggtttcgcctatgggccaagcggtaggcggatagaccttatctagtaattctttaagagaggtcatacctaataactccgcccaggttaatggttctagccaagtgatcggtcaaaccaaccagtcactgagacaacctggtgtatctatatttaatagattgggaatagctcatgatctcagggatgatctgaacagaaggagagggctagacaagcagtatgtcgcaccagccattcaaccctgggcccgtgttcaaaatcctgctcaaagagatcctgacgtgattttggtcagccaagagactgaacaagttaatccatccgtgcaggcacaattggatgaactaaaaaatatgttccaaggactatcctgtcaaaagaataatgacctcaagttggaccgagcacgtggatcccctttctccccagagatcaatgtcctagagttgcctcacaagttcaagatgccgacttggaagatgta

SEQ ID NO: 72649 - DNA, 1401 bp, Cannabis sativa
atttctcaggtgaagtcgccagaatttatggtggttctctttctggttgaattttcatttcgcttgcattggattgatgcgtggttgcgcgatagttgcccaggaagcatggatcttgggttgaaggtgtgtgtaagtgatatttgtgtaattttttttttatttgggttgtatatttgtttatttagccaactagaagtatttttgtaatattgttatttttttttttttgcttaaaactagaaaaagccctaaaaaatgagcattgctactggccaccaatggtgcccaacacctttcataggtggcgctttatgattagttagcgatattgtctaaaagttattttcttaagttatatggaacttgagatacttaattacaccaataacagtatgacaccaaagaaggtgctaagcaccaatgatattttttagaaattctcaaaaaaaaaaatagcatcctatgtcgacagtccattaaatagacccactactgaaagcccgtgcattattggagttggcctaaggtattgcctcctaaagtgttgctaaaaaagatatatttagacatatgttttacaatatgtataatatagtttgtaagtactcgttaaataatgtacatatttacacgaaatgtagctcttgtgaattgaatatcaatattgcagatgagacgtagcaagaaaaataaatatatcgaagttgagtagtctcgagatatagcagtcgacctgggaaagatccctagccctgcgctcacgttaactttgggaactccaaaataggtaggggtgttcgcagtgcagatggttcgacctttttttcaaaccaaaccgcataagcagtttttgtaatttcttaaaccgtaactacaccgcaagatcttaaaatcgcaaaaatcacactgcgaaaatgcgatgtggtgtggtgcgatatgaacaatttacattatcaccattattgaacattataatacaaatttaaaaatcaatctataaagttttaacaatacaaaaaaatcttatttaagttttaatatcataacatatatactaatcatcaagtcaatgtattgaattgtcttcaaaaaataatgtaatatatattatattttcttcttatataaaaaaaagaataaaaatcatattgtaagaactggtaactgtaatatatagtgtggtgcggtttgaatcgtaattattcaattcaaaattgcaaaccaaaccgcactgaacggtttggaaaaaatacaaactgccactactacaaaaatggttttttccgacatttttaaacaatcgtttaaagtatcctcatcggtttctataaccgtcgtctatacgaccgtcgcaaaacgggcaaaataggtaacagttatgttgaccgaggttttcgg

SEQ ID NO: 72650 - DNA, 1013 bp, Cannabis sativa
gtgaggtggaaggagaagacagcttctgggatatggtcaaaactggaaagtctctacatgacaaagtctttagcaaatagactgttcttgaagcagaaattgtactctttcaagatgttgactgggaaaaatgttgaagatcatcttgatgatttcaacaagatcattcttgatctcgaaaacattggaataaaggtagaagatgaagaccaagctattatagttttgaactctcttcctacagaaacctatgaacactttgtggatactatgatgtatggcaaggagtcattgactctagaagaggttcaaaatgctctaatgtctaaagaattaaagaagaagtcagagcagaaggttgatagcaatggtgatggactgtttgttcgaggaaagaatttcaagaagggaaacaaagaacacacagggaagaatcaaggaaaatcagactcaaaatttaaaagaaaatgctttgtctgcaacaaaaccacacacctaaggaaagactgccctgttcttaagaattataaccagaaacagtcatctggtgatgttgatttagtttctgattgtgatagtgatggatatggtagtgcaggggtgttggtagtgtctaaggaaagttcaagaactgactgggtactcgattctgggtgttcttttcacatctgcccagaacagtctcagttcagtaattacaaacagatcaatggtggtatggtcaggcttggtgacaacagatcatgccccataactggtataggcactgtcaaattgcaattgaaaggtggaggagttgcagagctaaagcatgtcagacatgttccagaaataaaaaggaacttaatctcagtagctatgttggatcaagaaggacattctgtgaaaattgagaatggcataatgaagattatcaaagggtcaatgctagtaatgaagggttcaaaagaaaatggcatttatgttttacttgggagtaccttggtaaatcaagcaaatgtagcagaagatga

SEQ ID NO: 72651 - DNA, 1053 bp, Cannabis sativa
tggaaagattgaagaaaaggagagaagaatctgtaacttttatatttgtgggattaaaatgaaatttattacaaacaagaagatgcattccacatttccagtcgtgggaagcacctctaagaaaactaaaatatatatttgtattttggacttgaaacaaaattaagaaaaaaaaagaaggtgaaattaattatattatttgcatgactaaactatactaaggtggcacgctagagtatacagtaattacaagtataataagtcatgattgttgatcaagttcttttaaaaaaaaatgctagccaaaattggtaggttagaaaatatttttttgtaaaataaaataataacaattacgtatattagataataaggggcagcaaagtcaactgaatattttcaatttattttaataaacaccatttattttatttcaatttattttaataaagtcagattagctggctggcttatacgtatattaattattgtttatcattaataaaaaagaggtgtattaattagcacgtattacagttttgataaggaatttaatattcagactataatatatgaattttaatgaattgccaacttctacctattttttttaattttaacgtcgatgtgtatttatacttatattatataatgcatatatacaatatagaacatggacctaatagttttgaataggtcctaaccatttccaatagtaacacctggtgtggaatctatattaatttagtgtaaaattttttattttttggcccaataattttaataatgtacactaaatatcctactaatacatatcttttacttaaaagatctcatattttatactatttacattaatagcttaaaataattaatttgtgatataattatattatggatactagtaaaaatttaaaattttaaaataatttagtaaaataaaatatttattaaatcaattaaaacttacacatttttgtaaaaaagaaggaagtttaaaaaaataatacctacataatttaattttccaaattattatggtgttcccacata

SEQ ID NO: 72652 - DNA, 1282 bp, Cannabis sativa
ggcataaaacccaacagattgtacatatcttgacggtcttcgttaaacaacctggcgctctgacaccaaaattttaacgtcatattgcctagggaagctacagttttttttctacttactatgcatacctttgctaatcaaaagatttctaaaaattgtgtcaaatttaaacttctattattatatatatccatacaaaaagtcgggatttcgtctttaaaattacattcatatctaaaatatactttataaacatgttgcacatcgactacaaaagtatggcccaagtcatcacaagattgaaatttctaggtctaatcatcttgacatgtacaatcacccctaagctctggactcactgatgttcagccttagcctttcccttacctacacatgtaaacaatatttgtgagtcgacagactcagtaagaaaagtatataaaacataacatattaccgatttgtatttaggcacccatacacctgtctacaagacttagcagatgatcaataatgttcttaatagaagtacgacatttatacaacaagcactaaatacttgtcatatactagtgttggtagggatgaatcatacccagagtactactgagtgttgtatcacatgcattatgtacttaaccgtaccagtgttggtaacactaaattgtaccctttgaacatcatatattgtactaatacattcagtaccgctattgtactagtgttggtagtatatgaatcaaatacacaacatgcaatttacatacatacacatatacatgtatacatggtttataattatcttacctcgtttctaaattcaagtgtgctaatcgacctgaattgaaaatcacgcgttgaacggagaccctatgtcacagtcacataaattgggtaaacaactagccaaaacctttttggggacctaaactcaaaactagaagtattcttatcgataaatagcatgacaaagccctatatattaagcaaataaaaaaaaatagacattataggaaaatttcctgaaaaatagcaagccgtttccgtaaaaatggaaagctgtttttttgggtcactgtcagtaaaaacagtagaccgttttttgctacagaaaaacaacaaacctcctaatcaactcaaaacaagctcaaatcttcaaaaactctccaaaatacttttaaataccataataaaccattttcaagtgataaaactagatataacacaaaatttcataatccaccattgttgagctaattttgagttgctcaactcagcaaat

SEQ ID NO: 72653 - DNA, 809 bp, Cannabis sativa
tcttatctctttgacatacttttttactgttttaatcttgtctctgtgatataattttgagtattttagtcttgtctgtgttatgacatagttttaagtattttttagtcttgtctatgtgacataattttgtttcgttattggtttttctttgttcttcaatagctcaccattagagcaactccaaccataaacactataattgtgttggtttaccacaaaagtaaatttagcattatattaatatatttctattccaatcatcgatactaaaagttacacaaaattattttgttaattaaatataatatttttgtattatattattaaaaatggtaataaatatatatatttgaaagctatattaatatatgtgaaagaaaaaagtaattaataaataaaaattaagttttagtgtgatctatagtgcttcaccgaatttgatggagttttagagttaggttggaatgcatttagtgcaaaatcttcacaaatttaacgttttagagtcccacaggagatgaccttacattgatgttagtggttgggaataataagtctattgcaactgaagggattgttagtagtgcagtttcgtactttacataatagttgagtgctcaagctataaggttgaacctactgcaatttatttctactgatgtatcatttgagcggtagatgaaacataatatagatagtcttaaggataattgtgatggtgaaatcttcttcatctgattttattttaatttttttgtcaaacgatctaggaattagacgaattattatttggtttgtttttctaa

SEQ ID NO: 72654 - DNA, 2604 bp, Cannabis sativa
ttgcggcgtaaatacctaagtttatctattggttgcagtttaatatctaagttaaaattttggcggtaaaaataccttctgttacagttttggaagttccgtaagtaccttgccattttctggcacgctgagtgacagatggcaagacacatttaaaataatgccacatcattttattaactatacacgtgtgaaccattttattcaaaaacaaatttaaattaaactaacaaatatatttgaaaataaaaaattaatacaattaatataaatctatgtacctaaaatctgaattgcaaaatcaatacattaattgaaacaaaaactaacattaaaatctaaattgtaaaacctggaaacaaaaactcaaaaacaaaaatgttaaattctatgttttatattaaatctagtaatactgcaaaggaaaactaaatagacgtttctttcaaacaaaaactcaaaaacaccattaaaaaaaaaaatcttagaaacacaatggagatggacaaattctttggggagaagactagcaattccatcttcttcaaagaagaccatcgttcgaggttctctatctccgacctctccatcgattgattgcatcttcttcaacgtctttgagtgaggagcaaactaagatttcgagtgaaattttttggattttgatattttttaggggggtttgctattggttttggagatttttctggttttgcacaatcttgttcaaaagattacaaaatcaaaccaaaacccaaaaatcaaattaaaacctagggaagcaattttttaacccagaataaaaacttatatatatgtattaataggaaagatggattaataacaatgataaaaactcaaacccaggaaagatcagacaaaggaaagaaacaccaaatagcgcacaaatttaaaccttgaatgtactgcaacacttgaaccttcgacctgggttcttcactgtctttgaggtgcgaaccacaacttctcatggtggtttgtaatcgaatactcatcgccccattcgtttctcaaacataactgttaaatcccagcttcctcccttaattgatggccatggtcggagaagatggaacctcgaacgatactcgtggtcggcgaagatggaacttgtattggtgttcgttgtcgattgatgggttcccgtggtcggagaagaaggttgtgttactttctctctccgactctattgcctcaagatttgggaatttattttataaataatttagttttttctttcagttttaatttttgttaaatcttattagaaaaaaaataattgttaacttttttttatttatttcggatttaattgatgtggcaaattagtattgatgatgtgtcattattttaaatgacgtgtcattattttaaatgacgtgtcttgccatcagtcacttagtgtgtcagaaaacggcaaggtacttacggaacttctaaaactgtaacagaaggtatttttaccgccaaaattttaacttaggtattaaactgcaaccgactgataaacttaggtatttataccgcaaattactcataaaaaaatgatatttttaaaaattaaatttcatttcaacccagaaattaaacatttgggctcagcccaataggacccgaacccgactatgccaaacccgaagagcctgacccaatacccgacacatccgaacacccaaaaaccgggttcggttgtgcatttccaagacccgaaccccgaaaacccaaacctgaaaatctgaaaatctgaaaacccgacacgtgtgcagccctaacgccaaggagcaattgcagattgcctattgatcctaaaattgagaacacttacaaacaaaatagatgaagaaaaagattggaaaagctgcaatagaaattgaacacgaagtagatttggttattcatgggaaggatcgtatgccatcacaaaggcactacaatctggatcgtacaagttggcatgctatggccccatcttggatctgataccagtaccaaggtatttgaacaaaaagcatctatgaagatattaccattaaaatcatactattcttcaacaatagtccacttcgatctataggaagtagatgagaagtcacccattgattcgaagagacccaatacaatctctttctatcgatcaatggaaacgataattaaattgacggtccttattctgttagtcgaacatggcataaatatagtagatatttaggctatttgaataaacaaggcctgtgtagctgcatcatttatgttttttcaatttcgccaaaagcctgctaattgtcctctgaccttatgtaattacatctgattgttaatacataatgaataaagcatttgatttaacacttttttggtacttcattatttaactaatcgttttctcctcacaaccagtttggatatgtgtttgaatttaatgccagttatctctttagtgagtcttaacactgtcaaattatgaatctttggacaagttgttggaatatgtttcactaggatctagatttactaccatgtatattatttaacatcctaaatgtgaatatctaaaacaatgtaaaataaacacatataaagttt

SEQ ID NO: 72655 - DNA, 709 bp, Cannabis sativa
agtgtttaaataattagatttataaaaatatctatgttatattaaacgtggctataaaagagaaaatgttgttcttttttcttttagaaaaaaaaatcaaatttaattaactacacatatctcttttatcttttatcttatattaaatgtgtctatttttttatttttttaactttgctatttaaatttaaactcattgcacatatctaaaaaatattttctattatcattttttttacccaatctaaatattttttaaaaattatatattcattattgtgatatttaaaaaaatatctttttattgttattttttttagaaaacatgtatgatatttataaaaaataaataaaagtattacaattaagttaaaattataattaattaataaattttattattatatatatattttttttataaatagtacttaaattaaattgttttaataaaaaatattattgattattcaataatataaaagaagaaaaactaattatacaaataaaaatacatgtaaccaaaataaaaattaagaatgtaattaagtatataatattaacttagtatatatctcttatattaaatgtgactatctaacataaattgttgatttaacgatttttgtttatgtttttgttaaagttaacggttaaaactaatacggttgaatcaattaattactttttttttgacaataataagttt

SEQ ID NO: 72656 - DNA, 891 bp, Cannabis sativa
  modified_base (611)..(611): a, c, t, g, unknown or other
ttaattaaaataatgtatacaaaattgtaaaatgcccttattttaaattggtgcgtgtgttacatggtatttatagtattgtactgttctgggaagtttcagcaggtttggagaagatttgtatggtttttggggtgaaaaccaagtttcccgtttatgccaactgagaaaccggttaaccagttttactgctgctgtaaaactagtcaaccaatttttccaacaagggaaaattctggttttagccttaaaactagtttttgctcggggtgtttttcagaactttgattagggtaatttagcaatattttaattattcaaatccagtgggagttagacgtccgggtatggagattaggctttgattccagagtttggataagttgtttatcgaattttgttgttgtgatataggacccgggatcgtcgggcgtaattccactcaggtcagcccgtagacttgatttctggattgagatgagaaaagtgttatgcatcacgtacggttaagtgattaacaattgtgtggttatagtctcaattatgatcgagaacctgaatatatgtttgctaatcctcggttatgaccgagggttggaaacggtcattancgttatgagtaattactcctgaaatcgcggataggtttcttacttatcattcgctgtattgggcaacgatagtgacatatatagctcgtgggtaacgagtggtaagggtactttattaagtaccaagattgtgtgatacgatgttgtgtaattgtttaagaatgttaatatgtgttgtgattgaatgaatgctatgttgtttatagaattattcacttttcttgctgagtctctgtgactcacgggtgctaaatgattcaggtaaagggaaggctaaggt

SEQ ID NO: 72657 - DNA, 1875 bp, Cannabis sativa
tggattaaattgttaaattttattgttttataaaaatttcattaaaattttatttataaggctaattagattaaagaagagtatacatcattccaaaaagcttttcttagttgccgatgaagtcacacaacaccacttgctgcaaatcttctccaaatatcgtcatctaggtacgaggtgctatgagtccacgtggtacccaaattgggattatctcatttttatccttgactctcagaaattcttcaactatctatttaagtgacttggggattagtgccatgatctctggtgtgaataatagatctgcttgatcaccactgccttttagacaaggcatgggactttttctcttcgacacatcacgtcttgatggtggttgagctagtggaccctatacaaaataccatataatatatcaaatttgatcctaattctatccaatttttggcagtataacagctgtgattgaacgtctctcaaaattttaaacatgcctaataacaaacaaaatagataaaaccattgattatccacccattcgaccacaatacatgtattcgcagaacttacttcactttggttgaatatttaaaatgttaaaactccactaattattgataattaattgataacaaaagttacctcaggtgttaaaattaggtatttaggccaaggaaggaacatgtttgctactttcttaacgtatcttcacccctcaattgagattgggatttcaacatcctcttatagaatttttgaaatgcgaaccatagggcttagtatgaactatgatttgaccctcatgtgcgtacagataagcttgggccactatgttgccaatattgtttgagcagagaaatactggctgattagctgccctctgttcaacaaaattgtacatgacaggtggcttatttagggaaacaaactcctgagcataattttatggaccctcattctcctaagcatattgttgtggaacatacacctaatgagttgtccttcttcctcactcttatcctcattctggtcttgttcaacaacatttttcttctatttaagggatttgattttggcttttaatttctcaatctccttctatttctgagccacagcatcagaaacttctcttttctcctgccaaacagtttagatgccttggcaaggaacctgcaaattaataaataaagttagatataatttatattctataactaatgaaataacatttgtcaagtactagcataccaagcagccttaacatgtccaagatgctttagtgtcccgagcgcatgtgttagaatgttattttggcaatggacctaaacttgtccctgactaacttgctcctctagttgagcctaatacatatattcaagcaattagtatatgatttatacatactaacttattattacttgatcaacgattaatatatacttactatcttatcagcaattttcttgtcataattagtgacaagtttcgtttacttggttcgagatttaatccaaacacgattgcgtgggggatcctcaacctcaaggtcatttttcttcattattttataaaaattaaatgagtacttatattttgatgcacattattagaaattcattatatcaattacttaccacatcttcccttacgttcaccattgcactctgactttgatgtctaaattggatttttgctgaacgttccctttgtacttaaaattcctacaatgcaaaaaaaaatgttagctaccaatacttgtatttaaaagtttatcttagtacaaatataattagtacatgaaattcaggagttagtcgactttgaaaaaatttcaaccaatcctttgtcaattttaggatgttttttagggac

SEQ ID NO: 72658 - DNA, 1450 bp, Cannabis sativa
agtttaggatttattatttagggttttgggtttaggggtctgcttcaaattcatgtttcagttctaattttgggtcacgcggtacgtgttcaggtccaggtctgggtcctagatccaaacaccaactatgggttgggtccaagccctaagtccagatctggatctcagtcttgagtcctagttcggttctagtttgtgtctctggtctcaatttgggtcataagtttaggtctggtggagagtcgggtctcgggtccctgtcccggttccatggcccaagtctcggtctcagttctggggctctggtcccagtttcgattcccaatccatgctgtgatgaaacccgacaccaaatatggcagtctctaagaattattaaattttggatgtggaaccgtgaccaattgcttagttatgcatgaaccttggtatgaaggaagatgccacaaacggtgatgtcaatccatttgataagttaggttgaacaccataaggaatactccttaataagttgaatagttctttcaagaactcgagaagaaaaaaacctctcaaattttttttcataacaatcttatttttcaaagtgtttataattctttatgtagccaacttacaaccaagaaaaaaggaaactaaaaacaatgacaatttctaaataaaacaaagacaaaataaaggaaacaaaataaaaaaggaatgttgagaaaagtttccaaaatccaaaagcaatgatcataaaaacgtgatcaacccaaaaactcctaaattgagtctaaattgagtctaatttaatgagaagcatacatttatgttctccttcagtgttgaccacggtctcctcttattttaaaattctgtggactaggatgttaagttcctctttgaatcttttggctcgcgcccttatcactggaccaactggaacttgacttgtatctttagctttagtgtcctcatcattcatattatttggtatcagagcttaggatcgtgtgatttggcctatctttcttttgtgtttttctattcatttcatgttttataatcatgtttaactttgtgctctatattcatgtcaattcgtgtttcaaattctttgtttctctttgtgaaatccgaaactgttagaagcatcaattgattttgataattctcttgtatcaaaatcgtgtctttattgtcatcagtttcccttatttttattctccttaaaaatccaaaattttaaaaaaaattcaaaattacaaattttagagccacaatttttttgttgatttcttgttttcaaatttttctttgtcattagtttcccttttttttattgaaattcaaaattcattgcctaaggcccaatttgatattgctgaattatttgttcccttgtttaactagtttccctaattgtgtcacaaatctatttccttatttttgtttctcattggtttcc

SEQ ID NO: 72659 - DNA, 881 bp, Cannabis sativa
atgcctcaaatacgtcagtggtatgctagtcccattgcaagttttaaccattttgcactaaggtactctcagaaactaaaaccctagttggatatgtcaacctgggcgtcgagtgaaaccctaggtgcccaagttggcttctaggttgtaggttcatgtaatttcagctctcgggccttggattaagttgctccatgtcttcatagtataaaatactgaaagatagtgagttggattcaagttattgaagtttgaaattctatccggagatctcgaagtcaacctaggtacagggctagggtctcctctcaggttgactgctatgagtactcgagtctactcaattcagtgacatcatcctttatgccacatgtcaaatattgatgtttacgtcacgataaattttttttagattaataataatgtacatgattataaaaaaaaattaaattaaaaattttttaagccgaaattgaaaaggaccaaaattatatatgtaatatattgttatattatatatttggaagcaaattaaatctatatataatatatgatataaatagtctatattcaataaatgcacgcaatagttttgtttaaattgaattttcaataaaattaatattcaaatatatttaatattggtcaactcaacgttagttaatactaatactatacatatttaacataattttcaaataaataataattatgagatggttaaattgtatatgtatatatttttttttaaagagattaatgagtagtgcctactatccttgaatgttcaacgtgtaatattatatattagtgtaattaaattttgagtttcatgtaattcaataagtacttttatgcaataaaaaaatgatataattctt

SEQ ID NO: 72660 - DNA, 575 bp, Cannabis sativa
ttaataatttaacattcatacatatatcaaactatccaactcttattaataatcaaaaatatcattacaagcttttcaaggcataaaccctaacaaaaagttggtatattcaagcccaaaacctaccgcaatcaagctaaatgggtgccgatatctaaggaaccaagaagtgtgactggagcccttcagcacaaggggtggaatagagccatgaatgatgagatcatagctctcaagaagaacaaaacttagatattagttcccaggtcagaagccaacaatctaattggatgcaaataggttcacatcataaaaagaaatgcaaatggatccttctagaggtacaagtcaaggttggtagctaaggaatttcatcaaagagcaggtttagatcatggagaaacctttagtccagttatagttattaaagcttttgcagtaagaattgtcttgagtattgttgtttcaagaaactgggacattagacaacttgacataaacattgcctttttgaatgggcatcttgaagaagatgtgtacatgtgtcaaccagaaggctttgaagatcctacaaa

SEQ ID NO: 72661 - DNA, 1467 bp, Cannabis sativa
aaaggtttggaatttttgttacttaaacataacaaataagatttaaaattaattttaaataaaaaaatattaatcagggtcaaaatttaatttgaaccatttatttagatcaatggttaatgacaccactattcatgtgctatggctttacacatctctcaagacaatacgcccggagtggaatattaaaggtcaaggatgcttctagtttctatgagcttcttttgggttgcatgcacattccgagtaaacaagaggtggaggagttcgttgtttgaaaaaaatgtaatctttgaaaaaaaaaaaattaagaagagtacaaatataaaaatttccttatcaaattataaatataatgtttgaaaaaaattagtacttggtgtaaatttttcaaataaaaaaaatcttaaaatgtaaatgtaaaataaactaaagaaaaaaaaaattaaactaattaagctagaaataaaaacataaaatatgagtttagatattaggtttacaaaattatgacatatcaaataccataaaaaaacttaaatgtgaaaaaataccataaaagagtggcgaccctaaaaatgttatatttttgtaatttttttttttttttttataaaattccatatttgatgtaattttaacaataataaataatgtaaaaaaattttataatgaaagatttaggaaaatttacatggtatactaacttttgttattttttttacaaaaacttttgttattttttttacaaaaatttttgttattttttttacaaaaatattgttattttttttacaaaaatactgtttacaaaaatactgtcaagcggaattttttacttttttaccgtatttttttataagtttcatactccagtatactgtgttaagtttcactggtgttctactggtgttttttagttgttttactgttgttttaagttgttctgttttgttatttactggtgtttaataaaaacaaagtatttttgaaaacttttccgtgtgacagtatttttgtacaagttaactcaaatttcaatatttttgtaagtttcttaagatctatttgttaaagttttaagtgtacgtagcccaattaataatctttatgagcctactcaactgaactatggggttcgtaggactaaagatttttaccattattcaaaaagaaaaaaaaaaacaaaaagattttcagcagtgttgctagttaatcacagcatctagagcacgatttaattatatataatttatggtcacttttgttgccattattactacattaatatttactctccataacacttgacatttgcgagagctagatctgagagagttggagtaccgtaatgagataaaaatgctttgaagagaacttatagcatgttattttattaaaataatatatatcatctttatattaaatcatactataaaatagaaataatgttttttttttttttaa

SEQ ID NO: 72662 - DNA, 881 bp, Cannabis sativa
ttattctctaattaaaaatagagcaatgaacatgtttacagggaatatgatggcagagacagttaggtgttacaatgattgctctgattttacacttttcttaagaattagaagaaaaaataaagacattgacatacttaaaattgagccaaatgctcatttagacctctcttatgaagatgtttgtgatcatggtgcaaagctaactgttttcaaaggaaatttagagtggcaagtcgtatcatctataagtttcttaggattgtatgagattagattctatcaactcgatcaaaaagtttactggaaatcaattgagggaacttatcttgatagattacggtatgttcttaattttaagtatttttaattatgttgttattttggaatgtctttttaaatttaattgaattacattaaattaaaatgaatatcaatttattattattatttttttttgttagtgtttcttcgaagattgaagagtatttgaagatgaaggtaaaagaagttaaagattttgtaacgagtaaacaataatggaatcgttatggaagtcaatcaatgaaattctataccgcatggatttagaagctactttggccactttcacttttcaattttttttttactatttttggatttagatatattagtattagatttttattttttgacatagattagtatcagatagattaattagtgctttacaaagttttgagtgaaaattatcattctcaaatgtttatgtttatgtaagaataaatatttattttaactatacaataaaatactaattaatttataaaagatgcttcttttttcattccattaatatttaatttaggtggcatttgttggagttaataaaataaaat

SEQ ID NO: 72663 - DNA, 1039 bp, Cannabis sativa
  modified_base (46)..(46): a, c, t, g, unknown or other
aataaaactaacactacgtggcttgacacgtaacaatcacctagtntatatatatatatatctactataaaaatggggttcaatgacttattttaagagactctaaatttagtgacattccactgcgtgtcactaatgtgggtatctggaaaaataatatttattgacatttcagtgcaagtcactaaaaccttttagactctcaccgcgcgtcactatagacatttagaatctcacattttcagactctaaaaataacaaccacacccatagagtgtcactgtatctactttttttttctttttttaataattttcttgacattggccatactatatcattttttctttttttaaaaaaaaaagaaaaaaaaatgtatggtatatcaaatttgtttaagtttcattttccttttattaaaaaaaaaaaaagaataaagcataaaactacaaaatacatcaataattcaaaaacagaaataaaattttagtattaagaaaaattgtagatcaaaatgggtaacattcaagacttgaaacataacatttttaaacaccaaatctaaaaactgtaacttggaagcttattcagatgagcttctttgccatagaccgatgaactttatttccattatgagggatctaaaaaacctaaaaagaaaataaaaaatacaaaaaaagaaaatattatcattacaaaatctgaatacctaaaccatagagagcaaaatagtgatactacaattactgaaccaaaattttaaattgaaacactatacaataatttatgattcaataaatattcatataacattaggcatgaacaattcatttatcaaaaaaaataaaaatactcaaaatgtactaatttcaatacttgagagaaatcagcgtaagaaagaatgaggagttcttcttagccttgtcaacagccatcaaaatctctccatttcaactagatagaagaaaataaagatcaaaagaacacatgtgaaaataaatgaaaaaacataagaaaaaaatacaaacagaacacaaaa

SEQ ID NO: 72664 - DNA, 906 bp, Cannabis sativa
aaacagactaacaataaattaaacaatttaaattaataaaattttacaaaaataaattaaaacaatactaacccataaacaattcaatgattcaaatctagaaattctcctccatttcttcgtcctttcttgaagttgtagcaaatagtttaaccaaaaaaagttaaagaaccaatttttaaccaacttatcacatatgattaccaaaaccaaaacacaccattatttgtagtacataaacaattaagcttactgctaaaaaccagtatgaatataaacaaaacccactcaatcaaacacattactgccctttggatactcaatgccctaaagctttaaacatattctcctgcaccgaaattgcacctgacaaacatgttcaggcctcattgacaagctggaagccctcatcgaagggagggaggccatttcggggagagttgaggagcagagcgtgtcaatggttgttgataatctcgacatggagtgtatcggcgatggcaactcctcctcctcaggcgacaacaagccttcggtacacatttacaagaggcccaaatttagctcaagaaccctaataactccaatgtttgtttctatatttacccccaaacccaaatcgctacctaacaaaattgaaattaagggtttcagaaaaaatcatcttggagggggaaaaatggcaagcgaagacctgcgtgcaagagcggagatcgtcagcaacccgaaggagttctatcgtagatgattgagattcttgaggaataaaggtttctaaaggggattctaccattgcaagatctagaagagtattgaagagtgaaagagactaattttgtggctagatacaaagaagatgaagagactagaagaaaagaatgtagttcctgcaaaaaaaaaaaaaaa

SEQ ID NO: 72665 - DNA, 1160 bp, Cannabis sativa
aaatagaagatgtaaaatgaaattcgaggctacaaacattcccacctttttaacttaccataatttaaaaactgcactattaagattttttttttattatttaaaaaaaaataatattcttggcctaagatgccatgtggcctatgcaaaagaaaagctattggttgagatgtgttcattttcatttttcagtccacaaatttcatcttcctaatttaaatggagaataaatagccactacaacaatgatcatgcgtaaagaacatgaaagccatgtacaaatcaaaaaaagaaaaagcactttgaagcaaatggggtaataatttgatataatgttatgcacctgatcaccagagaaaatgacccaagctaaaggtttactgaacaaaatatttcctttaaccatgctcacaacacagcgcaaagcttgtatcaacaagtaggcaaaaactatagcattgactatgaccacaaatacaagagctttcttctttgaaggagatttgtgttatctatacttcttgtaaagtttttttggtttctttgtatatggaattgatgctatgttttggaggataaatagagtttctttctccaaataaaggtgtgtagtataggagatggataaggtttgtaaacgaactaaaacttgtattattcaccataatgccagaccttattcggcagaacccacttaatatgttaataaataaataaaatcactggtaaatgagatgcaaaattctcctatggataacaaaactatctctgagacatctcaaattgatggagattgggcaaacaccctttatagcatatcaacataaacaatggggttataaaatacaatgtaaaatccatctaactatacttgggcatcttatttagttttagcaccctctgaactaaaccttccctgtcccccctgtctgcttgtgccaatgtggggctgccttccttcaggtctgtaattgggtaagttttgattcgagccatctaggactaaatggttctcatttagttgcatcattcagcagaggcctatggcttctaaattcaggtttgttgttgggaaggtgaaagggttcaagagttggattaatggtgagtgaatggggttttcaaatgagactaatatgggaatgggagaaggagtagag

SEQ ID NO: 72666 - DNA, 901 bp, Cannabis sativa
taggcttagagttatgtttgatgtcgcacaacccctccctcggggcctacccatccatttctcgggtatcaacaaagttgtctggctagagctaaaatatgagaatcttcctgacatttgtttcttctgtggccgaatgggacatagctacaacaaaggctgcatggactatatgaaagcttgtgatgaagctccctttcccccggagctcaggtatgacatcaaaaccattacgggcaaagtaaaagtttctactaacgctatgttatgtcatgaacagctgaactttgccaatcctccggtagcgcccttcatgacttccaacccggctagtgcggtttgtgttgctcccccggagatcatgcctccgtttcccacttatggctcccaagacatcaacccttctcatggccaaacacaacaagtgggactcttcaaatctggcccatccaccctcccacaaaacttcccacaatggaaccaacccgatcccacaaacaatgcaccaacccacaaccatcctcaaaatactctcgagacaattacaccgacatacaccgccctcatgaatgctactatgagcaactctagcgtccaaaaagcctccccaacctccacaccgaaccaagtcgtcacctcccaacattcaagtggctccaattccacaagccaaaaacactgccatgtacccttacccgagaacatccctctccttgacacaagcaagaggcttgaagccatgaacctcacctaccaaccgggatttgctaccccttcgggatcaaaagcttcaaggaaaaggaataagcccgattcaaaggacaaattcaaaaggcaaactgaagtggtcaatggagagcttcgtcaccaaatcaaacgctcccgctctgacaacccacag

SEQ ID NO: 72667 - DNA, 1244 bp, Cannabis sativa
  modified_base (1085)..(1087): a, c, t, g, unknown or other
  modified_base (1213)..(1218): a, c, t, g, unknown or other
gaatcgttataacaccttgctcaaaccttgctcaaacctttttcaaacctttttgatcaaacaactataaacaactataatttttgatttaaaacctatctgacgggaaaggaaaatcaatgttataactcgcgtataaacctgaatactaacggttctcgcaagctaggaaagtactaaacgaggcatcgcgacgccttgataaaagcacttgacctagaaaatggatagataatataactattcatacaagcaaattaagaatatggaaagtgaaaaaaccattaaagtatatttaagttttcttaaggcagattataactgctatagcaaggcagaattgacaactgctcaaaaatcaaaaaagttaggtagattactaactacttaaatagaaagattacgagaaatggaaacccaaaaatactgtacatttgatcaaaatataatttattatattgtgaataaaaacacaagcaaacacaattgtattaagttcaaataaaattgtacaaggaatttaagataagaaaaaaaaaacctgaatcgggttacaaacttgtatttacaaaaatgccactaagggcaaaccattaagtcatcctcccctaaacaaaggatcagcggagaagctattgaactcgagaaagaccgtctccatatagcctgagaaagaccctctacacgtagctcggagaaagaccgactatacatagcttgaaaaagatcggctacatgtagagagccttgatctctgcacagacctcattctcctcatcatcagaagatccaattcctgaagtcaagatcactttcccagcctcatgaaatttctcgatactagaaagaggttggcacaaagatctccaggcacaggtttaggtcttggattggctggattctctgatagaaagcacgccaaccttcttcccggatttatctaaaaccacgcaaaattttctctagaattctttattagcctgaggaggaccttctaaatcgcccacaagatctatgatcacttatgaggatcgcccatggcgagctacgggcttcccctgatttggattggtcggaagctcctnnnccttggaatccatcgtttctggctccacttgaggtttaaagtccttgggaacaaatggaaaatggttggtatgtccgggtattatgagtttgggaggatgaacttattgttaggttttatgccctnnnnnnaactccatttcaatgtaatctatttt

SEQ ID NO: 72668 - DNA, 1513 bp, Cannabis sativa
ttatttaataatcaaacattatattatggagtaatataatattcccccacttgattaaatgactccactctaatggaaaccattacatttgtgcatagtgtaaaatgtctttcgtcttgaattttatctcagtgtaattatcacaaagtttgtcgaaattttagttgctgtagcattgaaccactattactagataacaaactggtgataccacatacacctttgctatgttcactcaagaaccttatggattacttttgcaccgttaatggccatgtgcacaaatccactttatgaacattttagagaataactctcaattctcataagaggcggcaccacccctagtctatataggtggagttttagtgtctcacaactctttagacactttcttaagcttaagctccattaaaaaacctttcggttttaaccctctaatttttactacatgtactcatccatagatgagacaattgagtaccacattcactctattgacttattattacctattgaacttaagacttaatttttactagtgttaagataggttaccatcaatgagtaaaacactaagaaagattaggtcccatccctcaaaattcatgttttaatcttgtatgaagattaagcgatttgttaacttcacacttttaattccaagcgaaacatgctagccaaatatagtgtccactaattctcaaattctctaaaagattaatcataaaagattaattttcacactactcaaattctcaataattttgatacaaagcatatcaaaattaaacactaatttagacacaaaacatttctaaattacacacttaactttagacaccaaacatctcaaagttacacttaccaagcatgtctcaaatatacatatttttagttttagacaataaacatgtctaacaattaacagagtaatacaatggattagcctttattgtgtattgggttgagaagatccttagaagcttctattttctcttggtaatagagcattcattggctcacgccatgtctacaatcagctagactccacacggaggaaatcaagatgatggagatggtacagactaacaaactcctggacaactctgctcccctcagaccattaatggaggctcacaacaaggatttcactctggatttggaggtttcaaaaactcacagtttgggaatactcttactcaaccattttctatcaaacttgatagaaacaattttactctctagagaaatgttgtctctactataatcaggggtcattgtctcgaaggctatgtcaatggatcaaggacctgtccacctgagtttgtaccatcacctagagctatatctgaagatacatcagatccaactcttatgttgaacctcgagtatgagaagtggataatttgtgaccaatttttaatgggttggctctatggatctatgatagaagccatagctgtagaggttacgaggtgctcttcaacaaggactttatggacaactttgg

SEQ ID NO: 72669 - DNA, 1575 bp, Cannabis sativa
ttggacctagtttgcatagggtggatgatatatataggaggagcagatgagacaatagtagtttcaattgtagtaggaatattgacattgtcaagtgtgggagctaaagcttgtaagcctggaacaaaagatgcgacaaaataaacaaaaggtggaggcgagctggtagtgacaaattgcagtggggtggtaacttgaggagacttgctgctgagtttggagatcaatggtggtagcagtaggtgcattgataccttgaggagttgaggatatttaaggtaagtaagagaagtggacaccttgagatacattaagaacagatgagtttttataccctaaataaaactcaatttcaatgttatcttatttacttatccataaaagattagaattattttattactattatatattgcttgattcatatgttactttcatgattatttaattaatatatatattctgttaaatcttgaatatatagttattcacaattatagtgttgtcaccacagtggaaaataattattattgcatacttcaagctatttagtcccatgatttatcagtacgttagatttacattgttgtgataatcatcaaggttgtctacttacacttgactaagtagaatgtcttttccatggtgttatctatgtttacggatggaggacatgtgtaatttcaagattgtttcacttcaactattccaggatcaatcgcaggcccaaccataataatggtctggatctattagagaagtcaaacctagatgttggagagatgacttgtctaggcgaaataaacctccaacattgtgcacatttggctagtcccaagaagagcttccatagcagtagttaatagacatccagatattcagtttcgtatcacattcattaattatcaaatcccacaatttcaagacttaattttgaggatcgtgtccaagaatcatatcttccgaatatagaaacaaagtaattgtcaatcaagtattaatgtgtctttattatccacaaaagtagggacatggtctaaaaattatcaacatgatgtggcatccatgtcagcaaaagatcaatgcctcatggaccgggcttcactagatgagctcgaagtcaatgtattatatgtatttaccccattagtgggcaaggtttacatatgagaactctggcactattaaatataagaaaaccgattcatgcaaaggcttagaatctcattccttgagtgctcaagaaaattctaaggttcaaacacttggcaaaatacttgtgtaaatccaaagggcttttccagccttatcataataatattgagttgtggactagaggtcgttaatcctcgaaccacctaaaaactcttacctcattctttgtttatattatatttctttagctttattatattttattggtttccaaaaattttagtaaatattttggtattttcattgagagttaaagaaagagttggtatcaaagtatattgcaacaatggtagcaacaaggaccgcaattagcatatttggcatctgtgatgggggtactcctatggatgatgcaaatcc

SEQ ID NO: 72670 - DNA, 1010 bp, Cannabis sativa
tttattttttattttcaaaattaaaaacaaaagttgttatagaatacaattttttttttcaaaaacaaaattttaaaaagaaaaattttacttttacttttgcgattaaacatttaaaaataaaagtattaccaaacgttactataacatttgtttaatttttttaaattgaacacatatactgattgtgtaatgtatatacaaaatataattcctatttttgttggtgaagctgaaactgttataaagttaaggtgaaactttttttcttgttaaaccaaaaactttgttaagaaaaaaccaagaacaaattaaggtgacaccttttttttgggtgttaactggtagaatttttgacattgaaagatgtagtgtttattttttttttattagataaaagataataaatgcatagcattcctaaataatggtgttgggtttttgtttttttattttttttttttgaaaaggtgttggaatataatctaattgattccatgtagattccctccatatgcctcttaaaagctaataattgacattgttggtcattttgcaaaaaaagaaaaaaaaaataaaaaaatggcattgttggtgtaaacatctaaatatcttttgcaaatctctcagtgatctatctctatcattttctcttcatattcttaactcttaattgactaataatatcattattaacaaataaaacaaaaggttggtcgaagtgatctcgcattttccaatatcaaaagaaagtaattaaagctaataataaatgataagaaatatacacatacatacttcaagctaatattatttattttgatgtatatgcatataaggtgtgttcatccaatttaatccgtactattttatttatagtgcatccgatttgcactaagtaaagattttattctttagatccaatacaatccgcacaataactcaaatctaatccaattcaatccgcaaaagtgcggattgaatcggttattttggattggtcacttttt

SEQ ID NO: 72671 - DNA, 578 bp, Cannabis sativa
ccttcaaaacttccacttccatatgtccaacaaaaatttcttcatatttttttaggtcaaatagaagcttcactattatcgataataagcacctcatctgttcctgccatctatggtatttaaacagaagaaaatgtgtgtgtaatcttaatctccaaacagaaatttacttttaaaatcaaccaatataatctaatctaataacaattgcttagaccaggaaatggctgcccctgctgtacagaccaggaaatggtctcactcaattgacttctattaattagtacatgacaagatcattacttctagtttgagcacatgccataactattactaaaaagaagagaaaatttcagcacatatcatcattataccacttgtctattaaaagatttcagcacatatcatcattgaccattactatagccaaaaagatcccaagtcaagaatgaaaatttattcaaattctccaaatccttagtactaatataaagttcaagcacagaaacaatagtccataactagtttctaatagaaaaaaaaacaccaatttctcaaatccaccatattatattagc

SEQ ID NO: 72672 - DNA, 1528 bp, Cannabis sativa
  modified_base (1491)..(1493): a, c, t, g, unknown or other
atagagatttctatgtagaattctataaaaatacaaaaaaaaaatgttttaaaatgtaaaaataaaaaagctcctaaaaattattattttttattctctttaaataaatgtaatatagtaaataaataaggtaaaatttagtaaaaattaataaattataataattagtgatattataataaataaaaaattaatatttatagtaagttaaattgacataaatattatatcttgtactaaatttatcacaatttttaacatgtgacaaatttagcacgtttttttaaatattatttaggcaataattttttcttaagtatgctaaaatataacaatacataatatttttgatacctaatttggtatgccagaggattggattaaattattttttaaaattgaattagattaaatatgactatactaaattatattagcactataccatgtttgatgcacatacaaagactaaataaagtataaattttaatttattattttaaattttaaatatatattataaaaaattagaaagtaatacttccataaaccttgtaagaacaacacacataatatttagtctcaacattaaaacggttatcatttttttatatattagttaaaatatagtacatatacatattaaaaaacttaaaaattttaaaaagaaaattttacttaaaatactaattttttttcaaactttatatttataaatgaatgagaagcagtattatataatagttcataagaggggaggcctttgaataacttggagggagttttattgataagataagtagcattctatactaggagtggccaatataccaagagtaaattggattgaaatcctagtgctcgagccacatgtaatatgtgttagtattttctttcaacaatcgaattttgttgtggtatttccacatatgaatagtaatgtatgatgcctttggaggcataaaaagcttgaagattcaattctttagcattgtttgagcgaattgccttaatattagttgagaattgagtacaaactatgttgaaaaaattaagtattaaagtttgaacattaaacttatttttaagcatatatatccaagtaaaacgagttttgtcatctaatatagtgagaaagtacttgtaaccttctacactaatgatatggaaaggagcccaaatgtccatatgcactaaatcaaaagtgttttggcaaaattatggttagaaatgaagggtaatctcctttgtttagccaattgacaaatgtgacaatgttgactggtgaaatgaagagagttatcactctttttattaaagaaattagaaatgtacatagaggggtgaccaagggaattgtgccaatggtcaacatgtttattatcaaattgaaaagaaatagcattggttgctattgaatcttgttgcagcaagtatagccttccacatttttcaacagtcccaatcactactgttgcccctgatttcgcnnnatatacgtggaccaaccggacagagacacgtggat

SEQ ID NO: 72673 - DNA, 921 bp, Cannabis sativa
tttatttggccagctggaagtacttttgtaatattgttacttttttttggttaaaactgaaaaaagtcttaaaataaattaaaattttatttaattatgaatcaaatttaaaatctaatatttttttaattttatattaaaaattaaaacttccttatattaagttatttataataattaaataactcttccaatttttttgttttcatttaaaaacaataaattaaaaatatggagttcaatattaataatgacataataattaaaaaaaattattttataatcattaaatataacatgtgagcaaacaaaagtcatacatttgcagctttaaacatcatttaacaaatttaatatttttattttaaaaaaagtataaattaattaccagtggacccaattctatcaaatctttgataataaatcaaagatttatattttgatgatgacgtaattttcgtaaaatattaaaaaatatatataattttaaaataattaaaaaataattttataatcattaaaatttaaatatttattctttaaaaaatattataccttttttaattttaaacatcacttaacatataaattatttatttaaaataatatataaataattgtatgaaacctattatcgactgccaagtgtaaatttttcttctcagcacattgatactgttgactggatttttagccaaccgacgcggagtcataataaatgagatttaaactaaaattacagtaataaatgcagttaataatattaaaattcaataaatgtaaataaaaaacaccgaaatttaaagaggttcggtcctggaagtcggtaataacctactcccctgtcgatccccctcccagatcatggatgaccccttatatagggagaggcttggtgcttcttgttggaatttattttac

SEQ ID NO: 72674 - DNA, 811 bp, Cannabis sativa
gaatccctactaataacctttccagcacactgatcaatattaagagcatcagtagctatattagcctttccttctacctgtttcgaacacatatcagctcccaaatctgccataatcctcgaggttagagcagcattttgcacccctgtcatgcctttgacaacccactatttcccttgcaaattcgatttcttcttacattcatctgtagtgtgtcccaaaccattgcaattctcgcacattgttggcttccattcatacttaatacccactgcagcagtgtaaccatactcattctcaaatttaatagttgttggcagttcttgttccaaagaaacttctatgagaactctagggaaattaagcttttgtctttgcttggtaacttcatcaaccataataggttcaccaatttgtcccacaatcttgaacaaggtcttttgtccccaatatttcaggtccagatcttcaatttgaatccaaatgggaaccttgcaaatatctcctttcctgaaattagtgtctggatcccacgccttcatgatcacaggccgcttattgaaaaaagtgtaccctccatgaagaatactatccctaaattcaacagaagagaacctgatcaggaagataccataagaaatgagtccaaccttgtccacattctccttccaaattcgcctagcaaatccctcaagaacttccaatggtggattggcacccaaaacataacaaagaatagctgaattccaataggatatctcttcctcaatatcatcccttgtaattttcactgttaattcctcactgccag

SEQ ID NO: 72675 - DNA, 1227 bp, Cannabis sativa
tttttaaatttttaaaattttaatatatacataataaaaataaaaactaaaagtataattgagtatacaatgcatgtaataataatctagtatatatatatatatatatatataaagtatataaattcatatctcgttttttaacactctttctttctcttacaaaaaaaattaagaacactcctcttgtatttttctatcttttacatgattaataaaagtagtatattttcttagatattttgtagtttattcagagttaatttatgaatgattcgcatattttaacaagattgatgccttgttatttttctgttgaggtatagttgtctatttgttattttatagttgtttttatgctgttgtttaggtgttctatagttgttttatagttatttttctgttatttttatgtgtttttctgaacaattattatttagtttatgtgtattttttatcatgtctattttcagtttattttagataatatttttgttgtatatatgtgtatttattttgttatttttatgttatgttttagttattttttagcttatagttattttttaactatcactaactcaaaaaggaaaagagaaaaaatttgaaagaataaagttgtaacaacaaattctatatatataaaaaataatataatagtacaaaaagataaatcaaattgtcaaaactaaataaaaaaaatcgtaatataaaaacatattgaggagttgatattattttgcttattacaattcggtcaatatttttttttttatttttctgttgctttgtagttatatttttgttgttttataaccatatttttatattgtttgttaacttgttataaaattgttttttatttgtttatgagttattttattttattttactgaaacacagtattttttgtaattttgaaattttaaatattgtatttttgtaaagttagtacagtaaaaatgtaaaaaattctgtattatagtgtttttgtaaactttttctcattttatagtatttttgtaaatttttcgtatttttttttatatataaatatatataaatttagaagacaagcatgtcattgtctatccattacttacatattaatttattttggttcaagtatgatcaccctaaaaacaaaaaaggaaaatagaaagtactatgatatcattatcatgtaaaattgtaattgaatgctatttatcaacgagcattatttat

SEQ ID NO: 72676 - DNA, 953 bp, Cannabis sativa
ttggcaaagcaaggttggaaaatcattaataaccctcattccatgatggctcgggttctcaaagcttgttacttcactaataatagctttttagaggctaaagttggaggctatggttcctttatttggagaagtatattatggggcagggaaataatagcaaaaggaacaagatggagggttctctcaggtaaggacatcagaattaatgaagataaatggcttccccgccccctaactttctcattacggactcaagcaaaggttccaaagggcacaacgatggataaactcaaagatgagaagggagattggaaacaaaaattcattgaagattgcttccacaaggatgatattcctcttattctaggcatggccccttgtgctagaaacttacaagatgacatggtgtggcattacaacccggatggtatgtacacagtaaaaagtggttatgatatagcagaaaaaaacattctaaatgcaggtacttcttctgagacaacaatgcaatggtggaaaggaatttggaagatggaagtgccccctaaaataaggaactttacttggagattatgcaatgaatggctccctgttaatactgtgttgcagaaaagaggaatgaaaattgaagctctttgctactggtgtaagagagaggaagaaacaatagagcattgcctctggttttgccccatggctaagagtatttggaaaaagtactcaatgtggaaaattatcaaacaaagccgtaccaacattattgatatgcttatttatatacatcaacaggtttcaagagaagaattcaacttttttattacaatgtcatggcttctatggaaccgaaggaataaaaaccggctaaagcttcatgtgctcccggaggagtcttggataaattgggctcaaatggaaatagagtatttactcagcaacatatcgcctcaaaa

SEQ ID NO: 72677 - DNA, 749 bp, Cannabis sativa
gatatgttggatgaattgcatggttcttgtgtctttacaaaaattgatcttaagagtggatatcatcagattaggatgaaggaaggtgatgaatggaaaactgcttttaagactaaatatggtttgtatgagtggttagtgatgcctttcggtttaactaatgctccaagcacatttatgcgtttgatgaaccatgttttgcgtgcatttattggcagattcgtagttgtgtattttgatgatatcctaatttatagcaaaaacttggaagaacatgtaattcatttaaaatctattttggacattctaaggaaataaaaattgtttgctaacctcaagaagtgcaccttttgcacggataagcttgtgttttatggttttgttgttagtaagagaggaattgaggtggacgaggaaaaggtgaaggcaatccaagagtggccaaccccaaaaacaatcagccaagtgaggagtttccacggcttagcaagcttctatagacggtttgtgcgtgattttagtagcttagccacccctcttactgaagtcatcaagaaaaatgtgccgtttaagtggggaaaagaacaagaaagggcatttaatctgatcaaagaaaagttaactaatgcacctttgcttgttttaccaaactttgctaaaacttttgaaagtgagtgtgatgcttcaggaataggtattggagctgttttgatgcaagaaggtcgtccagttgcttattttagtgaaaa

SEQ ID NO: 72678 - DNA, 923 bp, Cannabis sativa
ctaagcatcattaaaatttctctacataagttatccgtgctagttcaatgcattgtacggtgtaggttcccctcaagtgagcacacaaacttacggtgtcttggtcacttgcaattcaccaagtttcatagatctttcttgggagttttcttgggggtgctacctagtgtacacatgtggaactaaaaaagaataactttaagaagttatctatgttagcaagtagtttagacataatcagtcttacgtgtaacaaaagcttacaacttagtgttcgcttttgaaatcacattttggctatcgctgcctgagatgttaggcagaggccatcattgaagagcgatggaaggccatactggaaaagcaatgggtactatctctttcatatttggctacctctgcagagcttaccatgcgaattccatcactgaagagtgatgggaggccatcgctgaagagtgatgggtgctagctcttttgtgaattcttgcacggtgaaatgttagaggaaccactattacaagttggctagtgagagcacttaccgagatgttctctattccagtattttggtagaagagctaactccaagttctcgttatactcgccatgcttgtatgcacctttattgttatcttgtaacttggtgcgcgcctttttagttgggtccaagcatgcttgttacaggatctttgtactcaaagaatattcttccgggagtaagtctcttacgaagaatttctttcctcgatctgtttgttgaagggcctggtaactctttgtgggcagacatgccactttgagttggcttggactcttctttttcactttcgtaaagggatcttgctagcaacatgtggcttacttcttggtcatagtagaccaaaagtatgagagcagactgtgttggaattattttacca

SEQ ID NO: 72679 - DNA, 871 bp, Cannabis sativa
ttaaaatatattaataaaattaaaattaaaaaaacgataaaaaaaatctcatctacatggaattatttatccaccctgctggatgggataaataatccgagacagatgagattagctggattaattatccagacttctgccatgcccaaacactagattggacaaattagtctgtctaatccaatccagtcctgcgtaccaaacgggccctatgagttactgtgggttgttgctatataaattttattgtacatcatatttctattttgttgtatagtatgttattattcttggatgatatttattttttattttgctttgtataatagtggtatatagttttgttagcaataatacaaatattttaatgtatgtatataattttattgacatgctacatatatttaattattatttttatatattttgattgtatgatatatatttattttaaataatatttaattagtttttattttattatatacagtggtggtatataatattattgttatggtatatgtattttaattattgtatataatttagttagtgtatacaaatatataaattagtaatatatatttttcttattattaatagtaatatattttggtgaattgtatatgtattttttattatacggtatatcattttttaaaataatatttaagttctagtttctattgtacttttgttgacatggtatataattttattagtatcctatatatttttatttttatttgttgttattatataaatatattttgattgcaaagtatatattttttgttatatggtatataagttttattgtatactatatcattttattttagatcatgcatgtttaatttttattttatta

SEQ ID NO: 72680 - DNA, 1265 bp, Cannabis sativa
aaagagatcttactcaccaaaaaatatattttagtgtgatttttttttattattatttgattagaataagaagttgatgaagttctttataaaaaaaaatcaaggaaatcatacaaacacttctcaaagtaatatttgacaaaatcagcctcgaaatctccaaaattcaagagtttagaatattaaataatcccaatcttaattagtttcatcttgcattaaattgggttaccacattgcattaaaaatgacaatttatatgcatggttgtaggtactaatacattgaatagtgtttctcttgatataataatggaaaagaatctactaaatttgactaaaattaatactctatttaattaaatatataaatcgagaatgttaatgggtagatgtgaagcttaatttaatatataaatggagaatgttatataattaattaaataattttttttaaagaaataataaagagaaattttgagaactgtgagtgtgtgtgaagtggtgtaattattagagatgttggtctctttttttgagaagtatttttaattaaaaatgtttgattgctttgtttacaagttgggagatgggagttggaagctgtgcttgacacagattttgttctcaaatgatctttctttcacgttctcttccctaccataatattaataatactctaaagggtcattttagtataacttttaatttaattttagtatattttaatttaattttagtatatttaagattatttgtaaatttttagaaaattttaaaatgtttatcatattaaaaataagatttaaacaattatttatcacaagtataatttctctcatattacaattattttaatattgttataattttttaataacaactcttttttaatattatgattttttttattatacttattttaataatattttgaaaaagtaattatataatttttaattacgttatattttaagaattattacacaatattattataattttttaacaaaaactatttattaatgttacaattttttaataataacactttgagtttgttaatataaacattaaccaaaataatacttattatttgtcacaaataaaatctaaatgtaattataaattcataaaatctaataatacaattcttacattaaccaaaatattaatacatgtgtgacaaatatcaaattggtgtgaagaatctgtagcttgcatcattaacatcattgatggactcagggccggccctaggcatag

SEQ ID NO: 72681 - DNA, 1213 bp, Cannabis sativa
  modified_base (1143)..(1144): a, c, t, g, unknown or other
tgaattatccattgtaacaatctaaaaaatcaatgatcatctatagacggtttacattgagtaaggataaatttaccgttttacctttcaatgtattttatccttaaaacacttagctatttctaaataatattgtagtaaattaatataattactaaaatgagcgctttatcatttatcgcattaagccaatatctaaggaaaccatcgtttcacttctaatagttatagaaactatagattccatatctaagattaatgctcccactcaattgcactaccaaattctcaatatgtaagtatgggctagtcctacaggtaagctgataacgaacaagtcaaagaacctgtatagtacaattaagttagaacttaactatctcaagattgagatcaattgacctaagatcaactaagtgacattaacttagaaaagacataacagtaagtttatgatatcttttctacttcaatatattggtccagctcgatgtataactgatacatccaatactagtttattttactaacgccctagaaagaacattccacttatacaagtgtaagtaaagtacatcgttgattatcacgtcagtgtaaattcaatgcttggataaatcgtgtaactgaatagtttgaagcatataatcattatatttcaatgtgtagacaacactataatcatgaataactatatgtttatgatttaatagaatctatatattaaacatataatcatgaaaataatcatgtaaatcatgcaatataaaatgatttttgatcttttattaatagtaaatctgattatattaaaataagttttatttaaagcataaaattccaacactcctaacatcaagtagtatcagtgttatgcaccattaagtgagattgacatcgcaaaaggagctatctatattaaaggcaacttcagatttgggcaacttatgtattggtgatgagaacactaaggctaaagaaacaagtaaagttccacttggctcggtgacgagggcacgagccaagaaattcaaagaagaactcaacaacttagtcaacagaattttaaaacaagaggagaccgtggtcaacactgaagaaaagcaaaaatttgtgtttctcatcaaagtagactcaatttanncccaaattaagctgatcacgttttccaaggcaattggcagctttcctttttatttttgtttcctttatt

SEQ ID NO: 72682 - DNA, 875 bp, Cannabis sativa
  modified_base (376)..(377): a, c, t, g, unknown or other
gtaactagaatcaatggtaaagtatgtattttcttacatttgattacttaattaggtggcatttggtaatatttttttaattaattttctatttttaaaaaaaaaaatgaaaatatttttcaaaaacatgttctataaaactgttttcactttttcacttaattaattgagaatcaaaattttaaaaataaaaaaaatcactttcaatatttttttaattaatattttagactctgaccagacctggacccgaatcctcccccacggccctggcgctaaacccgacctccaactcgaatctgaatccgacccgaacctagacctgatttaaaaaaataaaaaaaataaaaatgaaaataaactttacagaacacanntttgttttctgtttttaaaattgtaaaataaaagtggttacagaacgcatttttgtttttcgaaaacaaaattttactttcattttgtgattgaaaaattagaaaacaaaagtgttatcaaacaacaccttactttattaaaattaaaaaaaaaaatgaaaacttgattaaataagggataaaagaaaggaaatacttaccctactattatttaaaggaatgtcattatgcttactaataagtaataagaatcattggtaacgtaattattcttttacatttgtttatttactttattataattaagaaagtaagaacttgcttaaataaaggataaaagaaagggaatacttctcctttaattttttaaagaatgacattaaggataatagtttttatttatttttattttactttttataattaattaaatatatatatataataataattttattctttaaaatatgcctgtatacacttcctaggggttgatat

SEQ ID NO: 72683 - DNA, 733 bp, Cannabis sativa
ttcttcttgaacgacatcttctgtttaaaatcgttcaagtcaaatgacccttccggacttaatcccgttatcaagacaaactcctccaaaccgaaacggacaactctgtcctggactaagaaccacttctctacatcctccctctcttgatgaacctccctcactaaagcaaggtaaggcagggcaacgtgcaacttaacattgcccatcttcaaaaattgtgaacaaggcgtccatccacaagcgcctccaactgaaggaaggacctatggcgaacaggccctaagaacaacaactggatctcgtccccagaattatgcaggagagacaagactaggaattggcaaccctactatagcaagccccatgtggacttgggaaaagaaatttagccagacttagagagtccatccgccaagctagtctaattgaagaaccacacactactaattgcgatgtatttgctcagtagagacgtaaattccttgatgaatcatgcattattgattgagatatattattcactcagtagagacgtgaattcctgagatggatggatgactaggagtacatccttcgctcttgctaggtagagttagattgtcgcagcagaaaggctagcgatctaataaggcgattcaactagagaaccaatgtaagaggcaaagatctcgtcagagatccacttaagaaacacaagttgatatatcaaggagggtctataaataagcta

SEQ ID NO: 72684 - DNA, 864 bp, Cannabis sativa
ttttatttaaggcataaaacccaataaattcaccatattcccgccttatacccgtttaaattaaagtggggacaagacggggattacccaacgggtaaaagattcccattaggtaatctaaaataataaatataagtgaaatagtgtatatagtaaatggagttagtaaatacaaaattggtaatctaaaaacatgagttattttaattgtagtagttttttgtagtgaatatgctcacaaatattttcatgaaaacttaaatatctcatcactataatcaataaaaagcttaaaacatgaagttattttaattgtagtagttataattttaaaatatatataaatatatatacatatatcatataggggcaggctcgaagcgggtttccattcccctgtcccgtcccgtttctgactcgggtatgcacatttaaactcatacccgcccctgcccctgccccattaggggaaggtactcgcggtatccgaacccacgagtataattgccatccctaagtatataataagtgtacatttttaaattttttttctaatatttttcactctctcactaaattttattttattacttttcaacaaaaaaatacaaacacttattatatatttttttttttgtctttaatatttttttactattcacactcaaattatttcatactattttataggtattttatagttgtagttcatgtgttctatagttgttttttttgtaatttttatgtgtttttttttttttttgcatagttgttgtttagtttatatgcactttttatggtgtataattttagtttattccacataatttttttgttgtatatatgtgtatttattttgttatt

SEQ ID NO: 72685 - DNA, 993 bp, Cannabis sativa
  modified_base (372)..(386): a, c, t, g, unknown or other
acatcagatttcagattccgattccacaacaaatgttgaatgttgcttgttgctggtgaaggctttgaaagtgactctgatgttctctctgtcataactgatgagaacttttctggcacttggatattggattctggttgttcggtacatgtgcccatataaggagtgctttgacattataaggcatatgatggatgtactgtttcgatgggcaataattctagctctaaagttgttggaataggaactgttaaggtaaaaatgcatgtttggattgtgttgtgagaacattggcctaatgtgagacatgttccaacattaaggaagaggttaatctctttgggagctttggatactcgaggttgtgtctannnnnnnnnnnnnnntgaaataactatcaagaaaggtggcttggtagttataaagggtaaaaaagagagaaatttatataaattattcgagaagactatttttggtagagctgtgaaggtggagtcaagtcacaaaagacattcagttagtgtgaaggaatatgacaaggtgcagaagactccaatttcagttaaaagttgtttgaagaaagaaggcatcaatgaaagattgaagaatgttaagacaaatgctcaagtgaagttcaatgaaagtatgaatttagtgcatatatactcttattgatggtttgagttgtgggtttagagaatttgagtcaaggtggacattgttagagtttgacgcaaattattatttatttatttttatttgtaaagttgcaatttctttttgagtaattattaattgtggaaaaggaaagtcttggtgaacaagttttgataaatcttcttaaggaagatttgaaatgtcttggtccccaagctgtcttgatgcccaagttttataactttataaatatgtgttttgtgtgagagagagatatgtgtgtggagaaaaatagtgagttgtaaaaagaggggtgtgtgtgactttgttgtgtgt

SEQ ID NO: 72686 - DNA, 614 bp, Cannabis sativa
taaaataataataaaatttaaaaataagttagatattttttaaatttctaaccataaattataagattagataaatgactattaatttttcattttatctgattagatatttattttataattatatattttgtttaaataacattaattttgatagttagttgaatttttttaatagagatttagggttgtaacaccctaaatttttgaaaattaaaagtttatttatttttttttatgtataaaatgaataaaaactcaagaaccccatgcaaactcaaacttcatagaaatcacacgagtaataacagaaaatactcaattcacttacctcaaatatgttcctccaagccccaacaccaaaacccaacaaaatggttccaaactcctcctcaaagttcataatttccaatttggtaaagagagggatagggatggtttgagagagaaagactagactttacctttgtttgatttcaatttagccaaaaaaaaaaaaaaattaattcaattttttttggtaatatttggtcgaacgaccaatctgcccctagggcctataaattacataaataactaccaagagtagtttttttcatttcataacacacata

SEQ ID NO: 72687 - DNA, 900 bp, Cannabis sativa
aattaggttgtaattgcttggtaattaaggaataaacgtacgcgtagaatttttttttttttgatacataatacagtaagtttttatttagaaataatttaaaattgtatattttaagtagttgaatatcatatattctacaatattatttggagtaatattcatgatggcccagcaaagatgacaaggcattattaaacttaaaatatataaatttatgtcatttatttattttttgaaaaaaaaaggaaaatattaaaattaattgatgaaattgattcttagccataaaaaagattgctcctttttttttaagaaaaaaaaaaacaaaaacaaaagagtgcccccacacacaatatataacatcacttaactttttatattattagatgtttgctttatctttttctttttgtttttgtttttgtcttataaattcaaaagaaaaagagttttaataatccaagtatatatatagctattgtctttttaccacactatacaactttgccttctttttttctcaataatagagttgaagcatgtggtcttccatatttatatacatataggagatacatgacaaatatatatatttatatatataacacctcactatatatatatgaaactggatagaatgatatatccaattctaatctatataatatatataaattatagggcaagactatggtaggacttagcataaccttcctaccggtagggaagcttttttgatggttattaagatataaggtgtatactgtatactattacgataagactgcttatatacaattaaaactttattcatattataataatatttaagaatatatttattttaaaaaataaataatgttaataaattaaaattttcatttatttttaatttaa

SEQ ID NO: 72688 - DNA, 1602 bp, Cannabis sativa
agcatgagtctctgcctaagtctctaatgtaagtattttgttaaagttcttgaattgtttcaaggtcacgatacactagatatatatatatttacttgtaaaaagctacgtgcgatgcacgtatattaaattttatgttaggtattttctattttatttaaaagtgatacaattaaaaattaaagaaaaatattattagttattaggtgagattattattattatgtatatttaaataatataatttataattttgacaattaaaagtaaatactaaatgcaatatatgatgatctcaatacactaagatatcttgagtatctcttgtatgcactctcttttgacaattcaagtactgttgttgaagatgatgaaactgagtccattcctgaatccaataaaatgttataaaagtcctgaaattgatcacaacaacaacaaaaaagaagaaaagaattaaggtcatgacgtcatataatgttcatgcaaattaataattctacattttatgttcataagtatcttcattgctgttagagcttataacaccttcaagttcacccccgtgaatttgttgcttccttatactgaccctcctggattagttgcctaattttctcggataaactgttttgtgaaatggggtttaaaaaagaacctttgtgattgcttaaatccattttcatcaagtcttaacacatctttaagaagaggaccccatgaaattgtaaaatcaaacattaaaatgacttgattcccatagttgtaaaatcaaaaagaaattgaaaattcatatcatagtttttttaccacaaaatctttaggagatatccaactgtctcccaagacaactcctacatatattgaaatttaaaaccccaacataatattattgattaattgtaaagattggttatgagaattgaagatttttacctccaagtttaagtttcaatttcccagcttcaatgacatctacataacaaatatttcaagctttaaaagagagtttataactaaaccacaaatcaaacaaatatcttttttttttcagataaagaataaaaaaattaaatttatttcgtttgggaaccaagaaaattgagaatcattatcatatacaatcttgaactgggggacctaatagaaagatccctctctaatattccaagactgaatttgagatattacgtaacaatttctatctctatctattttcaatttttacatattaaaaaaaaaaaagaagaagaaagtgacaagaaaatcgactctctctatcggaaaactgacgagtatatatgtatgtatgtatgtatataatacaaaccggagccgagaaagatgattctagtcgaagcatttagaaggggtaatcttgataacaaggtcggggaagacatcatccgggtcatggatatgtgggttacgttccacaataaatgggtcgctgcacttgtcgctgagatgtgggtcatggatatttactatttttaattatttatttttaaatataagtacaattcaacaaattactttagataagtaatataaaaaatattaaataaataaattaacagagatgctaaagcgaaaaaaaaa

SEQ ID NO: 72689 - DNA, 1088 bp, Cannabis sativa
caataagaacatttgattgaaaatttgttgaatgaagcaatcattgggtacatgttcttttgtgtgttcagtccaatcatttgggctgatacatttcagttgactagtgtacttaaaaaagagattgatttaagagagattggggcttaaattttaatttttagtcaactgggccctttatgtgacagcccatttattggtcaacccaaaaattacaaccctaccacattcatcatcattatcttcatttcccttcacactcaacccagccgccttcttcaccaacaccaccataacctccattcacctccatccattaccaacccgtagccaccacttccagtcgaacctccgcctgactccaagaaaaccaacccaaagcttcgttcaaccatcaatgtgaaccaacccgaaccacccagccgcagccttcaccaacgcgacccagccacgaaccactgcaccaagccgagactccagtcgaaccttcgttcgacccaaccacgaactcgccaccttcggaaatcaccatctccatcacccatgcgaaccaacttcaatcaaccatgtccccttcgctcttcactcagcccatctcactgttcaccttcacttcatttcaaacacaagcagctgccattacgaccaccattgtagttcatttttgctagtgaaatgcagaggaagtcaaagctgccacaaaaagcattgtcaagagtgattgggtaaaaaaaatttttttcttaattgaatcacattatggctgctgagtagtggataatgtgtgggaaagatttaaattgggtacattaataatttgaaattagtggtgggacttttaaatttttagtgtgatattagaataatggtgtggttctttgtcgtggctgtttgtgatggtagttattagtgtaaatgcttggaattttgagttggtgaagtggggaaagtgttgagtcttggatatatgggattgtgaataacttatacagggaaaatttaccatggcgaattgattcgtggaatgtgtgtaatgtcttaaatctgatttggtgaagagtgcaagaattttattgtgaatgctgtga

SEQ ID NO: 72690 - DNA, 702 bp, Cannabis sativa
aacatataaagtgttctaaaaaaaacgatatactggacattggttctaataaaatgaaaatataattggtaacaatattttaatctgaaaaatatcaatcataaggaaatgaatcctgaaaagaagactacatcgaaatgggttggattgaatcggttctcttttgatcaaattatccaactggaagttccatgaatgttttacttgagaggcaaccaaagtcagagaaatttctcaagaaaaaatcagattatgttcaagagccaattcaaagagatgcccttaaagggctatggaaaaaaatgatagaattgaaaaaaccagcactaactttcaatccttatggtggaaaaatgagtgaaatatctgaacaaatgtcagttgttccttccccctatctccatcagttggcaacactttatcgaacatcaaatagatgatgtcaaacatattaacacagtaatatttctattactaacaaatgtcaatttataacgaaataaatctttcagttgtcctcagcaaaatagataagacatctcaattttataattttatattagcctaaaataaggccttctacggcctttggttctatcaaacacatagatttcattaacacttacagctcaaaacacaaaactacagatgaaaactatgagattcatcgtcgctcagagtgaactctttatatggttttga

SEQ ID NO: 72691 - DNA, 1184 bp, Cannabis sativa
  modified_base (334)..(335): a, c, t, g, unknown or other
  modified_base (365)..(369): a, c, t, g, unknown or other
  modified_base (535)..(554): a, c, t, g, unknown or other
  modified_base (1027)..(1027): a, c, t, g, unknown or other
gttaaccatggcaattaagatcaaacaataataggttttataaaacttgttttaataataaacaatataaaacacacacatgcaacaaattggatagttggatacagtatttatttaatgtaaattaattaaataattaattaatttttgaaaattcttaataataaaatattattttcgaaaatattcaaaataaattaaataattaatttcaaaattaaacttataaatttgaaaaattaaatttcaagaaacctaaatatctatgcaaaaggatgctaacaacttttcaaatttaatgttatttaaaataaaattaaatattcaataaaannaaatgataaataaatatcatttatctaatnnnnnaatttaatttaaataaaaataaaaaaatttgaaagtttgtaaaaatatcttgttacaatttaaaatttcttcattaaaataatcttattttaaattttaaataaggtcattttattaaaaattaattaaataatttaaaatataaaatatctaaccttaaatttannnnnnnnnnnnnnnnnnnnaattttaaaaataagataaccaaccaagcaaaaaaataaatttttacctattttcaaggtttaaaaactactaatatgctaaatcaattaaaaaaattaattaatttaagtctgataattagatttgaaatattaaaaacaaaaatctaaatacaaaattacacaaaaaatttgaaattaatttcatgaaaaaacatgaaaaaaatgaaaaattggaaaaaaaaaatgcatttggtgcggatggaatgcattgcataccatccgcgcgcgcaagacttggcatttgaccgagaaaacacggtgcaggaggctgcatgcagcctctctccgcgcgcaggggcaaatttcagacatcttgggcgtgttccttcggacatgccctgtctgaacgcgcatgaaacccgagtgatcactcgtgtccgctcgcgtaagtggggtgacaccacctcttgatttttccgattttcaaaaantcataactaattcaaataaaatggaaattgagttctgtaaaaaaagtgaattgcttaattttttccatattatccaaaaaaataattctagaacgaaaatcaaattcgttttttgtaaaaatttcacaaacatcaatcaatcatcaataaacacata

SEQ ID NO: 72692 - DNA, 1193 bp, Cannabis sativa
  modified_base (106)..(116): a, c, t, g, unknown or other
agtcaaagaaaagttcgagcgttggcagaatgctaacaacaaagctcgatactttatggtgtctagcatggtcgacacctggaaaataaggtttgccaatactctnnnnnnnnnnnatatcatgaaccagttgactgaactgtttgggatggcgtcagattaagatcattttgaggcgaccaagaattttatccatggacggatgaaacctcatcagacaatgcatcatcaccaactccagatgactagttacttcccaaaggctgagaataatggagctattatagatcagacaactcaagtgaggttgatcttgaatagtttgactccagcttttcttccgtttacatcaaattttgtcatgaacaagttggattttgatttccacgagttaatcaacaaccttcaaacatttgaaaatctgattggaggaccacagaaaggaggaactaaagctcctagttctagcactgctaatggtacggctaaggtcgaggcaaacattgcctatgcttcgaaacccaaaagaagaagtggaagaataggaagaagcctcttaaagttgttaacacaaataataagaaaaaggctactaatgcaaatgcaaagcaaaaaaggaaagtgcttctattgcaacgaaaagggccactggaaaccccagtgtcataagtttttggcaaagaaataaggtatttccatttatgctattaactcatgtgttttagagaattattatctccttgggctattacttctagatctaataaccatgttaattttcttattatttcagctccagctgcttaaacttagattgctatcctagcgagttgagtcggatggttggatagaagggtggagattgtccaagtgaagatgaagctcaaatcttctttattttttatttaattgtttcagtttataaataatttagtttcaattattggttttggattttattccctatttcatattattgctgacaattcattagacaattttgagattattaataaaattttctctttcagatattttgttatgcattgcttttatgaaattgagcttccttttcctttaacttgtgtatgctaataccgattatatttatatgtttatcatgtttgtatgtgtttgtgttttattatagatgcaaaatctatggtatattattctctacaaagagataatac

SEQ ID NO: 72693 - DNA, 619 bp, Cannabis sativa
atttacatttattattcattatttaagaagatcgtaaaaaattaaatgactacatgaaagattttgacaaattaaaatcgcaaaaaataaaaggtgacaccacgatttatagtagttcacccccatgtcgcgatgataataaggctatgtctactttgtcttttattaatttaatccaacacactagagttatgttctcaagagtgtggaaaataatacaattggagatttctaggtgaaaatctatatcaaagcttatgaataaaaggcgcatgagagaccaaatactcatatacatgataacaatggtggtggtgataaatgttcttagaaatagtgaaccaaaagagccaagaataaagagtggtcccttattcttggtagaatagtgtttgaaaagttaaaatggtgactggatgatgaagatggtgtcatccaagtatgaaaaactcaaaatctaagaaagggataaagaagagagatctcaagaggtcaaaaagtgattaggaagaggtctcaaaagcagtctagaaagtggtccccaaaccctagccaatcattatgtatatataggcctagagtttggtagtgactctccacaagtcagggtatcttactc

SEQ ID NO: 72694 - DNA, 924 bp, Cannabis sativa
  modified_base (785)..(786): a, c, t, g, unknown or other
  modified_base (884)..(885): a, c, t, g, unknown or other
ttatatacatattttgagatacacataactagtcactactaacttaactatattccatcagcaaaaaaaccaagacagagcaggaattaagatctccatcgacaaacacacaaaacccaccatgaagaacataattttgattcacatttcaaactaaaatacagcttttcacaaactatggagttgaaaaatcactacatgctaacaatattccttcactttatccgtcagcgaaacagattaacaccgaaatcaatgtacttagagaaagataattaaattatcagcctaaagagacaaactgaaaaaaaacatgaagctacagagaaaagaatgatatacaaattttgattttgtcagtatcaatcatcaattcttcatcataacattataatagaattattattcataacaaaaacatcaaaatagatttagatacagattatatagataatcaaaatacagaactcaccttcagctcggctttgagaaagggcggcggctgagagaaccggcaacgttaaagcttaaatgaaaggaaataggttttgaattagggtttttctacttttatcttactaatagcatgcttcacgtgcaaggcacgtgccgatttcacatattttatttatatttttaaaagggaacaaatggtcaattaatttgtgaaataaaaatcaagaagaaaataattaaacgataataaaagatctatttttttatgaaaattttatctacaccctcaaaaatttttaaagacaatctattttaataatttttatttnntataaaatttatatctttaattttactatgtttttttaattattttctttctatttatattattaaaaaatacacctatcaaataaaaataaattatnntttaaatattatgacaaaaaaataaataaaaaattatat

SEQ ID NO: 72695 - DNA, 946 bp, Cannabis sativa
ttaaaattcaagcttaaagatataaaaataactctaaatcttagagttatcaacaatgcataccgactcgatttacctggagagtataatgttaatgctacttttaatgtttctgatttgagcccttttgatgcaggagatgatttgaggacaaatccttctcaagagggggggaatgatgaggacactaaggctaaagatacaagtcaagttccaattggcctggtgatgaaggcgcgaaccaagagattcaaagaggaacttaacaacatagtcaacataattctaaaaaaagaggagaccgtggtcaacactgaaggagagaaaaaaattgtgcttctcattaaagtagactcaatttagactcaatttaggagtgatttaggaggatcgcaattttttgatcatagctattggatttttggtaacttttagcaactttcctttttaatttcgtttctttttttttttctattttattttgaaattgtcgtttttatagttttcttttttcttggttgtaaatttgctatataaagccttgcaaacactttggaaaatcagattgttatgaataaaatttgagaagttttcttcttgagttcttgaaggaactatttgaagttatcaaggggtattccttgtggcattcaacctgacttatcaagaagattttcatcaccgtttgtggcatcttccttcataccaaggttcatgcttaactaagcattgggtcgcagttccacaccccaaatttgcgagttcttagaagctgccatatttggtgtccgatttcatcacaattgttggtgtggtttgtatcacttggcgtccctaaggtttagggcattataacatggtatcatagtaaccacaattttaaaggtcttgaatattggctacatatgtacatttacggtgaagactagcttgactcatggatagt

SEQ ID NO: 72696 - DNA, 1028 bp, Cannabis sativa
aaaatttgatgtggggagacacaactactattatttcctattttattattattattataaaatgatgaaaacataaatatgacaacaatgcataatacatattttatataagtctatgaagaagaacagtataaacatgtcaaagtaagaatgaaagacattgtaaaaataattgacacagtagagaaaaaaaaaacaatataaaagtaataataagcgtgtgacagtagaaaagtaataaaataggaaaagttagtaatgtatgtaaatttccctaaaaaaaaacaccatattttctttttacttattttttataaatatctcaaaagttattacatcttttaccatctacacaatttgattttcaattttaccaagtcatatacaaaattttaattcttttcctttttttttttcagttttttttggttaatcgcatcaaaaaaccactagttaaatcaaacttcattttgttgttgagacctgcacaacaaaatatacttactatttccattttatttattgagaaaattaattatatttccattttatttattgagaaaattacattatatttccattttattttactatttaatgtttacctttatttttatattctttaaaatatacttacttttataaataatattccatttaaccccttaaattaatctaaattatatgctagatttaaataaaaaatgaaaatagactcataaaaataagtatattttaataaaatataatatcaaaatatttttaattaataaatacaaaaaaaaatattcctcaacttaatggccttaatatttacaaatactaacattattttcagttaataaattattctcaattggttaatcaagtcgtcatataacatatcattttaagattataagtaattttaaaataattttagccaaaagttaaaatcccaggaaaaaaataaataacactatatatgaataaaacaacaaacttgttcatacatataaattcaggtttataactttatacttgtgtgg

SEQ ID NO: 72697 - DNA, 1236 bp, Cannabis sativa
acccaatccgagtcatcaccacactccttccttagtcaaacagaacaatgtaatagcactacaataccccaagaaattctcttttttctctatggcacaatagactaggacatcctagtgccaaaattgtacaaagtgctttgtcttcttgtaatatcacattaagcaataaaactgatgcaaatttttctgatctttgtgctacttgctgtttaggtaaacaccataaatttccttttccaaattccactactgaatataatgaacctttacagcttttgcactcagatttatggggtcctgcccctattgtctcatctagtggctatagatattacattagttttattgattcctattctagacacacttggatttatatgttaagaacaaaatgtgaggctttaccaaccttgatcacatttaaagcacaagttgagttacaacttggatacaaaatcaagaagctccaatctgattggggtggtgagtatcaagcttttaccaaacttttaaatgagcatgggatcattcataagttgtcatgtcctcacactcatgagcaaaatggggttgctgaacgcaaacataggcacatagtagaaagtggtttaaccttgttagctcaagcatccttacctctcaaatattgggatgaggcttatcgcactgttgtttttctcattaatagaatgcctacacccaaattacatcttagtacacctttggaaacactttttcaagttaaacccgattacaccatgttaagggtctttggatgcttgtgttatcctaatcttagaccttataatagagttaaactcaattataggtctactccgtgtgtttttcttgggtatagcttgtctcataaagggtacaaatgtttgtctaaggagagtaaactctatgtgtcacgtgatgtactctttgatgagcacatattcccatttgcacatgctgcattttccactaaaaccgattcacactcttcacctttacctgctgtcatacaaccttttcctcaaaatactcctcatggaccacctacagtacctgctacacctcattcatgtcctactcccaatgctcattcatctcataccaatattaaccctcccttatgtgtaccaactgttgcatctgctactagtgttgcatttgaaattactgtcccagttcagaacgccattcctctacccactacagctgacacaactcaaccacctacagcac

SEQ ID NO: 72698 - DNA, 947 bp, Cannabis sativa
  modified_base (711)..(715): a, c, t, g, unknown or other
atgtggtatttttcaaaattagtaaaaaattgtataattttaaaagggaaatattttttggggcctttgggctaggtgggccttaggcacaagcctagcccgcctatgcccagggtcgggcctgtcgggaacttagtgtccaagttcaggattcgggtccgagtccgggtttcagggttcagggtttggggccagggatggggtcaaatccgggtctaggttcaggatcctggtcaatgtgcaagtctagggttcgattttaggtcttaggtcttaggtctcaagtctgggtctaagtccgagtttagggtccaagtctggctacgagtctggggttgaggttagtctttcaggttcgaggtctggagtttggatccagggtctggctttaaaaatataataagagtaatttttaatattatttaagtatttttctagtagagtgtacttatcattttatggggtgcaaataaaattcataaaaacctataaatttagtgttaaccctataaaaagataatatgacaaacttaaaataaaaaaaaaaagacaaaacacaacaacaaaaaaaatgaagcaactcagtacagtaaaataaaggtgcttaaaaaaaacacaaaagtcaaactaagcattataatattcaatctcatattatagaaaatcttgttataatgcaattataaattaaaagaaaaatatcaagacatnnnnnttgttaaaatatacaaatcattcataaattaactttaaataaactacaaaacgtccaaaaaaatatatactacatttattaattatgtaacaaatagaaaaatataggaggagtgctcttaattttttgtaagagagaaaaaaagtgttaagaaaataagatataaaaaagtacttattatatctattctatataaagcgtgcctatataatagaattcttggtttatgaga

SEQ ID NO: 72699 - DNA, 951 bp, Cannabis sativa
  modified_base (505)..(519): a, c, t, g, unknown or other
tatatataatgattttatgttatttttcactttgatcattcctaggttaatatctattcagtttatctttttgctgatcgaaataaaaataaaaacgtagagtcacatcaacacagttgcaaatttgtaatatcacgacaattcatgtttgtggggcttttgattaatattccacgcaacgcatccatctcccatgttcatgtattgggggcggctctatttaaaattattcactaaaataaaaatggagagagctttgcaaaattatttttgtttgataatagtttttaattaaatgtgaaattattaattttaaatttataaattttactcaatacaattatttccccgctttattgttaactttaaattttcttttgtgtgacttgttgattgtttttgtttgataaaaacattaattactttttttagtttgctaaagttacatttggtaatacttttatttttaaattttttaattacaaaaataatttttttttttttnnnnnnnnnnnnnnntttttaaaaaaaataaaaatgtgttctataacagcttttattttataatttcaaaaacaaaaaacaaaagtgtgttatgtaacttttattttcattttcatttgttgattttatttaaatcaagactgggtccgggggagggtccaagtccggggcttggttcgagtttgtggtttccaaggtctaagttggggtttgagtctaaaatattaattaaaaataactatttaaaaaaaattgaaagtaattttttttttaaaaaaaaaaaaaatagattcttaactgaaaaattgataagtaaacacagttatatagaacatgattttgaaaaatattttcacttttttaattttaaaaacaaagaactaattaaaaaagtattaccaaacacaccgtaagagttgcacaatattaaatattaaattttcggtc

SEQ ID NO: 72700 - DNA, 1794 bp, Cannabis sativa
ctaaaataattagctttgattggaatttggagagaattaaattttgattttagtgtatttctcaatcacgtgtctttggtctttcacatgggcttgcagttgggcttctcactttttttttttatactttcatttctatcattttttttatctaaatatgaatatactcaaagggattagttataaattggatttatttatgagaatgttgacccaatcattgaatgaaacgacatgtcgtataaatatatgtaatgtatgaaatctacagaatagtatatgatatgtacacatttatatatgagtttaataagttacatgtctttttcaaactgggttagaagtgtaaaaataaaaaaggccctttattttattagttagtctctattatttttcaaaaattaactcaaatttaaatattatcacttatctcattttaaattaggggtgtttatgtgatctaatccgcactattttactcatagagattcactaagaggttgtaattaacactcctcgtatatataattatatattttaaaaaaaaaggttagtaaaatttttaaaaacacaaaaaaattgtgttttttatatgaatcattgtgttttataagacgtttaatgtgccaaatttgtttacttgtataaatgtgtaatcacatgaaagaaaattactttttacacacccttttatatctttataaaaaatcaatttattaataaaaaaaatgtaaaaattagaaaccggttaagtaaacggggtatagcaattaaacttttattttatattatgtacattgatgtggaccctaattatttatatatatatgtagtcttattattaatgttataataataataataataaaaagtcaaagtgggattttggcgcctatttacagaaagaaagaaagagaaagagaagagtttatctctatactctctgttactccatttcatcaaaaatggcaaaaactaaaactaaaacaaacaacacagaagaacccaacaacaacaacattacttcttcttccttttctctctctcaggcgaatacttacttcttcttctctctggctgcttcgtttctccatactctctccaatccatcacagcctcaagaacctctctctctctctctctctaattatatatatatatatatatttatggttttcaatatgcacaaaaacttttagcaccccctgtcaattaatgcccaccttttcaatcctgcaaagtttcccattacttaaatctttctttctctctttttccactgtcaattttggtttccattgaagaaaaagaaaagggaaaatggtttgaagctcctccgccaccaccgcctccacttccaacgcctaagaaatccctagtttgccctcctgcctgatcttgatcttgatctgtactactactcatcacagactcagtcaagaacgctccaacaacctctttctctctctggtacattgactgaggtgaggttcttactttcttcattccatttattttctccatttactaattgtattcttcgatccgggtttgtttatatactgttcaattttgatccattcccatctgagttctttgtgtttgattcaaattagaatatattctttctgttgtttggttgcagagaaatatgtttgaaatgaaattatacatattttatggttaatattgatgtattatagattatttgaagtgataattcattttggggatttgggttgggcattttttctgatagtaaatactcatatagcatgttatttctttctttca

SEQ ID NO: 72701 - DNA, 819 bp, Cannabis sativa
agaacacctatattgacctcctacaacataaaccaatcaacagaatccagaaatacatacaaaatcaagacatgccatggatgaaccaagcttgagttttcaaactcaaacttgtgcatccatcacaccaaacattaaaaccagctgcaagaacctatttctaacttaaattgagcataaaaatgaattccaactcatacaaaccctagcagcccctaaacttcaaaattacataatcaaactaaacttcaagttaagaaactaaagaactagggtgctagagcttacctccaattgaaaacactaagatttcttgttgaatttccagaaaagatgaagaaattgagtgagctccttctggtttgggtggtgcacgagcaaagagagagaaagagaaaagagttttctcaaattttggttttttctttaattcttatttttcttctaagtgtaaaagggttaaaacattaattcatgatgaatcaaaccttgtggccaactgccacaacccaaaacagtcacctaatccccccttgccaaaagaccaaaatgcccttagtgcttaaacttaagctaattcaagcccaagggtaaaatggtcaaaaactataaccccgctcaaacccggtattcaatttttctccaacatttatcccactaagaaaaggttctagacctacccatgtgatttaaatagccatccatcgcatttttcatcgtcgtcaagcaaaaattataaaaatagcataattcatatataactcaaataatacctctagagtttaataaaatttctggaattgagaaactataactcta

SEQ ID NO: 72702 - DNA, 786 bp, Cannabis sativa
aaaacatgcagagcaaatatagttgtacaaattcttaaaactattatgacatggcaaaaaaatgcatgcaaaataaatgtgggtgtaaaatttacttgtctaaagttattagcgtgtgaaccttgtcgtaaaggtgttctatacactacaaatggaggaaagatcagatgcatacaaagtaagaaattaaaatataatactaaaagagatatataagatatgaatgaaataataataataataaaagttattacttagcaacctgtgagaaatttttaaaagtgtatataatttttgtaatttttatatcttgttaaaagtgataaactaaataagaaaaaagaaaatacccccaaataatcaaggttggaatctatgaactaaaacagacaagtattgtaaatatttaaatggtgaaactaaacaaagatgaaagattaggtctttaagtgttcaagcatcaattcatcaataaaaatagaaaaatactcaaaaccacaataaagtaaactataccatctttattgccttgcctttcattcataattcatctcatttaaaatactatatgaatggattagtaaagaatttaacttacattgtcgtcatcttgaagtagcttagatgaaagtttgttgattttaatagtgtccagaagggagttttcttttttttttttttctttttacctaagcaaatgagaaatttggattaagcagtagtatttatatgtatatgtgttatttaaaaacaaaaaaaaaaccatattatttgtcatttgaatat

SEQ ID NO: 72703 - DNA, 2299 bp, Cannabis sativa
ctctttattttcttacatgcttttaattttgcgtttctcggtttgatcactagtttcttagttagtacctttatctccttatctggttttagcgattttagagtggaattgtatctgggtaaattttagggtttaggcagaacgtaggtttttgagtttctccaatttaccaacttttggtttgataaatttcatccaggaattgggattgctttctctttgcagcaatatcctaatctggttcagaactttatcgtctagaatatttagaaacagagtgtcccactgaacttgccatcccatataaacccagaacttcagaacccaaatccaaattagagataaatgatgcaaaaattagggaacacatggtaaaaacccatcaagatgatattgccaatcaccacagatgcttcttgtaagaaattacagaaggaaaatgtcgtttcttgtgagatgctgcttggcctgaattccccaatttatggtctattcctcttgttaggcctttattttacccaaagtcacaattgcttttgaaccggtgacctggactttgaaatcatgatctccaagtctcaaaaattaaagactccccaggatcctcacggtaccttcgaggctaaactaatagagtcgaaggtgcaagccattggagattacgtaggtaccatcctaaggacttgtggtattgaatataagcgagaatgccgagttagatcggtggctattggcgagtttagttgttacccactaggacgacttactcgttaaccatctgaggggaccagtggcgaggccaggttgagtggctcgaccgggataggcacttggagcctcgaacacatcagggttggagccgttatccccctgcgagactacttcaaggacttcctaaaccatctcgatcttccccatttcatacagaatccttgcaagtttgaaggttatgtacaaaattttgaactgggagtgtcccgcttccctggaaatagagtatctttactctgtcaaggccgttccatcgaggaagaatgtagtaggggatttttactatcttcggactcactcaggtgatcgtaagatcattgtaggttttccaaataaaactctttttaaagatgaattcttctagacgactggtcttttccccatcggcacaaccacctttcgcataatacgtaagtaacttttgcttaagacttggttaaattgttccatgtctttttactctggttttgctgatcttaattgtgcctttgtttttgacaactgtcttgaaaagactagttcttactcctgagatgcccgagtgccgcaggctcctactgggtcttccctttggtcttcggtcatctgagttccttttgaacgaggtcaatctaaggtctgtgggtctccttactgacaaggagtttacttgtggttacaaatatcccaagtattcttcttcgcagtaggtccctgtaccagccgacgaggagggtcaggattatgtggcttaggcacattatctccagaacgccgtcccttgagaagccaaataaggagtatctcaaggtaatcaattcggtcggtcgcccatagtgcttagggccgagcgtaacaccttagtgtcgtttcgcgatagtcattataacttttacagctggaatcccctcatcatagatcgcattacacataggtttaatagttggtacccaaggtttcacatccaaattagatgtactgacttgttctatgggatagccgagcaatacggaaccatgctggatagggcaagtcatttagatgcgacctgggatttagagccaattaactcctatgagatattcaggatcaaggggtgtagggattttagtggatattatagtccttcctcttcgtcttcttctgtttatggtaaatcccttaggcaagagattatgccctagtttccccttttacttatttttaaatgaatgctaacatactatattatctcgcagaaatgaaactcgaggatctctttaatgtatcaggcaaaaagggaaagaagaggttaaccatctcggaggttccatcagatatcgacttggagcccttaaaatggcccaggaagacaactaccaacaagaagcgagcctcctagactgctaatctcaagatccctaaaactgagactcaggctccgacccatcctttggcccccacacataccgacgagcctattcccaaaatgacttaagcttctgcctcatcgagccaagcccttgaaactctttcctgtcgaggctgggaatactggcccggagtacac

SEQ ID NO: 72704 - DNA, 1624 bp, Cannabis sativa
  modified_base (1534)..(1550): a, c, t, g, unknown or other
  modified_base (1592)..(1596): a, c, t, g, unknown or other
agtatgttgtttcttgcttttccatgatatcattgatgttctaatgagaatacaaaagcctgtagtagacctccttgtgtctggacaagatgcccaatcagaatcggtataggcatgcaacttaacctcagatttggctgcaaaaaacaacccttgtccaggactgcttttgatatattgcagcaccctttcagctgcatgaagatgtgttacccgaagtgttgctaaaaattgactcagcttgttaactgagaatgaaatgtcgggcctagtgattgtcaagtactgcaattttccaactatccttctgaaaagagtcgcgtctgcaagtttctctttttcatcttgtccaagcttgaggttaggttccataggtgtgttcatgggcttgcagcctaagtgccctagatcctcaagcagctgcaaggcataatgcctttgagagacaaaaattccttgctcagatcgagcaacttctaagccaagaaaatactttaaacttcccaagtccttgagttgaaatctgtcatttagtctaattttcaaggcttgaagttcctcaagattgttgctagcaaggatgatatcatcaacatacactaataggaatatgaaattcccattaaagtgtttgatgaaaagagcgtgatcggttgctgaatgatgaaagccctcatccaccaaagcactagaaaacttggaaaaccattgccttgaagcttgcttcaatccatataatgacttttgcaacttgcaaactgggtttggtggtagctcccccttatatccttgaggcaaagtcatgtaaacatcttcattaagatctccatgtagaaaggcattatttacatccaattgatgtaaataccaacctttcatggcagccaaggcaagaactagtttcacagtaacaagcttagttactggtgcaaaggtatcagtatagtctatcccctcctgttggttgtacccctttgcaaccaaccgagctttaaacctttcaacactgccatcagcatttaatttgatcttgtacacccatctcgagccaataacatgttgatcttcaggcaaagaaacaacaatccaagtgtgatttttctcaagagcatctatctcattatccatagcattatcccgctccggaataccatgagcttggctgaaaaattcaagctcaaagtgacttgagatggccaatgctactgctggaaaggatggtgacaacctgctgtaagaaataacatgagacaaagggtaaggggtaattaaagaaccatgagcagcaagagcagtaggattagtagcaagaaaacagtggtagttattcaaatatgaaggccttctaacatttctacctgacttactttgaatagaaataggaacaggtatagaagcagagttagatggctgagaaggggaaatagaaggctgagaattcgactgatcagtatgcaataactcagattgcatctgtccagaatgcagattgctggtttgcatgtgatcagtatgttggaaattattttaccannnnnnnnnnnnnnnnncaagtatgttggattaacaacctgatatgaattctaaaacannnnnaataaacacatataaagttagaaaacct

SEQ ID NO: 72705 - DNA, 646 bp, Cannabis sativa
atattgaactttgacatagatttccaacatttttcgcgtcaatgaagggtcgataggatgcgtagaagggagatccagaccaccgaggctttctttgggatgactccattttggatttggttcgtggtgatgaagtccaatttttttcttcttgggagaagaagcaattcatatacctggccctattcttgcatgctcaaaaacattgggtggccttagaggcggatttagagttgtggaaattattggtcctcaattctagtattggctcaatcactccaaatgaattgaagaagttgatggacaattactgtaacatattcacatcattgatcgaccagtctggtatatttgacacccactgcttggtaatggtcccttagataacagcctctgaaagccaagtcgaccattcactcgggatctcaagaacagaacggaagtaccacagatagagacgaggtaatacgttttctaagtaatttgatacattgataaatatgattataataacactaacttattgcttatttactaatgcaatggtgattgcggtgtgtacgttattgagcatattgagcataagattctcgagttgccattcggtggagtgaatgacgacaacatgttgtttagacaaagatgg

SEQ ID NO: 72706 - DNA, 763 bp, Cannabis sativa
ttttttataaataaatttataattaaattaaattttgaatatttattaaaaaaatataattgaattgtattagatttaattttattattattaattaaataatagcaattctaatacaactctaagtctctaagcaaatatgtattacatattactaatatctggtttaattaaaaggcagtataaacatgcatgacaaagccatttttctaatattgattttttttttctaacttcatttaatattgaatattctttgttcatataaatatatatttttttaatatataaaacatcaaaattaaatttcactttaattacaaaacatggtatgtatgctctaaaagtgaaccacttgtcaaaagtaaatgaaaaagagtatagagaaaggagaaaaaaaatgtgattggccttaagacggcagttttaatttcaactttatttattttcttcatgtgtattgtttgttttggtataaaacaatattgattgagtgatcaatactaatagtaataatagtagtactataaaccaaacaaaacgtcacgtttaagcaaagaaatttattttgtttagattgaaagcaataaataacaccttcttcgtttaattaattagaacccctttaaataatttcataggaaaaaaaaaattagaacccctttaaatgatatgatattttctaaatgagcaccagtggtgtctagcactttctcgacatatcgtgttgtgattgactagcgatactctctaaaaattatta

SEQ ID NO: 72707 - DNA, 1285 bp, Cannabis sativa
aaattttaattaatatatattaactatggtgtgatatatatatataaatatatatatatatatatatgcagccatgagattgttggtgtagtgacagaaataggtgaaaaagtagaaaagtttaaagttggtgataaaattggtgtggggtacatggtgggatcttgtggcacgtgtgagagttgcaacgacgaacttgaaaattattgtccaaagatgatacctacttgcagcgccatctaccacgacggagctaccacctacggaggcttctctgatgtaatgatggccaatgagaactttgcgattcacattccagacactctacctcttgatgccactgctcctctcctatgtgctgggattacggtttatagcccattaaggcactttgggctcgacaagcccggtacacatgtgggtattgttgggcttggtgggcttggtcatgtggctgtgaaatttgccaaggctatgggaattaaggttacagtgataagtacctctcctgataagaaggaagaagctattgataatcttggtgctgactcatttttggtcaatcgtgaccaaaatcaaatgcaggtactaattcaattagttattaaaaggttttttttaaatttcaattaatgggttatgcatgttttttaattaaaaattattatgaagggtactgccatgagtacaatggatggaattatcgacacagtctctgcagtgcacccacttatgcctttgattggtctattaaagtctcaaggaaagttgattatggttggagcaccaaacaagcctcttgagctatcaatttttccattattattgggtatgtgtatttctcacctttgctgtatatagattgaatgaaattagacaaaagtttttaaatctaacaatctcaatagttcagggagaatttataacgttgaaaaaaattcagggggatgatttcgtacatgttaaagtttaagggataaaaatccaaattagcctattatatatatatatatatatattatagggttggtataggcaaatttaatataccataaaagatgatgtacaatgtgaattaattgtgtgaattattttagttcagttttgttaaagaatgtgattttatgatgttgcaggaaggaaaatagtaggtggaagttgcactggaggaatgaaagagacgcaagagatgattaattttgcagccaaacacaacattacatctcatattgaacttattctcattcattatgtcaacactgccatggaacgtcttctcaaatct

SEQ ID NO: 72708 - DNA, 813 bp, Cannabis sativa
cggcgttccaaacgagcccttagactaataatttatacacaccattgttcgctttgctcgaaagagatgaaatcaaatcgaaaatcgctccatcaatcgtctccttgggctcagacgaaatcaaaatctttacatatgagtagggttgattgaaaagaacaattctcttcatcaatttcctgtaacaatacaaataattataatttaaatctttacatataaatataaaattttggaaacaacatcaaccctactcaaacatgggtctgaaagaggaaaaaaaaactcatttcgtaatcgccatagcggctctaagtttcattaaacctaggcaacagtcgacccactaatcaatgaatcaagaagtcccccttcaacgatttttgcctcttcaacgatagtaagtatgaaataggagaactccccttctccttgaattgtgaagctccaacccactaatcaatgaatcaagaactccactaatcactgcattgaccatttcgacaacaaatttcctttcggtagtgagagactaaacgtcgtggctttggtcagggacgttgatggtgatagagatagacgatgctgaacagggagttttcgcctgcaaaccaaaaaaaaaaaatgagaaagaaaaaaaagagagatgttgtcattggtaccataacacattgagattgaaataatgtgcatctcgaaagctagattattcttttattttatcatcaataaagaggttgtgtgtgaggatttcataactctgtgagaatatcttatcggtatcaatttccatgtccctttgcgaataggaga

SEQ ID NO: 72709 - DNA, 1082 bp, Cannabis sativa
acttattttgccaccaactttttcatgcttatatatagggcattacttcatattaaaaaaaaaaaacaaaaaaactcattgacaaaatcaaataagatctataaaagaaaatcaaattggaccatcaaagtgaattcaaattataaaatacatatgcataacatggcctaagaataaataattaaataattttgtttatatattattttcaataataaaacataaatacattgaaaaagaattaaatcgtgttgtatttactaatttaataaaactaaagaataaagaataaataaaaattaatacaaactcgatcattcttaatatataagtcatactattattgttatttctcaattaaaatttgtttttcatcaataatatttgcacatataaaagcaactagctagcataagtgaatgcttaataaaatgtataaatgtgaatcaattattaaagctttagaggataattaatcaacaatgtggtctccatctacaaaattttaattattgttctttataatttataaataaacatggcatgtagaaatatatatgtttattaatttaattaaaaatatatttttatgtgaattcggaatggtttataattttaggtaagagttttatttgttttgatcattttgtataggatgatatatttgattgatagtttttttagtttgtttattgatatattatatatataggagctaatacaataggtattgtaatttttacctattgatatgtataatgatttattgccattgatttaatcaaatgacttaaattaacttttaaaaattacaccataattaatatttctctttatttataattaattttaaatattaatttggatccaactaacaatactccaaagctaactccaaacttataatttttcttacttatttaccttataattttttttataattttaataattattttttaattttaaatttatatattaatttcattttctactcagcaataattatagctaaaagagtacaaaatattcaagttatttaatcctaaaataatcaatacaatcaacaatataatcatagt

SEQ ID NO: 72710 - DNA, 1344 bp, Cannabis sativa
  modified_base (1242)..(1250): a, c, t, g, unknown or other
aataataataataatataaaatgacaatcaaaaatgaaattcttttattaatattattactttcttctttattcatcttaaacaactcaaactaactcccatcacatgtttgaatgagaatagataagagataaacacacaaatatatatataatagaagagagaagacacgcatgcatgcatgtacgtaggcttgtgcgtagtaggacaacatcatcatcagtatacttcaactcgccattggttgttaatcttcaatgatgtgagtatgtcatcccattttttaccaattttcatggcagcatcacctaaggcatcttcaattggttttaccatgtccttacgcccacctaagtatatgtaggctcctttaagcaacaactctagcacctcatcagcatagtcactaaaaatgtcttgaacatacatcttcccacccaatttgttcttttgttctctgctcaatgctatgttataaagaaaattatttgggtactccttttgatattgctcgaattcacttttaaagagtaggctatcgttgttgctcgccccttggaatagccatgcaagtccggagaattggaatgttggaatatcttctttgaagaaacgttgaagatgagccctaaatggcgcaacaccagtcccagtagccacaaatatgtgagttgcattagggtttttgaaatctcccaaaatcattgcctcgcgagttgggcctgtagcgagtgcagcgcgcttcatattattagtgatcaatagataatacatatacattctatgtcacattgtaaaaataatttataatattactggaataaaattccacaataaaatcttttcaatttgaacattgagcttagctaagaatacctgcgagttgaattttatctccaggcttggacttgcatagaatctcactagtggtgccaggaatactacgcacacataaagtggttgtttttccattaaaaaaatctccatatcttgaagaagcagctgaaaagtaactcaaattttttggatttcctggttcgaaaggattttcatcgggctacacaaaaattaattaagaaaccaatgagacgatgtcatttcttataataataattaatatatcaatgccactatattaatgtgatacaacgatttgggtagaactcgctcccaaaagttagctagcctgagagagaaggtgtatactactgatcaatcacatacactacaagaaatgtcacnnnnnnnnncacatttttgtgctggcaaaagctggtattgcactggtaaaatagaatttacttgtgatgtgttggtaaaagggggttggcaaatcaatgttgg

SEQ ID NO: 72711 - DNA, 2119 bp, Cannabis sativa
tgagatgtttacttcttagttcggagttggaaaagccttattggggagaggccttggctactgcttgttaccttattaataggagtcctaatagagtcatagacttgaagacgccttatcagatgtggtatgggaagataacaaacatgaaacacttaagagtgtttggatgtgcatcatatgtacatcacccgatgataagcttgatgctagatctatcaaaggcacatttctaggatatcctataggcataaaaggttatagaatttgcataaaccagaatgaaaaacctaaggtcattatttctagaaatgttgtttttaatgaaaatgattttcctcacttgaaagccgagaaatgcagtgtgttacctgatgcagatgcatctggcaagagggaagatttggcagagtttcaagttgacctcaaaggatttgaaccatcaagtgagaagaatgacaggatagacacaactccacatgagactgaggaacaaccagatctgtctaactaccagcttgctagagatagaaccagaagagaaatccatataccagcaaggtttgcagaagctaatctgattgcctatgctttgtccatagatcattcatgtgacataccataaccattgagtatagaagaggctttaaatggaaagtacaagaaggattggtctcgggttgtggatgatgaattaagcttgcttagaaaaaacaagacatgggtattagttccaagacctgaggacaagaaggtgatctcatgcaaatggattctaaaaattaaagaaggggtgacagaagatgagccagtaaggtttaaggcaagattagttgccaaaggtttcactcaggtggaagggatagattacagtgaggtgttctcacctgtggtgaagtataagaccattagacttatgttgacaatggcaacacagcaaggtttagaagtggatcaacttgatgttaaaactgcgtttcaaaatggttatctagaagaaaagatgtacatggagcaaccacctggattttaggtggaacaagatggaaaagagatggtttgtaagttgaaaaagtccttatacgatcttaagcaatcaccacgacaatggaacaaacgatttgacagttatgttcaggagattggtttcacaaggtccaagtttgatcattgtttgtatttcaagcacctagaagagtcagcagttgtgtatcttctactctatgtagatgaaatattaataatgggcaaagacaaggcagtaattaaatgaattaaagataaacttaaagcagaatttgacatgaaagaattgggacatgtaaagaagatacttggtttagattttcatagatctaagagtgatagagtcatgcatttaaagcaaaagaattacattgagaagatccttacaaagttcaagatgcaagattctaagagcacttcagtacctcttgggggacagtttgtattaaccaaggtagaaagccctatgacagctaaagagaaagaagagatggaagaaattccatatgctggctttggggtgtctcatgtatgtcatggttagcacaagacttgatattgcttatgctttaagcatattgagtaggttcacgtcaaattttgggataaaccattggagggcactcaaatggttgttgagatatttgagagggacatcggatattggattgacttataagagagcttcagagaaagtgacattgaaaggatatgtggatgctgattatgaatcaagcaaggatactagaaggtctactacctcttgtttcaaactaatggagattgtattagtttgaaatcacaactccaatctgttgtagcactttcaactacagaggcagaattcatgggcgaccacagaagcattcaaagaagcaatttggctacaaggaattctgatggagttgaagcttctagttggaaaggcaggggtatattttgacaaccaatcctcaattcaattgtgcaagaatctagtttatcacgagaagacaaaacacattgacattcggttgttttggataagggagaagatagaagaagaagaagtaatcgagctggagaaagtgaagtgttgcgatattttgcacac

SEQ ID NO: 72712 - DNA, 1030 bp, Cannabis sativa
gagatggtgaaacgtgaatgcgtgttaaaacttactcgtaacatggacttcacttgttttatattaaaacatacaatggaagatttttgggcaaattctagaccatatgatacaattacaactagataagcttttaatattcgtcctcaaatgaagtcacctcacaatggtgaaacattatatggtgttgtggtaactacattttttgatcctaatcttcaaaataatgttaagaataatggttatgacataaagctgagcgatttggcaagacaattgaaggaagccatgcaaggatttgagaatcattttctatgtcaagttatgaaaggtggggaagaggcttcatttgagattttgaaaagagtagagaatataagtcttatggataagttagaaaagcctaatcactcggttacatttaccaattagaaagggatttttaacgagattgattttgattttggccgactaataatttattttaaaatttattaattaaataaattagggaaaagataaagtgttgtctgaacaaagacatcgtcgctgtcttcttaaggtattggtggcgtcatattcactctgttattacagagtgataggtgcctataaaatgtgcccaatagatttatttttaggttaattaattaattgaaaagataaatatttatttgaatttgaatttgaaaagtagttacgaatatttatggtggttgagatattccttcaaagtagttgaaagattctttcaagtggttaagagatttcctcaatcggttattagatatttacttcaaacttaaatatctaattcaaaaaaatatctataacagttcttgttataaatatttattcaaataattaaatatgatttaacttattattttaaattaaagtatttatttaaataaaagttttattggttttagtttaaatatactgtataaacctaaaaatatatacattgttataaatattaataattatgtggatgtcctaattttttatttattaccatgaattgtaa

SEQ ID NO: 72713 - DNA, 865 bp, Cannabis sativa
gatgcatctaataattgaggaactttttgttctgtttttatgagtaagcttatgaacaaagagattatttttacagtgatgtaaatctagcaactgtcaacactcaatgggattaaaaaaattgatcaaatttatagtcgaaagtgttgtgtgattcgggaggcctagtgcatggagtgatttactccaatctctatccacatcttttcttttactatgttctagcacaccaaattaatcattgttctaacatacatctttaatttctaaattgatcatattcataattgtttatatgaagattgtgtattgaatttgacaattaagcaagttatattatttacagagcagatttgttagctttacttacaatgaaggatggagaattatagtaattctctgatgaataataatatgctgcagtcaaaatattacactaataatgtggtatacttttaaaatgagaaatggtaagaggcattttaagatattatattgttaatagtaagttttacaatgtagtgttggcacttaatgtgtctaatatcaatactatgtaatgtttcaatgtatattttgagttaatgaatataataaaatgtaaccatacaagtaatatggtttagtctttctcttgtattattgtgtaaaaagtgtacaaattactagcatgtttagtaacaaaaaaaaaaaaatagtttttaaaattttcaaaacataaagtcatgtttagttattgtattttaaaaacaatacggaaatttacaaaaatattggaatttgagtgaatttttataaaaatactgtcacacgaattttttttaaaaatactgtgtttttataaacaacagtagaacaactaaaa

SEQ ID NO: 72714 - DNA, 1508 bp, Cannabis sativa
gacccatactgagtcatacattcttgtggttctgggaaaaccaaccacgaagtccattataatatccttccacttccattcaggaaatgctaatggtttcggtaaccctaccggcctctggtgctcagctttaatttattgacatgttagacatttagacacgtaatctactacatctttcttcattccacaccaccaataatagggtttcaaatcctgatacattttggtggttcccaggtgcaatagataaggtgtagtatgagcttcgtcaagtatttcttttctgagttcatcacagtttggaacacaaacctgagctttgtagagtagcattccattattcgagatcgaagattccttaggccgaccggccaatatctcgtctcaaattttaactatctcagcatcttccaattgtgtctttctgaccctttccaacaaatctgactcaagtgttaagttaagtaactttccaaccacaaattcaattttagccttaaccatttctgaagctagcggaggagctaccgttacagcattaaagatctgcccgagactttttctgttcaaagtgtccgccacaatattggccttcttgctgacaagttgtactccatgtggcaatgatcttacccacgtggacatgccacatcatgtggacaaaaattgagataacaagtagaattttttttttttttttttaatttgtttatgaaaaataaaaatgtgttttgtacctatttttgttttgtaagtttaaaaacaaaaactgtgttctgtaaatttaattttttattattgttttttatttttatttaagtcaggtctgtggtccgggttcagatctgcgattcagggtctaaggcggggtctgagttggggtttggggtaggggtccgagtccagctccgacttcgtggtgtaggtgcaggtccaacgtctgaagtccgagtctgggtctaggtctgggtgtgagttcggggtcaaggctcgagtctgggttcagggttagggcaagggtctgtctttgggcctaggtttgtgtttcaggtatgggtttgcgtcaaattcgagtctagggttggggtcagggtcggggccgggtttaggtcagtgttcgtggttgggtcttggtcggggtccggggctggggctcgagttcgagtctgggtctgagtcttagtctgaggtcggggtcaaggttcgagctcggggcaaggtccagggttggggtcgaggtccaaaatattgataaaagtaaatataaatagattataattagaaaaaaaaatgtttaaaagttttttgagagtgacttttttttgggttttcaaaattttgtttttttttttaaaaaaaataaaaaagtaaaaacagttttataaaacgtactttctgaaaatattaaaaaaaaaagatattgacagctaaaccatctgaactttaaattttttaacatttaaccacaaaaatttattttttggggggcaaaactacctaaactc

SEQ ID NO: 72715 - DNA, 1032 bp, Cannabis sativa
gcttcagtgcaagcaatatactcagcctctattgttgacagtgcaacaacagattggagatttgccttccagcttatagtgcagcctgtcatttgaaaaatgtatccagtttgagatcttctcgaatcaatgtctccagcatagttagagtcgacaaaccccattacatcagagttattgttgttgtttttttgtccataaaccaggccaacatctgtagttccttttaagtatttgacaatccatttcacagctttccagtgctcgatccctggttctttcatcaacctgctgaatatgctaactccatagcacaaatcaggtctagtgcagaccataaggtacatgagactccctacaagactagtgtaaggcacaaactccatgtagcttttgtcttcatcagaggagggattttgagaacaagacagtctaaactgttggcttatgggagtagaaacagatttcacatcagcaaatccaaatcgatttaggattttgatgatgtatcctttctgagatagtctaagttgcctcttatttctatcattgaaaatttatattcccaatatcttcttagctgaccccaagtccttcatatcaaactcactactcaaagcttgcttcaccttgatgatttctcccatttgtttgcttgcaatcagcatatcatcaacatagaggagtaggtataccagatttcttgagttcttcacatacacacagctgtcatatgaacttcttttgaacccaatcttggtgacaaaatcatcaaatcttctataccactgccttggagactgcttgagaccataaagagatcttttcagtagacacacatgatcttcctttccttcttcttcatacccttcatgctgcttcatgtagatctcttcatatagatctccatgcaagaaagcagtcttaccatctaactgttcaagctcgaggtcttcacttgctacaagacttagcgaaattctgatggaggtatgcttgactacaggagagaaaatctcatggtaatctatt

SEQ ID NO: 72716 - DNA, 687 bp, Cannabis sativa
aattggaaatctagggtaatcttttttagaaaaaaggcaattacggaagactgttttacagggcacaaaaaaagaagaagatacctgattacagtgaggagccattgttgcagaagaagtcattttttagtaagcactacctaattgaaaatatattactacgctgtcaagctatctcttgtagtactcttcctggccatatatgcatacatgtatatagattatcattttgcttttactattgtatgaagtaaaaagttgtaaaatgcaacaacaatttaaaatttgtcagttgctacaatcactaaaatgcaacaacaatttctcttcttcacctacatgcatataatcattaaaatgcaactaaaacccaatttacatttagggctgtttatttcaacactgctttcagaaagttttatattagtattaatctcaagttaaaaagaaaaaagtaaatagcccagagcgaatttccattttgtaagaaaaaaaacgaaatgactccaaaaggcagagaaactatgaaataattgcagaaggaaaaatgtatttcccagaactgcagctaacactcaaacaatggacatatcattaagtcatctgcaaaaaatgtacttgtttccctagtccctcagttaatgaaatatatagttatgtaagaaagataggagaaaaccaggataa

SEQ ID NO: 72717 - DNA, 891 bp, Cannabis sativa
aaagaaaggccttcttgttgcgtatacccttgagcaacaagtctagccttgaatctttcaacggaaccatcactattgagtttaatcttgtaaacccaacgacaaccaataactcttctatttggtgggagaggaacaacactccaagtcttgttgtttctgagggcagtgagctcagcatccatagcatcgagccattgtttaaaatgaattgcttgtttatatgtttgtggctcctttaaagatgtgactgcaagtatgaaagctttatatgattcggttagtctagcataagaaaggtatttatttaaagcatgaggagtagatgatttatcctgtattgcagaatgacattcaaagtctctaaggtaggaaggaggtcgagtggttcttgtgcttctgcgagggatatccactgctgtatcattgcgattgttacaggcatttctttgtgtttctgcagtgtctgctggtgtactatctgcaccagtaggcgtattattttccttttctgcagatgaactagactcaggtatatcagtagcaatgtgttggtaatcctcaacaatagtttttgaaacattattagaggggacaaccgtggtagtgaaaggatcaacattagtttcatcaatatttaatttaagaaaaggaaatatgtgctcatgaaatacaacatttcttgagataaaaacttggtgattattaatgtcataaagtctataacctttcactccttgaggatatccaaggaagacacaagttcttgctctaggatcaaatttggtcctatgagcagtgagtgtagaggcaaaaaccagacaaccaaatacttttaaatgttgataatcaggttctcttttgaacaataattcatagggagttctgttt

SEQ ID NO: 72718 - DNA, 778 bp, Cannabis sativa
tcccggaatggaaagactgcttgaagtttgttttacacccaatgatgttttcacccttttttctttttcaagcaaaatcaatgcttgaatttttatgcaactctagccttccctcgtggaagccagagcttgcttcatgaaaattcaacatgactctcgcatgaacgttgttttctgtgcatgaaagatcactgggagtacggcacgtcttcgaccctccttcccgaaatagaaggactgcttgaagtctgtctcactcccagtgatgctgtcaccctttaatttgtttttgaaggaaagtcatcacttgcatttttatgcaactttagccttccctcatggaagccgaagcttgcttcataaaaattcaacatgactctcgcatgcacgttattttttgtgcaagaaaggtcaatcggggtacgacacgtcttcaatcttccttcccgaaatggaaggactgcttaaagtttgtctcactcccagtaatgttattgccctttgatctttttcaagcgaagtcatcggttgaatttttacgcaactcccgcctttcgtcgcagaagccggagtttgctttataaaaaactcaacatgactctcgcatgcaagatttttttcgttcgtgaaagatcattgagggtatggcacgacttcaaccctccttccctgaatggaaggactgcttgaagtcgatctcactcccagtgatattttcaccctttgatctttcttaagcgatgtcatcgattgaatttttatgcaactcccgccttcc

SEQ ID NO: 72719 - DNA, 1233 bp, Cannabis sativa
gctatcatcagcgaagagcaagtgagagatcattggagcccgcctagtgagtttaaaaccatgcaagttccccaaatcttgctcacgttgtagcaatcttgataagccttcagcacatatcaagaaaagatagggggatagcggacaaccttgtcgcaatcctcgtgttggagtcaaagagcccttaacttcaccattaataaggaaagagaatcgattggtagtgagacagctcattataagcgagacccaaccattagcaaaacccattttcttcattacttcttcaatgaatttccattccaccctatcaaaagctttactcatgtcaagtttgagagaagcgatgccatgtttaccagtagtcttgtttttaattgcatggaccagttcaaaagccaccagaatgttgtcagttatcagtcgattagccaagaatgcactctgagtttcggaaataaccaaaggaaggacttccttgaaccgagcaactatcattttggttacaagcttggagatgacgttgcaaagactaataggccgaaaatccttcatatgatgaggctttttaatctttgggatgagtgtgattaaggtgtgattgaggctagaagggtcagccccattgttgagtatgtcaaggacggcatttgatacaagattaccaacaattgaccaattttgttgataaaacatggcagacattccgtcaattcctgggcttttgtccgaactcattgtcttgagagcactatcaacttcagctggtgtgaacggagcaaggagagcatcattatgagcagtagttaccaaagtgggtatacaatcaagtgtatgagtgagggcacactcatcaaggtcgccagcttggaaaagatcagcataaaaatcttgaactacagctgatatatcatcaatagttgaagccttgccacccaaattgttgtagagaaacttgatgtgattattgttccgtcgagcactagcttttgtatgaaaatacttagtatttttatctccacaagcaagccaatcaactcgagatcgctgctgccaatatacttcttctttttccaataactcatcaagtattaattcagcttgtttaagatcatcaaagtggctgctgctatgataggaagaattattgagttgttcaacttgcttttggcactttttaatgtttttcttcatcttcccatacttgcgatcatgccaaagttgaagctgtgt

SEQ ID NO: 72720 - DNA, 813 bp, Cannabis sativa
gctagttagggtgttacacctgaaccgggaagatgtaactttgtttgcttaaaggaacctaaattatagaacagtttacggttgccttcatgtctaagacttgttcatgtttctaaataactataactcaacacacttttaatttgtacttgttttttgacaatctcctttgttttgcagagaacttgaaaacacttgagatggggttgttgaatgcgcatatgggaaacatcgataagaacattacacaaatcaaggccaatactggaggtaagctgatttctgaagcatctaaaggcaaaacaagagaaagaaaaggagggcctctaaaccaaagtctactagcaccactcctctagcttccactccaactccttcgtgtgctaaagagggctctgtgagtcctgagaaaacatctccaggtattgagaagacatttgtgggtgttaaaaagagttgggaaaacatatgtgggtgttgagaagacttctacgagtgttgagaaaattctacaaaccatggggctctagtaattgaagaaatcctggaagtttagccccccaacgtcctccacgcacacctaacaaggttttccctaggagatctatccctgaaccttcccaatgtttcatggaggccatcgttccataggatgaaagtggggaaggttacgtgttccctaacagagctacccaattgttgaagcgctttgaccccctgtctaacactgggatagtggccaaaatggatcagttgccagatgcaagggaaagatctctcaggggtgagggagatttgaggaggacatgaaca

SEQ ID NO: 72721 - DNA, 972 bp, Cannabis sativa
ttgaaattttgacgaaatttctttaaggagggaaaaatgtaaggactcagtttggctgagtcaaaacgaaaaatagaataattaattaaataaatatgtatgtataaaaataacaatcagaaccccccaatatcgtcctatctttctctctctctagaccaaccacacaaaaaacaaaagaaaactcacaaaaccccatcatcggcgtgactcccgcgacctctctctggccacggttttggccccacgtgccaaaccattttaatccccaggtgccggcaatctcaaccccaagcagcgcgactcctttttcgctactgttagcctagaatcgcaagtcaaagtttggaggttcaaactttgaacagattatttggccacctccgttgttcgtttgacgagtcgtcttcaccactagagtcagcttgtcgagaagaacaacctacactaagctattttgcccaacttactactttttcggtgacatttttgtagctctatccctttctagtgactttttggcgatatcgtgtactgtttggacaaacggttggcatgggtgtgatttacttattgatgtggtcattttgatatatactacccctattttcggtgacatttccgatacaccaatttttaccgccaccaatagttaatgtgcatcgcgtaggcgaggcttcagaactttaaactttaaatatagtcatattatatgtcgttggagtcaactttgtttgtagaatgcaatgatgataattatttagccatttgatggtataggtgagagtgatatctaagattggactaaataattagagcttgggacttgagagtcgtctcttggacaaagtttaacgacttgggacaggtagtgactcagcataattatttgacttgatttttatatgtgttgaataacattagacatatttcaatctttatgatttgcaaattgtttaaaaaattgaaaac

SEQ ID NO: 72722 - DNA, 2487 bp, Cannabis sativa
ttctacttgttttgtgtttcgtcttagtatagagcatacaaagttattgtcacgctttactctttgtgtgtttcttggttatatgggaggaaaaaagggctatcgttgttttgatccagtttttcaaaaattgtatgtatctcatcatgttgtttttcttgagatatatttttttttttactatttttaatgttccttataatttgacaaaattagatcttattcacattgacccattctctgagtctgaatcatccactaccgctacagctccttctcctctccattactctcgcatgcatcgtgttgaaaggtctcaagaattatataccggtactttacaacctgaaatcattcttccattagatactggtactttacaacctgaaatcgctcctccccctcctcctgcagctattccagaccctctagattgtggaccctcctcttcattatccttaacatattcgtaagtttacttgccaaccaaattttacatactcatcttattctgtttcttttacttttttttagcatttattcattgtctttctgatcctttgtcctataaagaatcacttattgactccctttggcagcgtgctatgaatgaggaactctttactttgcaaaagactcatacttgggatttggtacttttgccttctgataaacatgttattggttctcgttgggtgtataaaatacagaccaagtctgatgggtatattgaacagtataagtctcaattagtgactaagggtttttcacaatagtatggtatgaaattgaggagacttttgctcctgttgcaaaaatgactattgttcgtactttgatagcagtggcaccagttcgtcaatggactatatctcaaaatagatgttaagaatgtctatcttgaatggtgacttacatgaggaagtctacatggttcctctttctagtgttcttcataagcaaggcaagatttgcaagctaaaaaatgccttatatggtcttaaacaagctccccgcgcatggtttcagaagttctctattgttattgtgtctcttaattgtgtttcaagtgatcatgatttaactttatttgtcaagtgcacatcttcatgtcgtatttttctttccttgtatgttgatgatatgattattacaggggatgatttacagagaattaaaatgctaaagtcagaattaggttatcagtttgagatgaaggatttgggttctcttcgttatttgtaggtattaaagttgcattttctctaaaaggttatcttctttctcagtcaaagtacactactaatattattgagcatgctcgccatactgatactagagttgttgacactctctctgagttgaatattcagtattctccttctaatggctctcctttagaagatcgtactttgtatcacaccattgttgtcagtctagtttatctcgctattactcgtccagacattgcatatgttgttcatattattagtcagcttgttgcttctcttactatagttcactaggctattgttcttcgtattctataatatcttcggggtatcatcttttagagcttacttctactttccaccccctctctggagttacgagcttactgtgatgcagattatggtcgtgatcccatagaccgaaaaatctgtcactggtttctatatccttttgggagattctctaatttcttggaagagcaagaagtggtcttttgtttctcaatcttctacagaagctgagtatcgtgccatggcgtccactactaaagagattgtttggttgagatggttgcttgtagatatgcgtgttactcactcttgtcatactcctatgtattgtaacaataaaagtgccattcaaattgctcacagttcaatttttcatgaacgcaccaaacatattgagattgattgtcattttacttgtcaccatctcaaattaagctcatttactttgccttttgttccttcattcctccaacttgcgaacttttttattaagtcgcatatgatttctcgtattccttttttttagacaaattctcaattcttcttgtagcttcatcgtgagtttaaaagatggtatttaataattatttaaagttattttaatctttttttttttttaattttagtcttatatatatatttttgaatggattttagtcttttatattaattacctatataagtgttatattctttgtttaacttttacaattgaataaaaccctaaggaggaggtttcaatggttatatttttattgtaaccatcatagttatattttttaagccgttggattactattaaataattgtgattaatttaaaaattaaataaaaataaataataaaaaaacttataacatggaaagtaacataataatttatttccttataaaattttaattaagattaattatattttaaaattaaattaattatgattattaattaattttttacaatttat

SEQ ID NO: 72723 - DNA, 630 bp, Cannabis sativa
gaagaagaacgaaactacaaccagaaaagattgaagcagaaccatctctattaatttgaagatgctggaaatggaaaggcaagagaatatttgaaaggacttttcgaacttcatctcggcgcgcttcttaaaaatactcggcatttaagtactaagtatatttttgtcacaaatatctcataaatttataactttttattagattttgtcaacaaattgtcaaaaacaggtttcaaaattatttgtttcactataattcttttttttttaaaaaaaagaataaaatgcatccaaatatataaaattaataattgttagttattattattattatttgaaaacaataatcaaattcattgataaaataataatgtaaatgactagacatgactagacatcccaaaaaaaaaaaaaaaaataaaaatagaaagtaatatttaaccaaataaattgttcattcatttgaagaaacatgcataactaatatatgtgcatctataatagttgttcgatatacatagattagagagagacatttcttaaaaattagatagaatacttactatatcctctaacaattaatgattctagatttctaaaaaaacggaatatctcctaataaaactatat

SEQ ID NO: 72724 - DNA, 1066 bp, Cannabis sativa
aactgagagcaattgtaatccagagtagatgtagcctccgtaaagatacccttgaagaaatcaataaactccctcccaattacctctcggccggaaatccaaacattatccttgttcataatactctcgatggcgtttcgccggcctttaatagcagccgaaagaaagaaaaacttagaacacttatccccatctttgagccaagaaatcctggccctttgtctccaatagatcgcttttctttctcttgactcattaaggtcccagcggaccacccgctcctgattccagtcccgagacccagccgggagtctctgcagaaagtcaagcttctgttcaagctctttaataatcacatcgagcttaccaaattgagatctattccaattctggagagccaccctggtggcgccaacctttttgaaaattcttgccggagcccaggcatggttaaccgagttccaagcgttggccaccaccagattgcttctagcatcacgagtccatccttcctcaaatttaaaggaccttttaaacttggtcgccggaccatccgacataaggcataaaggcctatggtcagaattacaagtctgggacgagcaaaggatagctcttgggaataaattgagccaagcaccattcactaaacctttatctaaagcagatttcacatgctgcctcccagaccgatggttatcccaggtcaagttgtccccttggattggcatattaataagacccctagtgtccaaaaggttagagatgatcgggataaaagggtcccgaccagaagagccttccctttcagaggcattaagaacaaaatttgtatcacccaatataagccaaggccccccgaatctatctcccagttgcaaaaactcagaccagaattttttcttagcatgaagataagggggaccataaacacacgaaagaagccaagggtgggaagcgggatccgaatacactatccccgatatatgattacaagaacacgaaatacattcaaaaataaacccagccttccaagccaagataataccacccgcattgcctctag

SEQ ID NO: 72725 - DNA, 606 bp, Cannabis sativa
aatctaacatcctaaatatgaatactcataaataataaattaaacatgtaaaattatagaaaatatcacattgattgcaacaaaatagatttgactccttccattcaatattctaactcttgctcctttctgctgtagagtaatatcgaataatgaacttggattcttatttgaataaacgggcacttttcaaacgatcttccacactaatttgagtattgcctttaattgtgtgggaaattctcaatcattaaaggacacgaattgagggtgaaagagatagagagagattcgaaaatatgtaaggaagagaaatcgttttctttggttcagttttctagattttaacagacaaagaaagcgttctttgaattaaggcctttgtgttccttttacagagtctctctaggtttaggttttgaatataatgggctttaagaaaaagacaatgaccctaaaaggccatagcttggtcgaaatccatatgggctaagggctttggatttttccttcgatccctttaaacgagactttcttatcttttttcaaaaataccattttccattctaattgtttaaatgctaacattatctatttaataattat

SEQ ID NO: 72726 - DNA, 522 bp, Cannabis sativa
ttttatgacaagcaaactaattcttttaggaatatgtgaagagaatgggtaaattgtttacccgtttttatattaaggacttcaaagtaagtgttttgcccaaagttcaaatgtaaagacatcttttgtcaaatatgttcctttcttcccctactttaattatcaattgtcttttttagaaatatttattttgtgtgagaattctttaatttcttataatctcttcagtataacccttaaagatattttttttaattaaatttgagcttaaatttgattagatacaattctatttatgttctcttaattattaattaatagattttatttggttatatgtatttttttaaaaaaaaacaaattgcaaattcatttatgtttaaaagtgaataattaactcattgtttgatttattttatgtatacaacaaatatattataaatgatagtgatgactacaagtgagacaaaattatgacaacagttctgaatatagttgcgactataagtgagtacggtgatg

SEQ ID NO: 72727 - DNA, 900 bp, Cannabis sativa
  modified_base (746)..(759): a, c, t, g, unknown or other
gaccacaaagaaggcagaagcactatcaagccctgtggttggctcatcaagaagcataatttggggttgtgttaaaatctccaaaccaatgcttaatctcttcttctcaccaccacttatccctctaaaataccaatttccaatcttattatcagcacaatgttgtaatcccatttcttctattgttttttcaaccaaattttctatctcttctttcctcattttatttgaaactctcaaatgagctgagtatgtaatagtttctcttactgtgagagttcccaagaaaatatcctcttgagtgagatatgactgaaacattaatatattaaattatataattaattaggttattgtaacaaattatttatagtattctttatataaaattatcaatatatgcatataattaatttatgtagaacttacaatgcccccatgactttcattattctcttttcctttaacatgaatattgccagtcattttaacatttgaggacaatcttcctgttaaatagaaatggatcaaagaaagagataatatattttataatatatatacacacttttacattatttgttttcggtatataaaaaaattataaactattttttatgacagtatatgttataattttactataaaaaataaaaaaaaataaaaagatctttattgacaaattttgagttataatataattttttcgtgactaaataagacttttaatcacaacaaaaaattannnnnnnnnnnnnnataatatttaaatacaagttattactaatttagttttggtcacaataaatattgtgattaaaaatatattaattacaacaaattgtaatttttgtaactaatacagttatagtcacagactagtaataacataggcataat

SEQ ID NO: 72728 - DNA, 1098 bp, Cannabis sativa
  modified_base (37)..(38): a, c, t, g, unknown or other
tattctgttaaaccaagaattgccgttagatagacanntttaatatataaagatatattttacataaaataatattaaaaaagatcacatgaaaagcatgacaaattgacatcaaaattgattttgaaatgtataatgtatataacacccgaaatgttagtttccaaaaatggtaggtgcggatatttatctgtgcaaataagacaaattaatatacattaatatataatccacaattaataactaaatatttcttttaaaaagtaataattaaatatttctttttatctcaaaaaaaaaaaaaaaattaaatatttcttttaaaaaataagcattaatcataatttatataagcataatgagttttgagtttaattaattaaggtggcattttctaatgagctttttaaatatatatatagctaaaataatatataaccaaaataatatattataattatatgtataaaaaaagataataacaatattctatacaaaacatcaacatattactaatataaaaattattatgttcattaaaactctaaatttatgggagttactatatgtatattaaataaaaaattaaatataaataaaaatcatcttcatttattataacttctaagtaatacattattgagtaagttgcagagaccatgagcctagaaaaattattaatacaagtataaattttttttgtgttcatctaacttgcatattagtgcgactagtgtccatatcgacgagcactggtcagatattatcttagatattgcaggaaccatgagcctatgaaatctaagctctcaatatataaaaataaaatttacgggaattacctcatatatactatttcttaacattttttttttcaaatttatagttggagttgctctggtgattgctccaatagtttttatatgggttgctatagatttttgttgcaatttaggttatttcgttagttgctatatgtgaattttcgtaatacaaaaaaaaaaaaaaaaaatttggggtttgttcaatttttttttttttttttttttttaatttaatttattaaatttactaataaataaataaaaaattgagaat

SEQ ID NO: 72729 - DNA, 851 bp, Cannabis sativa
tgcttacatatcagttatatgtgaggatcaaatgattctctcttgtgctccatgtaaagatcgtatctttacaaacttgtggttcgaataactaaagtgtgcgacaattcttcttgaacttgtaaagttcaatgttgtcagtacatgaacactcaatataagattagtatagttgtaagcgtttaatcttatatatgaccctgaggttgtagtctcgagactatatgcaacctatgttacttaggaaagtgaatggtcaatatgcgactctgaaaattgtatacgttcgagtattaattaagaatggttgaaatcgttctcttatttattttggaaacgttttatgttttaattaaatgtagttaatgttgtaacggtcctgaccggttatgtaatttaaatgatcatttgtcttttatataaagaagtgttataactcgaaataagaataatcacttactcttgcaaaagtggactaggcagactaagttttgattgaattactataaatctctatctccctttgcaatttacatatacgttgtttttgttttattattcgctattttactttgggtattcgctcttttaggtgaacactcgcagttttgtaagtgaatatttttatttatctcaaatatttatgattttttgtgttgtctatttctttcaataacatcaggtgtatacaatttataaaagcagtgtgattttgttcagctattctatgggaaaaaatgcttaattttttttaaaattttatcttatttttttttaagcagtatcaaataatcctttagagcatcttcaatggtaacatttttaaaagtgtcaaaaatttccacatcact

SEQ ID NO: 72730 - DNA, 674 bp, Cannabis sativa
tagatcttgctgctatttccaacccaacaaggaaatactttaattccccaagatctttgagtttgaacttattgttcaacctgactttcaaagcttctagttcttgtgcatgattacttaccaaaattacatcatcgacatacacaagaagtagaatgaacttgtcaccaaaatacttgatgaagagagaatgatcggttgcagaatgatgaaaaccttcatgctctaaagctgtagaaaacttctcaaaccattgtctagaagcttgttttaaaccatataatgatttatttaatttgcatactgcattgggtggtagctcccctttaggaatatacccttgaggtatagtcatatacacatcttcatgcaaatcaccatgcaagaaagcattgttgacatcaagttgatgtagaatccacccattgacagcagcaagagcaaggattaacttcacagtgaccaacttagcaacaggggcaaaagtttcaaaatagtccactccttcttgttgatcataccccgttgcaactaaccttgctttaaatctctcaaccgatccatctgcattaaacttgatcttgtaaacccatttgcaaccaatcacgtgatgatgcaaaggaagactaacaatggtccaagtattgttggcttcaagagccacaatttcatta

SEQ ID NO: 72731 - DNA, 827 bp, Cannabis sativa
  modified_base (37)..(42): a, c, t, g, unknown or other
attgaataatagagattacattgaaattgagttttannnnnngcataaaacccaacaataccacccccggtcgatggaagggctgaagtgaaaatgtaggaggtaggcaagaaccgggtcagtttttaaacatgtaggcccccaagggggtagagaccttcgggatgccctcaaaagaaatttagaagaaggatgatcaagcagataacagtggtgatggagtgttcattgcaaaaggaaaatttcagaagaaagattacaaggggcacaagaattcttacaacaatagcagagacaaaaatgacaggttcaaacctaagtctgcagtaggtaaacaatgctattattgtaagaaagaaggtcattttcgtgatgattgtttggcacttaaggctaaactgaaaagagaaaagaatcttggaaagaatggagaagctaacatagaaaatggctatgaatcagctgaggttctagttgtgtctaataacacaacagatggggcttggatcttggattcaggatgctctttccacatgacacccaaaaaagaactattcagttctttttcagaagatcatggaggtattgttttacttggtaataacagagcttatgaaattaagggaattggctcagtagaaatgcagatgcatgacggtgtttccagggttgtgcaacatgtgagatatgtgccagatttaaagagaaatctgttatccattggaatgtttgacaagaatggatatgcagtcaagattgaagatggaatactcagaattttcagaggttcaaaggttgtgatcaaagggcttttgaacaatggactc

SEQ ID NO: 72732 - DNA, 1096 bp, Cannabis sativa
tagaaatgtcgggattagtcgggagtttagagttttcccaaaatacccttaagtccccttttacacctcttagtgttggaagggcaaaatagccatttgcctttatgagatttgtcttttatggatttttataatatgttaagtaatcgaattttttattttactttggctgaatcaaataaggaaaatgaatgttataactcattttattcaaaattggaaaaaatcaagaaaaagccaaaatcctttttctctcaaactctttctattttcggccccttcttgagtagcaagacttggcatttttccttggtaattcaagctaattttaacaagatttagtgatctctaattgttggtaaggttcctataactttcttctatgtttcttggaatttttgaagaaaatgataggttgcatgcttagttttggtttgttgttgctgttgtaattaggtgttattttcagaagtttaagcatgcttgattgagtgaaatagaactgattttaatgcatgattagttgattttaagcaagtttggaattttagctcaaaatcttgatttttatggtaaattgtggaaagttgctgtgattgttaattgtgcttgggtttgttttctggggttatattatgtttatatatgttgaattgagcaggtttagttagctaattggttggttgagcaagctttgagtttggaactcaagcttgactcattaatggtggtttttgattctgagagtgtagggttgttttgatgctttgagattgttatttggggtatttagaacatgtctggaaggttgcatggagtttggagttgatttgagtgagaaatgaatttttgaagtttcctgcattgaaccggaatttccagttcagtatagcttgtaggaaccggaatttcggttggtgctttgggttcctcccagaaccggaattccgattgtagaaccggtctaccagttgggacatttttgggaatcctagttctacccatttttgtgttgtttagggtattgccatgctttttattgatagagaaacttttagtttctagtttaaggccgcgggaagtgatttagcgtatc

SEQ ID NO: 72733 - DNA, 865 bp, Cannabis sativa
gtcgagaatgagagttggattccccattctttgcaaaagttttggaactctaaacttacaaattgcaagccattgtttgtgactatatcctttggcactccaaacctgcaaattatgtttttccaaacaaaattcttaacttcgagatctcttacctttgtgaatgcttctgcctcaacccacttggtaaaatagtctgttagtgctaccataaagactcgttgtcctggagcagtcggcatcttccctactatgtccaccccccacttcatgaaaggctaaggtgctagagttgaatgaagcttttgtagtggcatatgcgaaacttgggcgaactgttgggatttatcacatttcagcacaaagttgaggaaatcggctctcatggttggctaatagtaaccggtagtaagtgatctattgctgagacatcttgaacctgagtggttaccacagttatcttcatgtaatttggtaagaacataatgagcctctgtaggattgagacacctgagtaagggcctagaatacgaccgtttgtacaacttgccgccataaagagtgaaccttgctgctttggctttgatatttcaagattgattcctatcttgcaggagtgtgccatcagccagatactaacttatgggtgtcatccagctaatgttctctaacacatccttgacttcttcttgaggcttcgaaactgctgaccattgcatgtagatgactggaactgtgactccactgtttgtttgaattgttgactctaggttcgcaagtgcatctgcatgactattgtcgatcattggtacttgattaattgatatttcagtaaagctcgacagtctttctttaacagcttgga

SEQ ID NO: 72734 - DNA, 1413 bp, Cannabis sativa
tctaaaggataaagacaaggaacagttaggtagttattagatattatcccatgtgtgaataaataaaacatgggaaatattcacgtttcatcggcaattataaaatgaatcaatcccaagaataactttcaatctatattcttataaataggggaagaatccatgggaaaagggacgacgaaaaatagagagaaattctattatttcaaatattgagatttttttttgtgtattttaaaaaatatccataatattgtggactcacggagtatatagattttaactacaaaacacgtagaatatctggtgtttattattatcataaaattctgtagtgtatttattgcaaaaaaagctatttatttagttaataaaaatctgcgttaacaataatcaatcatcaattaatcacataaattaacacgaacacatccaaatcaatcaaacatcgttttaaatccatatttaatgaaaataagttattaccatggctctgataccaattgttgaaacttgttttaccaggatttagatttactaacatgtatgctacttataatactataatttaacatcttaaatatgaattttataaaataatgaattaaacacatataatgttatagcaaaccttacattggtggcagcaaaataatatgactcctttcgtttagatctctaacccttgatcctttctgtcacaaagtatgatcaatatttgaacttggattctccttgagttgatagtatgaactacacaatcttcctcactatactagatattgctttgacatgtgtgggcatattctcaaaccaatgagcatgaatttctacgaagaaatctcaagaagaattcaaaataatgatagaaaataatagattttttattcgatttgttagacaaaagagagtctagagccatcatttgaatcaaaacccttaatgttctatttatagggatttattagatttaggattagaactaaatgggatgattagaaagattcaatggcttagaatggaccctcatggccgaatctcttatgaagcccatgagttggaattttgctattattttgcttctttaatgaaacaaccttgtctcttcagtaatatcatttttttttctctagttatttcaatactaattctatctatttaataattataattagttatcaaataaaatattcatttaaatatatttattacttagaccttccaaggtctcttagttaataaaccatgaattctctttttttctcaattgtgcccttctttggtaaaattcacaaataaatcatagtctttatttaaaatcctaatggattaaataaatcaattaattgagactacaaaataatattatcctagttagtgcggggaccgtgggcctatgtaaccaagctccca

SEQ ID NO: 72735 - DNA, 536 bp, Cannabis sativa
gtaaaataatttccaacaaaaggctccatcaagaaatcattttcagcattacttagaccatgaggaacacatctttggagagtagtcaacagatccgaacctctattcgctttggtaaatagacgctgaaaatatttaatggcaatggattcaatctctttctcattagttcgccattggtgagtatcatcaaacagccccataatagtgtttttctttcgtctgtgagaagccttgaaatgaaaatactttgtatttcggtctccatgttttagccaaagagcacgactccgttgcttccaatagatctctcttttttcctccacacaatttagatccatctcaagcttgtgtttagtgatccaatcttccttactagttgagtttgtgaggctctcaaactttcctttgagctcttttgatttggcaaacatttcatttttctgctgaatgttccaagtatttaaatgttgcccacaagactctaacagccgagaaatgtggagaaccggttcacccctagatttattttccca

SEQ ID NO: 72736 - DNA, 1409 bp, Cannabis sativa
aagtctgaacgttatctacaaactcatctcaaaagtgttggtactcaggttcaaagatgtttagccttctgttatttccgaaactcaaagtgctttcctttctgaccatctcatcacagataatatcttgattacttttgagttagtccatcatctcaaacatcaaactcagggaaggaaaagttcttcaactctcaagttagatatgagcaaggcatttgatcgtgtcgaatggagctatattgaagcggtgatggctaagatgggatttgatgctcgctggatttctctcatcatgaaatgtctctcctcacaaagtttctcattctctttaaacagtgaaattgttgggaatgttattccaagtagaggtcttcgacaggggaatcctttatctccctatttgtttttgatatgttcggaaggtctatctcgcttgttgaatcatgtagaatcttcaggtaatcttcatggatttcgtctcacacggcaagccccaccattacacacttgttgttgcggatgatagcctcttgttctgcctttcttccaactcatctgccttagctatccagcgtgttctacatatctataaccgtgcatctggtcagctacttaacattcaaaagtcggttatgtctttctcaccaaacacaccaactgcaactcaacaattttttcaagaaacattgaacatgcctttagcgaatgtcatgaaagatatcttgggctacctgcatattctggaagagataaaacataaatgttcagttccataaaagagcgaatatggaaatcgcttaatgcttggaaggaaaagttgttttcaattggagggaaggaagttcttctgaaggcagtggttcaatctatacccacatatgctatgagctgcttcagattaccgcataagttttgttaccaaattgagtcaatgatggctaatttttggcggggatcaaataaaaatggtaacaaaatacattggaaaagttagaatttgttgtgcaaatcaaagtttgaaggtggtatggggttccgctctttcgtacattttaatcaggcattattggctaaacaagcatggtgcatctttgaaatgccaaactctcttctcagccgtttgcttcaatacatatacttttccaatacatcttttttggaatcaaacattggtccttccccttctcttacttggcaaggaatctgttggggtcgagaattgttgctcaaaggccttcgatataaagttgggaatggtatgcatattaatgctaggacatcaccatggatacctggccatgttcaacacaaaccagtcttttattcaggaccttccaacctgccagtttcatacttcataatagagacaagagaatggaacttgacattgttggaagctcacttca

SEQ ID NO: 72737 - DNA, 814 bp, Cannabis sativa
  modified_base (784)..(785): a, c, t, g, unknown or other
tatgcaagtcaaataaatatcaatatatatcctgtcaatccaaaataaaagaacataaaaatatatagctttgtggtcataaacatcatttactagtttcacacttttcctcacaaaaataaagtcccaaattccattttccccttcctaatttaaaaaatatatatatttatcactttattttaaaatataaaataaaaaatacaacgtgaatataaaccccaaatcaattaaatttttatttattataatacagttagaaaaataagaggacttttaataatacttttgtcttttaatttctttaatctaaaaaataaaagtaaaatttgtatttttaaaattgtatttttaaaaaataaaaatatattctataactatatttattttttaattttaaaaactaaaacaaagtgtgttttataattttttttatttttattttttgattttatcgtagtcgggtccaggtccgtgtttgaggctgggctggggctgtggtccgagcccgcaattgggatcggggccagacttcgggtcccaaggttcaagttgaggttggagtctaaaatattgattgaagaaaaaaactgtttaaaaaaattataaaaatatttttttttatttttaaattttttaaaattttgattctcatttaaaaaattgaaaagataaaataattttataaaaaatattttcacttttttaattttgaaaaatagaaaactaattaaaaaaataatacaaaatgtaccctgtaatagtgagatttctctcacctagnnactcgagaccagactcctatttaaaggac

SEQ ID NO: 72738 - DNA, 695 bp, Cannabis sativa
ttttttttttttaaaaaaataacagtttatatttttttgcttaggttaacaatatgaaacccttgagtttgagcctacgcataattgtagcgcacatgtcgcctctacctctctcaaatatagtcatcctcccatctcatgtgtaccttttagtactctcatcaagaagcctcttttcttctacgtcaatttggcaaagagtgatgatgattttgggagaagaagaaggacgggaggagcagatgatggacgagaagatggaaaaaaaaaagggaaaatattaaagtaaagaaaaggaaaagattacagaaaagaaaaggaaataaagattattgaagttttaatatttttttccttcatgaacttttattcatttatacggaggttggggatttgggtttctttgcttgacggtacttgggatggtcactttttacgctgatcgccaccatatcccattctgtgaactcgccgccgatgttctaggttcaggttggatgattttctttgtacttaatatttatttaacaattttgcttgcaaggcaatgcattcaggtatatcattacaatactttgattttgctttttacatgttataattgatgttgtagttatgtacattcagattttcaagtataattttgagtttggtataaatgtaggttcctgccattgccatgtgattatatatat

SEQ ID NO: 72739 - DNA, 734 bp, Cannabis sativa
atctagacaccgactactagtctattccaggccccgttacccgaatcccgagccaagatctggatcactatcacgggtctcgatcttgttcaggttcaagtcccatgtcccatttctaagtttgggtttgggatcgagactggggtgcggttctagctcctgaccctggctctgtgtatctagtcttgtttcttgtttttgtctcagttcaggttctggttcgggtcccgagtttaagttttggtcgggatccaggtccggctccaaattcgagtctaggtctgatttctagtctgggtcctggaccagttaccgtttgtgatgtaggtccaatttcagttatgattccaagtctaagtcctagttcgtgtcttggtcaacttccagtttttgttccaatttttggttagaggataagggttcgagtccacttttgggtttgggactaggttcaggtctgggtgcgagttcaggactttgtcagggtttggatcccgggctgggtcccaaatctagacaccgactacgggttttctcctagccctgggtccagatccggatcccaatctcgggtccaagtctagctctatttctggtgctggttcacgagctgggtcctaggttaaagttcgagtttgggtcgagtactaggtcccaatcctagttttgtttcccaagtctctatcctgattctgggtccaggtcccggttattttgtgggtttgggtcccagt

SEQ ID NO: 72740 - DNA, 1001 bp, Cannabis sativa
tgtacttatattcataaataaggactatgacaggagtgtttgccaaaaagaattgtgttataagaagattggaatagagtatgttatgacaaaaaaataactttagttgttatattagcatttctaactagagtgtatgtttcaggtttaataaattaggcatatagagctattggtacgttcttgagtttgatttttttttttaatttatgtgttaatggattgataatttaaagctttactcttttattaaaaataactaagtttaatttttgattaagggtgaaatctaatcattaaggtgataatataagaatcgattaagcgagtaagaaaatgtatataagaattagattaagcaatttttgtcctgatgttattcttagagagagtgattttgatagtaaattttattcctatttcattagtttgatggattagtaaatgtttcttttatagggatatgtatatagcttattcattagaatatattaacttgtgtgcttctaaagctatatgttggctagttcgtatgtgtaaggagacctttgacgatctttagcttacacgcggttcatgcaatttatagaagacatatggtctgtatgaatgacatcagtttgatgatgatatattagatcgttatgtggtagggttacattcttaattgatatgcaactcaatttaaaatcaggtagtttattgaatgcagtggattggataattttgaggatggaattcatattaagtgtgttgactgaaaggtaaaagtaattttcaagacaaaatttcttcaagtaggagataattgtaatatcctctttctcgaaggggtaattttgtattttttttttgttgttattttgttaattttcatattaagaagttttattaaatatatgaaattttagtgagaataaaattttttattttttttagttagaatattttactagtatacgaaatgttaggtaaataattaattgttgggttttgtgccc

SEQ ID NO: 72741 - DNA, 798 bp, Cannabis sativa
tactcttacaatacaacaaaaagaacaatatttttgaccaataactacatgaatttagtgaaagttgcattcataaaaaatatatgcaattcaattatctttcgaatgatataaagatcataaaaatagattaaaactgagagagttatcataattttaccaaaactatttctgagaaggaatatggagtagtgaattacatgaatcagcaaaaatacaaacttttgacattaaaaagtttagaactagaggataatatcttcatgaaagttttaggaaatttaacctttttataatgacatcaaaatctttgaaattagaattatattcagagacgtattgcaattttaccaaaacagtttctaaagcacaatattcaagaaacgaatcagaggttataaaagaaaattaactttttggcataatatgactccaaattaacaaaacgtttcttcatgaaatttatggaaaattaaataagcttcaaaaccatatatagatcattaaaagtggatgagaattgagaaagttatgatattttagtgaaagtactttttctgggaatatgaagaaaaatgaatgacaacaatagcagaaagataataactttagacatagaatatcactaaattggtgaatagtttctgcatacaaattttagatcatcgaataagctttccaatgatacaaaaattgttgaaagtgaatcaatatcatgagagataacatcactttactttaacacgtttttctgaaaacaaaaaatgtaataggtccgaatcctagataacatttagc

SEQ ID NO: 72742 - DNA, 816 bp, Cannabis sativa
taataccttttatataatgaaggacattttaggcattaaaaagtaaaaaatgacatttgttttattattttaaaaaggaacattaactatcactaaagttaaaaatagaactatttacttgcatttctcttatgcatacggtaatgtgataaaataaatttgacacacattttgtaattatatttcaatgcattatagtaaattaagatataaattaacataaaatataattatcattaatgataatcatacattaaatatattttttaaaaattaatagtaatattataattaaaaaaagtgttttaaatcaagtcattatactaaaacgacaataatgtcaaataaaataagtgcattaaatattatattttgtgctaaatttaattaaaactttagcatatatcaaacttaatttaaatttttacacaaagggaattttataaatataaaaaaagaaaaaaaattaatgcacaacttgtttgggactcaatagagatgttcttatatattatatcttacattttgttgctaaacccttcaagtctcaactatcattctactagtatttaacttttcaagttcaaactttagtagtaaaatcttttaaattattgaactgttaataaatttaaaatgttatctattttttacaattaattgataacataaattacttatgtgtgtacttttgtacacgtgatacatttatattagtatgcttaatatttatttaaaaattatttcaaaatttataatattttttaatttctaaatattttattttttatttttaaaattttatttaattttaaa

SEQ ID NO: 72743 - DNA, 1144 bp, Cannabis sativa
tacaaaatttaaaattctacagtaatattaagaagaaaactatattttaattatgtatatgtgaagatgaaaaaaagttcaaagttattgtcatcaatgtatctaactcgtagtcatcacgccgctacattcaaagcccttgttagttatcatcatatctcacttgtagtcaccttaacattcaaagttattgtcattactgtattttacttgtagtggtcactatattcgaaattattgtgatcatcgtatcaaaatttaaccaaatgttattgaaatttatagaataaaaaaattaataaaaccttcatttattgttgctaccacaatacattatcatatatataataatatttttttaaaaaaatcacactaagcatagtatttgtccaattataaaaatcctataatgagattaagagattatcatggggttatgagatatagtaacgtacaatataaggatgaatacactgaaaattaaaaactttgtaaagaaactcacaaaaagagaagtctaaaaaaaacttgccatgaaaaggccaataatgtgaaattcataaaagaaaaacaaaataaataatcactacacaatgttagatctacaaaagagaaagggatataacataacttttattaaaaaatgagaactttataaccaattcataaaaagagatttctttatagaaacttactatacaatgtcaaatctgtaacgaattgaccagttttttcattgattgggtttagcataaaaagagaagtctaaacaattgttggtttagcattacatataataaatatataatatttataatttattacacattgcattaaataattatatatattatatatgtgggagctattattttgattatgaaaataatgatgaattttttaaagaactatgaaaagaataaaattaaggcaatttctcataaaatgtccaataataatataaaaaaaataaaagatagatgctatattaaatttgtagtttaagcttcaattgtctaatattttaaccaacaatgcatcttgctatttgctagaaataataatcataaaagaaaaaaaagaatagagtagaaaaaggatgagaagggagatctcgtaaaaataattagatttagtattaatg

SEQ ID NO: 72744 - DNA, 888 bp, Cannabis sativa
ttgtgaataaaagcccagttagccacattatgggcagtaaaattataagttctactagcatacacaaaattacaacaaataaaagagggacaggatgtagaacaaaaggagacatagttctcaatcgcccaatgagactccgtcccattgagagcattgataactattctggagtcactctccaccaaaacatacttgaaaccttgctcaagagccaacgagacaactgaacaacaagtcgctgcttctccaaataaggggtccacaaagtctaactgagccgtgtgaatccgaaccacattaccctgatggtttctagctaccaccgcaatgcacatattatccaagcctaccctgacatcacaatttaattatatccaatcctgaggaggaggcttccagattccctccaaagaaggggttggagaaggcaagaaaacatcatgaagtctgcataagaagtacaaatcaaatcaatacatttcaagacatccagaggagagttgatatgaataatctcattacgaagtctccagatagtttcaacaaacaatcgaagcatacaagaaaacttcatccactcgaatccccgtagtattaagattccatatgaatttgacctagtcccaaactcgaatccccgcattgcatataggatatatgccccatggtgaagaacgccataaatgcattgccacatcacaggacaagaaaatgatctaaatattagtaaatatttatatctaatgatccataatccataatccataatccatatgaatttatatctaatgatctaaatattagtaaatatgttattaaaatgtatgagtttttataattaagtttttttgcacattttttgtaatatattaatttttgttgtac

SEQ ID NO: 72745 - DNA, 1485 bp, Cannabis sativa
  modified_base (634)..(640): a, c, t, g, unknown or other
aatttggataatatagagtagaaatttaaataatagagtactttttgttttattttaacattttattattgataattttcgacataagaaaaaaatcattttaaattttactattgaatataaatatgtattacaaaaattttatttgatactaattaaaatttggccccctagcattcaagtcctggctccgcccctgaacatgatgtacaattatggaatcctgactttcctaatagatcgaatgatggtttcctttaagtaataattgtagaaatggaatgttgtgaataaatataattttgaccgaaactaattaagaaccaacatatggaaggctaatcattggaattaattatatcaatggacactgcagtgaaactcagtaaatataattctataattattaacagttcaattttatatttatagtggagcaatcatggaatttataaacaatgattatttggttgatgagactcaataaataatctagtttatcagagctcagaattataggtccatggtccccgaatcaccacattgaaacactgttaagggtagggataaaaaattacataaagatgttcggaaaaatctattttgaattgacaaaatagtaattatttatttnnnnnnnaaataaataattttttcaaattaattaaatagggaaaagacaaaaattattaagacaaaagttgttaggataaaagataccaaccttgtcctaaaagacaagggtaggcacctatagtattgttggtgtccctatgaagtttgtatttttgggttaattaattaatttaattaggtaaatatcttatttaaaaagtggttatatataattcaaggttgttgagatactctctcaagtagctgagagattccctcataaatatcagtaactgaatttgggtatatgtatttatttatttaaataattaaatataatttaattaaattactaaaagtctgatttgagaaatcataacaaacttctcacttcccaaaacatttttcgaaataccttcagagaaaaagaatttcaattttttctctaaattattcttgctcatgtgttgagaactcaacaagaacaaagcttatacacttaatcctaatagcccacatttttccttgtgtgtggtggatcgatttagaagatactagtgcgagtccaattgtaattttctcatcatttggattaagggatacaacatacgagaagttttgaggataccctgataggcttcaagaggtatactctaaacttataatttatgttttgatttaatgtatacaaatctagagatcctttacaatatggtacaatgataatcagaaaatacaaaactcttccgctatgtacctaatttattatcataaaatcaacaataagcactcacacttcaaagacgaagggagttcgctgtttggtggtgtttcaaaatcaaatttgtgaagtaaattacaaaggattgc

SEQ ID NO: 72746 - DNA, 940 bp, Cannabis sativa
gaggtgatggtcgccatgcagaaagccatggagacagcagggatttatatacaccctaaggccatcccagtaggactcgaggaagcaccggaagagtcctctctaagcactcagaaacataagtccagggaaccaagccctatacggtatccctctgaagaagatcaacagaaaaatcctacatccatcctagggagaaagaaaaggtgtaggaaccacgaaaggtttgcttagatttcccgaaagggaaaggtccgtagaggggcaaactccctcaggatcgagaggaccgaaagagcgcttctctgcaccaagaacgcagagaaagtggaagagggagccggagatgccctctagttgacttaagacaccaaatcaacgaaaagcacggtgactatcgggaccacctggataaaaagaaacatataccagtagtctccgcaggaacgctgaacgaaagaattttagcagagttggcaacactgcgcatggacatcgctcgagtctccaagaggcaaaaaggggatgattcagactccgactgtgaggaccgggagccatgcgcccgacacatactagaagcggaactccctaaaaattttaggatgccagagatggcagcataccccgaggactcagaccccagcgatcatttatctcgattcaaccgagtaatgacggttatgagggtcagcaatgatgctaaatgcttatgctttccgctaacattgagtggttccgcagaagagtggttcaaaaagttggaacaaggatctgtggattgctggaacaagttacaagttagtttctggagacagtttgtcgcagcgagaaagatcaacctcaaagtcaacgccttaactaacatcaagcaactacccacagagaccttgaagaattttataaagaggttcaaggaagaagcctcaaaaaccaagaa

SEQ ID NO: 72747 - DNA, 715 bp, Cannabis sativa
ataaaattaattttaggtatattactgaaaaaaatttcttattaaaaagatactgtaaaaatcaaataaatgtgaacaaattaagaaaacaaagaacattaaaaaaaaaaaaaaaggagcttttagaaatcaacatgtcacctatttcgctttggatagtacttcactttggtgatgactcatattgaaattgaaaagcacaaaaaattacaacctctaagaaaggattcttgaatattggtgaatactaataaaattaaacataatatgaagataattatcaaaaaaaataaaaataatatgagatgatagagagcaatcatataagaacgagagagattataaattatgagataatatcatgaaattaattagaacctacccataatatacatttctatgagatatatatatatatagatattatattatatttttccttttttctttttcttttaaagcctacatataaaccaaaactaaaagtgtgatatatatggaatactttttaatgggtattatttataaatggttactaaacaaatttatctataaatattaattttaaaaatatcaaactatcgaattttgatctaataacgaataattaaatcataaatttgaatttttatgcttaatttaactatttaattaaaaaaaatatacaaaaaaatatctccttttacactatatcaaaaatatgttcatacaaaaa

SEQ ID NO: 72748 - DNA, 989 bp, Cannabis sativa
tgacaacacatgggcaacgcccacgggaggtgctctaattatagcatgtatccgcctgtttttttttttacttaaaaaattaaaaaaaaaaaattatagtgtcaaaaataaaattaattaaatagctagtcgcatacgtgttagatttttaatttatttttatatacttacaacagattattttaaattttattttttaaacttgctgatcaagattttcggcaattaactaaatgagataatgatgagagctttaggataattaatgaaccgtagtccacgaatctttattattaatgagagttcttatatagagaatgtcttggtgagacgtttttcgctctcccctttgatcgatcccctttcccattttgtctaggggtatttatagagattggtaaagatagttcaaaagagataacttgtctttgagtgccaatattgtatgagcagtattgtatgagcacaagttcccaagagatacaaaatagggcatgcacaacctatgctgtaggtaccatagggattacgtgagattaatctttattctttcttgattgatgtgattcttcataatagagctgtcactagcccctttgattactgtgtaattgtcgtaaacgaggcttacgttatctgacatgtcctcttatgggcgttccaagacgttttccccatgctacattaaatgcgaggtgattgttcgagtatattctcctcctcccagagatgctttattatatgcctagcttccggagaggaaggccatgcttattgcacttcttcgggggctcacatcctgtactacaccaattcgttttaatatgtctcagctaattcttaggtgaggtgtccttttagtccacgtgtcatatgtggtcgaggccacgtattttgaaaaaaactcgaggcaacaaaactaaatatgttatagggataattgcggcaaaagtccccaaaaacttgaggttgatgccgattagtcctca

SEQ ID NO: 72749 - DNA, 1000 bp, Cannabis sativa
atgaaatgaattaaatgtaaaattctaatatatatacttcatggcagatattttttttaaaaaaaaatgaatattttagacaataaattacttgattcggtaaataaatatcccaataaatataattattgaataactttaaatgttaaacattaacacaattattaaaattacatgcctaaataaaatcatgtaattaattagcaaatcatgtttttttttaattttattttataccaaataacatataaatttcaatatatatttttaaataaaatgaaaaaattaattaaaagcaatttattaaccaaactaacaaaaataagaaaattaattaatattctaaataaatagaatttatttaaaaatttaaatttttctatatttttttttttttgaaaatatccttccaagaaacgacatgtcgtttttctctatagtaaaaaaacaacacgtcgtttttaaccataaaaaatgcaacaatgaatgggaaatgacatgtattttccatatatagagggaaaatgacatgtcgttcatgtcgtcttcaagcgcaatctgggtcgacacatcatttttaaccataaaaaacgcaacaatgaatgggaaacaacataccatttttcatatatagagggaaaacaacatgtcgttcatgtcgtcttcaagctcaatccgggtcgacgtgactcgtttatttgcaactcgggtccgaatgactcgacccaaaacccaactggattttacaattctgacgaccaaaatgcaaaaaatcaattccaaatgaatctaaatattaaaattaagagatccatataggttttaggcaagaaaaatacgtaaaaattagactttaactctacaaaacaccaacgagtctaaacgcggatttgaagaaaaatcacacgtttttatgattttttttttcaaattgattttcatgcacgaaatcactctataattttatatgaatgtgatgttgcataaaagattcgaaata

SEQ ID NO: 72750 - DNA, 1202 bp, Cannabis sativa
gggggtttacctgcagaaatttagattttggggtttagtgaaaccaaaacgaaaatatttagagttttgccgccatttacccttaatcttacatactataatgtaaaacacaatattggaaattaatcttttcaaaatgagtatattggtactacccatataaaaatttaatattgtataatctaaataaatattaggagtttttttatttttatactttaaaatattttttatatatatatttttagagaaatttacgtagcaactcacatagcaaccaactaaataacttaaatcccaacaaaatttgtataataacatacatcaaaattaccgataaaatagtatatgggataatttaatttttttaaatattattattatgattaatatataataatgttatttgccaatatttttgtggctgggaactagtgattcattttgaaaatctaaatcctttttgacagagttactacctttgggaccacaagatatttttttggcatccacatagttaaatatactttaatattacatttcaatttttatatattttttttttccatggaaattatttattatttattccatttgtaagctttgaatcgattgctactaattaattagtgagtattttttaatttctgacaaaaacaaaaagcattcacacttctttttcttttcctaaagtgaaagttttgttactattacttaattttgagaaaataaaaattaaagtataaaattaatctgccctgaatggttcttgagtgtggaacattctattttttaaaaactataattctaaaataaaagtctgaatttagtgattgaaaatatatttctaaaaatgtgattggttaactaactgtttaaatataatagtgttagaatatgtaattagtgtgactgaatctaaaaattatttgcatagggtctgtttgataacacttttttaattagttttttttttaaattataaaaataaaaatattttctagaatcatattctctaaaactattttttttttaattttttaattaaaaatcaaaattttaaaattttgaaaacaacaaaaagtcattttctaaattttttaaataatttttctttttatcaatattttagactctcaccccaacttagaccttaaaactcgaacccgaacctcgattcagaccctaacccagactcggac

SEQ ID NO: 72751 - DNA, 1147 bp, Cannabis sativa
taaaggatatgtgcatgagggggagttgcccccaaatgtaatttgcaaactaaacaagagtttatatggtttaaaacagtcttcgaggcaatggtttgccaatctaagtactactctccttagcattggatttcaacagtcacattgaccattcccaaggtcatatcctaatgccttcctggccctcttagtgtatgtcgatgatataataattgccaataacaataacacagatgcttctgcatttaaagttttcctacactccaagttctaacttaaagaccttggctatcctcgattctttcttagtttggaaattgttagatccaaaacaggcgtagttgtgtctcaaaggcctttcactctacaaatcctaactaaatctggctcctttggcacaaaaggtatatcaacatcaatggatgccaatatatctctcagtaaggatattggggctcccatttcagatctcacctcttataggagcctcatcggcaaactcttatacttaacaataactcggcctgacataacatatgttgttaatcatctaagtcaatttcttagtgacccacgacaaccccacattaaggctgctatgaggatcttgtaatatctaaaagaaacacttggacaaagccttctcttccactcttttgttcctcaacaaaataatgctttccacctccatgcctttattagtgcagattggggtacatgtccagatacaaggcgagatccatcactgatttttacatttttctaggcaattctctcatatcatggaagtccaagaagcaaaccactatgtcaaaattctctatagaagctgaatagaggtccttggctaacacaacctgcaaactcctctagctcttcaatatacttttagaatttgacatctctcattcaactccatctactctctattgcgacaaccaagttgccctgcatgtcttcgaaaatgcaatattccatgagagcaccaagcacatagatattgactgccatgtggttcgagactaagtcactagaaattgcatcaagctcatacatgtcccttctcagcacaatatttgtaaagaccgcatacgaataatacgttgaattatttaataattaaagtttatgtatgagattttattat

SEQ ID NO: 72752 - DNA, 1021 bp, Cannabis sativa
tcatattgattttaaaaataatataattggttaattttattaatattaattaaacaatttattaaatatatttttaaaattaatacaaattaaattaagtatagaaaaataataatataattattatatgtaattatgatacttaaattcatatgtaataaaattatatatattattaaaaatagtgtatttatatataattatctcttagtataaatttttaaaaaattctgggaggccacagcccctgttgggatgtatgtggctccgtccctgcttgtccacctacacagatcagagatagatcgagagagatacgagggagaccgtgggcgtttgggcagcggagaagccgatggtgtagcagtgggagtcgtccatcgtcgtgtctcaggcgttgcccttggaggtcatcgtcgtcacaatgagagacgaaggaaatcccaggcgaagagagaaggtaatcccaggcgaacaaaagcttttttttcttttttttttgaagagagaggagttttaatttgaagcggctaaaataaaatgtgaatagaaattagggttttccactttgctttatataatatattatataaattaattatattcaatttatttattagatgcagtttaaatatttggtgttgactttttttattgaattttatttttaaataaaacatttattatttaaaattagtttttttttgagtattgtgcacttattttattattttaaaattaaatttaatatttgtgatatagtgatgcgccaggtgtattatggcacatgtatgcagtcacgcttgtcgtgtcactataagtcaatattttttttttaaaaaaaataatagaaaatatggaaattattttttagtgacacttcatatttttagtaacgcaaaataaaggacactaacactgaatttttagagtctttatgtgcatgtcactaaagctcacctctaaccctttagtgactcgcacttttgtgcgagttactaaaactcaattttgtagtagt

SEQ ID NO: 72753 - DNA, 1837 bp, Cannabis sativa
  modified_base (1326)..(1357): a, c, t, g, unknown or other
  modified_base (1700)..(1709): a, c, t, g, unknown or other
  modified_base (1783)..(1811): a, c, t, g, unknown or other
ggtccagatggaccaccggttctgttatgactcaacgtgagggtggccctagcacacggaccacacgttctcagaggacccaacccaatgttggtcctagtacgtagacaacacgctcgaggagaactcaacgtgggagtggccagaaccctgggacaagggataaagagctcaatcgtggaggtgcccagtctatgggagaaggtacttatgaaatggaaaactgccacctgagatgccgtctagaagaggcgcagcgtcaaaacgctgaattagagcgtgatgcagcctttgccagggtggcataggggacaaatgctcaaaatcaacctaaacctggagtgagaagacctcaaggtaggcctcgtggctcacaaactaggagacaggaagatgcctgggaagaacaacccagggaaaatgagatatcccctaaaaatcagaacgaacaaccagatggaaggaaaccagaaactgatgaacgagaaatttctcatgacaatgaggaggatcttgggactcaatcaggagaacgtaggtcacctgcgagaaatcaccaacgttcttcccaaacccatagagtgaggactcgtatagaccctaatgggggaaatacaacgaactgcactcagggggagagaacagagcatgaagaagctagcgtaaccttaaggcggtcaagaacccacagtcaatcaactcgaagaggcaaaagtactcaatgagctaatgatcgagaaagtatgggaaccagtaaatctgtgagttactcgaagacaaagtgtatgagtagtacgcgatctgtgagtaagatgaggtctggcagcaattactcccaactggatcagtgagagcacttgaatcgcaagaaacctgacctttgccaagagcttggtccaaagtaagaggatcccatccaattgtggataaacgagctgaaggacaagttcaggagatatcaagcgagggaactagggagacaatctggatacgacttagatgagaagcttgagctgtatcatccaaatataatgaatacccttttcctttgggattcaaaaacccgcatgtgtcgtcatatgatggaaccactgatctggtctcgtatttgaataactttaacacaataatgcgagggagtaatgtgacgaacaatttacgctgtattttgttccccacctcacttgttggagcagcgagcagctagtttaacaagtttactcatcattcaataacttcctgggagcatttgtccaggaattgcaagaaagagttccaagaagctgctagggataaacgacccaaagcggcctcgctaaccaatannnnnnnnnnnnnnnnnnnnnnnnnnnnnnnntacttaagtcgttttagcacggcttcagctagggttatgaatttggatgacagcacacaacttatagccctttaggcggggatctctactgatccattaaccacagggggcgagttgtggcatgacttacaaggtcatccagtaaaaagcatcactgagttcaaagaaacggctcagtgattcgttcagaaggaagatgcccgaaaggaaatgaatttgttgaaaacaagctagggaagcgaacccagcaatgtttcaacaagtactatttgttggaaattattttaccaggatcgagatttactaacaagtatgtttcattaacaccctaatatgaattctnnnnnnnnnnaaataaacacatataaagttttgaaaaccttagagtgggtgtagcagaatattatgactctttccattcagatnnnnnnnnnnnnnnnnnnnnnnnnnnnnnagcataatcaagatctaaatctggat

SEQ ID NO: 72754 - DNA, 1052 bp, Cannabis sativa
  modified_base (41)..(52): a, c, t, g, unknown or other
tattatataaaaataagatatataatccaattcaatataannnnnnnnnnnncaatacgacctaatacgacgttctaaacgagcccttcataagcataaacatacaccataagtgccctttactcatttatataatatttctaccaacttttacggctaattattaattgattaattataattatgtagaattattattggacgctaatagtacttaacatcacctaaaagtaacattttatgattgattagcaatatttaaaattattaccttattaaattatatggaacctcatacttatttgcaccaataacaatatcactaaaaaggtgctactactaatatgttttaacaattctcatatataaatcctcatatttatttccctcttataatatcctcaaattaataaaaaaaaatatatatagtttagtattgtttgtaattgtaattaaacaatattaatgtaaaaggttaattgcagattaggttttagtaattagctaactattgtgtttggcaagtaattaaatttatcaaaaaaaaaaaaaaatttgaaaaaaagaaatataaggttagtgggcgtcgaaatcaatggcattttaaattaataataataattaaaagatacaaatataaaccccatatatatatattttagcataataaatatttttttccttaaatttttacatatatatatactaaatcacatcttcaaatttgttagttttctcttttttaaaaaaaaaattgttagttttttaaaaatttccctcaaattattaagactattgaattaaagaattttcgctcaatttagttcatttttactaacaagcacctaatgtggtaattatatactcatattccaaataatattctttaaactttgttatgtattaaatcgggagaaattgaggattacctcttttctttaataactaataaaaagtcactccatattaaaattcaattgaaacatacctgcttctaagtgtaatatgcctaaaataccctcaagatttaatctcttattaaatcctcaatt

SEQ ID NO: 72755 - DNA, 1029 bp, Cannabis sativa
  modified_base (616)..(628): a, c, t, g, unknown or other
gtcaaaagattttattgtgttttattactttttttcttctttgttttttatttcttatattttaattaaaaaaatagtattgtataataccaagttttttattgttacttccactaaaaaaagttttctttatttgttatgatttgatgctatacatggatattgcatagtgattatttaatattcaatattaaattacaataataactatatatcatattaagtggtattaagtactctttgtaactatatatcatcctatggcagaattgtgaagcaatttttcttagcaagtttgtcaagtctcttaaccaaacatttattgtcctcattcttaaaaaggattctgttaggttatttttagcctaagtttcggatcacagtttatggttatttttttttctttattattatgtagagaatagaattacgcttgtttatttatttattttttgtttcaggtttcgacacttggaatgcataaattggacaaatttcgaaaaacagtgatttataaaataaagaaaattttgaaagagaataaagctaaaacttcaagcctaaattcaactttttttttatcatatttttgaaaaaagtcaaaacataaaagttnnnnnnnnnnnnnttatctttccaacgcattttgaattagcttatttggagttcgtatgagaaagttatgcctattttactgagagagcttgaagtagaaaaaaatagatctagtggccgcggcgaggcttttggtcgccgtggcgagggactacagaaagtccttttttttacttttctacagccgccgcggcgaggacattggccgccgcgatgccgacttcgtacaggtcaaggataactttgtcttttctcatttttgggctgaaaatttctatttaatgaaagggggtcacgaattgtagaggggagaccatatgcaaccctagaaagacaagaagaaggctcttggagcaagcatgggcaatccgcgacaatcctccatctagtttctttctcttctcttgacttttt

SEQ ID NO: 72756 - DNA, 1195 bp, Cannabis sativa
  modified_base (1002)..(1010): a, c, t, g, unknown or other
aaattaacaaactgatcaagatacaatagctcagacccccagatcattggattgaaggcagcctcatagaaatcccacgctaaccatggcacccaaggcgaactccagatgtccacattttgaccattgcccaccaaccagcagctctctctacgaatgagatcatgagtagcgaagattcctctcgctccccacgaggcagaactcgggatactcgaattccaaaaattagaatccctcctacaatacttagccaagaaaatatatgttataatgaaatagttaatcgtcgacaaatatatgtactgtagcaatactttctttgagatataagttagggaaataaattgtaatgaaatagttagcaaatgatcacaactaatagtaccttgtagctcataaatttctatttttgcagtaaaatattatgtatttttttatattagtaattgttatctattgtcataaccttacacattattttgccatcatcaattttataattataatattattttataaaacttgacacaatattcacttaaattctgtttttctttttttgaaaaaattattattaatttcttcttttacctttcagatattatttatgttatatatatatgtgacatatttaaatgttaaattacaaaatttaaataaaaaaatatacgtgcattgcacacgtaacttctattactagataaatatatgtaatatatgtatatgttatattatttttttagttactaacttattattagtatattgcatcaaaaaaaaaaaaaacttattattagtatatatgttatgatattaaaattttaatataatatttttaaattttgttaaaactttgttagattgattttaaaattttataatttgataatgatcatagcgtttggttgggaggaatgaaaatataggaatagaagtgggaattggaattgaaataggaatgcaatggaattggaatttaaaatacataaaaaaattgannnnnnnnnttattaaattttttcaaattttgcattgaaatggtctttctttctattttaaaatggaatagtcattccaccaaaataatagaaaggtcattccatcggaatggtattccaatagttttaaatgcaactaaacaaaggaatggaataaacattatttaaactacgcatgtattttcacagtgtga

SEQ ID NO: 72757 - DNA, 601 bp, Cannabis sativa
acatatttgtcatacgaagaacaatcggttcagatcttggacaggaagaaaaaagtgttgcggaacaagactattttgttagttgaagtgatgtggagaaacaacaagattgaagaagtgacttgggagctagagtcccagatgcgggagaagtgtcccgagttatttcggtaaattttaaggacaaaatttctttaagaaggagatagttataatatcccgaaaaatataatagtaattaattaggcatattttattaaatatgtgattatttgaataatggggtaagattataatcttatactaattgtgagttaattagtatcaatctggtaaatgaataaatgaagcgtaatttgttaattatggagattttatcgggttatgtaggtattttaaataccattttaaaataaaatatttattttcgggttcggcgatcgtggaaaacttgacggagtggtcagaaatgtcacgtcggttgaaattgtgttgtattggaattatatcggactaggttaaaatgttgagaagtaggtaaacagagaaaaataagaaatgacaaaaataccccttgattatattatagcttaagttttaa

SEQ ID NO: 72758 - DNA, 688 bp, Cannabis sativa
  modified_base (477)..(479): a, c, t, g, unknown or other
tgtttggtattcatgatgattattatggctattgtgttgttatgtttagattcaatatattggtgttttttttagaggagttgtgtttggtgctttggtttgggattgaagtgaggattttataagtgctaaataataaggtagagaatagtactatcaatcaataattaggtggtacagtactacatactttatattttaattattattaacaagtatatatttatagagagaaaataatttaatttgcataattaagttttatgtcatgcatgcacttttttgtttggctattatgtcatatttaatgaaaaagaaagaaacagatataatagttcagtactgtacgattggtacatgttatggaaagatagatagctcccatcaaattagtgtgatgttatatgttatggtatgaaggactaatcaaatttttatatatgatcatcatcaattaattaattaatattattattnnnattattattattattaatgttatcaaatattacattaatttattggttttaagtcaaaactgttagcatagataactaatggaccctgtgtgtctggtccaggtttcgattttgtgtctgagttcaggtctcgaatccgtgtccgtatttgagttccaattccaggtttcgatctgtgtccaggttagagtttttattacaataaaaaa

SEQ ID NO: 72759 - DNA, 789 bp, Cannabis sativa
gggaaaattactaattagccatgtttgaaaaaaaaaaaaaattaaaaacacaaatatatggtatttaatttcttttattagtaatttttaatcaatataaaaatggcaaataattaaacttttaagaaaggaaaatcatacaccaaatggagtggctcaacgtaagagtaattaaataatcttaatagttaaaaattattttaaatatttgttataaaattgttatgcagtttaagtttattttatgaagagatttttatttattttaatattattaagagataaattttattttaaatatttgttacaaaatgataatagttattattttaaatattgcacaatattaatttattgtgtaattaccaactatcttattaaacataacaatagaaattcacatgtaattatcatttgatatccaaacacacattgtattttaaaatacaatgtaattactattacagtgtaattattaccctagcaattacatttgcttacaaagattttcaaaaactgatttaataataaattaatttaagaagaatgttcaagaaataaataagaagaggatttttatgtggctggggcattaaaaagccttaatccacaagtcagtattattgagcttgaaaagctatggagtattttcacacaagaatgttcttgtcaaagatttagaaccctaaaatttagccttcaattttttaattgagttttaaaccctttgcacgaagagatcatgttctaattataggctaaagtcgggtttataggtaaatctagacc

SEQ ID NO: 72760 - DNA, 788 bp, Cannabis sativa
atagattttaatgttttatattaattcatgcttccgtgtttagtaaataaaacaaaatgatattgtaagacgttattttagtcacatacttttttttaactctaatcttaaaattttctattctcaaactcttgctaattattgtggacattgtcccacataaaataaatagtagagaattgagccacatataaaaacatgagctactctattcattgccaattggttttgagatagaacttcataattctcaacactaatgaatgatggtgtagcctgaaatctaatctagctaattaattatatctttgaaaatatttaaccaaaatcaaatcaactagcactactacaaattacactatttacgtcggtcaacgctactattcacagcgttgaccgacgtgaatagtatccaaattattagatccgtctttttaaaaatgacgtgaataatatacaattagcgtcatttagtaaatgacaataaaaagaaaaccgacgataaaagccaattgttttttttgaaaacttgcttttattttgcgtctgttattacctgtagattattgtgtttgcgacggttttaaacagacgcaaaaagaaattgtgaaaaatctaacagacgcaaattgaataaaataccttaaaactaacaaatcatcgccagtacattgttcacattcaaccctaaactattcgagtacacagcgaaaccactaccctttgaatccctttcgaatctggccactcaatcgtcctctctgaaatcagcctctctacccttctga

SEQ ID NO: 72761 - DNA, 735 bp, Cannabis sativa
gttaagttgggagctacttttgggggcctaaaaattgggaattttcgagccattattgcccaataggagcttctagcataggagaacttccatgatgggagagcttccggaataggatagcttccatgatgggagagcttttggaatgagaaagcttccatgatgggagagcttcaggaatgggagagctttcatgatgggaaagcttccggaatgggaaagcttccatgatgggagagcttccgtgattggagagcttccgtgatgggagagcttccagaatgggaaaccttccatgatgggagagcttccataatgggagagcttccgaaatgggagagcttccataatgggggagcttttgaaatggaactttaccgaggagactattttttgtattttggctattacttttcactcagatgtctcttttggacgtttttaatatcattttaaagcttgtgacgagctctaccatatggaatataagttagagctaagctgtgtatttttataagggtgttttcactatgtagtttggtagaaaaaccctagattctattcgggcattagaggagtgttcttgagtaaacacttatcaattttacattatgacatagggccttcgttcagcacgtaaatttttattcaggttgaccgacacacttgaatcaagaaacgaggtaagactagcataaaatgtatatgtatatatgtatgtgtattatatgcatg

SEQ ID NO: 72762 - DNA, 1095 bp, Cannabis sativa
atatatatatatatttatatgctttattatatatacttatagattatataatttatatgactattaaaaaatataaagttcaaactaatatatttttttatggtggttgatttaaactttgaattcaatctatatgtatttgtcttattattacaattaactaaaatataacaattgaatgtaaaaataaaaactaaaaaaatattaatggtcgatttggatgggttaacccgaccaaaattgccaattttattgggcggattattattttcttttctcttaattgggtgtgttgtacttagatttttataacccgatctttatattgggttgaataaaatgtagcataaaccaaccaaaccgaccgacgtacacacctgcccttaatatttgcaattattacacatatgactctaataaaaaaaaaagtggcagctagaatacattgtctaataattttgttgcaatcgtacccttttttagctatgtgaaataaacccattaagtgtcaactcaaaaatacataataacatatttatttagcttatttaatacgtagtctaataatatatcgtcacgtgtttctgagttgacacttgataactaaaagttggtacgactacaacaaaattgtaagaaaaaatatttttaccgctacttttttttttaattagaatcatatatataataattataaatattaaaaaaaattcaccgcaaataaccatattaaattttatttttatgaaaaaccaatttatatgagaaatttacatggtatactaatttttgttattttcttacaaaaatactgctaggcggtaatcttttcatttttactgtgttttcttaaaggttttatactgctactgccttttattaattttttttgtcatgatttggaaaagacaaaagatttgatgttgatataaaaaatttttaaaaagtttttcaaataaaagttttgagttgacatgatttctatttaatttatatgtataattttgatttgattgatgttgtctacaatttttttttatttatttttttaattaaaattgatgttattgaccgagattttcggcaactaataaa

SEQ ID NO: 72763 - DNA, 644 bp, Cannabis sativa
aaactgtatgaactgagagagtgagattcgaagtgagaagtcgtgtgaggtgagtctgactattggtaattctttttttggaatttgattaaaaaaatgaataatattaaatttacaacaacttaattaatgaatacttaagctgaccaataatttttagacttagtaatgaatagtcttttttttttctgaatgtgaatcctattcctgattaataaataattaagtattattaatattatttttttaaaaaaaatataaatttcgagttacaaattacaacccgaccgaaaataaactgcttatccacacccgaacccgaaacccgttttaggcttttccgggttcaacccgacccgaccatacgggtttttcgatgggcggtttttttggctgcgggtcggggcgagtgttcgggtttttcaagtgtgcgggtccaaatgtgcagccctacaaacaacactaaacccagcttctaaacatcatccttctcagtgcaactctcaaagacgctgcacagtcgaccaatgctaatggatggatctccattaaagtattctactatcaaacgacctgactttgccttctcttcaacctcagcctcagtaggtccacgtaacatactaccaagtatgtttgattaa

SEQ ID NO: 72764 - DNA, 559 bp, Cannabis sativa
ttttacaaattacattatatattaaatattaagattttgttatccgatttgatttaattaatttcaatcatatatttcattggatgtaagattaatattggattgattttatccattatatttcatatatatctattagtttaatttgtgttactcaaaattttaaacctattattttttggatcagatcagatccatctaatattttaatctagtatatatttgattggatgtgatctattttaacaaaaaaaaaaaaaagtaaaattttaatgttaatttgaatatatgcagatatactttatctataacaacataaaatctaattacttatttaaattaaatgaaaatgctaattagttttattggatgtgtaatatccaatgtgatccaattaaatattcaaaaataatatcttatctaatccaatcacaattaaatatttaatatttagcagtccgttgtaattaaatcagtccgttattattaaattgtatcgatatatcagccctatatacataatataattagctcctcttccaacaagtatattttaaat

SEQ ID NO: 72765 - DNA, 858 bp, Cannabis sativa
  modified_base (78)..(98): a, c, t, g, unknown or other
taaggtttactaaactttatatttgtttatttcatcgttttagaaagttcatagttagggtgttaatcaacatacttnnnnnnnnnnnnnnnnnnnnngtaaaataatttccaacacactataggtggcatttatctcaacatattaaagtacatgttagagttaaaggtgtcgtaaaattattcgaaaaaactgctaatgcctataaagtttccgagttcaaccaactttatgatgaattgaagaatagatatcctagagctgtgattatcttaaagagtcaaatgtaccacttaggcaatgggcaatatctcactttacagtttgttactacaatattatgactacgaacgttgttgaatctattaatgcagtaatgaaggaaccaagagagtatcctataattgcattattggaggctatgcaagcaaaagtctctgaatagttcaacaaccgtcgcaatattatggcatctattaatacatcatgtacacctttaactccaatgacagagaatatcattcgaataaaattcaagaaagcattggaaatgaatgtcaagcagcttaatcgattttagtatgaggttactggtaagacaacgatgccatagttgatttgggtcaaagacaatgctcttgtcgtgtttttgaccttgataaacttccttgcgtgcatgcattagcagcatatgaacaagctagaatagaagtatatactttgtgctccaattattataagtttgaaacttaggcgttggcttatgttgatacaatttatctagtgcctcaacgagaagattgggatatcgatgaagtttaattacttccgaaggtttttcctccaaatgtcccaatc

SEQ ID NO: 72766 - DNA, 985 bp, Cannabis sativa
caagcgtagtgctcagctcggggcaatatcccgtgctgtgccatcgagttgaagaccctgcagccttcctcgactaagccagagtggctgcaggccgataagattgttgaatacgtgaccccgtttggttttatccccgaaaattccatctttgtgaaaagatcgagtgctgatttaccatcgccatttaatccatacccgttgatcatcacactccaagaaacatcgtcttttccctctaaccgattgaatagctttcttgccattgaaatgtttccacttcttgcatacaaatctataagggcattggtgatagtcactactttgttgaatcccttgcatattgtgtaagcggttatagaattggcgagctttaggctgtttaaatgaacacaagcagaaattaggctcagtatggttagattgtcgggttccaatcccgacttaagcaaatagaagaagaacttgatggcctttttggtgttttgtgtttgtacatgagcagacatgatagcgttccaaagcgaaatatcttccttttcacccatttgaaacagcgagtgacacaaccgaagatcgttgaatcttgcatacatgattattagcgatgtaacaatggtggtttctttaatgattcctcttctaactgcaaaaccatggacagacttaccttgcaatcggctgaagcaggctggcaatagatttagcaatgttatatgattaggcctctttccatcccttgtcatttcgccaaatgagaccataatctccttatgtaaactgtgctgacgaaaaccagtcatcattgcattccaagacaccaaactcttttcaggcattgattcgaaaagcaacttcgcggtatcaagatccccacagttacagtacatgctaataagtaaattaacaagagaaacatcttgtgaaaacccggttttgacagcatagcaatgaatagccattcctcgtcccaaatctttcttct

SEQ ID NO: 72767 - DNA, 980 bp, Cannabis sativa
tgttactagtgtttcgggtttctcattgtgttgcaggttttgaagggggtgcaaggattcggccattgaagctactgctgtagcttgaagaaggaaggaaggagaaagaaagcttgctgcgttttttcagcaagggagaagcttgctgcgtttttcagcaagggagaagcttgctgcgtttttcagcaagagagaagaaggaagaagaagaggcttggctaggttgtgttcttgctgttcaaagaaaatagaagaaggagaggagaagaatagggccggctggttgtgtgtgctttgaagagatgatttttaatgctaggtttttctaaggaaaaagaaaagaaagattatatatggtcttgattaatggcagtagggttttgactaaagaaagagaaaaaggggtatcagatttttgaaaagagaatatgctcttttggatccgcatcaaacaaaaatgacgaatctacccctagtagttgaacgttaggtgtttgggtgtagggggctgttgggaactgcagcaaatttcctacacacatttttctataaaaaataatgtcagtgtttgtaaggttggccaataaataaattttgaatgaaaaataaagaatttataactaaaaaattgaaaaaaatatttcggagaccataatgatacgcagggccggctcaagcggtttgggagtcttgggcaaaaaattaataaattgggtcttttattaaaaataattatcaattaaatacttcatagattcaattttcaaaaaaaaaaaaaaaaaaaaaacttcataaactctaaaataggcaaaattatttagaatcatgtttatttttgagaccacaaaattttataatttgctttttttgtaagtatagtgcatatttactcttataaatatttatataaaaaatatttattatattatataaataaagggaaaataaaaaagggagtgatgataaaaggaagagacttt

SEQ ID NO: 72768 - DNA, 1339 bp, Cannabis sativa
tacaagcctatattacacaaatttagcttttagatgtgaagtggctacccctgctctctagtaaagcagaggccactgttaaacaacaatgggagaccacacccaagagggctgtgagtgctagcactttttgcactctaatgttgagtaggtagaaccgctactttggagtagagttctttaagctggttactggtagtatatatgaaggtgctctccattctagtatcttggtaagagaacaagctccatgttctcgatgtaccttcctagcttataggctcccttactagttatctctataacttgataagggccttcctagttaggtctaaacacccctgctgatgagtctttagtgttcaggaacactctttggagcaccatgtctcatatgaagaatttttttctcttgacgtgtttgttgaagtgccttgctacctcttcctagtaggcctgcaactttaggttggcttgttcttttctttcttttacttcgtcaagggactctaccagcagggttctatttgtttgttggtcataggttatactcctgtgagacggtcgcactagctctacatgcaacatcacctcatagccataagctagagcaaatggagtttgcctagtggtcgtcttctcggaagtcctatgcgaccataagacctctgggagcaattcaggccagttgccttttgcttcctcaacgcacttcttcagggtgtccttgagggttttgttgacagcttatacctgcccattagcttgaggatgggccacgacagagaagctttttatgatgccatgtctattgcagaaatcaatgaacatgtcactgggaaactgcttaccgttatcttacacaatcttttgggaaaggccaaaccggcatatgatgttcttaacaataaagtcaaggactttcttggatgtgattatcgtcaggggttcagctactgtccatttggtgaagtagtatactacgacaatagcaaactgtacccctcattttccctttgggagctgaccaattaggtctatcccccacactacgaagggccaaggagactgcatcatcgtaagctcattgggtggagcttttggtgtcttcaaaactctctgggacttgtcacattttctgacatagtccacaaagtttttgatcattgttggccaaaagtacccctgttagagtatctttttgaataggatagcccctggcatggtttctgtggaagccttcatgcacttctatctttagtcgttcagcttcggccttggtgacacacctcaggagaggcatggagaagctcagtgtgtatattttcccgtctacgat

SEQ ID NO: 72769 - DNA, 908 bp, Cannabis sativa
  modified_base (308)..(314): a, c, t, g, unknown or other
tgagccttgtgtgagagttaggggaccatagtagtgggtatgatatactgaacccaaccctccctcacatgaatcatcccaattgtgaaagcacatttaccttatgaaataattgtattaggataattatattagtttaacctaatttaaattgattagcaacataattaatttacaaataaattaattaaatttttattagattattttaaaattaatttataaaaatacgtttagtttaatgaaatatattctagatagttatttctagtaactaattatatttctaatatttaattaagtagaannnnnnntttaagttaaaaattaattttaaatcaacttaaattaaaataattttgttagatatatttattcaaaatacttaattatttgtttctaattttttaatacatttaattaaatagatattttaattagatagaaaattatttaagttggaaattttaatttcagaacaacttaaattagaacaattttcaaaatatattttattttattaatcattttttccattaaattttgaataacatttatattaaatgtatacattttgaaattttgaaaaatagattaaagtttaaaattaattatttcaattaatttttagaccaatttaaatcaattaaatttttcataaataatttattaaaataaatagactaaaatatatcatattttaattagaaaataaataattacttaatgaaatatctagatggttattttctgagtagacttttggtatttttctagatatatttaattaaatagaatatcaatatttaagttaattttaatcaagacacttaaatattggatatttttcttaagaaatttaattaaataggagaattatatttgtgttgaaaattaatttattaatt

SEQ ID NO: 72770 - DNA, 1038 bp, Cannabis sativa
  modified_base (111)..(111): a, c, t, g, unknown or other
taaaataaaaataaatgtaatgcatttgaaccctccgcgcatttatatttatgaattaacgaaaatagtagttacggtgtaagagaattataacattaggtatttttgccnccaaaaataaacattaggtatttttttttaataaaacattaagtatttaagtgtataaactctaaaacattaggtatttatgccgcaatttacccttaaaaaaatagtatttattgtggattaaaatttggctcatgctatcttttgtactaaatttggcacaattattagcttgggccgaattcaacacacattttatatcactattaaaattaagttttaaaaacatgttctaaaaaaataattatacagcatatttataactctccattgagttttttttttatttatttgtttatgtattaaacaaaacttttatttagtacgtccaaatatttgagttttggaagatgaatgtgggtgaccttcacaaggtttgggaaatcatagccttgaaaaaggccaaatagagactgggatttcttcccctttgatcaaattcttgataccatgcttcatgagctttgccacacaagctttgggatgaacttaaaaagatatatacatatttggtatacatctgtatatatagctcttgttatttttagtgcgactttaaatttcctttcatgtgtactatttttaaaagaaaagataaattgtttttattttatacatattatatatgcacatgtaaattaatgttagaattctgctatgtgtatgtaatgtgttgagatattaccttgttcattatggccctgaaaatctagattatcaatatttacactatgtttggtagggggagagaaggagggagaggggtggagggagagagataaatgagagaaagggagattaaattcttctaaatacacaaatttcgattcctctaaagataagagaatctaaaaaaagacaaaaaactaaaatgtctctttccctctttaaaaattaatatataataatgttagaaaaattaataat

SEQ ID NO: 72771 - DNA, 805 bp, Cannabis sativa
aaaataaaacaatttgtcagaaagaaattgtcacataaatttgatatatacatttatgtgacaatttctttttatatatacacgtatcattaatttttacaattatatattcatttttaatataataaacagattcaaaaaatgtactaaagcttttatattaggttatcattaagtattatttttttttaaaaaaatcagctactattttgtactatttttaaaaatataaggtctaatttgtcatttaataaaagagagtccaataactttaacaaaatacaagattccaaattagtatcactacttaggggtgttcatcaaaccgctcaaaccgtctgcattgcaaaaaaaaaatgcggtttgaaattctttgcagtgcggtcgcggtttgaatttttcctaaactgcgcggtgcggtgcgatttgcggtttgaattgttgatatgcggttcaaaccgcaccgcaccgcataatataaaaataccaatttttatatatatttaggtccaatatgtgaaagcccaacctaaacccactaattattgtattgtgtaaaattaaaactttttttcatatttattttcaagccttattgtatttttgacaagtgttgctcaagctttgttgtatttgtgatatttaaattatttattgatagtttaaaccgcataaaccgcaccgcaccgcactactttttgtggtgcggtttttgcagttcgtggagcgggtgcgatttggaaaattgaaaaaactgcatgtgcaggttggtttgaaaatttaatcaaaaaccgtaccacccgca

SEQ ID NO: 72772 - DNA, 1364 bp, Cannabis sativa
aaataaaatttattgtgactaaattatgtgtttttagtcacaatacttgttgtaactaaaactaaattagtgacaacttgtaactaaatattatgtttactcacaagtaagttttttgttgtgactaaaagtcacatttagtcacaaaatttttttgttgtgactaaaaagttgtcactaaagatggtcttttttgtagtgggtagatacggaatatatttagttggaggaaattccaccttcactaatatgtaatttatttttaaattaatataatagtcttttctaaaaaaaaaaatattatataaatatataaagatctaaattcattatatattattcatgttatcatccatctagctacttttcttaaaatttgagataaagtagatagagttttatctgaaaaattaattgacaataaaaagaatagtttatttagtatatatatatatgataatttatttctacacactagcagttaaaactaactctaataattttaagtttcttataactacataattctgctgtacaaaagaataataatactaaatattagaataactacaaattaaagaggcaaaaaaaattacattatttactaattaacgatgtagatgattgactaataaatacaaaaaaaaaaaattaaatgtaattaatattataagtggaatatatatcttaaatatatgacgtacgacaaacaaaaaatgctataaatactattatactatacattatttaaacaaattcttctttttggctgtgaattaatatatatgtatatatattactgactatatttatatataaataggaatcatgttaatcaatgctataaatatatatatattaaaatatatagcataagttttaaatgctatattctgtaaattataacattagaaagcgaaaggaatatttgcaagaacttttataattatatatgcaatataattaaatagggctcaactcttgctgatccatcgagtcaaagcttttgaccaaataaagtgaaagaaaccaaaaagcaaagataacaaactttaaaaataataaataataacaatatatataatgggacaaagagcaaaacacatcaacattataacttgttgtattttgtacgtgagcttttttctttttttgatagatttatattcacaccaatatgtgagcttttttcaatattaacaactcatgagttgagattcataaaccttttgagattcataaaccttttttttagaaaaaatttttagaaaaaaaaaaaagaaagaaaagaaagaaagaaagaaaggctgtgtgtttctctttctgtgtctcttgccctttaatatatatgtatgtatatatat

SEQ ID NO: 72773 - DNA, 783 bp, Cannabis sativa
gacagccacaagaggagtaaacacattgggaggaaataccacatcatcatgaaatttgtggcaagaggagatgtgttggtagaaaaggttgatactgaagacaacctagttgaaccatttacaaagacattgacagaagctgcatttgaaaagcatagagaaaatctaggattaattgaaatgtactgattgtttatattagtgcaagtaaaagtttgttgggttttgtgtcttaactaaaaccataatttaatgtaatcttgaatttcattatcaataaaagaactgaattattttattacttgtttagtgtaatgcttacttcatatgtttattttatgatcatatgtttgatatataaattctatttaacccttatcacattgttattcatgattattgtgttgtctacacagtggaaaataatcaagatcatgtaattaaaccaattagtcccatgatttatcagtacactagatttacactgatataataatcaacaatttgatttacttacacttgtacagtggaatgtcttttccaaagaaatagcaaagtaagcttgtattggatgtatggttatacatcaaactggatcaatattcacagtggaaaaaatatgataaatttaccgtaatatcatttctaagtaaatatcacttagttgatcatagatcaatgatctcaatcttaaaatgattaggttctggtttaaatgtattacatgtgttctttgacttgttcgttaaatctaactagttggattggcccaacacttacatc

SEQ ID NO: 72774 - DNA, 1462 bp, Cannabis sativa
ataaatcatcattcctatgttgtgcataaaaagtccgtggctaattaaaagtattagtaacaaaaattacaatttgttgtgactaattgttttctaagccacaatacttgtgactaaaactagattagtgacaacttgtagcttaatactatgttttagtcacaagtaatattttattgtgagtaaaaaatataattagtcacaaaaaatttacattgtgactaaaattttttcactaaaggtagctgttttttgtagtgtacgtactaatataaaattgtcatgtgtacaagagtgtacacataagcagtctatggtggcagttataaccaggtgatactttaaatttgttaacaattcagtaattttgaagattttactgttaaattttaaacttaggagaatttagtgcaagtgaaacgataggatagtttataaaataaatagcactgtcctcaacaccacacaaaggcccacataattatgtcaattatacttaccaaaaagagaaagttattaaaaaaggacacaactttaatcaatcaagtacttgtatcaaaattggactctaactagatagacacacactactatgaattaattaagaaatttttacatatctatcatatcttcataaaatcttattggagaatattgtcccacatggattaaatatgaaaatattgagtcatatataagaaacatgggctactccactcattgccaaatctaaataagaagtgagaagaattaaaatgagtaaaatcacaacaacaaaaacaacacatcatgtagaacgacaaagtaaaatagtaattaaatataaaggtaaacataataaagggatatcttttgaccattattgttattacctacttgaagatattgaacactatatcgatatagcgcgttatgagagttcttcacttttttcctacttgcctgaacccgaagcaccactactataaaaaacatcctttaatgctcctttttcatatccaacaaaatagtgaaggatatgaaagagttcttgggagtttttatctccactattattgagcatgaaaaaattactacaaatttttttactttgagtccaaagagtaaaagtaaaaatgttgtgactaattataaattataattcttatattgtgactaaaagatctggggctaaaaatattagtcacaaaactacaattcgttgtattttttttttttttttgataagttacaattcgttgtgatcattaaatgtgttttagtcacaatattagttgtgactaaactttaattaatgacaacttgtatttacatatgatattttagtcataagttacttaacttgtgactagaaattatattatgactaaaaggttgtgactaaaaataattttttttttatataatgttaatttatgactaaggataacatatcttgatttataaattatatattcagggg

SEQ ID NO: 72775 - DNA, 2154 bp, Cannabis sativa
  modified_base (28)..(54): a, c, t, g, unknown or other
ataaagtttttattaatattattaatannnnnnnnnnnnnnnnnnnnnnnnnnntattattattattataatatattattatgattattattaatattattatatgttttttaaaactaataagtttattagtctatacatattaagtttatagatagcacatacgaacgaaaccctcatcctcctttatttattttcttttattttcaacccgaaacctagcgatctaagctctggtagtagcgggatagcaaattcttgaagatggaaagcttaaggtatgatttaatttcgttttaagctaaaaacaattattttttatatcgggatttcctgattagaatagttatggagattctgacttcgtagaaatgttctttggtagctattggactagttttgatgtttactagttgaatttgaggtgattttgagttagaaattgagtttggaactttttaaagcttagtctgaacattagtgatgttttttgtttaagagctcatttttaatttctgttacattaggattgtagtatatatggtatatatgcgctctgtgaagtttggatgatttggataagtttcgggggtgtttcagtaagtgcaaaatttggaattttcgtgttttaccgatttttgaaatttttaggagatcataaatcatatttttgtcatagctttttacttgggtgtgcgttttgacgttctatataccgttttgaatcttgtaataagcactacaatatggtgtaagttttagagccaaaatataagttttattttagtatatttataccgttgtgtttgatataaaactctagattgtcttacgcgagtgttaagtaggattttgggataaactcttattggtttaccattgttgtgacatagggccaagatcatcggggatatttcttcacttgggttggcctacatgcatgaatctggattaaaggtaagaaaagtatattgtactgcatagcatgttatatcgtaatacaattaatattgttgtgaattgattgatattgagattaagatatggttaatattattatataatgaaaagattgattgattaagcaataataatatgatgataccatgaatgtgagtaccgggtgtaggtacaggctcacctgattaggtgatgcaatatgtcgggcatcgtaccttattaggtatgggaggtatgggcgacagtgatatgagaatgccaggctatggcatagattgaaaatgttgttgggttttttcctagcggagtaccttattaggtatgggtggcagtgacatgtgagtacctggcattggtacgggctcatctgattaggtgatgcgatatattggtgccaggctatggcacgggctcacctgattaggtgatgcaattatgtgatatatgagtacatgtttttggcacaggctcacctgattaggtgatgtcattatgcaaaaaatgggtgccaggctatggcacgggcttgcccgattaggcaatgcaatacaggattattagactaaagcatcgacttgtctaattaggcaatatgatataatgaagatggttactttatgaggtgacatatatataatttatattattaaatgaatatgatttttattgttggtataatggttttgtattaccaaatatctgtatactgatgtttattcgtggcaaattccagtagtgatttggatctcatcttatgagtaatgcctgatcgtttaattctgattgtctgagtataaatggtaatattcgaataataaattatatgattattgttattacttttcttgctgagtccttgtgactcacgggtgctatgtggtgtaggtaaaggtaaagaaaagctagatcaacaatgagaatacagtctcctccagcaatgtacatattgacctcattggcctgtgaaccgagttgtcaggagttgttttgggctggctgtatctgttgtgcatttttattttgtgttttaattgtttttgtatatagtcttttgtaaaccttttatgatagagatccccataacacgtttttaatgtccttatgatgcccatttttagtgttttattttagtcaagtttttaatattatcactatttttaataattaattaatctattagtattaaactagttt

SEQ ID NO: 72776 - DNA, 784 bp, Cannabis sativa
tccaaaactgttgctaaacctactaattctgatgttcaacatgaaagactttctaattctgatgcttcatcttataaccggcctgctagaactacttataagccttcatatttgcaagattatcattgttttcttgctaaaactaactcctctgttgtgtctcaagatccttcattagttaccccttactctatttctcaagtgcttgattatagcaggttggcaccacacttttgagcaactaactattttccatttccagccactttgaacctgagttttttagtcaagcttgaagcattaaagattaggatgatgccatggacgttgattaagtatcatgcaataggttgtagatgggtctataagattaagtacaatgatgatggttcagtggagagatttaaagccaaacttgtggctaagggttacaatcaacaacatggcatagattacactgacacctttgctcttgtgacaaaaatggtaacagttaagcttgttttagctcttgcagcattccatggttggtatcttcaccaactcgatatgaataatgctttttttcttggagatttacatgaagaagtttatgtggcccttcctttagggtatactccaaaggatgaacttctcccaaatgcagtgtgtaagcttcaaatatctttatatgatttgaagcaagcattaaggcaatggttccaaaaattttctaatgccttgattgcagaaggcttccatcgcaacaatttagttgctttgaaggctctcaaagtcaagttga

SEQ ID NO: 72777 - DNA, 1842 bp, Cannabis sativa
tttttttaccgttgtatttattattatattattattttattacaaaatgtggaaacaatgtatagcaagacttaattgtattatacttattaattaatacattgtagatgatgtggtttgtaataattctatttctcatcaatttatttatatgaatttaccattttttttatatttaccgttgtatttggtacaaattttttttattattatattattattattatttattacataatatagaataatacattgtagatgacgtggactgtaattactcaaactaatttaaatatacaagtcaactgaaaagaagcgcgtattctatcacaacaattttttaccgttgtattttattattatattattatttatttattacagaatagagaaacaagatataaccaggacttaattgtattatacttattaattaataagttgtagatgacgtggcttctaatcactcaagcttagtgattctatttctcatcaatttatttatatgtatttaccactttctttgtatttaccattgtattttgtacaactttttttattattatttattacaaaatatagaataatacattgtagatgacgtgcactgtaattactcaaactaatttaacagtgattgattctattcctcatcaatttatttctatatttataataagtattttcattaaaattaggtttttttttttaaatattatacctaaaattgattttatttgtaaaaatactttcaataaatttatttacataaataacgatgtaccacgtcagcataaataccgaaatttaaaattattaccgaaaatggaagaaacttaaaaattttgcttccagaaagttcagtattttgcaagttttttttttaaaaaagcaacattttagttgcttttgatgtaaataatatatcaattagttactttttattaaaaaaaattatttcaagataatttttttttatacatatttagttacttattttgatcaaatattttaaaactatgattttttttaaaaaaaattaagctatattatatgttattttattatttaagatatctcgagattacttttttttagcaattttaaaccatattttgagttgttggaaacacatgtaattttttcgatataaaaacagatgaacaagataaaagtaacttttcttttcttttataaattattaacaaataggtaactaaataatatctttgaataaaataagtatactatctaattttatgagttaccacaataaatattgtaatattttatatttaaaaatttgctagtatctaaataaatttactttaaataagtaacaccaacagatcctatacagcagagaagagatcatgtttaaaaatttcgtttcttataagttattttagaaattagttgatatttaaaaattcaattttctagtaaagaaattaaaaggttattttttattttaattattttttccgacaataataataaaatatacgttttccatatgttaaaataatctttttaaaaaatagatcgtgatgacataatttttaagctcaaataaatttacgtaataaataagataatattttttaaaaaaccaataaaattggttggtctattttagtttggttaggctcaaattttgattttttttttgttagttaaattaaaagaaactaaaagattgtatcattttttttagtgaccgtaaaaaatatgttgtttaaatattaaattataggcagtcgattttgtgcccatatgtgcaaaacacggattggaatccgtgtacggcaggtaggtcccacgttagaatagttataattt

SEQ ID NO: 72778 - DNA, 661 bp, Cannabis sativa
ttttttttgtccataagtctttactttcttttatttatttatttattttatgaaaatctatttgtttcctttttttcttttaaagcattatttcttctctaataatattgatttttctaaaaaaaattaataatattgatttgctttgcaagatatcacttcaatttttttgtcgtaccactttaaattttttaattatgtataaagtgataactcttattcttgcatttctagaattagcaaattaaaaatgatctttttcaactatgaatataataaatattatacttggcaacaagataaaaaatgaatatttaagtagttgtttgctagtattgtatattgaaaaagagaaatcctcaaaaaaaattagtattccttatcaataactttcgtgatatgcaagaaagagatcgattatgtgttttatttttaattatgaagcttttttttaaaaaaaaaaactttaattatgaagttaataaagtgtttttcaaatattttatcacctaaatttataatatagtttggcattccctaacttcttattttggctctgcccctaactatatatacgtaattcatacagaaataacccacacaaccattaatgttttaaaccctaaaagtataattaattaattaattaacatgtttctca

SEQ ID NO: 72779 - DNA, 769 bp, Cannabis sativa
tgattccatattgcccaaatgaaaaaaaaaatagaagggccaagttatatttgtcatatagatcaaaagcaccagaaataaacaagttaatatccctgcctttatgcatattataataactgaaaaacatggagtgcttccaagcttttttggcatgacgacactcaaggatagcgtgttccacagtctccatttttagttggcaaatggggcaaaccggggagggaatgatatgtcgaaaaaataaagaagaggaaacaagtatggaatgagagtgagcacgccagatcagatgtttaaccttaggtggcgcaccaaaagaccagattttagaccaaaaatacttactagtatcaatagaggaagaagtgggcatatctctagatttaagagctaaatggtgagcaattttgacattgaaaatccttgtagggtcaaggcccaaaatcaaaatatcattgcagttatggccagaatttggagcacgaagaatttcatcaatgaacgtgctatcaaaatattcctgtagcttaccccgatcccaatcaccagaaagggaaatgaaaaaagacaagttaggatcaggaggggaagaagaggattaagatttaagccaaaagccagggagccaacgatcctctttagtactgatatccatactattttccactttccaaattaaccccagttttagtaagtcacgtccccataaaatgcttctccaagaaaaagagggcctatgaatagaaacagcctcaaggatggagga

SEQ ID NO: 72780 - DNA, 664 bp, Cannabis sativa
atgggaccaatcgtagcctcaagagctaatttcatcatttccaattagttcggagcttactgaaactccgatcgaatttctgtcacacctcgtcccaaagaattgacatgctatgataccatttgataggaatttcctatcatttcagtgtaaacaatagcataatagagctgatatattgatattgaaatgaaaagggaaaaagtttgttaggtattcgggagacccagctctctcccaagagctaatgcttactttaacaaaataattctctacctttttacctttcctactcacttatatatagcactaattcctcccattaaaattacccaattaccctctttatttactatcctaaggcctaacaacatgttgagaagtgtaatagtacatgggtttgtgtttatacatattactagtctagccttgttaaattacagatccataaccatagcattcttaaaaatatgattttaatttggaattttatgtgtctgaatgtttaggttgttttatttactttgtatgttgatagtctatgtaaatgttcatcagaatatttgtggattttttgaaacatgttttggtacacaaaatctaatttttgtgttggttaggtgattcatcttttaagcataattatcttcttcttttttctttt

SEQ ID NO: 72781 - DNA, 1222 bp, Cannabis sativa
  modified_base (907)..(907): a, c, t, g, unknown or other
cttattttttttaaaattacatttttatttttagttatcttttaagtttattctagaaattagttccctttcataaatataatatacaaagtaagcataaatatgaaatagttttatctagtatacttaataatttgaatattgtttaattgttggtaaactaaatataaaaaaaaacttttgaaaaaaaagaagaaaaaaacactgaaaaaaactaaaatgctacctttgattcaggctagcaaaaaaatatatgtttctcacatatcaaaatgattatcttaaagtgtagatcacaatgtgtaagttttgagaccaaataattattagtgtagccaaaaaaaaaattaaatataaaaaaagaagaagaaagagaaaatattataaatctaaatattaattaaatatatgtacagtaaaaaaaactaggtgtatataagacaagataattgatacaaacattgaaatatattgtacaaacaaaaataaagaatgtatgtcacaaagataaccaagaatgtataaactaaaaacaaaactaatattaatgaaaacgttacaaatacaagagtaagtttgattgttttaaaagtaacgttatttctgtaattgagatggattttaagactccacatgtaaatttctctagattaaatgacgtggactaatcaaaaaataacacgtggacactaacctggcacataacggccaggtacctacggaagatctacactagtgacggaaggtatttttactgtcaaaagtatttatctgctactcggcataaaacttaagtatttatgccgcaaattactctaactataatcatcatgatagtaaatttattacttgaatacgacatatctttatatattaaaagtgcctatctaacggcaattcttggttnaacgattcttggtttaacgattctctttttttttttaagaaaaagtaaacggaagattaactctgttaacattctcaaaataaaaattgagtttctaacgattgaccctctgtaatgaaaccctgcaatccgattcattcgtaaccctaagcatatgccatagccctgaacccatgatcaaaacatcgggagagtttctattttgcttgaatgttgtaaccaaatcggtcaaattggattcgtacggagcccatacaaaatccaattgcatcccaatctcatcaacacagtccgataatcattgtgcctcctaaa

SEQ ID NO: 72782 - DNA, 854 bp, Cannabis sativa
atatgatctcctacttgaaattctttatatctgtgctttggatctacataacttttttgcatgcttcgagaagcaagcatctaagccttgatcttttctgtagcatcactggtcctctgaactgattctagacctagatactttctttccccggtttcatcccaatgaattggagaatggcacttcctatcatacaatatcttataggaaatcagccctattgtagtctgataattgttgttataggagaattctatcaatgccagctacttactccatgaaccctcaaagtttatcatacaggctcgtaacatatctctcagtatctgaattatcctctaggactggccatctgtctgagggtaaaaagttgtactgaacttcaacttcgtacccatggccttctagagactctcctaaaacttggaagtcaacgtaggatctctgtctgaaacaatggacttcttatccccatggaaataaactatctgcttcatagataactccggatattgatcgactacaaatgttattttcattagtacaaaatgtgttgactcttcaaagtgatccactataacatagatcgagtcatacaaactcgtggttataggtagtccaaccacaaaatccatggtaatatcctcccacttccactcgggaagggtcaaaggctgcaacaaatccacaggtctctaatgtttagccttaattttctagcatgtcaaacacttggatacatagtctactacatcctttttcatatcacactaccaatagtagggtttcaagtcctgatacatcttggtggtacctggatacaacgattaagaagtggagcgagcttcatctaa

SEQ ID NO: 72783 - DNA, 868 bp, Cannabis sativa
  modified_base (665)..(665): a, c, t, g, unknown or other
attgcatcacaacagttgaatttcaataccagaaccaataaaagttaagagttcaatgagagaatattacttgtcatataagcacagacactaaattgaatggtgttctacaccaacagtagagtgcaactcataaacattcaaagttcctcaggcttatgtaaaaagatgctataagaaaattaacatgttatttagtggcatttaatatattgaaatgttattcaaacagtgaaaagaaaattaaatctttttacaacaatttttatttttttatactaaaaagaattccattctattcttataatcccatttttatttctttatcctaaacgttttcgaaatcaaaatgtaaactgcattaatattcacaaactagcgtttaacactccttgaatttactcgaataaaaagcaatttggcaagaaaaaaagcttattttcaccaattattcaacatcaaaccattaaaaaaggaaaatggagttactttttcagactcattttctttctccaaatccacggcgagttctttgaaaagcttaaaacccgttcgaatatcctgtaccaaaaaaaaaaacgaaaaattatcaaaaaaaagtaatcaataaatgaatgtctacaaatgccagtattcctatcaagagaagaagaagaagaagaagnagaagaagaagaagaagaagtgtttgaaccggaataagattctgattatcttggtaaatattcgaagcagctttctgaatgagaccagtgacggtattagcccgagaagcagagctcgacgccatttttgggggttttatgttaaaaaagaactgagagagattttatagaatccaatttcagtaaacgacatgtcgtttaat

SEQ ID NO: 72784 - DNA, 844 bp, Cannabis sativa
agtctctagagtttagaaatgaaagatatataaatatacaaatggtttagatatggaaaatcatttaaaataataggcgtgagagaatcttgatttcgaaattgagaagagatggaatttggatttggttttggtttttggtttctttcaatgcaaagttgaaagaaaatgacttttgaattttgagtgagaagtgggaaatgaatgagatgaattttactcactcagctaactcttattcaaaaaagagaaggaaaagaaaaactcatcttcacttcacgggtcaactactcaactcaatgactgttttattacatgagtggaatggtcaaatcaattctgggagtttggataaggtgtgagaatcggtgcacaactacacttttcaaaaccaatcatacttcgccacctcacccacccattttttggttccatccattttatttttcacttattcagttttgtcgtactcatcaagcttcacttactcttttcaaatcggaatttgaagtaaaataattttgatttttttttacatttgtgtggagatttaaacttatgatattttttttttcaaaaaacttatgatattttcttttatcagaaaaagtgtgaaattattaaattatataaatttaaattttttataattgtaagactatctttaatgcaatacataaatattgtgttaaatttgacataaaaaaaacaaattttatatttaccataatatttgttatgttgctctaatgtacaataacattttaagaggtaaatttgtctaaaaagcaaaatattattaatgacaaataataaattaaatatttaaaaaattactaatgac

SEQ ID NO: 72785 - DNA, 807 bp, Cannabis sativa
  modified_base (703)..(716): a, c, t, g, unknown or other
tattaattttttatttattttttaaataatatttaaagttttaaaaatttgagaaaaataaatataaagtttaagaatattaaaattaaacatgctctctatattaaatttaacaataaaaaataataatgttacaaataatatatatatatatttaaattaacctaatataaataatattaatatttatatatttataaaactaactctactaacaccgttaaatttaacagaatatatttttatattaatattttgttaaaccaacaaaaccattaaatagtcacattttacatataaagatatacatatttatactaggtggaaactacgtgcaagacacgttgtatcttgttttttttttttttttgcaattttttctatttaaaatatttaatttaataatagaaatattatttataaattttttttatatatatattttataaggtaggatgtttaatacgtcatttaaaactgttccacaagataagttttttattataatttttaaaatattactacttatatgtaacttataatctaagatgaagatttagcaacttcttattatcttgcttcttcaatagagtatacattaaaattcttgtatttttgagtcttcatcttcttttgatgagcataaatttgtagtatccaacacattagaaatactttcaatatgttaattccatttttggcnnnnnnnnnnnnnnaaaatattttattatttattgtattttcgactggtatgtattaatatggtttccttattttgtgtatccaaacttggaaggaaagttgtct

SEQ ID NO: 72786 - DNA, 842 bp, Cannabis sativa
gaccgttatcaacgtttagtaggaagattgatttacctatcacacacacaatcagatatagcattctcattgagtatggtgagtcaattcatgcatgcaccttgacctaaacacttcaaagctgtctacaaaatcttaagtatctaaaaggaacacctagaaaaggactcatgttaaagttgaggccatttacaaattgaagcccatacaggtgtagattgggttgggagtatagttgatagaagatctacatcaggttattgttcattccttggaggtaacttagtcacatggccgagtaaaaaacaaaaaatgtggctgccaaaagtagtgctgaggctgagtttagagttgttgctcgtgatatgtgtgagatattatggataggaaggttacttgaagaattgacggatttcaagcatcccctatgaaactatactgtgataacaaggctgctatctcgattgcacataatccaattttgcatgactgtacaaagcatgtagaaatggataaaatttcatcaaagaaaagatagagtaaggcctgattttcatgattatgttccaaccgaagagtaagtagtagacattattaccaaggtattattcaaaaagcaatttgattttttggatagcaagctggctatggcagacatctttaaaccagctcgagggggagtgtcggagaaaatcaaactattttaggaagttttttgattctagaatgattgtttaaagctgtaaaataattgatttgtgtactattttatttattatacgaaagtggttattagtgtgagttgacattaaagtagaaagattattgtattgttttagggc

SEQ ID NO: 72787 - DNA, 586 bp, Cannabis sativa
ccccccaatcacttacttttctatattatatctatattttattattgcttttacatttacatgtatttcatattttgtgttgtaactctagtcttctacattttttactttcttttttaaatatatttgtgcttagagttataatattatttacatctttttcaagtctttgtattttgttgcataaaaagtgtaatcatcttgataatattttattcatctcattaatttattttcttccattattgatttatatatattttctaacaaatactaattaccataatccattttggcttgtttttttttaaaaaaaatctttttaaatggttgtagatttttatttttattattggagagtgttattatcatttttttttttaaaaaaaaagatacgttgattaatgataaattagacttcccggtcgttacagaatattttcataggaatagtagcaacatcaaggcacccaaaaagttatgggtaaaagcctatttggccacattgcgagccataaagttacaggttctagcagtaatacaaaataaacaagtaatgaaggaactataactgtgatatcaaaga

SEQ ID NO: 72788 - DNA, 617 bp, Cannabis sativa
tatctttataattcttttgttggggaggatgatgtggcatcttctatgaacttcctttcaatttctttacattctcatttttttacttttttgttaattttttcattattttctgtaatttattatttaatgactattcattttcataacacttattttagtaatattttatttttacaatgtgacaattgaataataaaattaatgtattttttattattatactataataatttgataaccgaataatttaatctcattccattctaattcaacttttcatttccacctctcaaaaaaataaaaaaacaatgtcaagcacatccaacataaccaattcattcaatatatataataagaggttaagcaagtgtcaagtgggagcttcttacaaagtctttgaattggatgaagaaaataggtatgtcattttttgattcacatttatatgctctcttattgttttggttaatttggagtaaaaacttaccaattgatgtaatttttgggtaccaacttatgtatatgatgaagcatttaactattatattcttgtaattctttgctcatttatcttaaaatataatgtgttttacataatggttgattagtgcata

SEQ ID NO: 72789 - DNA, 1066 bp, Cannabis sativa
atgccataacaagataatattaataactaagattatgaataaattcatgaattaatattatgcataaattaagatgtgaaaatgatagaatgctaaaaatagaatagattggtgaaaatggcacaaaatttgaccttgcacgcgcccccacgcgaccagttttttttaaacctgtcgtacgacatgtccttttgaaaaacgacatgttgtttggtagaaacgacacgtcgcagggtcataaacgacccgtcgttttgtgcggcaatgggggcagaaccttgtgtgcgtacgacatgtcgttttctcaacagaggcaaaacgacatgtcgtttatttttcccagaaaaccgactttccactctatgcataacgacatgtcgtttgcccgatagagacaaaatgacaagtcattttctgctccaaaaacgacggttttcaacctatgccaaacgacatgtcgtttgcctgatagaggcaaaatgacaagtcgtttttcgtcacccctgtcacccaacaaacttccccacgggtccgcgagtctgcaactcggatcggcgcaacccggttcgtaacccagtcggacagaccatgtccggccaccaaatccgacgccgattaaggggttttgttccattttcaacctgctatcaaattccaacatccatttaattcaaaaaacaaaaaataatagataaaatattttgaacccggaatgggatttcctccattaatgaactttataaacacttgatatttcaccataaaatcatatagcaacagtcccaaatattaagaaaaaaacccattctacaacatttaatctcatattatctcctcccaacacattaatctgaaaaaaaaaaatttcagatttgaaaaaataaaaataatattaagttcaaatattatggagctctaaaataaaatatataagctctgataccatttattaaatttctatgattatgagctaaccaaaatacattaaatgctaatcttcattactcataatcatcaaccaagatttatattttatttagagcatccaaataaacacacacatacc

SEQ ID NO: 72790 - DNA, 1349 bp, Cannabis sativa
ttaatgatgaagtaaaatcaagtattattgtcaatcgtcgaggtagtgttgtctgcactgttggaaaaaatgaattggatgaagcacatcgattagtgttgcaaaatacaataaatattcaactatacattgagtaagtgtatcttacccctatcaattaatgtgcttttcattatattaagtattagctaatgatataccatgtgcttgaagggaacatttcaattggattcagacaaaatttccttctaagtcaaggaataaaaaatggttgcaagatgaacattatcgtacttttagtagttggtttaaaaataaggtattagatgtgttattcactttgtttgtgtatatacttcgtgtaatgtgtattttgattagtttttgcgtctagttaggttgtatgtgaattgagaagtacgcctaacaatgtgaccaacattgttcgatggttttcacgtggtccttcttttaatgtcacgaagttttcatcatatacagtaaacggcagaaagttcaccactcaagagcgtgataaaagcaaaaccacacaaaatagtggtgttagccttgtcgctagtgctttgcaagtgtctagttcaaaagatcgtaatccagttcagtgcaacatgactttctatggagtagttaaaaaaatttgggagttagattatattgttactcaagtacctgttttctatgtgattggaccaaaagtgatagtgcagtaaaaaaagataatttaggctttacattggctaatctaaatagattagggcacaaaactgaccgatttgttctagcgtcacaagccacgcaagttttttatgtgactgatcctgcaaacaaccaatggtctgtcgtgcttgcaacacaatcaagagactagtatgatgaagatgatgatctacctcttaaagaacaacatgtcccgatcactttaccagaaaatgatgatcaacttgatgacgatagcatatgttgtcgggaagatggtgaaggtttatgggttgattcgtaggttatgtaatatcaaaaatatttgtacaatttgtttctatatctcatttcttcttgttattctcaattaatatgtaatatttgtttgtttttttaacattttcttatttttgaaatgttgttgattacgacaaacttattttgtatggctggctatattgtgtagtatgtgttattctcaatcaataagtttttttacattcactgatgaggttattatacaaatgtcatcttatgatcctttggatgacaattcaagtgaagatgagaatatagaggaaattgaaaacgagaatgtagaggaaaatgaagatgagaatatagatata

SEQ ID NO: 72791 - DNA, 830 bp, Cannabis sativa
agtttataataaaatgttgaatatacctatccattctatacatgaaaatatagtataaacataatatagaagttagaattcaaaattactcaaataacagagaatcaactcaagtgaggaagatgaaagatgaatgttagcaccttaagcatccttttggttgtgttttttatatttcgttcctgtttttatttttgttttgtttctctttgtagataaataatgtaggaacatgttataggaaaccaacagtggagtacacagctgaagatatgtcatttctaatgagtactaatttcgattcagcttacaacatttcccaacttgctcaccctcttctaaaagcttcaggagatgggaccattgtgtttgtgtcttctgttgctggacttgtagctgtaaatgttggatctttatatagtgcagctaaaggtaatatagtttttttttttttttaaactttgagaagcaaatataaaaatattaataaaaaaaatattaattataatctcttaattaacctctatacctgaaattacatgttgaaatattttttttatagtggtattcgttatagttacaacatcattcttgtaaaattttaaaaaatttcgaatagtttacagtaccgaaaatattgttcttgatattctagtttaccacgtgtgttaaaataacttcaaacttatttttgttgctgtaagctattcaaatttttttaaaaatttacagagataatgttataactataaccagtactgtcgtaattttttttttgaaaaaaatatttcaaaatatgttctcgaagaggttgtaatagaagattgata

SEQ ID NO: 72792 - DNA, 1953 bp, Cannabis sativa
ataggtgcgcacatgagtttttgtgtagacatgaatttaaacgtatcactaattttatttcaataactagaaaatgataatattaaagattctccataaaaaatggttattaagtaagaaaaaacaaattggtaagaaaaaaccatttcaaaaaaaagtaagaaaaaaacaaattggtaaatttgtaaaatagagaaggcatttttgtaattttagcttcaaagcgtatttaataggttgataggttgatgagaagagaagttgagctgagcataattggggcccacaactgttcatccaatattccaaatagtgcaaccaatttttaaatggagatttcaaatctagaatctaatccaatttgtaaaaatagtgtaaattgaattaattattttaaattagttatttttttatattaaatttttaaatatttttttcacataactaataataaaataaaataaattaatattgttttatatctccaggagcggagctaggattgaattactagggggccaagcagctaattattgattttcgttttttttttaaaaaaaaatctataatgcaccttttaaaagactatttcggtccacctttatttattttagggataactttttagtctattttttatgttcacatatgttatagtattttaagaccacctataaatttttaaagaattatgaatagtttatagtgtgaaaataaaattcaaataattacttaccatacttaaaaaatagtcacgagtgtaaaaaaatatttgaaccttattttcgacattataaattattctaatttttttaaaaattcacatgtgattctagaaaaatataacgtacataatcatgaaataaaaaaaatgaactaaaaaattcttctgaatgcaataaccgatgaaaaatagatcaaaatgaccattttaaaagatgtacaatagaattaactaataacttttgtaagaatacgtatgaaaatattttttataatatacacactccgaaaaaggtcagtttggtacacatttcggcatttagaaatttttttagtatttttataatcgtgtacgtttgcagttatttaagaccaccgttattttttttttcaaaaaaaaaaaaaatatagtgccaaaaataaaatataaatagtttgttgtagtcataattatttttctatgtatggtaaacagttgtttgaactttattttcatcattgtaaattatttaaaattttttggaaatttaccaataatattaaccaagtacaacagacacaattataaaaaataaaaaaaaatgtaattataataaaaattacagaataaaattataatttttataaaatttaaatatattatttaaatgattaatttctaattatatttaaaaacatttattcatcataattatatttacattaataaattacacagaaaagatagtgataataatacatatgattttattttatatgttaatattttgatagttattaattttttctttgattggcatatacgtgattaactacacatctattatacataatttttaacaaattaaggagggccaggccacctcaccctattaagtacatccgaatatctccaacaataaattagtgaagatggtattattgttggccatatttcaatattttcttgagttatgtaatgctggttcttgttattttatttttcctgagagaaatattatgatccatatattagttaaactgtgttttagagatgactttaatagatgtttttcacaaaaaaaaaaaaaattaaaataaataaatttaaaagaaaaatatatatatacaaattaatatctgttgctccagaattcgcccaaaatatgtggaccagtcgagaggggacacgtggatcagataacctgtaaacatttgctaagtctttgcgcgtcacaagaaagggctgtt

SEQ ID NO: 72793 - DNA, 914 bp, Cannabis sativa
ttttattatttaaaaaaattagttcaaatataccaataagaaaatgacacatgaatttaatagcttaatagagtaatttgcaacataaatacttaagtttaattctcaattgcaaataaatacttaagtttaatttttggcggtaataatacctaagttataaatctggaactctgtaggtacctaaccgttaaatgttaaggtattatatctatgtgtcatttttttattggtatatttgaactaattttttttaaataattaaaatttaatgacttggaccaattagggattgccatgtggcaatttatttaaccaggtacctacagaagtttcaaaattataacttaagtttaagtacctacagagttccagaaattaatataacttaagtattcttatcgtaaaaaattaaacttaagtatttatttacaactagaagttaaatttaggtatttatgcagcaaattacaaatatttttttacaaaacttgattttcttataatgaaaaattaccttattatcttcaaaggaactttgtttgttttctgtaattaagtggttttgtttcaaaaaaaaaatatttttttataccaactataagtctataactataatgtttcataaaaaaaaacctctaactattaatgtatttgtttttcacttgcgtataatttgtagaatctatatgtttcttccttaaaaaaagtattttgatgtgttttgctcaatatgttaaagtcattattatatgggtttttattaaaccatatacaattaagaatatttctctagagatcctagccatttgaacttgggtgcaatttaaaataattattaattaatgtgtgagactttgagttcccttcaaattaaataaatgtattactcactatgtttttggtattttaaa

SEQ ID NO: 72794 - DNA, 911 bp, Cannabis sativa
  modified_base (360)..(362): a, c, t, g, unknown or other
taatttcataattaatcataaacagctgctaatttccaaattaactaagcgggctttacagcaagggtacaaataagagagattctacgcatcatacataaaattcgagcaagattatttcccagaaaactcaacattcaacccagatactctaaacatgcagtacaaacaaacagcagacaagtataaagtttcctaaaaacttacatgaagttcaaaggctgggggttggtgtcgatcgtcgatatagtgaagactgacaacgacgaagaaaaaggagcagataatctatggtgtctggaatttcttctctttgaggaagctctgagaaaatgtggcaagatagcgaaagtaaccaannnaaatgagaaggctggcttttataggccagaacgggtgtgaagcagctgtgatgaagcttcatcgtacggtgagattagcaatcaattcgcattccacagatctaacggttgggacgaacgcttagcaaggcggttgggaacgcttgagtattcgactgacacccattaaatgcgccggatcattaaatggataggaaatgaattgttgcctgcaaaaagtaaaagctacaatgataatggtcataaatgcactcccacgcgcccaaagcacgtgctaggaagttaataagacaaccagaggcacctaagcaagcctcgtttacttcccaccaaacaatgcttgggagtaaatgttgcccttaattttgtccaaaatatgcggacccacgccactgcgacacgtggatttgaggagtatggttttgggattattcgactaagtctttgtactctcggagggcaaagctatagcaaatcacctctaggaggtatcaaaccccatctgaatagtcacctcgcatttaatgtcgcatgggagaaggtgtattg

SEQ ID NO: 72795 - DNA, 751 bp, Cannabis sativa
aaccacgtacgttgtttgtcctatcacctcgagattcgcctgacttcatcacgtcgatcccattccaaggtgctccgttacaccaagatgtcttacttcaccaacatgatgtgacaaatatgacatgaccaacatgacgtgaccaacataccattttggcatgaccaactttttaaactagacactttcgggctaggcatgtgccatcaaagaatatctccaataattattattttttaaatatttgttttgaaatattattttataattttaaacttaacccaacaatagttggaaaaagatatatgttaggttaagggactttaaaacctaccatgtaaacctatataaggaggggagaagttacttattaaatggactgcgattcattctcacgaactttcactctctcattctaaaaacttacttgagaattgaactcctggagaacataactttaagaactcttatcaagcattgagatcaataatactctaagtggactagtctattaccactaaaaggaggtgaatcactataaaattacttgttcgccatcaccaaattccattccataaattggtttactttgattgacatttacttgtgttcatcttgctcatttgcaatcttcttagatctgttgacgaaaaaccatgtcaatgaatcattatagaaattactaaatataaatatgagaattttcattagaattgtcaagtgatatatgttgagaatattttaccaggat

SEQ ID NO: 72796 - DNA, 1421 bp, Cannabis sativa
  modified_base (1373)..(1391): a, c, t, g, unknown or other
aatcccatccaagccagactcactcctgttcacactcctgttcagctttcgcctttcctttacctacacatgaaagcataactgtgcgtcaacaaacttagtaaggaaagcatataacatatcatataatttcaacttgtatctaggcgtccatacacctaattacaaggcttaatagatgagtaagaacgttccatacttgggtacatctactatacaacatacactacataccttgttgtacgagtgttggtagggtttgtttcgtaccttgagtaccactgagtgatataccacaaacaccctatactttcccgtacttgtgctggtatcactgtactatactcataaacaatattcactacaccaatgcactatgtgccgtaactgtacaagtggtggtagtgcaactaaaccataagcatgcatatacacataacatatacataaactcagttattgttatcacacattatatacagttcttacctactttccaaattcgagtgtgctggccgacctgaacgaaacgtctcgtgctagatggatgcccaaatcacataatgaaaacgggtaaatcacatgatcaaaaaccctaatccaggatacccgaacccaccacactaagctttgttatactttctagggattacaccaacgcaggaaatagggaaacacccaacccggtttgcaccagttcacccaaaatatctcatttcttgctcaaaactccaccaaacgtaaccaaaccttccagagtacctaattacggtatacacaacatattccagccaataaatcgtagaaaaacccagtgaatcaaaatatgccatttaagatcaaagtttaggttttcaaacccaaacttgcataaattcatcacaacccaaccaaaccaactactagaagctaaaaccaactcaaaattagacttagaattcgaattagaaaacctaacctaactctaacagcccctaaaactcaaagttacctcttgaaaccaactaaaaacttgagaaaaatataactagaggggaactagggtttaccttgattgattcctcctccaacccttgctgaaagcacaaaatccggcaaagaattctcttggccttggctggttcgaagagggagaaaggaaggagagggtttcctttgattttagcttgttttttcttattttccttctaaatgaaataagggtttatttaattaaacctagggttgccaccactctccacaatttaaagaatgactaaatgccccttaggttaaaatttaggtatttctcaaaactaggggtaaaatggtcaaattccatcaccctactcaaccttggtattttattttctctaaaatatttcccactaagnnnnnnnnnnnnnnnnnnncccatgtgatcaaactaaccatccatcgca

SEQ ID NO: 72797 - DNA, 997 bp, Cannabis sativa
ccttcatcaaacaatgcagtagaaaatttggcaaaccattgccttgaagcctgctttagaccatataatgacttctttaatttgcacacagcattgtgaggaagctcccccttaggtttataaccttgacgaagagtcatgtaaacatcctctttgagatcaccatgcaagaaagcattattcacatccaattgatgtaaatgccagcccttaatggtagcaagggcaataacacatttaacagtcagaagcttagtaactagagcaaaagtgtcagtgtaatctatcccctcctgttggttgtaccccttggcaaccaaccgagcttttagcctctcaacactcccatcagcattgagtttgattttataaacccatttacacccaataacatgttgcccttcgggtaaagaaaccacaatccaagtatcattcttctcgaaggcagcatctatctcattgtccatggcattgtcccactcgggtatgccatgagcttgactaaaaaattcaggctcaaaataactcgaaatggccaaaactgttgcacgaaaagcaggagacaacctgtgataagataaaactttggataaagaataaggtgtattggattttccctgagatgaagaaacaaaaggattagcagcaaggtaacaatgatactcattcaaataagatggtttgtgtgtgtgtctccctgttctggttacaatagatggatgttgaacctgatccgaaacagaaaaatgaggaatatgttcattgcttataacagaaccaggaacattatcagaaaaagaagctgattcaggactctgagtaggtatagccattggttcagaatcaggttcaaggcagggagaagaacactgagtagagtcgggtatagcagaaaagaaactatcatatgcagcaggaagactctcagactttacaaagggatccggttcaaatagaattcatacattatatatatataatcatgaaataaaccatg

SEQ ID NO: 72798 - DNA, 1296 bp, Cannabis sativa
  modified_base (553)..(553): a, c, t, g, unknown or other
  modified_base (981)..(983): a, c, t, g, unknown or other
  modified_base (1052)..(1061): a, c, t, g, unknown or other
  modified_base (1141)..(1141): a, c, t, g, unknown or other
tcaagaaaaatctctgaaagtgacctatatgttagatgataggggtacatattagaatccttatatctacaccaattcataacctattcgaggttgtggttactcttgtggtggaggaattattctagaaggatgtaaaaacccatctatagtaatttaagctccatcagtgaagatacataactttgttgcttttgtaaagtactggaaagttattcaactggagaaagttcttaattgtgttaatctctattccaattttgatagaattagagacattgtcttctatttattcagatgcacttaataagaagtatagaattcagtatccctagttgagtaatgcaaatagaatatgatgttgcacaatgttttatgaacacaaaggaagtaatggtggagaaagcagttgcttaccacaaacttacagttccagtaatttaggtttagtcaaacacactacacttgatcgggatatcaagacaatagattgattgaaatgcactacttgttttatgttagtgcaagtggagtttgttgggattttatgccntaaataaaacccatttcaatctaatctgattcgttatcaatagaaggtaattgtaattatatgctattatgtccaaaacatatagttattcacaattacagtgatgtcaacacactggaaggtaatggtgattatatgctttgaaagataacgtcccttgattcatcagtgcactggatttacactgatgtgataatcggcgataaagtatacttataccttggataagtgttatgttctttccagaaacttggcaaagtatgctagtttcgaatgtatggagtatacaatggactggcaccgatattgatcttggtaaagatattataatcttactgttgtatctttctaagtcaatatcactaatttatcttagatcaaaagctcttaatccttacatgtccaggttcaatctcaagagtgttatnnntgttctttaatttgttagttaagtcaaccttttcgtctggatggtacatacattttgggaacatgatannnnnnnnnngtgggagcgctaaacatagatattgaatctatagcttctatctggacaaagaagtgaaactatgatttccttcgagcttngcttaatagagataaatggaatagctcttatttcagtaattatattagttttttgaaatatcttttattggaagctaagtgctttaaggataaaatacattgagggttcaaacgataaatgtgtccttactcggtgtaaatcatctatagaggat

SEQ ID NO: 72799 - DNA, 708 bp, Cannabis sativa
aaatcacatctcgagagatgtataccctgccattagaatctaaacatttataacccttgtgattgagactatagcccataaaggtacatggagaagacctgaactctaacttgtgcttgttataaggccttatgtttggataacatttgcacccaaatgttttaaaagaggtgtaatcaggttttgtatgaaaaagagtctccaaaggtgatttcagttgcagcaatggagtagggagtctattgtgtaagtacacagcagttctaaaagcttcatcccaaaatttaaggggtaaagaagcttgagcaagaagggcaagaccattttcaacaatgtgtctatgctttctttcagcaagaccattttgttgatgtgtagtgggacaaggatgcctatggtgaatcccattttcagcaagaaaattagtgaaggatctgaactcacctccccaatcagtttgaagggttttaatggatttacctaattgtaattcagcttcagccttaaaatgttgaaaggttttaagggcatctgacttatgtttaagaaggttagatcccatgtgaatctagagtaggcatccacaaagtgaatgtaatatttgtacccattaaaagatggtgtgtgtgatggtccccaaagatcagagacaaccagctgtagaggttcagatatgacagtttgggaggctttaggaaatggaaattt

SEQ ID NO: 72800 - DNA, 692 bp, Cannabis sativa
ggatcattctaggtgattttaatgcagttttccatcatgaagatagaatgggaggtaatccgattgcttctgctgagcttgtggattctaataactggttgatgcaggctgaagttagtcctctcaagagaacaggttctaatttcaccttggtcaaataaacagggagtctcggattttttctcgaatagaccatgtgtttcataatgaggcttgggtggatgattttcctaatactattgcaaattttacttgagaaacttgttctgatcattgtttgtgtctaatctgtttgatcaatacagaaattataggatgtaagccttttaaattctataattttttgattgatcacaaagattacaaacaattggttatggatagttggagtaggcctattagaagtcatggtttgtcaggagtgttctttaaaactatgagactcaaacacaagtggagggctttcaacaaaacttctattggtgattttggaggctcctatgataaagctaaggtcgagtataaggaagctcagtccgaactccaagcagccccccaggacagttctagagttgaaagagagaagacaacagctagtcagtttcagcatcaagaaaagttgtacttgagttttttaagtcagaggagcaagatcaaatggatccagcagggtgattctaacactgcctatt

SEQ ID NO: 72801 - DNA, 803 bp, Cannabis sativa
aaaagaaagtaaagttgaagaagatattgaagaatgatatgattcctccgacaatcctactacttcaggcttagttgaaaaggatagagaaagtgattccacttcctcagattatctttcacaacaaattgaaccagcaatacgaacattccaagaacagtaagcagacatattattcaatgttctaattttgaacagaagggacactttaaatcaaattgtcccagacatctcaacactaataacaatggtaatgctttagtttttgaatcatgtgttttgcagaatgaaaaattcatctggattgttgaatctcaatctactaaccatgtctgttattcattgcaattgcttgaaaactaaaattacttaaaatccggtgagttgaaacttaaagttggtaatgacgaaatggtatcagttagaacaaaattttgaatttagaaaatgttttgtttattccaaatttcagtagaaacttgattttgtttcatgtttatagtaccaacaatacaaattgaatttttcgagttctggttctatcatttcttgaaatgacattcaaatttgtgttgcatctatggaacaagggctttatgttcttagaccagatgaaccatttgcgcttaataatgaactgtttaaggtagctaaacctaggaaccacaaaaggcaacagatcgataaagaagatgaaacatatctatggcacttttgtcttggtcatataggatatgatagacttcacaggttaaccaaaggtggtccattttaaaatttcaccttaggtgaattaccagttt

SEQ ID NO: 72802 - DNA, 821 bp, Cannabis sativa
gtcatgagggtaatatcttgctttgtagactcttgagacaatagaatcagcattagataccaatctccaagcttgtttgccgagcattgctaggttgtaatctcttaagtctttaaagcctaaacctccttcattcttgtgcttactaagtttagcccagctagcccaacttactccctgattttgttttgaggacttccaccagaatttgctcataatactttccattgatttgcaagtctcaaccggaagtaagaacacagacatggcataacttgggagggcttgggcaactgtttttagaagtatttctttgccagctttagacagaaaacgaccttcccattgctgtactcgcttctgcatcttgtccttcaagaaacccaaaatggcatttttatttcgaccaaccaaacatggcagtcctaaataaaagctgctggcatcggcttcattgatgttgagctgttgacaaattctgtctcttatagttctagtcgtatttgaactaaaaaagacggaagatttgttaaagttcaccacttgtcccgaagctagttgaaaaatatgaagcatgttgagaacattagagacttctctgtcattggctctacaataaacatagctatcatcagcaaagagcatgtgggaaatagtaggagctccgtttgccacacgacagcctttcaaaagattggaagtttcgaatcttgtaataattgatgagaatccctcagcacatataaaaaataagtatgaggacaaaagatcaccttgacggatacctctatggggaatgatagtaccaacttctctaccac

SEQ ID NO: 72803 - DNA, 780 bp, Cannabis sativa
tttttttttttttttgtgagagagaaaaatggaaaatgtgtgtgtgccgtttgaggagagagaaagagagttgggtatagcgcacaggaaggagagacaatcaggtgtcttttgtttgagggtaatggtaaattggtaataggaatggaatagtaaataatactcataataataataataataataataataataattttatttacaccctaaaaatttttaaaaacacattattttaataatttttattttatataaaatttatatttttattgtactaattttttttttaatttttttcttttaattgatattcttaaaaaatatatttatcaaataaaaataaattacattttaaatattatgacaaaaaaattaaaataaaatattgtataaaattttcttagaaagaaaaaaagatatatatatacatgagttaaaaaaaattatgaaaataaactcaaaatgaatattgaaattaacataaataatgtgaaaaaaaaattttaaaagaatattaaaaataatttttaaaatttattttaaaattaaataaaattataaaaataaaataaaatactttaaaaatataaaaaagtatattataaattttgaaataatttttatattttttaaataatatgtaccaatataaatttgatacatgtacaaaagtgtacacataaacaatctaaattgacaattaattgtgaaaagtaaatgacttcttaaatttaataatagttaaataatttggaagttttaccgttaaaatttcaa

SEQ ID NO: 72804 - DNA, 706 bp, Cannabis sativa
cctagagccatgtgaccaactcacatatggtttcagcggagatggaatcattccctatggtaagattaaattaccaaagattgttggtactaccccaaggaaaaacaccattatggaaactttcataatggtcgacactaagtctccatacaatgtgataataggaaggctagccctatatgacctataagccatctaccacttgtctatcacatttatgacatcatctggcatcgatccctttctttgtaagcaaagagctgctcatgagtgttacagcacattgttgacatgagcaaagaagaccgcctctactgttttgacagtttgggagatgaacaaaacctcttctacaagggctagagagacgttgaaggccgcctctactgcaaccaaggagacgtcagacaatgcacccaagactacttgaaggtgcgtccaagatggcgatgacatcgaccctcattttgggtacattgactcgggagttggtctgaccgaggaacttaaggaaatttccctcacaacaatgaacccgaccaaggttgtcaagattggtataaacctgacaaaggcattaagcacatctcttatggcttgccttaggaaaaataaagaaatttttcttggttgcatgaggacatgaatggaattgacaccaaggttatctatcattctctcaacattgacaaagtgaatttcaagc

SEQ ID NO: 72805 - DNA, 1369 bp, Cannabis sativa
acaccccttttaatatcactttagaatagacactaataacaattagcttcgattttaaattgacaataaatgaaaaaatatatatgtacagtctaagtgtcgattgtaaaatgataccaaaactaacctaaactttgactttatttctcattggaataggtgtcagttctatgaacttaaactatcagaataagtgtcagtttaaaatcgacaccaaaagtgcagtttctagtagtgttactttttcacatgttatgctattgttcaattggtaccggagctagtgggcttcataccaaatgagtcattttcaaagtctattagagtgatcgtatgtggtttatatctcaatttattgcaaatatctattcttaaatcaagaatcaactcaccgtgttgaattttgactcaactctagaagacattcaatcaatacaagatcttatgttggtgtctaataatgtttattattacctcttctctttgatctgcattaaagcttgaactcatcctatatatacctataatttttttttaatatgcataaaaaagatataaattttaaaacttaaaagaacacataaataatactttaaaaattaaatagaaaaaatttgaaaaaaaaaaacatatttatcaaataaatatagacatatgtccttattacatcaaatcatatttgataaatgctcaaatgaaatactaaaatggtaatagttaacaacatatatattctaatcatctagttccctaccatgtattctattttctgccaaattttgtctccaagtagttcataaatctgaagactcgatagtattaatataattattatctgttgtgcgggtgatttcttagtcactattcatctcattttctactgtatctatgctcatttatcttgtaataaaattatgtagcatacagttaacagaaatataacccattgtgttttcatgtcataaatagatggactactgagaatagcccatggcattttcaacaatccaaaacaacgctcaattacattcttacaacatgagtgcttcaacttaaagaactcttctcctgtgtttggaaggtgtccattattccaatcattaagatgatatcatgttcctctaaaaggtgcaagaaatctttgaccattgatggtatcactaatcaatggtttatcaaaacaacctcaggaaaacaggactgtgctattgctgctgaacttgaagctattaaattagctttactctggactaaggaaaagaattgggaaggagtgagcatcttcactgactctcaaattgttgtgaactctcttctgaagaactcttgcccgaattggagacttagatctttatttgattctgttgct

SEQ ID NO: 72806 - DNA, 694 bp, Cannabis sativa
tattaagatataaaagctccaaagatttttctacaagtatttatactctagttaaagaaccttaattattagttctttttcccaagaaatccaatctctatccgttcgcatgaaggagtaatgttctatttatagagaagaatcgagtatgagcgtacccgaacccgatacgattttaaggtatcaacaacaactagaccatctgatggagtaaaatacattatttattgacttttgggccaattcactcttatatccacatattcgtcttttctcttgcgcatcttgctcgaaaaggacaacaccccaatgttggtcagtgacatctgtttgaagaacgcatgttacgtcagagggaatctataaaggtggtagatgttgtgtgatttcttttaccttttgactgctacaatttggttatgtaaccattatggactattcttcttgagtatattactgagtagtcatgtcagtatagaaattcggggaataaattctcaaataattgatgatgcccaagaattgttgcacctgaactttcgtgagattttcatctaaaaatttaagtagttcatgggctatatatggttgggcttttatattgtcctttggataatttcatcctaaggaattctatttgcgtctgtccaataatcattttcttttcaaacaacatgataccatgggctctagt

SEQ ID NO: 72807 - DNA, 614 bp, Cannabis sativa
aaaaaaaaaaaatagttggtgattgttgataaagtaacttttttaaaaaacaaaaataaaaatttaaataatatcacatgactatttttattttgaccaaaatacatagttagcaaagattatgagcagtcccattagagatactagatactatgtgttaattgttataaattaaataagaattatattaaattgcatcaatagttaaattacacatgctagacacttgacctttaatctctcttcattgagtatacgagctctgaattggcacgtagaataattatcgaaataaataaataaaatttctaattggtttggaggtctcagtcgaccctatgtccatgtgcaaaactttaaatgaagcttcagaaatcgcattcattggacacgaagcagccatgaattttctgtcagcgtttttttagttttaaattttaataatattaatttcttgtgttatcgtcactctttagtctttttccttcaatttaataatattattatatataatcacacataattatttaattaatttgagctactcatatattttttaacgtacgtattacaatacatgatatcggcatcccgaaaatataggtaataataaa

SEQ ID NO: 72808 - DNA, 1302 bp, Cannabis sativa
tattaattacacaataataaataatttatttttaatatcagaggttatggagtttaaaattatatgcatttcttcttccatgcatggttattaagatcataaatattattaaaaaaggaaaaatgtagttttcttcttctatgatcactttggatcgttggttattaagaaaaagaaggagaaatgtttattaagattctattcgtaaggtataaatttattatattttaaatgctaagttgataaaaattgaataaaattatgtaataataatagattgagctttaaataatttattaatctatttttaaaattaaagtaattcaaaaatcataaaaaattcacaaaatagaaaaaatggattactcaattcttaagcctccacatcatcaccctaatcactccctaacaatagcattatataaatatatagatatagatagatactaggcaatatagccgctcttcgcgcgactaatttaatatttttagtattataatttatagttacttaaaaatataattctaatatatagtaaaattataaatatattatcttatttcatattattagtaataatttttttataaaaaactaaatgcgcaattttattgattattatttaaaattatttattgagaaatttaaaatttattatatgtagtattttaaattgatttgttaaaagaaattatttttataaaaataaataaataaggtggtgtaaaaaattatggtgtttcccataatacattatttttatatctcgatcattcaaaactattgtttatattgtatttcacttgttgtctcattgtatcttacttattttcatcatcgtatctcacccgttgtcatcactgtgtctcatcatttgtcattaccataattcacttgtagtcataatgtattatttgagattttatacttaatttttctatttaattaaaaaaaaatctcttatttttatattatatagatagggattgttccatccggtgaaaaaaaaatcaagaaaaaaagtttttcagcaaaataaatataaaaaaaattgagaataacttaaatatgtgtatataaacatattgttgatatagtgtaaaataatatatgtttttttaattttttttattaagtagctaaattaagtgtaaaaaatcaaatttctctttaattttattattcgtcattggatcaaaatataatgattttaaaaataatatatagtaaaattataaatatattatattattttatattattattaataatttatttattaaaattaaaaacatattatt

SEQ ID NO: 72809 - DNA, 535 bp, Cannabis sativa
tttttgtttgttcctttgtttagaactcttaatcttaggtgcttttttctttataaatttttcaattttaatcttttcttttctataaagttttaacactatctcttattaatcttacttctattgatataatattgtagtgtttaattttttattttatcttttgatcttttcatctctgcagcatttcattatattatttatatgtattattatatatcaagactacaggtggatacggtaataacaatgagtgagatataataattgacaactttgaataattgaaatataaattattaattgcgagaaatttttttacttatttgtttttttttttttttgaaatatttttttttacttattttaaatgataataatactctaattttatactatactaccttacttattttattttatattaataattttttaataaaaaaaaataaaattctatatatacattattcatataaatttcaaacttcttatttttaataaataattcagcagtataattttaatattatta

SEQ ID NO: 72810 - DNA, 842 bp, Cannabis sativa
aaaaaactgtttaattataataaaagtaataatttcattacttaaaaagattaaaattattttattagcatattataattgatgttttctttttaagaagttattgattttatttattaacaaagtttaatcaatgtggtgcatctgttactttattatgatatacatttttataattttattttacaataataaatttaacagttatttattattgtaactatgtacgcattaaaatattttttttaacaaaaataaattattcttaaatataaatgttcaacatttttcttcaataataatatcctcagcaaataatgttattatttttatgtgttacattattacttttattatgtttttagtggtaaaattctatctataacatttttatacatatttcacatttttacagatcctattagtatcaatcttgaaagacagaaaatatggtctcttttttattaatttcatgtcacctatatggagaagaaattccaacgacaccaaacaaaaaaaaagtccaaaattttataaatagcacttaaatggttttgtatttgtttcttttgttttttctcttttttttctaaatttggttgagttgctctctttttcttctatttaattttaaaaacacattaatttcatgttttttatttgtcaaaaataaccacatctttctacttacccaattttattctactactctatttatttatttattttataattcaaacacaataatgtcatattttatattataccacttaattaattcaaaaataacaatatcttaaggtggcaacactgtgcaaggagcagcttagttccctactatt

SEQ ID NO: 72811 - DNA, 908 bp, Cannabis sativa
  modified_base (33)..(39): a, c, t, g, unknown or other
tgcaatagggatttctatgtagaattccgtaannnnnnnaaaaaaaaaaaaaaaaactattgtgaagtgtaaaaatgaataagccccaaaattttaacatgatgcgctttcagaatagattatttctgcttagtttcatgtcttttaggcttgtcgtgccgtgtcgtacttacgcccatattttgtgttgtgtcatactcaagtccatatggttcgtgttgtgtcgtgccaatttgtaacttcgttccatgtcgtgcccaagttcacattttttcgtggctagttgtgctcgtgcctctcgaactcataccgatttcgtgtcttatcaaaaagcccaattcatatttatagtgcaacataagataaaacaaattcacttgtagcaccgaggtattaactaaaccgaattcaaaacaaaaattgaaagaaaaaatgtgtttgctgccaattatgttttcagtaaactctattttaaggtgagtagagaaaagattagtaggccaaattgtgtttggtcatagctttatttctaaacttatcgtttttttttttttttgaggggttgtttggcaatttttaatgaaaattagcactttcaagaaaaaaatgggtaaagtgagaaagttaagagaaagaaaagaaaattcgcatttatgtaaaagagtacaaattatgattaaagaacttgtttgaataaattttaaaatgattaattttttttcaaaattttgtttcttattttttttttaaaaaaatacattattggatactagtggtatctagcaccacttagaggtgacatcttgattagtgatatttcttaaaagttttttaattgatttatatgaaatctgatacttaattgtgcaaataacgataggtactagtcatcacaggtgctttttatc

SEQ ID NO: 72812 - DNA, 512 bp, Cannabis sativa
tgagtttccaaatatacaatcttatagttttattttaattattgtagtttgatgaagtgcatgtgatttccttggattattataaacatctctctctttttatcttcatattatttgctatgaaataataaagaagagagtatagtgtcccgtctaaatgtttaatgtattacgtctatttatataatatgtcaaatatcatatatatttttttttgttgaagatgcatgataaatgagtttaaaggtcatgttattgtttcgatcactcaaatcttcttgcttttctattttaataaaatatatagttttggttgtataaatatatattgataattttacccctaaaaaagatattgataattttgaatatgtattcctaaatatatgatatggttagttttatgtggtttttctatacttaatttttccatttggttatataaatatatattgataattttacccttaaaaaaaatattgataattttaaatatgtattcctaaatatat

SEQ ID NO: 72813 - DNA, 1492 bp, Cannabis sativa
atggaatttacttctgatgtgttggcaaaagaggttggcaaatcaacgttggcattatacttttgccagcacaaaataaaaagcattcgcaaaaataaatttttccagcgcgtatatgcactggtaaaagttagattttagccactgtaaatctgcgctggtaaagctttgacattttttgccagtgcagtttgcgaaatacgctgataaaagttactcttaccagcgcagtaacaaactttgctggtaaaattgacatttcttgtagtgacattttgtttctatttttatgttttcattcatgctaaccaaacacttaggtggcgtttggttgggaagaatgaaaacatagaaataggaattaaaataggaatagaaatagaattaaataaaatttaaaatgcctaaaaaaattaataaaaatattattaaattcttctcatcatgcattggaatagtctttctttcgatttcaaaataaaataggcattctaccgaaatggtggaaaggtcatttcattaaaataacattacaatactttaatatacaaccgaacaaaggaatagaataaaacttatttcctttctattactaaacaatttaactatataattataactaagtctttaaattgtataaaaatttaacattactaattttccataaaactcatagaaggcgccataggtacataaatatagatcgattactaaaattaacttgataataattttctttattagttatatattttgtaaatttttaattttatataaactgttaagttttaacataaaattttaattaaatgataaaaattgatgattatgcaaaaagtgcctatataattttttttttactttatagatatatagatggatatttataaattattgtgcatatttatatttttaattattttaaacattgtaaaaaattttaaatatttattaaataaaaaacataatttaaaaaatgaaaaataacgaaatttcataaaatatttttatttgtttaaaataattaaaaaaaatttaaagtattcacaaaatttgaaaaagttaataatatgtgttgcatttatctaaaatattttaactaattaaacaagaataattaattatacatacataacttacataacttatgtaatattaattttgtgcaaaccaaagtgaaagaaatatatagtgatttacaaatagtctctaagtgttatacccacattcatttctaacaatatgagattttttttttcaaaataacttaggtaaaatcaataaaattttaaaaagtaaataaaaaatataaaaaaatgagaaaaaagacaaattagagtaaaacttataaaaagtatcatgtcaccgtcctatatttttctttagagatatatataaatactaataataagctacctaattctctcatctcccattcatatgctcttttcatatattaggtgcggcttgatcggggttttatttgctactg

SEQ ID NO: 72814 - DNA, 893 bp, Cannabis sativa
ttctcataaaccaagaattcggttatataggcactttatatagaatagatatattttatgcaacttaatgattaaattttgtaaggaaagttaccaaatcttaattgtttaaaaaaggtaaatagaatttttaatttataagcacataaaaacaataatttttttttaataatttaagtatttaatatttataaaattttaatttttattaccgtataaataaaactaaaataaaaattataattttataaaaatattaaacatttataaagctaaaaaaaattattaaatttattatgtttataaattcaaaactttaaatattaatgtgactatttactaatagaaaaataaacatagttttataaacccaaaaccctttctttcttctcacgtcaccctcgcctctcagtcaccactgtgtctgtgtctgaattttctttcagtttcatcaatggcgggaaagaagaaacagaggacccagaatccacacccctttctcgcccaagacaataaagagtcactgcctccgaagaagctttccaaatctagtgatggcaagaagcagcagtagcatcagatggaagagaagcttatctcttccggtatgagttccttgcccaaaaccctaacaattccctactcactatcatcgaagacccgcccaaggatgatcatgaagtggaccactacattgataaatttgctgtattcgatggaactcggagttgctatggctattccataatgttattgaaggtgggtctgaacttgttttatgcagacttattggcaaggttcttagcaactgtacagatggtaagatacctaagctgtttaaactcatcccttctatgataaactgggaagatattctgtatttgactgagccc

SEQ ID NO: 72815 - DNA, 1053 bp, Cannabis sativa
  modified_base (80)..(81): a, c, t, g, unknown or other
  modified_base (391)..(392): a, c, t, g, unknown or other
tttatggacttgatgaatagagtatcaaggttttcctcgatatctatgtaactgtgtttatcgacgacatcctcgtgtannctcaatcagaagaggagcatgagatacatctgcaaatggttctgcaacggcttcgggaacacaatatttatgccaaattcaagagatgtaaattttggctatctcaggtgtagttagtcgctgggcgacaaatattttgtagttagtcgctgggcaacaaatattttgtaaagaactagtaaacttttgtaaagtgttttgtaaatgggatcccaaagtattttgtatactacgttatgagtatttaattaaataagcaaaattttaattaatcacgttttttattaacctcattgattagcaacgagcnncacagtacgtttaaaatcacgtcaacatgcctatgctagttagggtgttacatgtacggttatggtacagagtgcattggtatagtgtatattgttaaggagtacaataccgtggtaccagcacaagtacgggaaagtacaggatgtctgtagtgtatcactcaaatgtactcaaggtagaaacaaaccctaccaacactcgtccagtgaggtacgtagtgtatgtggtatagtagttgaccctagtatggaatgttcttacccatctgttaagccttgtaaataggtgtatgggcgcctagatacaagtcgatattatatgatatgttatatgcttttcttgctgagtctgtcgactcacagttctgctaccatgtgtacgtataggaaaggcgaaagctaaacaggagtgagcctgagctgggatgaggttgtacatctcatggcggcgcgaccttgagtgttcggtcttgggacatctagggttgttattttttagtccttgtgcgacctgagtattgtattttgaatattttgtataaaagtttagaaactggatccctaaacttgtaaatgattatgtaaagttataaagttaaatatttaatataaaatttttaatttgacacaattttcgaaaaaaatctttgattagcaaaga

SEQ ID NO: 72816 - DNA, 1374 bp, Cannabis sativa
tggttggccattttcttgtagcttgttcttgcccgagtatttggatcctttgtcaattgatgtgttctgcatggtaactttgctcacctattgacatgctatattacatgtggtctcggtcttacctacgtagacatgccatgtcatgttggcaaaaagtgggataatattttccatagctaatattatttataatcttaatagaatgtgtagataatttttttaataatctaataagttaaattaacattaatatattattctaaatgataattttttgtctcttctctttcttagtgctacaattttttacactcaatttaaatttatacataaattaattaagatgcatattaaaaggaactatgaaataaaaaaattacaaaaataataagtaaatagaaaaaaaaaattaaatatatggaaaaaaattagatatttataaatatttgatcaactaaaatatgtatatatatatatgtatatataattaattgggtaaaattgatgtatccaatcacccatacatgaaaaacaacaataatttttggataaattgaagtgaatgtaaaatacttaatttactaaagtcaataagtataatcctcacatagtttgtaaacaatgtgagacttttacagaaaaaaattacttagaaacatattatttaacatatataaaactataaaaagaaacacaatctcatcaacattttaatataacaaatgaatagtataaaaatcattatagcataatacctcatttgattaaaaatatatagaacatataaacatcaaaaattagaatatgagattaaaaaatatgataagcacaaaattgatgaattaaaatgtaagaattagaacatgtcacataaactcctaatgtatttattatgaggggaagtattggaatgtgcgggtatttaaagataactatttgtttgatcattagtagaacattctaaatcttaaggtgtattgatattttttaaaagttttagtttgcatagaaatgtgggcaagagaatgagagaatatgaagctcaagttcataaaggtatttacattacccacaaaaagtctatggagcctaccacattcccacatagaaaaatacactaaataatgtgtttcttctaaatgtctcacatttctttgatataaatataaatatatatttataaattattgtgaataattcaacttttgattattgtataaagttaaaaatgaatatttttttaaataaagaagtataatttaaaaaaacttaaattaacaaaatttaataaaatatttttacttgttaaaactaattaaaaataataattttaaattttaaattttgacaaagattgaaaaatacaaaaat

SEQ ID NO: 72817 - DNA, 1404 bp, Cannabis sativa
  modified_base (1000)..(1002): a, c, t, g, unknown or other
gctgtgctgtcaagtttgtagattattagtaagaattgcaacaataatgtataaaatactgagtcacaaagaagaaacaaagaaagcacaataccttttctctgtgaagccttaggcttacaacattctaagaacaattgaaatttgaaagaaatgtcatcgtattggtaaaacttgtctccctgcctaacattgagacttttcaagtgttgatttgaaatttcaacatactttgaactgtattgatcaaagtctattgagtgtgagtctgactcatagtaataatttatcaaagaatgaatcctatcaaaactgaggaatataacttgtaataatgagagatttctaactttcttgcaagaagagagatctattttgttcaaagtaacttcctctagtaccaaagacttcagatgtatggcttcaacttgaagatgtgactcatgataaatgtttaagtatccaaattccatgaacttaaggcttgaactttgtaattcttaagagaagggaaaaccaacaaaaacttaaataccccgtcatcgtctgtagtatctaagctttgaacatcgttcaacaatagagtttttagagatggaaaactaaatgaataagaagtatctaactctatcttatgcaactctaaactagtcaaatatttgcattttctaataatatttattgacataattgtacaacttttcaagatcatccctattatcctcattggagaaaaagatagtggggactgaataccagatgagtttccaatgcgttgaaagaaggcacgttcgaacaacttcttcattggggagaaaagacaggatgtgagtgatcaatgcatcaggttgttagatagtcctacaccgttaatgtgtggaaagattatagaatatataagaggtatggactactctttctatcaccaattagttttgagatggaatctcatgcactttaccatacactcacccagggccggcccaagcattgggcagcnnnggccattgcacaaggcccccattttttaaggcccattttttaataaaaaaacctatttttttttattatttatacataaataaataaaaaattaattgaaaatttatgaagcaatttttttttttttttttaaaaaagctactaataaaattgtagttttaatgtacatgggttttttttttttctaaagggcccaatttaaaaatttcgcacaaggctcccaaaatgcttgggccggccctgcactcacctattctactatcttaactaaactatacacttctgcattcactagtacaaaaatgggttttcgcgacgcttttaaacagtcgtttaaagtattgtcgtcggtttctataaccgtcgcctattcggccgtcgtaaattgggcaaaataggcga

SEQ ID NO: 72818 - DNA, 578 bp, Cannabis sativa
aaaaaaaaaaaaatagcagctaaactaaaaaaacagcaacatgttttagagaccatgcaaaataaataaataaatttatctaaaacactcttatttattttggtatctatttttaaaaaaaaaattattttaaatttagtctattagagttaaaaaaatatcacatataaaaattaaaaaatgttaaagaatattagtgatgcttaatactcttctatatgtaaatatcgctattagttcaattaagtatttaaaaaatactaaatattattagtacctaataacgacgatgctcataaaataactatccaatttaaagacgtacttctaaattttaatattttaatatgatatatagctgtttaaatttttattttaacacagtaaattatttaattttttttttaaaaaaattagactgcaacataagcatatataaacaaaattaggctaaaagactgaaagaaaatttggggtgtacaataaattatcatatggtatggtttatgtcacattttcaatattttgtacatatttaaagcccttcaaatatcagtaattttatatatatatatata

SEQ ID NO: 72819 - DNA, 597 bp, Cannabis sativa
tttgttttcggtatattataatctaaattttattatatgctatgtatattataattatagtgcaagtaaaagtattattcataaatgaatggtattattaaaaaataattgaatttgatatacctaattttgttatttaattaaaaaatatcactcatgcttatacattaaattgtgttattatatagcggggttgttccattagttataagagagataaagaaaattaaattagagttagatatttttggtatagtgtaaaaaaaaattaattaattaactaaattaatcaaagttcttttattattagtgatcattgattaaaatttgatagtttaatattttttaaaattaatatttatagctatatctttttgtaagtaaccaaatgaataattagtgaaaagtgttctatatatatgtataaaatagatgaatgtacatcaaaaagagaaatgaccctatcaattggtacaaaagtagtccttttatagaattttacaagtacaggccatttagcaaaaagaaattgtaagaccaaactgcaaaataaactctaaaaggacctctttcttaaaatttattcacattaggtat

SEQ ID NO: 72820 - DNA, 685 bp, Cannabis sativa
  modified_base (177)..(181): a, c, t, g, unknown or other
ataatttcatttacataaatcactataaggtgggtaccacataaggtccacaacttcatcatcacgtctcattccaatcaaacattttgttgtcatcgcccaatttcaacaataatattttaaaaaaaattgatgtcaaattattgggttacattgctatattattattattattannnnnattattattattattattgatgatgttttggctctgattgaactagaacagatggtggatgcacacatgaatttccacttgagaaaagcgtagcttaactcatggtcttgaaaataactatttgtataaattaaatcttttaattttaattttttttgaattggaaaactgaaaaaggagattgatcattcatgcatgaggcttctaactcttttcaactcaaataaatataaaacttgttgtgattatatagagcttgtttggctgtatttttagttttctgtttttaaaagtgagaatagaaaacagttttttgtcattttaaaaatttaatggtgtttggcacaaatttttaaaaactgtttttagaaatcaatattttagcatcataccatgacattaatctattcgagtctaggttcgggtctaggatccgagtatgtgagtaaaatataaaatataatatgttagacaaaaaaaaaatgtttttgaaaattgaaaaca

SEQ ID NO: 72821 - DNA, 869 bp, Cannabis sativa
aaagaagaataattggttgaaataaagtgacaaaaatctagctagagtgtaatgaccgcgtttgattatatggattagtaaaggcaattatagcattaattattcgtatttttaaactatttgtggatttaattatgtgtgggtcccattgttagaaatgggcattagtgttataatttttcaatttcggagatgttattaaaccctaggtgtattatttgtattatatttaaattatacaatttttacaatttttgctcggcgacaacagaaaatgcgatagatggctagtttaatcacatgggtaggtctacagccttatttcttagtgggatgtacattggagaaaaatagaataccgagtttgagtggggttatggtttttaaccattttacccctaggcttgaaatagcttaaaacttaagcaccaagggtattttagtcatttggctatgggattaggtggctcattcttaacttgacagctgccttttattatgctgaataatgtttagtgttaagcatttttagaaagtaaagaattaaagaagaaaaaccaataattagagaaaacactactctctttcccttctctctcttcgaaccagcaagaaccaacgagattagttgttgatttttgtgttttcagcaaggattcaagtgggattcaaagttgaggtaacccctagatcatttgctcttagtttttcaagctttgatgttagtttggatatgtgattttgagttataggggttgttagtgtttgaattgtgtatggttcgaattctaagcttattttgagttgattttaagttcttgttgctggttttgttgtttgtggtggtggatgatcaagtttgagtttga

SEQ ID NO: 72822 - DNA, 832 bp, Cannabis sativa
aaaaccgatcacccaaaaacccgtgtggtcgggtgggttcaacccgaaaaggactccaaacgggtttcgggttcgggattgatttttggtttttttctagtcggtttataacccgtaacccgaaattataattttttttaattaaaaaattaatacttaattactaatttaataattaatatcatttcaaaaagaaacctattcgtcgactatttgtattcttaattatctgacagaatctaagcctattactaatctattattgtataaatcataaatgtattatgcacccctaaattagtaataaataatttctaatttattacattcaatttcaaacaaaagctaagcctattcgtattctcttctcaatactcaatattcaattctgtgtgaaatgtgaatctatatacactcttaaaccagtaccagtcgactcacccacactagtgaccagttgacttgacacccacccacgcatggtaggcacccacccacgacggtgagtggttctcttctcggctcagttcggcgtcctgtgtccacccaccaatcggcgacggcgactgttctcttctccggcgagatatgttctcttcttcggcgagatatgttctcttctccgactggttctcatatttcctattttccttttgtcttcaattttcagtgggtgtatacacttattattaaaaaatatatacttattactaacactcatctagctcattaaaaagcatagtattactaacatattattattacatattatatataaagcagttctcagttttcacctttttattaaaaaacatatacttattactaacac

SEQ ID NO: 72823 - DNA, 825 bp, Cannabis sativa
acatacaagtcagcatactgatccaccgtatatgttacttttataggaaagaattgtcttgactttgtaaagcgatccactatgacccaaactgagtcgtagattgttgtggttttgggcaaaccgactaaaagtccattgcaatgtcttcccatttccattttggaaatgttaatggctaaagtaatcatgccagtcgttgatgctctactttgatttgctggcatgttaaatatctggtcacataatccactacatcccttttcattttgtaccaccaatattggggcttcagatcctgatacatcttggtggtacccagatccaatgagtaaacatgaagagtggtttcccttaatatgtaataaataaaataggaaatgacataattccataattacaatgcaaataataggaaaccaaggcatattgcctttattctctgacctaatctcacgaatgtagggactaactttgtgtcttggaagcgatgaggcttatctctgaaatttccaactcacatatccttcccagtgcatgtgggttgataacgagattgtacactggttggatgtcccttgataactctgcttagacatcctactatatactgaggacagacatttatatcaacctttgagggtcgctaggagtacttccttccacccaagtaggaaaatataagacacgtgtcttctaggtcattgcgatgtcatagtgcaaaaaataggataacaaagtggattaaagtcatgacgtcaagtgaaaccattgttaggtttcttacttgttgacttaccttgttaggcaatgagatatatggat

SEQ ID NO: 72824 - DNA, 992 bp, Cannabis sativa
ttttttttaacccaatcttccactaatgtcttatgccaaataaaaaaaaaaaattccttaattcctattaatttttttttttcataatatttgatattagtttgaagttttattagaaataacaacaattttaataaaattgttaatttttttggtgcttaattatgtaaaatatattttcataatatgatgatatttaaaaatattatttataaattataattttttttattagaggcctactttttaaaattagaacagggcctccaaaatatttgagacggccctgttaatatcgttagcatcaatctaataatcaatgtcattggtatttttgagccgacactcacaacaaaaatattaaaaatacatttatacaatcaataccaacaatttttcatatttatagtcatggaagcatgtatatatgttgcttaattatgtgtatttattaatgaatgaatgaatcattgttgatcacatatgtatataaatagactagctaattatatatatcggccatcacaataattatcatccaaattaatcttccatatatgaaagataacataattcaaatcatccttgtcatcatatatacaagataacatgttcctgaaattggaaacaaaaacaatagcctctctctttataaaaatacatatagtacttataacttataattttacttatttccttcttttattttcccctatcaagtgctttgcaagtacaatagattctacaagaaactatgtgaatcttgaagaaacggagaaatttctagaagaaccaaaaccaagtggaaacttatttttttatcgatacaacaagcagactgatcagaaacaagaagaaccaaaaccaagtagaaacttatttttttatcaatacaacaagcagactgatcaaaaacaagaagaaccaaaaccaagtgaaaactttttgaatggttacaagaaacagaatgatcagataaatgaagaatcaaa

SEQ ID NO: 72825 - DNA, 896 bp, Cannabis sativa
taatagataaaaagatgtaaatatccctatcttaaagggatatatttacctacttgaattaaatgttttgtaagccctacacaatataaaggacattaggtctctctcattccataagctacaaagtctcctcttagcttcatacacctgcaagcctatatctctcttaatcctcacattcaattcatgcttcctaaacactaagtcaaggatctttctttagtccttcacagcttatcagttcttagtctgtcatgcactcaattcttaccattgtaacattcaaaaagaattatagttaaaaattacaaggtaaaaatatgtaatctccatggtactatctttagaaactaaaaagagtagatcattacccgctaactaatggggacaaacttctataaattgttgtattatttcctttacttgcttttattatttacacgtggtaataatcaacaattaataaagctctgcatttgattaaattcttagtcaacaacaagtgtttttggtacactacttaattacattttctaagaccaaataaaatgatgtgatataaaaattcatggaaataaaaagtaaaaatttaataatgtattttaaaaaacaaaataaagaaattctttctaaaatttaatttttatatactaacaaaattatatctcacctaatatttcacattttctctttttgaagtttttaagttaatagacttgactttacaagtcattgtaatatatataaaaaaaaaaatactatatggtagcctatttatgtcaggttaaagaaaaagcactcttcaataataaataaagtcccattcaaaaaaaattattaataataaatagaagagttgaatagatctctatcaaaacatatgtttagtcaacata

SEQ ID NO: 72826 - DNA, 1106 bp, Cannabis sativa
taatataagcaaataaataaagaacacaatgtttttaaagaggttcggccctgttcagttcgctaatagcctactccccttgatttgcattaactcaagaacaaagaactccgtgtttcctctcttgaagctctcacaataaaatctctgagtatgctctcttagatttcactaaagtaattatttcgacccctttaccagtgagaatggatcactatctatagggctatatgcctgagggaaggtttcccttttgcttacaatatctataattggtaagaacatatattacatatttagaatacacagattgtaggatttggatagcttgttatatctctgtgatatgatcccaaatttatagaaactgctcttgtgcttcacgatgcacattttggaattgctaagtgttaatgcgctgctcgaattatccactgctcggctgggaagatatcgtctgttcaggtgtatgcgctgccctgctcagagcatccatctcaagcagatatggaagtgtcaccagcatgtgctgcaacatcacagtgcaaaaaatgggataacatttgccccccaagtctgtacaggacttccgaagtttcgtgtagacttcactagagttgcctttacatttgaatgggtgacacgtgttgaatgagtctgttcgtgattcgatgtgattctgactaagagtctctttagttttcggctaattaatgctctgattaattcgtacctcgagacatgcctttcttttgcacacttttgacggttacccttctttagcacttgattgcttttactttcccaatatttactttttggggggaaatcgaagcgtctgaggttttgaattgattactccctttcacaaattggcttataaatagggttgaaaattctcataatttacttttaccacttttctcactaagggacttcagagcaaaaagggttttcactctcaagtctgtcgggattctagtagaaagacctaaatagcttaatccgaacaacaccaaagcttcaaacaatgagtaagtttctcatctttctctcctttaattttgtatcttcaatttttcgggtttccattgtagaaaataaaa

SEQ ID NO: 72827 - DNA, 1129 bp, Cannabis sativa
tggtttacaaaatacttagttacgaaagtttttgcctagcaactattaaaagaaagactcgcattatggtattgaaattattaaggtgaacgactgggtctgaagtcccatcgtactgcgagatgtgtgggtttttgaatccctgaggaaattcagaattcataatatcaggatggaaaggctcgggctcttcatccgagtcataaccaggtaacttcccgtattccccatcctggtatctcctgaacttatcctccaacttaatgattcgcaattggattggatcctcttgctgtcagttagcattaagttgttggcgtaagtatggtgcattctgatttagatgctcgcgtaaatcgggttgccttcgattcaaatgctcatgaagatctggttttcttcgttcatagttactcacggatcttgtatctgagtaactctcagattgataaatcctcatattgctcatactttcttgatcatcataacgccgaggtctacctccttctcgcatttgtcttcctagttgactttgcccccgagacctcgagtgtcccgagccagaaacttgcctcgtcttgcacaggccttctccttcagaaaaggttagatacacgccctctgtttaggtacgtatatgcctcctccctttcaaatcgagaaggacgctgggggtgtctcggtggtaacccacttgttctaggttgagtcccatgatttctctcgttattacgatggatttcctgttccttagtttggggttgccttatgttgttgtttctatgagaagcctctggcacatcattgttttcatttcactgattcgtaaatccttggggtctttgaggtacttctcgacgaggtgcttgattattttgtcgttcatctaatggaacatccctagttcccccaggttgctcatcctgggtgttttgggatttccttgatttgtttcttgcctcctggttcttgaaccctgaggtctacttcgtggccttcttgctccaagatcaggttaattctgtgcattgtttccttgagtccccctggccgctgcagcctctctttccaactcagcgtttcgttggttagacttggctaagcgttgctggagttgtcgattttccaa

SEQ ID NO: 72828 - DNA, 777 bp, Cannabis sativa
gagcaaaaatctctaaattttggaggcaagtttatactggtgccattgttcgagacaatcaaggtcgtgtgatagccgctctctcaaagccagttcaagattattttcgttcagatgaaatagaagctaagaccctttttcatagccttaatggggtgatgcaagaacaaatacatattactcatattgaaatcgatgcacttagagtctctaatgctttgaattctagtttgacagatttatcgtgtttcttagatttaattatggatgttcgttgtcttttattcttttctcctgagttgttgtttcacatgtttggagcaatgctaaccatgctcgtagtttagcaaaatatactttaaagttggatcaagactcttgttgaattggaaaaattccttctcttattttcactattgttgtaaatgactcttgatttataataatagtgatcttaaaaaaaaaaaaaaagaaaaacaaaaaactattttagcacttttaaaaacccattttttttaaatgataatttttttctgctcaatatatcttacgattgaattaagatcatctgtgaaaaaattagtgtgtcataatatattaaaccaatccaaatatgtcaactcaactaactacttttcttaatattaactatgtagacagttttttttttttttttttttctttaaatactctcaaataaattaatgtatcattgattttatacactatggtgtaccatttttttaataaaacatcttcattctcaggatcggcctg

SEQ ID NO: 72829 - DNA, 1430 bp, Cannabis sativa
  modified_base (745)..(751): a, c, t, g, unknown or other
atgttttgttgggtcacaattagagtcgttttgcgagatgttgtttttttaggaggacaaaattacgcttgttttctatgtttcaaggtttcccgtacctgtggacgtgcaaggcttcaaaagtgcaacaaaagataagttgagccaagaaaaaatgcaaaaaatcaagagttggttcacttttggccgcgacagatttatttacggctgcagccaagatttggtagagagatgtatccgagataggttcagcagctgcggtcagatactctaccgccgcggccagatcagcactcactgcggcgagggaacccatggtcgtggcgaggttccgtacaaagtgaggtcaattttgtcttttgaatcctggaacgaaaaataaaaagagaactgcaaaaagaagaaagggggaagcgattttttagacctagaaagcaatcaagagcggctggagaagcaaagggggcgacccagattcattccaccaacaatttctttcttccttcctttttgatttctgtatgttgaattctcttttaggaattgttatggatttgaacatgaactaaactcccatttagggaagataatgaatgttgtttaaagttttccctagttgatgttaattgccattccttttatcttgattgtgaaattatctttatttgtgttaattccatgtttaagcttgatcaccttttacaagttctgtgatctcaattcaaaatctaaaaagtgagaattnnnnnnnctaaaattggataatctaggttgatgtgaaacgaaagtatttgcgtgacctttgtgacaattagattattgcttaatgttgatttcatatgattctaattaggagattaattagagaacatgtgatttagaacctagaagatctgaaaggagctaggttaaattgtataatctgtcattcacatcaggaaaagggatagtaattaggcattaacaagtgggtaaatatatcaataggattctcttccctatcttctcattttgattaacttctatctgtctatttaagcttagaatcataaatttagagtggtattcaatccaattccctgcggtttaacctcacctgtgtgagtttacttcttgattacgtgcagtagcgtactgtttataattttcgtaatactagccatcctggatttgacaaggatgtcatccacatatacttccatgtttcgtctgatctggtctttaaacatcttatttaccaatctttggtatgtggctctagtgtttttgagaccaaatggcatgactttatagcaatacagacccatatctgtttggagacttgtatgttcttggtccggtggatgaattttgatttggttgtaccccaaataagcttccatgaagcttaacatttcgtgcccggatgttgcgtccacaagctgatcgat

SEQ ID NO: 72830 - DNA, 904 bp, Cannabis sativa
ataaaaaataataagcttcctattctttattaaaaaaaaattaagttttttctttcccacattactgttctccatttttattttgtttttgatatatgtttccatacatgaaatactacgatatactcttctctttcaaatggagcttccaacaaagccacacaaatcctctgatttcgcctactccaccatcctctccgccactcgagaatggcctctcgttacacaacttcaagatcctaaaagaaatcggcgccggtatcggcaaagtttacctctgcaaactaaataataactcgggtgcatcttgttactgtgccatgaaagttgtggacaaaaagatgctcgcggtgaagggcaaggttaaccgagcggaaatggaggaaaaaatcatgaaaatgctcgatcacccgtttctttcgagtctctacgcggagtttgaagaccaacatttctcctatattgtgatggaatattgctcgggtggcgatcttaactatcttcgtcatcaacatcctcgaaaacagttttcgctcaactccgcaaggtagttattaatctatatcggttacgtaaattaacagaaaatctttattagtttattaatctctatcatttctttcatgaatgtatacagattttacgccggggaagttctactagcattagagtatcttcatatgttgggcataatctacagagatttgaaacccaaaaacgtgctcgtcaagtcagatggtcacatcatgctaactgactttgatctttcgctttgctccgacgcaatcccagtcgttgaatcatcacttgaatcacccgtgcctagggcccacattttctgggggcccaaaataaaaaaataaaaaaatttattaggcttttatttaactaaaatttaagtgta

SEQ ID NO: 72831 - DNA, 954 bp, Cannabis sativa
taattttgatatatatatataacatgagagcaccgacaaaacatgcatccatatgtgtatattgaattgatcatgtatttatacatggtttttttaaccgaagaaaattttcattaaaaggcgaaaaactaaaattaaaggacaatacacaaaagtcaaggattagaggtaaggaggtaattagtttaccaaattagagaagagttaaggaataaagctaaacgtataagagaatgaactgccatttgaagcttttttataatgagtaaatgaaataaaaaaaaaaataaaaaaaaaaagaacaaacatgtaaatatcatgaataataataccaaattcaatttagtatttatccttatattaatagcttgaacaagatgaatacagtctgagaaaacagtaatggagttgtaccccaaacggcgacacaacatcaactcatttaagagagttgctgcctccaccacatgaggatgaaaggaagctgccactggatcacttgatgaacacaaaatcaccatgtcacggtctatcaccaccgcctcgagacacatacaatcgtggtcctcattaatacccatatccacaaatagattaaaattacctaacctcaaagtctcaatcgagccactagagagcccaaccacagtttccgtcggcttcacatgagcagttggatccaaatagattgagcctcttcataacgcctaagaaaactcaaagtgtaaagaccgcatgagtttaatatgttggattattatttatttattttaaatatataaatagcagtcttgtcttgtgacatgtttgagagttagtatttgtcttttgtgcgtttcgattacggttgtttatgatcttatggcgtctagtagtagaactatggaagatttgggacatcagtgggctgatctacaagtggaagatgaaaatgaagtggggcttttatttgat

SEQ ID NO: 72832 - DNA, 622 bp, Cannabis sativa
aagcgagaattcgacaaccaccagaatcgacaaccattgtaagtaatccggaattcaataggtggatgcgtcttgatcaatttctcctttcttggttaatgtcaaccatttctgagtctatgattgggcatgttgtgaactgtgctacttcgtctgaaatctggaacacgctcgagcaattgtttgggactgcctctcgagcaagacaaatccatctgatgaatcaacttcaattgaccaagaaaggctctcttgccatcgatttataccttctcaaaatgaagaacctggcagatggacttcgtgcagcaggaaatccaatctcagacgaacaacttatcttgtatgttcttgctggcttagggactgagtatgaggcagttgttgtcaatctaacctcaagagacaatcttactcttgctgaagtgcaatttatgctccaaagccatgaagttcaaattgaagcaaatcaagttcatgccactattgatctcaatggagccacagaaaactatgcccaattcaaaagaacccaatctggccctcccaaccccacaggccgtggctattccaatcaatttcgaggacgtggacgaaactcgtatggtggccgatcgaataa

SEQ ID NO: 72833 - DNA, 781 bp, Cannabis sativa
ctatattgcatatccccagaaggacgttgacagggttgaatagctcagtatagacctaaccatttctaaaagtatgcgatttcttatttctacaactccatttttctatagagtgctaggggcagtatattgcaattcaattccaagttcaattaaataatgtttaaactgcatatccatgtactctacacccctatcagtttgcaagatctttaatgtcttacctaattggttttgagccaaaacatgaaattcctaaaaagctcattatttaaaatagatttttaactaattacttattttagtctatgagagaaatttacaagaattgactaaaaagcttccttatttactttttttaattagatatgtatttttttttcttttttatctttttctgtcttctttttacttttatagtatcggctagtttttaggataaaggctgacgcatgtgggtccagcttgctggtggtggaaggagaacgcgccatttggcacgttatgtaagattttcctctttaaaaaattagaaaagtaaatatgaaatgagctgagaaaaaaatcattaaataaagtagagatctaatcattattatttttttagaacaattatgattgaaaaaactaaataaccacaaatattattcactttaatattttactattttttaatgtattttaaaagaaatatattttacttttaagaaaaatattttttttcttctttatttgctccttttttttttttttcatattgtgtcacaaatgttactttttc

SEQ ID NO: 72834 - DNA, 1035 bp, Cannabis sativa
atcccatgagtactcaagatatcaaatattttcttatatttattattctaatacaatgaattataaaatataattgtgatacctatctaacaatgataaattgtattaccattactctttttaaacaacaataagtaaaatttccctttaatacccattattccttaaatactcaacatattatatactaattattttatttcctctcttaaaaccttttacttatttttagacaaaaaaatatgtcaaaaatcttaataaattcaaattatttattattttaattatagcataaaacatagtacctataatctttatccaacctaaatttgactagaattgtgtttatctcctttaaactgaaaatttcaatcttcacattcaacaatactcattcttaagtaccacttaatcatatatttattaataatctaaatttaattaatattagatagatagttgtcagaaaaaaaataatagtgtctgacttagtgctctagcagtactatatataactattcatattattatctttcaatactaaaaaaactacaaagctcatacatattaaactccttaactttaattacccacttatttcagaatcttcataagaatggaataaatcaaatttttcaattcatatttaatatcccatctcccattgattactaaatccccatatttataatttatacaacaagactaaaattattttatatatctaattttaataaaaatcttatttatagtcaatacaaactaaattaatattaattaataaatcataatccaatttagttttttgacataataattccttatttattatttaaatagatgggttggcaaatctcttaaatattaaagtcattcaatttattataaaaattatttaaatttgtatcttcctatacaactaaaaaacaaaaaaactcatctaaaagaaagataacttatttgaatcgcctcctccctctctcttattttatcggctgtccaccatcttttccattcaagaattcatgcacacat

SEQ ID NO: 72835 - DNA, 1228 bp, Cannabis sativa
atgacaatattcgaataataaactgcatgattattattattacttttcttgctgagtccttgtgactcaaggtgctatgtggttcatgtaaaggcaaagaaaagctagatcaaccatgaggtgataatcttctccagcaatgtacatattgacgtcacccgcttgcgtgccgagttgtcgggagttgttttcagctggttatatctgctgtgtattttgattttatgtttaagtggttgtcatatatattgttttagcaaaattttttataacaaggatcttcggaacacactttttatgctgttataatgtttgtttttagtattttactttagtcaagtttttaaaattatcacactttttaataattaattattctattactattaaactagtttataaaatcacacgcatgacgtccctataaattagggcgttacataaagagtaaattgtagaaaaactcctaaaagttttaccctgttagcaatcaactctccaaatctattttttgacggtaaaacttcaaaacctgtgttctattagcagttttttatttccattcattttttgttgttaattgtcacgttggactatttatgtgtagacaatatattctacatgaatacaatgtacacatgacacaatttaattggtcaacataaataaaaaaagaaattaaaaaaataaaaagaaattgtattcctgttgggagtttgttatctcaatttatgcatagggtgacatgtggagaacattttgtgacctggacgggccatacattcctcaatatgtcgtccagagtgatttattatccagaaacaactcatctgaagattagtataaaacatccgtacatggtgaatgaaattgttcgagcaactttcaatccggacaaagtgaatgcgattgaggcagttttagggatattatttatttatatcttcaaattaaatccctatttcagtgagatttctacacgttgtaaatgtaaaataggaaactaactaagtttctctttttattgctaattattttggaaaaccaaattgaagtaattttccctataaatagtggagccattccattacatagggatccgaaatcatattttctagaagagctcttatgctgtaaaagaattgtaagattttcctgagaattcttaacaaactcacttggccagttccttgtgatcttattgattctccaaagtaatacaacaaaa

SEQ ID NO: 72836 - DNA, 1276 bp, Cannabis sativa
aagcttctcttcaacctattctaagaatagtatgagatcataataagaaaaccaaaacctagttgaacactctaggtttttacaaatgaaacactcttctcacaaagtaagatataaaaatatgatcccagaagagataaaatattttggatgctctctaggtcctatttatagaacatagcaatcctagagacagccacaaaaatgattcccaactgtacaaaaatttcttaaaaaaattcttgatttgtagcatcagaatcgggctctgcagcagcagatcaggaccaaaaaggaaacttttcaaattgaaccaagatcacaaatttagacttcgaacctgccaaatgatatttatttgatctgttctaataaaggcaatactgaaatcatcaattaaaaaaagggaaagtcaagtttcccaaagttaaacaactttccataagagaatttcttctcttacaagaagtttcctaaaccaaaagagaccagttgagaagaaatctttccttagaagaaaagagtaattagaagcacaaaatgaatgtaataaaaataatttaaatgttcagtaagaaatacacatcaattaaaaaatattttgataactaaattaccaaaaaaaaagacctaacaatatccccctttggtaatttagaaaattaaaatattttcaataaccaagatctcgcaaaataaagttagcaaaacaaacatataaactccccctgagaagcaaatattaaaccaaaataaaaatgctaacttttaaacaaagattaacacaaacacaaacttcacctccccctggacagttgagtatacaatccaaattactccccctttttgtttatctataagggcaaaatataaaaggaaaccatgatttccaaaaaaaaaaaaaaataagatctgaaaaaaacaatcatcatcaacaattaaacaaaatacaaagaataagaaatcaaattttaagagaaaactcatcaaaaatttaccaaataaagcacatgttgatacttaccaaaagaaagacaaatgaccaatttttcttagcccataagtcaagtcactccactcctttttttttaaatatcatttttttgaaataaaaaagagagaagaaattaaaatattttatacaaaaatcaagttattctaatgcatgcatctttcaagtttcataaaaaaacaaataaccatgttatgcttttaaagaagataagattttagcatctcaaatataaaccatacataccagatgttgagaaaaaat

SEQ ID NO: 72837 - DNA, 1018 bp, Cannabis sativa
tcgtgatgatgctatatattataattggccacctaattgctacctcactcacattattctttacatcttatatcataacttaatttgtattaataggggaaatatatacgtttccttttaattaagaatgtagcaaattgtgactatgaaacacttctattaaatctatatttctttctattttaattgaagtgttatgtttgaataataataatttttctttatgatttttattattgtttcaactctttccacacataaaaagttactaaggaaaatttcagagaaaaaattatatcataagtagccaacttgaagaactattgatggagaagtgtttgaagaatatacaccataatatacaaccatcatcaaatattgtacaatagcctagaattttcacttcaatacaactttcattttagcattatagcttggtagtgttatcttatgtttgattatgctctatttggactaaacatggtgaggactaagagtgttgtagcctcaaggcctctttacattaagcattaatatgtcttactttttcaggaactactatgtcatctttactttaacttggagttcagtttgagagagagtgcaaaaaaagatgttattttatttttatcactgttaggattccatgttttgctctccaagctagaaatgcgcatattataatccaagacatgtaatgttctcttttgccttttgtacccatccttcttttttgttttctctataagatctatttgcttcatgctatctaattttattaataatataagtctttattggaatgagaatcgtcttcatgtatttcaattcatagaaataattagcccttctttatagttttataacttttagttttttattttttgataaattgtgctacttttatcttttctacaagcattttgtattcttgttagttgttagtccaagaaacaatttactttctattattccctgtgaaaaaaaccttatgttttttagtaatattggtggcata

SEQ ID NO: 72838 - DNA, 1348 bp, Cannabis sativa
  modified_base (521)..(534): a, c, t, g, unknown or other
atatgttgttttgttatttttttttttcaagaatgatgatttaaatgatgttgaagtgattggtgtgaaaaatcaagatgcaatggaaactgttgggctggatgagaatattcaatatacccaggttatttttgttttgtaaactagtttattgtttatttttttgtttgaatattttatgtttcttttattaatgtttttatttttcgggatgttttttttttgtaggtttttaataatgatgctccttcatttgatattatgggtcttatttctggtaaacttgaatgatttatggaagaaaaaagaatactgataaattgaatgatgaagaacaggttgttgatgatcatgacctttttaaggatggtgttaaaaaatgtaaggatggtgaaaatgatggtggagatgaccaggctagtttatttattattaggtttttgtttatttagatatttggttactttgttcttttttctttgttaaatgttctttattttgttttgtatatttacagggtnnnnnnnnnnnnnntgctgttaaagctattggttcagatgggagaaataaagataatgttgagggaaagaatattgaagaatgtaaagatgttgcagatgggagtaataaagataatgttgaagggaaaacagttgatgtatgcaagtgtaaatgatgtcgaggatgttactagtaagggaaagttgtttgatagtcaaggaactgaggatagtatcactgtgtctgctttggagattataaatgaaaagattgatgtttatgagggaagcattgaaaaggtttgtcttattattttctttttgtttattgtatattttttttatttagtttattttatattttgattcaatttgttctgttcaattattattttttttttattgttttcaggataagtctttaaataaattagaggcaacaaatgctgatgttttatctacctatggtttggacaaggtttgtttactttttgttattcttgtgtatgttcaaagtattgattttggtttactatttttaaatatatggtttgtttttttgcatgatattaagactgatgttgttggtggtgagaagaaacatggttctcaagaaacttttttagtatctaccatggaggttcttaatgatcatttggtttcttatgaagacagtttgaaaaatattttttttattttatttgttagtttgatttattattttttcaccttattttattgtttgcaattgttttgaatgctaggaaaaatcgataaaattggagaaaacaactcctacagttggaaatagagagaggaaacctagttctgtatacaatagtccgtat

SEQ ID NO: 72839 - DNA, 1004 bp, Cannabis sativa
  modified_base (708)..(725): a, c, t, g, unknown or other
ggcccatattgtagtagtgtctaaatatttaatgtattacgtctcttttatgaagtctatttatataatatgccaaatatcatatactttttttttttgtggttgaagatgcatgataaatgagtttaaaggtcatgttattgttcttcaatcactcaaatcttcttgcttttttattttaataaaataaatagctttggttatataaatatatattgataattttacccctcaaaaaaaatatattgataattttaaatatgtattcctaaatatatgatatagttagttttatgtggtttttctatacttaatttttccattcacaaatgaatttatttatctcaagcattaatgacaaatctatgtatacaaacctatgtatgcaagtgttaacgagcttattagaaagttatattgagattttatacacgtataacattgattctcataatttttttttttaattatgtgtgcttagtttgcaacaattataaatctctacaaattaatccttctttttatataaaaaaaagagtaaatattatattttagattttgtgttttaaaaaatagggtctttattttatcatttgataaaaaagagagtaacttttgtaaaattgtctaaaatagtattaccttattaaaaagtaaactctataacatggctgatattttttaaaaacaaattattattattattannnnnnnnnnnnnnnnnnttattattattattattgtgattattatataataacaacaacctgggctgatttttttctaaaaatctatctaaacaaaaaagaaagaaagaaagaaaaacaatatttatataataatgtctttatatgcataacaaactataaaaatgatcaccataaaagtaattattttgtgaggtccatataaataaattaataattaaacaaaaaaacttaaatatctacaactaatttttcaaaatcaattaactattcatttttcaatttataattattgtt

SEQ ID NO: 72840 - DNA, 1224 bp, Cannabis sativa
  modified_base (1175)..(1185): a, c, t, g, unknown or other
acaatctcaatagttcgaggggaatttttaacgaccaaaaaagttcagggggcatgatttactacatgtcaaagttcagggggaaaaattactaattagccaaacttatattctggccgtttaacatttggtttaggctgccaagtcctatggatccacgtttattttctcctagttttcaaccatttcatgatcatggtatattggaagtggtggttatgaaacacatagctatacctccacaacaactttcctgatcattatctaaaaagcttttgatttgaatttgtccttgcaaagattactatgaaaaagtttggtatcttgccgggactaacactaaggacaattaattattattattattataattatttttgtagaaactaactagatccttctgtgcctgttttctgggtttctactttttagttgaagaagctcatggccaaaaaaaaatatttacatggaaattttaagttaacattcctattatagactctatttttatttatagtttcaacttttttattgatgtaatagttttaactttttgtgttgctttttttttttttaatttaagcttttatatattacaacaataaataacttgaaactcgaattcaggacctccaacacacacgtacctttttatggctacttgagctagctttaagtggttaaaattttttgtattatttgtaagcaaaactattttcttttattttaaatatataaaactttatttgtctttcttatttttatgagaatgtgcagggagacatgaaagaatgtgagaaggttaatgtggccagaatataaattttatttgcttaggcacttaaaaaggaaaaaaaaaattggtaaaatcttaaaacaatgagtcttctttcccgatctactgatgccaagaaggactcttaaactttgagtggattggtaaagatttgattcggtctgcgatcggtgagcgtcgctctttgtccaattcaaactctaaaaacttgggggccatgattccttttaccaaggccactaggttgtcaaactatgctattgacaccctgtgtggtggtttgcgtcccagttttcttctatagtagttgactcattagtttgatttgctttatcttgaaggcaaacctaatgacaatgatgttggaaattattttacnnnnnnnnnnnatctactcacaagtatgctgattaacatcctaaatatga

SEQ ID NO: 72841 - DNA, 716 bp, Cannabis sativa
accacggatgaccattactttaatcgagttgataagacgactgcgggattaatggaaacaaagtggcccccgagaatggccactgaccccgacaagaggggcaaagggcggtactgcgcctttcacggagaacatggtcacgcaacttactgcaggcagttgaagattgaggtcaaccgtctggtgaaagaaggattcttctgggactgcctcgcttcggatgccacgctccacatccagcggggaagtgacaaaggccaagatcaatctccaccaccgtacattaagaaaaccgtgaacgtgatctcaggagggtcagacctaagcgggaattctgtacgagcttcaatggcacacgcccgtagggtccagtcggtaagggagatggcggtaatcgacagcgatggcccagacgtactcttatccttcaaccaaggggaagcctccgaattggaacacccccacgacgacgctcgtgtcatcactctggacgtagcccacattcgaatgaaacgcatgctcgtcgacactggaagctcagccaacattttatttgctggagttctgaaagaaatggaaattgaggatttaaaagcccaggacactcaggtcacactagtagggttctcaggggaaagcactgtcgctcgaagtttcgtccaactaaccgtctacgcgaacagagtcaacaaatcagtaaagtttctaattgtgga

SEQ ID NO: 72842 - DNA, 816 bp, Cannabis sativa
atcatgtaagtctaaatccagtgaactgaaaaatcatgagaattaaacttttgaacatataatcatgaggtcaagcactccattggcccttcccccacacgctctgcgggaaaacttcccaggaggtcacccatcctagcaattgttttcttgtggcccataacctaagaactccaaagttaagcgtgcttgatctagagtaatcttaggacgagtgacatcttgggaagttttcccagggagcatgtgagtgaggacaaagcatgttagaaacactcgtgttagtttacagggttagtcgtcgtttcaaaaagcaactagagtgacgcacttgtgtataagagccataagtctgtggggaaggcccgatggaggcttgaagcgaaggtgttacactatgtacttctactacagatcaaagttaatcaacctaaaagcttcatcgacaaacgaatgtcataaacacttccctacacgatggggcatgcaacaaaaattcactaaaaccctaaactacatggcaagcttcctatgatttcttctcagaatgtaatgaccccaaaaaatttaaattgcaaacttgaagttaccaatacttatgtaaggaaattacaactagggttatctaattgaggagcctaagcattgcctgaaaatctcaaaagtgcaataacagtttgtcaactactgcctaaaaatccaacaacctcgatggatcttggggatcaatgatgagaactgggggtggtgcatctggatgtagcctcgatcgtactcaaagaagaaggtggagaattttagctggaatattgtgtt

SEQ ID NO: 72843 - DNA, 1220 bp, Cannabis sativa
  modified_base (290)..(312): a, c, t, g, unknown or other
tagaactttccataggctgaacaagtatctttcctggagctttaacattcagtctcattggtagagttagggacttcagatcagcttttacacttctccaacaccactgctccaccctagagtaatcaccatctcatcagtagactttctagcatcaagcaagtttagaagcgtgatttggtgtagtctaagaatattaaataccacccttatcaactaacatatagttcctcctttttgttcttaagatttacttgattgtctttcaatgttcctttcctggattaatnnnnnnnnnnnnnnnnnnnnnnnctcaacaacaggtgtctggtctaatgcattgcaaagcatatatgagacctctcaccgttgatcctaaagaattctttccttggcctttagcttttcttgaataattgaaacttttcttagataaataaaatctatgtctagaagtcgaaaggcttctatagatttccattagaaaaatgctccagcaaagtaagttgcttgcactagagtaatttaatcaccaggcatgccgtaagccataggtttagataatattaaacctataataatactaggataaggaattttgttaagtccattgaatagacttactaacaagatttccttacttgtccttgtaatagaaaacatttggttactccatatgcagtgttttaaccatagttctcttgcctttgcttcttagttccttattctgactatctattacatgttaaaactaacaatggatttaatcacaggcatctcccaagtcataacaaggtgagttctttgaaaccctcccacaacgacaaggtaccgcgactatctatctaagaacttaagtggtattttccacatcggttgtatcaaggcaatagaggtagtgggaccatcgtatatagaataagatgataaaacacattggactcaaaaaaaaatatctcctctagtttgctactttattttcagatttattcctattcttaaaaaagtagtatttgttgaaataaacactttcttatctaaagaccatgggatggtccaaccctaatcacttagaataactatcaaacatgcaaacctaagttaacagtcttagcttttgttaagttcacaatcaagacatctctgaatcttgtaatggtttacactaagtacacaaccatcccatcattctgaaattgtcctatcactagggtatttcc

SEQ ID NO: 72844 - DNA, 1203 bp, Cannabis sativa
  modified_base (37)..(78): a, c, t, g, unknown or other
cgctcttccgatcttaaatgttatttctgatctatannnnnnnnnnnnnnnnnnnnnnnnnnnnnnnnnnnnnnnnnnggcataaaacccaacacctacaacccggaagctaacttgggcacctcgggtttcacctggcgcccaagttaacatccttaatttcagtttctgggaccatctttgtgcaaaatggtcaaaacttgcattgggacatcaactagacataccattgacatatttaaggcatcaaaatcagaatcagagcaagttgatttttgagcacccgaggccccgagaacccagcgcctaggttgacaatctgtcaatctaggtgccttccaagtgtcccatcaaagacccaattttgcatcgaatccttcttcataaaaaacaggtaaataggtccttcaaaagaaaaaacaacaattcctgggcacaaatagaagggcccagcgcccaagttgacatttggcgctagccttgcacccaagttgacattttgtagacttgggccatttaaaatggagttttttaggaattctttcaagcatcttcttcgtcttcaaaaaatattgatattcaactatttttagggaccaaatagaatttttgaaggggcgaaactaggacccatcccccagattgatatttcgtcaacctgggctattttcgaccaagttcaaaaaaagtgtttcgggcattttttttgttataaaaaataacaaagattcaagtaaacttggggagaaaatcacaaactgaagtccctagaaaaaggcctagcgctcaggttgacttgggactgggcccagcacccaggttgacaatctacctgggacgctaccttcaattgctcaaatgccaaatctgaagtgaccattgaatccaacatggtaaaaaataggggaagacaccctgtcttcaagtttataagccttagaagtataagaaatagaatcctgagagctggattgaaagggcccagcgcccaggttaacaaatggcttggttcgatgggttctgcttatccgaatctaatgtcgttttgaccgttcgtctagtttttcacaaatacaatgatacatgaagttatagaaatcaaatttacaactttgcatttctcatttccagcactcctgaaaataatgagtttcgagtctcccatatacgcaaaacagtaacatctccgagaactagtgacca

SEQ ID NO: 72845 - DNA, 1123 bp, Cannabis sativa
gtacttcttgggggccaaattaattggttgggaaggaaggaccgtacgaaattgaggatgaaatcggctctgggacctccaagcttaaaagaatggacggaaccacagtgcctagggcctggaatgctgatcacctccaaaagtactatgaatagttaaaaacaatgtttatattctgtaaaagaacctgtgccggacaaatgtatgcaacctcttatgtaattttttaagactaagtgacctaaaaatttcttttcatgtcacatagggggtattaaggcatatcatacgggcaaatataaataggataaacataagataactaaaaggttaaatacagttaaaaacacaaattgtttaaagagtaagaaaatccaaacaagaaaaggcttggggacgggccatgaaaagtctccccttaaaagaaagaagaattgtcttataggtaaggggaagaacaagataaaaaaaatgagaaatatgcataaacaagaaaatcacttagtcagcctgaggaggaagatggggacccgtgcgctcttccagcactgcatcaagcctcttctttttctcctggaagcggaccagaacctctctaggtttgggataaaaaggaagacgaaggttatagtcattagttgtccagcacatgaaaaacccatcatcaaagtgcttcgacaatgttgacaagtgactggggcaaggagagcatccctttttgccttagcagcttcttaacgagcctgctctttgaactcacggagctccttcacttcaacagtcaatttgactattgtttccaagtccgtctcgtgcagctctcccaaagattttagcttggcagtcaattcttgaacttcttccttggaatcccgaagatccctcctcaccgtagaaatgacctcatccctggccttcagtgcctcccggtggttctgctccataggagactccttcttctaggcttccatacggattgcctttttctgctcctctggttctcagagacttttaattgcctccttcatacccccatattcgtacatggtgtatctgtgatcaattaacgtctttaagagatgaccgacctgtgctgaaatcaaggaaaagtttgagtgttggc

SEQ ID NO: 72846 - DNA, 1190 bp, Cannabis sativa
aattagctcaaagtcaatgtgccttttgaccttatagagttcatgttgttactaaaatgcaacctgattaatttattgtcacaacatatatatatctttgatagcttttaataccattcttaattttacagccatatgtgacaaaaaaaatctcacaactaaaaactttataagatcagaatcagaaatcttaatgatctccaaaattttctattttttgatttctgataaagtgaacatatagtattttgtttgccttaaattccttatagcttatttggctgcataccgaaagttccttatatggttacttaaatatctatccaacattcttaatatgtatattaagtacaattatatacatgcttgagcatagattagattccaatataaattaagaatcgtctatatttcgtgaattctaaggttgcttttaagacaatgacttagacaacttattttctttagctacaagcctttcgcctggtatagtatttttcatgccaaaagttttgaatactttattgatatacctcttttgttataattcaagaacatatcttgaattcctaatacaaaatgggtatatcatcagtggcaagtattttttttaccaatataatatcaggatcatattattactcccactgaacctgtgatatatacacaattatcaaaagcttttatctcaaaaaaccaaatgagaatacttaatgaaaattgtgtaatcattgacgagaagcttacttgagtttatacatgaatttttctaatttacaaaccatattctttggatctttggacacaaagttttcttgttgcacacataacttttgtcatcaatatcactattgataaatgccacattagtaatctatttgatataactcaagaccataatgagcagtcagtgtaatgtttgtcctgaaatagtctttcaattaaaccaaaagaaaggcttttcaaaataaatatatgctttatgagtaattctttacatacaagacataatgtgcatctctccacattgcaatttgcatccctcttggttataaatatttatttataacccattggttttacactttatagcaatatgaaaaataccaaaactttattgtctcacatcaatttgtactctttatttatgatatcaatccagttttgagagttggaaccttcatggcatg

SEQ ID NO: 72847 - DNA, 1500 bp, Cannabis sativa
attagcaacgagctgcacaggatgtttaaaaatcacataatacgcctatgttagttagggtgttacatgtatccttgtggaagagtagttggctcacaattcccatgtgttgttttttgtaattgaattgatttcttcatccattgcatgtctctatttctggtttcttactgctttttggtagcttagaggttcacaatcaccaaatagacacataagagaaatatcattttgattctcagttacctcataaagctcttgaaagcttctaaagtgtgtcatcttttcatttgagctctcacttgaatcttcttgtatatttccaacttgcgagatcaatggagtcttaggttctggatattcttcttctattgtttgttgctctgctacatctttctcttcgaagtaaggaagaaaatcatactcatcttcttctgtgttccaaatccaagaatcttcttcatcaaacattacgtcgtgagtgatgatagttttactggtaattagattgtacaacttgcatcctttggatcttgactcataacctatgaatatgtacttctcacttttgtcatcaagccccattctcttctgatcaggaacatgaacttaagcaatacttcgaaagactctaaggtgagaaattctaggtttttttcccctccatgcttcttgaggtttcttctcatacacacttcttgttggagagaaattcaccaagtaaactttgcaagctatcgcttcagcccaaaattcctttggcattatgttgcttttgagcatgctgcgagccatgttcagtatggttcgattcttcctcttcgccactccattttgtttgggtcatcttggtactattaatggataataaattccataatcttcacagtatttgttgaactcatttgatgtgaactctcctcctcagttagatctcatggccttaatagcaacacaactttctttagatctttgaattttttgaaattctctaacagttcttatttctccatcaagaaaaaagcccatacatttcttgaaaaatgatcaataaagaggaggaagtatttactcttaccaaatgagtttaatttaattaagccatagatatcagcgtgtataagctcaagcggctttgtggctcttgataatgactcattttaaaaaacttctttgggattgctttctaagcaaatatccttcataaagttgatctggttggttgaagcatatggaaggcctctcaccatctccttcttctctaagtgtttaagcccaccaaaattgagatgtccaaaccttagatgccaaatccatgataactcattgtagtagacctttaaacacttcagaatattgtgttgaatatttaagagaaaaattctattctttgacatgagaactttagcgatcaaattacttttatcatctcttaagaaaagattattttctgaatatcataatctttctcttgtaattgacccaaactcaaaatattat

SEQ ID NO: 72848 - DNA, 1126 bp, Cannabis sativa
  modified_base (1058)..(1059): a, c, t, g, unknown or other
ggaatctccgctgatactatctcatcaaaagattcgggtgcatgtaatctccaatcgctttgtaggataattaaaaaatgggcgtgtggtaggccccttttttggtgctcaataacatagacgtatgcggcaaccttgccgaatatttcacgtttaaataatttatcttttaattcttccagtttggcatggaatactcgagcaactaaatcgggtctattttgagcttcttcatgttggcttagttcattggtaatttctttccagtttgggttgcaagtcatcgttaaaaaaatgtccggttttccatatcgctgaaccaaagccatagcttccatgtatctctttctcatgtctcgtggacctccaataaaagaagagggcaatattatccttttgccaacattagaagcatctctttctccaagcgttactgtgtcaactatacctttatacaactcagaccgaatatgttgttgctcatttctgtaatagtctaatcttgatgtctcaatcttgacatacatatctacgacatattgttgtagcagtcgtcctgagagtagcaaaattgatcgtgcatcttctcttatttgtaacttgaagcaataatattcgcgacacgaaactactgcttcctttttttgtcggtttgatactacaggagttgagtgagaaggaagtgttactaaatatggtgtgcacagtgaataaaacattgatgagatttaaaattttacaatctaacctcgttcttcagcggcaagtaattcttctgcagtggttgactgttgaggatctattgttaggctacgaacattggatctggttgtgtgtcctccaattcgttttatgtgttgatgccaaccagaatctccgtgaggaaataaaattggatattgtaatggatcgtaacagtcgtagtaatattgaactttatgttttccaccataaatgatttatacacaaaaatgtcacgccctccttgttgatacccttcatcatctttcacccaaatttctgcaacttgtgaggatgtaggagcattgaatacacgnngatctagcccagcatcttctcttacttgaattatttgtgtttccaaatctggcaaatctccaagtga

SEQ ID NO: 72849 - DNA, 599 bp, Cannabis sativa
  modified_base (300)..(304): a, c, t, g, unknown or other
aaacgatgtttgtgttgatttggatgtgtttatgttagtttatgtgcatatttgatgattgtatgcaaattgcaatttacaatgttaaatatttttagttacattatgaaattatttttcctaaaaagtagataataaattaataatttaggctaatatagaacttaatttagattttttatgaattagttatgatttgaaaacaaaatatctaagggtgcatgcctacgtgcgcgcatggaggggacacgattgtgtcatgtgcagctcgctcagacaaaatcccttcagacaagggcnnnnntgaggcatcccccccacctgaccgagatcccttgcccatggaggttgcatgcagccttgtgtctcggccatatgcccactttcgcgcgtgtaggggtatgcattatacccctgtgataacttttgattcaaattccatgaaaattctcgcagactctcaactagagttcaggacttatattactcagatgatagaggaattgaaagacataaagattcaattaataaagttaaatgattcttcagtcattcaagagcgtggtaagcttcccgctcagcctctaatcactcccaaa

SEQ ID NO: 72850 - DNA, 2360 bp, Cannabis sativa
actgcctctaatctcgtttgcaagctgcataaatcgatttacggtttaaaacaatcttcacgacaatggtataccaagctttcagacgctcttatcatggaaggcttccaacaatctcaagccaattatactttattcactaaagggacaggaaatagcttcattgctctattggtttatgtcgacgacatcatcatagcaggccccaacaatgctctattgcaccaactacaagcttcacttcacaatcaatttaaattgaaggccctgggaccagtaaaatattttcttggcttcgaaatcgcacgatcatctgaaggcattttcttatctcagagaaaatatactttacaacttctcactgatactggctttacaggtagcaaacctgctaaaactcccatggatccaaggacaaaacttaatgacaatgaaggaacacctctagatgacccctctgcctatcgtcaacttgttggccgtttattgtacctcacattgtctaggcccgatatcacctatactgtaaatgcactgagccaatttatgtcagcccctcgtactcctcacatgcaggctattcaccacttactttggtaccttaagaggtgccttggacaaggcttactttacaactctacttcatcattgcaccttcggggattctcagactcggactgggcttcctatcctacaacacgtcgatcaacatcaggtttttacctcttcataggagactatttgatatcctagaaaaccaagaaacaaacaacaatttctcgcagtactgctgaagcaaagtatagagcactcgctcctgctagcagtgaagttacatgggtccaatacttgcttaacgacttacaaattcctaaaaaggctcctgcattcatctattgtgataatcagtccgccattcacatcgccaacaaccccacttttcacgaacgcaccaaacacatcgaattagacttccatttcatacgcgaaaagataaaggcctctgcaattcgactcattcctgtcaacactactctccaacttgcagatactttcactgaacctcttccatccacaattctttcttctcatatccgtaagatgtttgtatatgacatatacagtccatcttaagggggcaatattagaattataacagaattagcctactgccatcaactactgatagtttgttagttatagtttttaccgttaattcagttagtctattctgttacattagctatcttttagctgatttggtttttgtctaaatgtcggttacctccctgtatatatatcggtgttcttcttcaattgtattttcttcattcagtaaataaaaagtttttccattctctctctgtttcgtgttaatatatagtattaggaaagcagtaagatatacattactatttttctctgacatgtatatatcttaatactactagtagtatattataatacaatctactccaatagagtcaaataatagtgtttacccttggtaatgtcaatcaagaaagcttagttttttccaagattgtttttggaagatctttaccaaacaagacagtcaacttctatgattgatataatagaaatggatcaagtagtaattttattgtaaatatatagtaaggtttaggttcattgctttttactaaattacacactaaaatttattttagacgatatggtctgagtaagggatagtgactttaagaaggttatgaagtagagtgctataattcacttgctactagccaaaaggatagctagttctagtaattttagtggggttctggttgcttagttcttgttatttggtagattttgatcaatttgataattttctaataaaagttttattctggttttctgctatttttcaggtgtatttcaatgagctaggagtgttgtttaaagatattatagttttattgtctaaatttttaggggcagttttgtcccatgtggctcgctttgagaatataccgacccatggtttggcaaagcatgctctgcggttagacgatgagctatccttgttcgaggaggttctaacgccggtggcggacatctgcgtcgtaaattcataagtgattctaatcactttgtcaaaaaaatttaagattttatcaatagaggaatgaataaaaaaagtaaatttattatatatattcttgtaaacaatgttttatgagatttatttttgtttttgactttattttgtgatgttaaatgatattcatgtctttatttgatacactaatttctttatatattaaaagtgcctatctaacggaatttcttggtttaacagaatataccttaaaaataaagaatattctgttaaa

SEQ ID NO: 72851 - DNA, 817 bp, Cannabis sativa
ttggtgtaaaaatttcaaaaaaaatataaatttaaaattttaaagtatttatatacctgaaaatatttaaaagtaggtacaaattgttacatatttttagttgatatttattatgaaattcaaattatatatcataaatattttgaataatatttattatactcgattttgaaaattaaaaaaaaaaaatcaatcttgagactttgacaataagttaagacatcattcttgagagccccatagcacgtctaggagacacaaaaatattgaccaatgtcgggactcacacgcccaagtgtgcccatattggatttatgagctcgcgcgagcatttttaccctagagatatcaatccgacaaggaaatcaacaagaacttaacttatttaggcataaaaagacttcgacttgaacataaagtcaaaattgtacaagaatctcatacaacatagcctatgcgaccactgccacatgaagatggtagtgctctctagttttttggagagcactgccacaagaagatggcacctctcgccactcactaaataccaaaagagacttgtcaaaatgtgttccctcaacacccatgagtgcaacacaagtgaaagaaactatttttcaccaaggaacaagcctagccgaccactaccacctttgtggcacaaagagtggcagtggtcggccacatcaaatgcggatgggaatttttgccaaaagtactttttcatcatcaacatgtcaaaaccaagtgagaaaagccaccaagtggtatagaaactgttatacccaaaatttgaatcaactctaaagatataata

SEQ ID NO: 72852 - DNA, 957 bp, Cannabis sativa
  modified_base (891)..(926): a, c, t, g, unknown or other
ttttaattacatgggctgtcttaacagttgctaaaatgttataaaatacatttaattacattttttcagtgttattgtaaatgttttttcttgtagtgatattaggtaactttacttataaaagtgggtatattttaataaaatgtaatatgggactattttttattaatgaatacaaaaagagatattcctcaacttataccaaaaaatactatgtctatcagtcctcaaatcgtttttttttttcaagaactatcgttaataaaagtaagtatttaatattcccgacgatttaaaataactaaaaaattgaaaagaggaaattttaaaaaatttattcccaacggttgatgacgaaggtggacatcgatccgaatttcttttttgtgtgatggtttaaaccgtcgacaagtggtttagtatagccgatagtttaaaactgtcggcaatttcttttgaaaaaataatacacgactctaaacttttcagatctaaataatatggtgatatatatttttttctacataaaataatattaaaaacatcacacggaaagcatgcaagacgaattgacttatcaaaaattgattttaaaatgtatataacaccaaaatgttagtttcgaaatgtatataatccgcactcaataattaaaattttcctttaaaaagtaataattaaatatttcttttaaaaaaaaaaatcattaatcataatttatatgcataatgagttttaggtttaattaattaagatggtattaggttacaattttactttttaattttttgatagaaaaatgtcagtaaaatttttatttttaaaaatttaattttgaaaaactaaaatgtcactaccaaaaactggtacttttagtgacaactttttagnnnnnnnnnnnnnnnnnnnnnnnnnnnnnnnnnnnntagtcacaacaaaaaattatttatgactaaa

SEQ ID NO: 72853 - DNA, 1369 bp, Cannabis sativa
  modified_base (57)..(87): a, c, t, g, unknown or other
atcggatgtatggaatatacatcggaagggactgatattgaactttgattagatttnnnnnnnnnnnnnnnnnnnnnnnnnnnnnnnaatatcacctgttgatcctagatacccgcaaaaagacagaataaacatactatattataatatagtccataagcacattataccataaaattacgattttacccttctcgggttaaaattacaaaaatgtccatgacacacccacggtgtcataaaattcaataaatcataatagtttcacatattaaatcatataataatataatttctcattaatacataattaacctagttagagtttctaatcgagttattaaaccttagggtattacacctggtgctccaaagagtgttcttgaacaccaaagatccagcaacatgagtattctgacccaactcggaaggcccctaccaagttttagagataacaagtaagggatcctacaagttgggaaggtacaaagagaacatggtgttggttctcctaccaagatactggaatggagagcaccttcgcaagtactatcaacgatcaacttatagaatgctacccaacactagtagttctaccaactcttcattagtgttagattaaaagagctagttcccacagatttttggtgtggtcgcccatcgttcctcaacgatagcctctacttttcatgtcaaccaaggttagccaatttatatcaagaggcgatctttttattatgtaagcttgtagattcaatttatgtaagttgtacagcaacaaagaccaattaatgaataaaaaacaatgtttatgctcaaatatgttgggtctaaaccacttgctaacaagattaacttcttaaagtttattcttttttcagttccacatgcatacaacaggtagcaccctaagaaaattcataggcaaggtctatgaaacttggtaaattgtaagtgaccaagagactgtaagtctgcgtgctcacttgggggcacccaaaccgtacaatgtatcgaactagcacaaagaacttatgtagagaaattttaacacttaatataagctactaaacctgcctccaagtcaagtgcatgcatacttcaccttggcataaaaaaaaaagtaaatccaaatacttacatgtcaaggcagtaagaagatatccaggattaaagactgcctagtcggtcacatgtccataataaaaatttgtaaggctaaatagcattaattttaaaatacagagtgcctataggccaaaagtacgaacatgaaagccctaaggctgaacataagtagtgtttaaatgtaaaaggccaataggccatatagaacatgaaataaaatgtatatgctaataaaatcata

SEQ ID NO: 72854 - DNA, 676 bp, Cannabis sativa
tcaagtcatacatggtaaataacatattcctatgccatttacaaaccacatttttccaaagtgatattcatgcatcattcaagcaatccactaagtggcactaatcctattttttccaaaatcaagattagctactacttactaatggtgatcaagcaaaagtaagcaattgtacaataaacacacttgaacaaaaccaatttactaaaacatagcaataaaatatcaaatcacaattcaaattaataaaataattctagcaaaaaaaaaattaactcataatagattgtgcaaaaattacaaagtttaaaagaaaagagagatagaaataaaaacccatttgaagtttgtcacaactttttttttttccttcttttcttcatttttcttcttttcttcactgtcagccgcctcctctttcaaatcccattaacgcctccttttttgagtatatataacaatatataaactggacaaaaccctcctaacttggcccatgatctcttttcaccttttatacatttttttaacaaaaaggcctaataaagaaaaaaaaaaaaacaaattaatcacttgggcttcaatggactttaatatcattttttttttcaattttaacaataagcccaaaatatacatttaattttttttataaaaatacacaacattgagatta

SEQ ID NO: 72855 - DNA, 1051 bp, Cannabis sativa
actcaatttaaatgtgtttttaaaagtttcagatcaaacaatgctcccgaattaaagttcaccgatatgttcaacaaatttggtatcttgcatgaatttacttgtgtggaaactcctgaacaaaatgtcgttgctgaaagaaaacaccagcacctcttgaatgttgctagagccatttattttcaacccaacttgccaattactttttggacagattgtatattaactgttgtgttccttataaatcgtactcctactccgaatttgacaaataaaactccatatgaaatcctatttggtactactcctgattatacacaactaagaaactttggttgtcttgcatttgcctccactctcaaggcgcacagaactaaatttgatcctagagcacatacatgtgtttttcttggataccctcttggcataaaaggatataaactttatgatcttaacacaaaacagtttcttatttctaggaatgttgttttccatgaaaatgtttatccttttcataaattaaataatgacaacattggtatagatccttttgccaacatggtgttaccctcttctcacatctctcaaacttatgttactgattttgatttcccacatgttaataatgacagtgctatgcaggatcaatcatcaaatgacaattccacttatgatacaccagcagctcacatacatgaaccaactggtgtacctactgagttaccacatccggaggtgcccacaaatataccaactgaacaaatggacaaacctgctattgaagataacagtaacacaaatgataatggcaatcaaaatcctctaaggcggtctagcagaatccataaaccgccaacataccttcgtgattacgaatgtcactccataattcaggatcaatcctccacaccttatccccttcataaattcatgacatatactaatttatctgctgctaataaggcttttatttgtgcagtgcaagctcacttcgaacctcaacactacaaacaagccgtgctacacaaagtttggaatcaagcaatggcga

SEQ ID NO: 72856 - DNA, 1432 bp, Cannabis sativa
tcaatcaatctcatgtctatgcaaattttatataacaattcattttgtgtacaaatacatatatatatatatatatatatatgcaaatcccatttgaaatatttatttacacaccctacaggttttacttcactttacgtgagtaaatttgcttggactgcatcataatatttatttggccaaaatcaaaatgtatgtcgataattctcgacaaagttaataccataattattgttatctcatgttagtttattgcatatgcaaacattcaatatttattgtcgacaaaaattttattataatataatttcgttccatattacataatctctttaaattacatattttttttttttttttcaatatgtgtatcatttataggtacatatataaaaccacttcacggattcaattataatcaaatatgttatgtctaacttatttagggagtcttttatagagtaccgtttcaatcatgattattattttgaaattatgaatactttataatattaatatatatctctagatttaatggctatgatatgccaatgttatggtaatgacattattattttatagtatatatgagtatgttatgagtatgatatttaagttataatctctgtatatgtgtacggtgtgaacatatagtatggacctataataaaggttttcatgtgtaacattatttggttatggttataaaataaggtgtataatattgctaaaacttaattagtatattagacagggaagtgctactatgtatagtgactagggtgagttctggtatgtatactgtgagcgactacgaatgggcaaacgatctagaacgctgatggtactttagttttattttaagcagttgataattctaatcacagtgaaaatatattatttaaaattatttacttatcgtattttagtttataaataaaggatctttctctgttgcatttcgatttctaaaactcacttttgtatttcaagtatttttgaatcttttttaattatgtattaaatagtatttttgtaaagtaagataaaatattagagtattacatgttatacaattgatttatgctattctcatcttataatattatttttatttggtttttttttattttatttttacaaaataaattataactctacttttttagtaatattagatatgatattttttttttcaattattgtcattttttgtatggtgcgttaaatagaatagtaattatactttattttaaatacaatatgtgtttttagatatcaaataataataatatataaataaagagaaaaaaagtagaatattaattaaaaataaggataattccataaggtatcattttttgtaaaaaatttatatttttacgtttaatgatttttttttacatttttacggtttcccgtaaaaacaaca

SEQ ID NO: 72857 - DNA, 741 bp, Cannabis sativa
actataaattgatgtgtctctcttataattacttaatcaatattttattctcgccaatctagtttgctagtgtgacttaagaatctctgtccagatttctgagtccctaatcatgtaaaaatccttgttgcattatctttaatctattcttctttaagcttaagttctttattaattagttttcaaaaatctcgataaaagtactatataactacaatatattctaccgtataaaaaaacaattgattacaattttttatataacaaaaacgatgacacactttatgtttgggccatgcgcaaaggttgaaagggtgaggtggaatccgcaccacatgcatcatgatatgcttttagtgtagccaaaaaaaaacaattttttttaattttattttgtctccatctactttatttatgttggttttgcaataaattataatcaagtttttttttaatgaattaatgtcgtgtttgattggaaggaatagaaatataagaatgagaatgagaattggaataagaatacgaatggaatggaattaaatttaaaatgcataaaaaaaaaattaataagaaaattattaaattttttcttactatgcattagaatagtcttaaattttatttcaaaatgaatagtcattctaccaaaacaatagaaaggtcattccattgaaataacattctaacactttaatatacaaataaagattattttttttccttttcattctatttcat

SEQ ID NO: 72858 - DNA, 1088 bp, Cannabis sativa
ctacacttgagcttgttgcctatagttataattatttaaaatcgtgtacgttatagttatttaaaatcacctgtacgttttctaaaaatttacaaaacatacacgattatgaaaaaaaattagtcaaaataacttttttagatgtcaaaatagacatggagtctactaggacacccctgctttaggggtgcactcagagctgtaaatacgtatgtattgtactagcccgacccatatttttcttactttttttaaaatataggtcttgttgtgacaggccataaaaaaatatgggtcgttttatgccatacgaaaatatcgatcgtgccatgtcgtgcaacaattttataaggtaggtccgacacggtccgtaagcccagtaatttcgtgtcgtgttcagattcgtgttgtgttttattcgtgctgacccgttttcttaaatagacctacatgttttcttatacagctcaaattcatgctccatatttttgtatttttaatacaatttatgagctaattactacaatatatgtgtatttataattacttttatatttttttttttcataatagttacatacaatcatacaaaaaataattataaatataagaattttaatattaatatcattttaatattattatcaaattattgagctttttaatgtatcatattttcaaactaatttattcgtatttacatgtcatacttttagatttgtcttaccgtatcgtgcttaagctcatattttttatgacgtgttgtgctaattcacaacacaatatcctattatacataaatttatattttttcgtgtcatattgtgctaagctcataatttttatttatttatttttttttttgtatgggatcatactcgtatctcgcaagctcgtatcagtttcatcatgaaaaacccaagtcatatttacaccaattggtgcactaaagaaatttacaatgtaatttttttttgatgaaaagaaaaacaacaatgtattaatgaaaggagaagacataaaaagaagtgaaagaaagaaagagttgaacttgaaaaaaaaaaaaaaaaaaaaaaaaagattttgaa

SEQ ID NO: 72859 - DNA, 631 bp, Cannabis sativa
ggttttcagtttagtaaagtacatactgataccttgattatcctgccttagattcattaatccttttcttaggttgtttatatgtggaccattcttttgatgaaatcgaactttcaaatcttgccatatagcagcagccgattcatcataaagaatgctagaggatatttcctttgaaacagtttaggatccaagaaataacaatattgttgtttctaatccaagcattatacaaggtaagatcattaagagaaggtttagaaatcgaaccatccaagaacctgagtttgttcttgacagaaatagccaattgcatcgccttactccaggacatatagttgtcttgtccggttagcaattgagagactaacacgtttcctggattatcaccatgatgaagatagtatggattggaaggatcttccaggggatttctttgctgcattgtaggattgatgtttctttgatggcagtctagtttgagctatctccaatcgaagtgggactcgtctgatcgtcattagacatttcttgaaagagaaaggatcaaacaaagagtttgatcagaagaaaacagagaaaagaaagcacagagtagttgaagaaaacttagctctgggaacaagcacgc

SEQ ID NO: 72860 - DNA, 677 bp, Cannabis sativa
tgacaatctttgatagttgtacgatgacaacaattatatattaattttgttttattttagatcgaatgatggatggtcgatataaggacaatattgttacgatgccaacaatctaatactaaatttacttaaattcagatggaataatggttttccaatgaaagggcgataatggtaaaatagtgaatatcttgaacacaaattttatttacgtttaaaatttaacaatggggatgatagtttcctgatagtgttctgatagtggtatgataaactgaaactaataaatacacagttcatcataaatacattgttcttgtccaaaataaaaggcaatattgttgtaaaaaatacgtagttcatgttaagttttggtagaataaatctacacctaatttttctctaaatagattcatattgtcatcatttacaattgataatggtaggtctaaaattttatgctcgatatgctacattgcatacattttgaaatttccactctattactaagtaaacaataatttagtaaattatggtcaacattcatagaaattttaattaagttacttaaaaaatattttatcataaaagatggattattacctcgatttgtctatggttcaacctttttttcggggagttcctaataaattgtttgacttgactttcagatgttg

SEQ ID NO: 72861 - DNA, 1351 bp, Cannabis sativa
  modified_base (228)..(229): a, c, t, g, unknown or other
  modified_base (463)..(484): a, c, t, g, unknown or other
gaaaatcaaatttccctatttttttaatagtatttgagacttgtgaggactttattagtattatttttaggtagatttgtaaagtattttaattatgttaaaatgtattttgtgtaattttacattttttggtcgttagtattgaagaaaaatgaaacaaatcaattcgagaaaaaatgtgcaagaataattaattaaataaagtttcactacaaaaaatcttacttnnagtcacaacaaaacttgtgaccaaaaataaaaaagttatgacaaattattaattatcattcttatgttgagaccaaaaggtccgtgactaaacgtactagtcacaaaaattacaatttgttgtgactaaattgattgttgtgactaaaagtaaattatacaatttgtgtgtatatactatatttagtcacaagtagtttttttgttgtgaccaaaagtcacatttagtcacaannnnnnnnnnnnnnnnnnnnnnaattatcactaaaagtaactattttttgtggtgttttgtcgcaagctagaacaacatgaaaaaaaaattcaagaaagaaatctaaaaaaatctggtgcctatgttaaagaattagaaactgtccagtagtatccctaacaagctgactcatccttctttatacttaaacacacccaacatttgttatcatagcacttgtctatgttaacaatattgttgttacatgttcatggcaagtcaacaccttcatcacgaaactcaacaagactttctttccaaaggactgggacaactaaaattttttctaggcaatgaagtcttcagggacaacacataaatatatatatttgtcccagagcaaatatatagttgaacttctccaaataataaaaatggaaaataccaaaccaagtgtgaccccaattacagcaagaaagcctttctccataataaatggaacatcacttagagaaccaactatctacaggagtgtcataggagcactgcaatacttaagtcacactagggttgacatattgtttgctatcaataaactgaattaattcctcaaacaacctattgatgtgcactggtggaagtagccaaaagaatactcaggttcctcaaaggtacaatgcatcatgggttacatatacctccaagcactaatctagccttgattgtcttctctgatcagtactacaaatattagaattcgcgacggtcctaaaaacgattttttcagggaccgtcgttaagaaaattaagtaactatttaaaactgtagggaaaaatttagtattcccgtcggtttaaagtcgtagtaaacaaaagaggagacgttttttaataaaatgcgatttttaa

SEQ ID NO: 72862 - DNA, 1445 bp, Cannabis sativa
tcttttttttaacgccaatgactatcctttttattttttaaacggatctcttctaacgtcgttaacctattaatcttattaaagaaaaagttaaaacaaatttaaaaaaccaatcgacgaacgactctaaggtgagttcggaggtcaatcgttttgagtcgacttttgaagaattttactttcccaatcccaatctgaacgactctaaggtgaggtttgtgatgaagaagtgtcggaggtcaatcgaatgtggcttcacggttggagtcgacgattgaagaatttcactctcccaatcccaatctgaacgactctaaggccagctttgtgacgaagaagataaaaacttaagctttcttaattcttttcatggtgagagcttgaatagaggcccaattggggaaaatcgtttctgggttattgtttttttttaaaagatttgtgttttggggtcagagatttgtcgggggttttgaagggtttgatttcaatgttagttcaagatagagtagggcctaagtcttccaagcagacccagatcaagagtttgcccactcatcaccatccaggtagattatccgaacctaaaaacctagatttctcaacatgggtatctgagaatctctataaagtcgttcatgtttttgttctgatcagtactgttggcgctgtcttctttctccggaatgtcggtgacaccgcggcgcttctctgcttcgagaatcatgttgaagccttggagaagatcgaattccccaaagtgaattggaatcttcattaaacttgcttcttgtatttgggaataagtgaattctcctttaatattgtttttttatgttagtcttatgaacttgtcacataattctcttgaagttgaaataatctactcacatttaggatgaccatcttcattccagattatgataaaaactcttaagattaagattataataaatgatcttgcattttcatatccacacaagcagttgtgtgtagttacttgcggggaggatagggtcattaaggtttgttttattaatgtttgatgtgattggtgatgcatgatgcaattattaagcattcaagcttgtgcaggtctgggatgcagctactggggctaagcagtatacttttgagggtcatgaatcaattgtatattctgtgtgtccacattacaaggaaaatattcaggtgattttctttgcatttatcatatttgcttttgtgtcactgaatttacaagggaaaagacaaccctcttaagcagtgcattagtgcattgaaggcaaaagattagatttgttgtttttttttactttaaataaaatagataaaatattctgtatttttatttcattaaatgaagcaaaacaaatttcagcttctcagtctgttaacggaagtactatatatagagttagtattatttgttcatttgcatatat

SEQ ID NO: 72863 - DNA, 990 bp, Cannabis sativa
atacctgttaggatcagaaaagagagctgcatcggtattaattttgacttcccctgttgctggtttttgccaagaaagagcaccatcggctgctgacaagaatacagcagtgggaacctgagttttatcttgcgctttactccattgttccaacatactcgaagccaatatagtaacagctgccacactagcatttttttccttccagacacaatcatttctagccttccaaatagcccaacaagtcatggctatgatctttctttgatccccatcgaaagattgaaagctagcctcgatccatcccgtgaaggtgccactatgatccaagtcgacgccaagtcccgtattgacccaacaagcccgtgcaaaagaacaatccaccaatcgatgcagaattgtttcgttactagaggaacacacaggacaagtagcatcaatgttgacacgtttataccgaagcatagatttggtaggtagacagttggaagccgctctccacactaaatcttttactttcggaggaactttaaggcgccataacttaccccagaaatcagaccccaccagttgcaaatcatcttccttcctttgttgcaaatgccgatacatacttttcactgaaaagtttcctgagctctcaaaagaccagaaccaaacatcatcactacgacttgaatttaagggaatactcaagatgagttgagcatcccttgtattaaacagatctcgcaccaagtccacgtcccaggcaaaacaatcagtttccataagagcatcaacattatgatctaataaagcaggatgattcgaactaactctcggattctcatcacatggcagccaaggatccgaaagaatatgaattgttgacccatttccaacccgccgacgagcccccattctgaccatatcaactgtttcaaaaatacttcgccaaacaaaactaggattactacccagttctgctctcaagaagtccttccccgc

SEQ ID NO: 72864 - DNA, 754 bp, Cannabis sativa
attagagaaaaattacagttttacatacattgggtacttatgccgctaaaaataaacattgggattatgccacttacaaacttaaaattttgggtacttatgccgctattgacccatttctaaactattggttataaaattgtaaaaaccgaccataatcgaccgtttttcacccctagcttgggcactatttaatattattttaaaaaatatagagattaatttattattttataaaatagagttcaatttataattttttgtaaaacatagagtctaaaatattatttactattttaattaaaattcatttgtttttaaactacaacaaatcatcatttttttttatttaagtatgagtgtttattgtgcgagtggtgtaattttgaccaatttattagaaattaatatgtacgcaatttgaacaatttcttaaatgtaacgtattgcatagatctcaaaaccgcatcataaccatacacaaccaaattacaaaattaaataaaaaataaaggacatcaacacaaaatttatattttttgaatactacaatgccatttaaactctatttataaaattctaagctagctaccaacccacattgcactacctagttttggaaaaaaattcattttgctaaaactccacacttgcaaatattttaaaaggaaacttacaaaaatattagaatttgggttaacttttacaaaaatactgtcacacggacaagttttcgaaaatactatgtttttat

SEQ ID NO: 72865 - DNA, 1220 bp, Cannabis sativa
ctctctctctctctctctccaataaaggaaaaaagaaagctctcaattttccttgaacccgacgtcatgttaaatgtcaaaatattacatatttaatagtataaaaatacaaagttaaataaattttaaataatattttcaagaaattaatgcaatatattattatgttaaaaaatatttatttagatttaattttatcttcgtttataaataataaatagtatttgtgacataattaagaaagaaataaaaagataaaaaaatgaatattgtcttttacgaattataaataattacattttaaataaatattttcattgaaatcaatgtgatatatattatgtgtgatatattttatgtgtaaaatattttgtttaatttaattttgtttgtgtttgattaagaaaataacatttgtaaaaaaggaaaaaaaaaataacaaaaagatagcccaaaacatgaaaaattaccatttctgaaaggaaaaagtccatgaagagaaagcccaaaacgaggcccaaaatccttcatcaaggagacaaagctgccatgtggcagctccccattttttcagccattcgtggaccccatgccagcagcaccaacatgtgctttgtctcccttctcccttcatgcgcgtgtgagacgcatggcctcaccctggccgtgtggcccccgtcaattcctttgagtttcggccttgcgaccgtactccccaggcagagtagtcagaagtaaatttagacccctagctatagtacaaatgttggaatgaatcggtttaccaacattgatactttttcctgaacaaatgcagtgcaacagatacaattgctcaatattgatctccccttgttgtgaagaaggaagcaagttattaatcacaaatctgttccacatcttgcccaaataacttaaactagtatttttgatatgcgtcggagtaaccatatcctttcccatcatgtactgtgtacctggcttagtcaaatctctcagcattttatcatagtccttattctttagatcacgatggtacacatcgtcttcaatttctgaaagttcaaaatactcattaattactaaaagcgagaactgaactagcttttctcttaccaacacttgtgtaacgccctaagatttaggcacgctacccaatatgattaagaaaccctaatcccctaaacgggattggttttaaaataagcgcggaaattaaa

SEQ ID NO: 72866 - DNA, 581 bp, Cannabis sativa
actgcggaccgcctcattataatacttggcattgaacaattcccaaaactcttcccaggtcattgtagtgatgtctcgggtgagggataccaactcccacaacactagagcgtcctcctgaaactgaaatgtagtgcatgtcacccgatcattttcgacgactcccatgaaatttagaattctttctattacagtgagctactgctcgaccttcataacatttgggcctcccagaacgactggaggcacctgcttgccaaaacctctcatatagtggctccatacggttgccagcaacaggttgttctactggcactgctagaaccaaaacgactgacgcttgctacaaaggcactatagggggactctgctgtctcagcctttgaatttcttcgtcttgctagaggatttgagctttcatttccgcaaccctttgttcccaatcaggatgagcttgggtggattctcatgtctaccaccttgaaatcttccacggcctctactgcgtccatggggatttgggggattttgacctccctgaccgccttcggtcccaaccatgttaccctaactcctcgtat

SEQ ID NO: 72867 - DNA, 638 bp, Cannabis sativa
ttatggaggacgtcgaggaagtgagggtgtgcgacctcaactccactaaaattatcttcctaggaagaaacccagaacatgaggagcgtagtaagatcatagacacgttaaaggtagctacggatgtctttgcgtggtgacaaggggacatgactggaataagtcctcatgtaatcacccatgtcttgaatgtcaacctagatgtgccttcggtacaacaaaaaagatgtccacttgaccccgtaaaggccgatgccttagagaaagaggtggataagttactgttcaatggccttatccgggacgtgtattacccagagtggctggctaacccggtattggtaaaaaaaatgaaatgggacatggcaagtttgcatagacttcaccgatcttaacaaggcttgcccgaaggactgttacctcagattgattagatggtagatgccacctcgggtttcaagttgctatcctttatggacgcctactccaagtataatcaaattaaaatgcatgtcacagatcaagaatgtactagcttgaggactgacaagggggtatactgctacctagtcatgccctttgggttaaagaacgccggagcaacctagcaacacatggttaaccagatgtttaaaagc

SEQ ID NO: 72868 - DNA, 1159 bp, Cannabis sativa
aaattttatttatgtagtgatctacaagtaaaattatcaattcttttttatttttcttatcactattcttctcttttacaaacatgatatgctatgcatgtcatagtaattttaatatatactcttatttttcctttcattgtctatgaactttattattatattattctattgtattctttttgtaatttaattttgttgtgtagacaaatttttttatttttcaataaactatcacaaaataaaatataataaatatattaataataaaattacatatatagttatttttgaatttatattaaaaaactatctctataattttttttcttatacaatcatatctctaaattatttacattttaatttcaatttttgtttgattgttgtctattttatcatactttaaatatccataatattatatgtatgtatattttaactaattaagttaactcatttattttaaaatgtgatataattatatttatagatacaataagaggtgagaaaacattttatctttttcggattgttatttttttttttttggtgatattttaaaattcaggtattttagttatgcctttattttaattattaattatcagtattaataattattcacttaaaaatgagtgggcataataagaagatataataatttatataagatatttaataaatattatgtttttttagttttttttatcgtttaataatagtactcaatcataagattaatattttctccattttatttattcattacattatttttttttttaacttattctattattatttgtggtacatgtttctaattcattttgttgtcatttatgcctacgtttttttttttttgttattattaatagtaatttttttttcatttaataataagattatgaattattattcgtttttttattttctctccattctcatatttatttaatatttttgttattttcatcatcacaattaattgcaccaatatttttagttctcatagaaaatttaaaagacatcttgttattttttatttttagtgtgtacaatacaattatgtctcttgatgtatttaaatattatggattaagtatttaaatttatttagatatgttatggaatttcaaaagttattataaagaatata

SEQ ID NO: 72869 - DNA, 586 bp, Cannabis sativa
agagagtaaaaaaaggaaatttctatcgtttttgaaaattaaatgccttaatcaacaaggaaaacataataggaaaagccactgcaaagacaacatgaacaaaagcaactattccaagaaaatcatgtttatatccgaaaaatcgttctacaaattctttaacagtctcctctgtgccatcaaacttttctgttacatctccatattgtgataccaacatgccatacatagtccatgctacaggacatgtccaatagtaccacttccaccacacaggtatcctctgttatttttccaagaaaccaaacaagaaaattagctttaatcccatgtaaagaaaatgaaaattgaatttgttgaaataagtaagaaaacacttcatactgagtatgggatgatgaagccagaaaagaggttccacaatccataaaaggcagacgaaacagtggtggcgacatcaaggtctggtgttgcagccacaaccatcattccatagaatgtgaagtagaacattgcgaatgtggtaaagaatagataccataagaatttaccaacactccattcaaagccaatcattgcataaaca

SEQ ID NO: 72870 - DNA, 774 bp, Cannabis sativa
ttattagggtcaaaaattgaaatttccctactacaaaaggaaggctttattttttgattttttttttgctagtctatctttgtttgaagaaaatctcggtacggaaagtattaatgccaagatgttagttcccaaaacaccgaaatcataaaattctaaaatcaaacaattattttttaactttaaacccacttaattccacacttttatatgcaatctgattatctaaagtatacaataaaattaggaagagcactagctacatctgattatcaaaagtttcaaatcaactaaaaaaattcacacttctccttcacttaaatttgacatgatgttaagctcattaacggtcaatcactaataatataagctaatacaagaaaaaactatttaataaatttaaattttaataaaaccatttaaaaatgacatagagtgaatatattataaaaattattatattaaattatatgtaatatttaattacaatgacatttcatttaaaaaaaaattacaataacatttagaaagtaataaacacgagtaaataatagtatgtttaccattgaaaaaagaacgtagtcaatgacgtaatatttatatataatatatttatagccaataaattctcttatccacacacgtactcagatctagtcacacatcaaaatcgtacaattatcatcatataaatatctcccatatatttatacgaattacatctcaaaaattaataactactcttctctgccaaaacaaaaacacataaaaaag

SEQ ID NO: 72871 - DNA, 1238 bp, Cannabis sativa
gagaagttagaaggggagaaatttggataggtggagtaatactgacctctttgaggagcaggatatctgaagtttctgttgaagtgagcaacatttgcttcgagttgcagcatattttcagcagatcttggtgttgactcagtcacagcaagattaacatttagatccatttccttatcagatttctcgattcttgattctgaagctaagagcaaggcttctatctcagcaacagaatactcttcaatccgagtattagatgagattatgaacgtgtcataatcacttggcaatcctttaaaaattgctgcaatatgatctcgagcagataatgtttctccaacagaggcaagtaagtccacatgttgctttactttcaagagatactcatcaagagacaatgaacctttcttgagattttggagtttagttctgaactccagaatcttagaggagacttgtaaggtataatgtttttccaaagcgtaccaaatctgtctggcagtgttgcatccgaccattcgaatgagcaggctctcattcatggaagataaaagccaggagactaatagttgatcttgaatctcccaattcaagaactcgggattatacctttgtgctgcttgatctgcatcagaaagaaacttcgatggaggaggaacatcttgaatgaatcgttgaagttggtgtccacgaattgctgcaagaacttgctgtttccagagaaggaaattatgatcatttaacttcactgaaagtgtatgactgaaatacacagggcttcgtgtttgctctgtttctcgaggtcgattccatggatttgcagaagcattggtctgtgttgcctgaggatcggaggaggaggtattgcctccaccattaacagcaacattcgccattaatggaggaaaaggctctgataccatgttagacctagtgttttatctagacatgaagaagatgaaagagagaagaagaaagagagagaaagagtgagctgaaagaatagcttgattccaatagagagagttacagagctttatatacaagcaaaagcaatcaagaaacagttggaagaaactaacttaatctaaccaactgtataacagacagtaactaactctagcagaataacaaactatcctcctttataatgtctagtcctggaaaggagcattggaaagccatgaaatgtcttatgagatacttaaaaggtctaaattggccttggcttttga

SEQ ID NO: 72872 - DNA, 1155 bp, Cannabis sativa
  modified_base (1125)..(1128): a, c, t, g, unknown or other
aaagtttgaaagcatagcatcatagcgaatgatagttatttgagcgatccaccgagtgtgttgttatttagtatcacttgtaaattcttataaaatttcaaatagtttacagtgcaaaaaatataaatttcaaaatattttgctgcacatgtgattgttttatttatatatatatacgtgtggtaagcattgactttattttcgatactataaataaatttttctgaaaatttacaaatgatcttaaataactacaatgtatatgatcataaaaaaaatttaattaaaaaactcgagtctaccaaaatagcaatttagaaggatgtactacatctttttccactaaaagtttttatataatctagctataagaatatctccagccataataacatattgcgtcttgcaacactaactctctcaaattttaccacaacttgacttatttattgcaaccgaaacacaaaagtttactcattatattaatttttaaccaatagcaaaaatattcaaagtttgtttatcctaacatttatttatctatttttttttttcaaaaaaatacccaaataatatttaaatacaaatatattcatatttttatgataaaaaatattgaaagtattaaaatattacacgtttactactacatgattttattagaggaataatatgtataaatcactactacaaaaataatttttcttgacgtttttatatagtcgtttaaagtattactgtcagtttctatagtcgcgcctatacgaccgtcgggcaaaataggcaacagttaaaaatggtcgctaatgtggacttcccgacagtttaaatcgtgccctatactataagcgacgatttaaaacatatatttttttaaaataaataatttattttttaaataagattttagtaaaaagttatatgtatttgtacaatagtaaaagtaaaagtttaaatataaatataattttttttatattatttttctattatatattttatctattagatttgagttgaaaaatttaattttatgtgtatatgtgtatactatactagtgtatagttattattttataaaggctaattaggatttttttctcccgaattttgacatgtaccaannnntgccccctgaatttttttggtcgttaa

SEQ ID NO: 72873 - DNA, 627 bp, Cannabis sativa
atatcaaaatgatagtatttctctatcaaattttccatcccattttaggttggcagttgttcttttgggatcaattcaaatgtaattgttcatgaaacgtggacaatcccctcgttttatttaatcacatgtgggataatatctaatgactacatgaccactctttgtttttatcttttagacagttattgctaacttgaaagttggtttctcgcttgacatgaattgccctccttatccatcttagtaaggaaacaatgctaagtgttggcaggtagttcaccttgtcatctctcttcttttgagtcagtattgcgaggtgactgtctctctatatgtaaccggaggctgttgtatgtgattatatttattctgctcgagcggatgaatatcctcttttggtctatgtatatcgaggcaaatgtatgtctcttcaattattgattcaatagttttatccttgtttcggttaagactatgcagtcagcgagtttcgaatattatcaattaaatctttatataataacgagttatttaaacctgcttttaatgatataaactttattatatcattaaagttgattcatcttctatttgtaggacacatgtcagtttctgaagtgtagc

SEQ ID NO: 72874 - DNA, 607 bp, Cannabis sativa
  modified_base (557)..(581): a, c, t, g, unknown or other
taattttaagaaaaaaaaattgtaattaacagtgagtgaagaaaaatatccttataaaaataaatatataaaattaaaaaaccacaccacttaataataatattaaactaaaatagaaatatttatttcaatattgaaaaaatattctaaataattatttttatgaataaaaacttatctttattattattagattaaagggtgtcactgctacctgctaccttacgttatttttaggataagcttgaaacatagtttaaacaaaccactatatatgccaaagacaaactaccatacatagtacaaaacaagtcacaactaacataaaaataaggttatttggcggtgaaattcctttatgttttaattttatacacttaatctcttattttcttttttgtggaaatagtccattaattttatttttctttgtaaatttgagacgccaattaaatctcaccgttatatactaactagattgtcattgtgtatatgtaacatacttttattggctttgaagttttctatcatgtgttgttaggttatatttagcctannnnnnnnnnnnnnnnnnnnnnnnntttctcgtctattggtgtcttttgga

SEQ ID NO: 72875 - DNA, 649 bp, Cannabis sativa
atattccaaccatctgttctgtgattctttctgaagcagaagcaatatttacagcgctgaaggcttgcccgattgacagtagcagtttttttgagattagaactgatcgcaagaggctggtggacgaatttaaggaggaaggcagtaatctaagttatgttagcctagttttcaacaagataaagcgtcaccagcgtttcccattatgtacaaagctcaattttgtaaacagaattaataatgagattgctcatagtttagctaagagaagccttgagaacaaattaactcaatcttttctcaattcttttccttagtggttagctcctttttgtaaagctgatctctctcattctttgtagtgtttgaggctttgttaataaagattacttttcaaaaaaaaaaaaaaaaaaagaaaattggttaatcttaataaataaatgagattagattacaactgaaaaaatactaatgcatacaaatataatctctttttttatctagctagaaacagttgtatatatgttgttttcgaggattataatagtttttgtgtaaaaatgaacaacacctattgaattaaatctcatttacggttgattgtcagaaaatagttctttaacagttattttgatagataaaaatagtt

SEQ ID NO: 72876 - DNA, 703 bp, Cannabis sativa
tgaacccatgacaaaggagaatcgcagagtttctaaacttagggtttcctacatatcttctacagcaaagtcgaaggtgcattcaaaaagtaaacatgcaaatcaaacataaagggaatcgagaacttactgaaggatcaaatgtctggattcaggtaaagacaagccaaacaagcagttttgatgaaggcacttcagtaaacttgaagccaaaaacctttcctttcgctctgaacttgcttagcaaagaaggatggtgaaaatgtgtttgtgtacaaatgctcactggtatttacaggcaaacaatgaaaaggggtaatcatttcaaaagaacctcagatgcctcgattcccccttaagggaatatgggaattcaaaaataatcaagtgcagccgtcaacagtggtgagggaaaattgaatttcaaaatatctattgtcagagcatttattagtcgcaaaaccgaagggacacccagtcacctcacatcgagtcgcgaacagacgcacttgacacatgtcatccatccaaatgcaaaagcagcttggatgaagtctacacgcaactttgaaagtcccatacagacttgagggaaaatgttatcccaattgttgcactctgacgtggcatcgcttgatggtgacacgtggaatcgactccaagtatctgctcgcagaatatagtccgaacaggatgcctcgta

SEQ ID NO: 72877 - DNA, 812 bp, Cannabis sativa
  modified_base (491)..(505): a, c, t, g, unknown or other
tgacccgaaattggaaccggatctggaagcggaccattaaactctaaatcctaaaccttaaaccctaaattctaaactctttacactaacctctaaccctaagccctaagccctaaatactaaaccctatacccaaaccttgacatgggccaagacccatacccaaaccgagatcgtaacccaggaccaagacccagacccaaatccagacccaaacctagaccaaaactcaagacctaaacccggaccaaaacccagaccaaaacctcgtttgtgaccttggccttgactgggcctcagtttgggaccccgacatggacccaaatagggactttgactcattctggagccagacccaaacaaacacctgaacccgtattgggacctagactcgggacccaaacttgatgttcaaacccgaacctgaacttagacctagaccaggacctcagatctaaacctagaagggggacttgggccccaaacccgannnnnnnnnnnnnnnttgacaaaggatccggatcttgattgaggacttggactagaaactaggcatcataacagggatgaagacccaaaactcgaccccaaactcgagagacgggacctgaaccttgactcggaaacaaggacttgactattgggacaaaaccccgaactagaacaagaccaggacccgaaccaagacccagaccaaaaccagtcccaaacccaaactaggacccgaatccttgccctgtgaccaaaaatttgaaccgaaactggaagtaaaccgggactcgggaatgggactggaaccgtaaccagaactt

SEQ ID NO: 72878 - DNA, 676 bp, Cannabis sativa
tctaatttggttccccttcccatcccaattccattactttattacttcaacttgtttaattacgtgtgtgaccatcccatccaggttgatgcgcgcacatgtccatcgttttggtttattgggaaattgtatatatttatatattaataattaatcctaaaaagaataatatatataatatgattatcaaaatttagttattaaaacaatactaaaagaaaagagattccaaaagaagcaaaatgaaccatgcaataattcaattggcgaacattaatttataaatacatgatatgtatagttttggaagaaatatcatcataaccagaatcgattccccccattagctagattgatcaatgatcaatgcaatgtgtgagaatagaatatcattataaacagcaaaagaagtataaaaaacataacaatctaaactaaaaatatagttaacaatctaaatataacgtagtcaatttcatagtaaacatgttcctgtggatttatattgtatattgtgcaattgtggggaagagtcaatattacatgttttggttcaatgctcctttgctcattcgtgttggctcagatctgcgttaggtattggttattctgcagaaaccaatttttttgattggtttatggaagtgttggcagtaggcaatatggggttggttga

SEQ ID NO: 72879 - DNA, 800 bp, Cannabis sativa
atatttacaagttatctgatccacgtgtcccatttcgactggtccacgtattttgggcgatttcaggggcaacattactatttttgcccttggagttaattttgccttaaaaaaaagcttaattgtctttaattatactagaaaaattaacaaatcattaatgacaaataataattaaatatttgttaatcatcaaaacaatgaagcttaagagtttgggtcaacaatctccccatttttatgatatcaaatatttaattattttgaaagggaaaaggaataaaattgaaacactatatagattagctccccctcatgtgcaagggttaaaaaaattaaaaagtttacctttagttttcccttgtatgattttaaactctctctcaatttattacttatattcaaatagcattagaagtctaaaaattgagttgttgcaaaaaaaaaaaataataataataatcactatggaatttctcccccttttaattcatgaaaaaaagatggcaaaagaattcataaaataaatggcaaacaacatgaataaaaaaatcataacacactattcatttgaaacatagaaccataaacagatatttaagttcaaacacacataccatccaaacataaaaagggaatacaaataactaaaacataacacactaacacatagaaagtcaagcatactaagcaaaaaaatgaacacgaagaatgatgctaaaacatgatgcaagggactaagatggtgggggtccaaagcagtccatgtaagctttctattgtgtcattttgccttggat

SEQ ID NO: 72880 - DNA, 1526 bp, Cannabis sativa
gtccttgtctcgggtcttggcgttgtctgggtttgggtcacaatttggttctcaggtctcaggtccgagtattgggtcccgtatcccagtctcggtccttagtcccagtcccagtcccagcctaggtcctagccctagtccatgtttaggtctcgatcgttgtcctggtctgggtcccagtccagatctcggtcctggtccaagtgtcgggttccagtacgagtccgcgtttgggtttgggtctgggtttgggtcttggtttcagtccgttttagggtccgggtcttggtctggatctgggtctgggtctgtgttcttgtatgggtctgggttcttgtcaaggtctcaggtcacgggtcctcggttctgggttcttggtcgcaggtcctaatgcatgtatgggtccagctatcgatcccaattggggatcgggtctgtgatcggttctgcgtctatatccgtttttgggtcaacgtccaattcctgttccaaggtcttcattccggttcttgttctaatttcgggtcgcgagcccgagtttgagtttgggtcctagtctagaaattactccaggtttgggtctttgtacgattccaagatctagaccccgactacgggttttgtctaggccacggttgtgagtcatgatctatatcccaatcttgggtcccggtctcatttcgattcggatcctaaatcctggtctgtgttcgtgtccgggtttgggtctaggattgagaccggggtcgggtcttggattacagtcccagttgagtttgggcccccaatctttgtcgggctcgtgggtccaggtcttagtcaccaatctcggttcgggtcttggatttgggactgggtccaagtccgtgtctgagttcgggtttgtgtcccaagtcgtcgttattatctgagttttgattcggggggttcgtgtcccggtccagatctgggtctgggtcctagtcagattccggttcctggactcaaacctagacttggactcggacccaggtctggggtacgggtctgggtcagggtcttcgtccgagtacgggtctgggtttgagtttgggtataggtcccagatccaaacactaactacgggttaggtccaagcctcgggtccagatttgggtcacggtctctggtccctatctagttccactttacgccaggtctcggtccgggtcctaggtcagggtccgggtctgggtggggtcgtgggtctcaatcctagttgtcatgcccgtgtcccgggtccaagtcccccatccaagtccgagtcctaggtctcgatctgagtccaggaccaagtcggggttcaagtcttgctccgagtttgggttcaggatctgatctaggtctgggtccgcatctaggtttgagtctaggtctaggttcgggtccgagtctcgagttttgagttctgatctgggtctcagatctgaggcccatgtcgaagtccccaatccaggtccgggtcctaggtcccgatttgggtccatgttcgggtttgggtcctagtc

SEQ ID NO: 72881 - DNA, 1485 bp, Cannabis sativa
  modified_base (1034)..(1044): a, c, t, g, unknown or other
tcatcttatatttgcaatgtgagactaactctaatagtcacaaaagtgacatgagccatcaaataaaaaattttcaaacttttacacatatataaacacatataaaactttcaaaaattttaaacttttatatatatatactaggcgtggagtacgtgccacaggcacgtaacccccatcaaaatctatgagttatagtcatatatcttactttcatcaattatatttaagcaaatattaaaaaaaaaattatatttaaacaagcacatagtttagtatagattcacttattgaagctaagatcaccaatcgtcatgcctaaatataagttcatatgatttgctctactattatctactaataagcaaagtgttgcctttgattttttcccaaatacgtggacacagataaaggtgacacgtggacctggaagaaccatcactcatgagaatatactaagtcttagacaaaaaaggaacacctcagggaaggtgcctcccagaggagagcataaggcacatctttactctcggggaggctagaaccatgctaaggtagtttcaggaggtatagagattacttgaacaatcacttcgcatttaatgtcgcatggaggaagacgtattgaaacctccataaacgacatgacagatggtgtaagctcccttttacggcgatcacactacaatcgatgagtctagtgacggctacattatgaggaatcacatcagtcaagaagggataaaagattatatccacctaactcctaagatacctatggtatagtgcatgtatttcctattttgtatctgctggggatatgagcccctatgaagctaacacagaaagacaagtgatccattcctagggattcccctaggaaaactctataaataccccacaaacagattgaaaaggggtcgaacaatttggttttaaggaatcaaagagagaaaataggagagaaatccaccaagaacattctctgtaataaatattctcattaatacaaaagactcgtggactaaggctcnnnnnnnnnnnaaccacgtaaaaatctcctgcattaaactttctacagctcttcttatacattatttaattggttgccaaaaacctcggtcaacacaaagtttataagaaagaaaaaaataataaataacaaaaagttataagaaaaataaataataacacaaaaaagattactataatatatatgctcgtataatttttttacactattatatatttactaatgaacaaatataaaaaaaaaacatttaaaaaaaaaagcagaacaaaattgaaaaaaaaaaataggagaaaaagatagttaaaaaatgtagaaaaagtttaaaaatattttaaaagagaaaatgaagtaaaaaaaaaataagagagattttttaagaaaaaaaaggacaaaaacattaataaatggtacagataaaataaaacacgtaactccaaatatgactaaaaaaa

SEQ ID NO: 72882 - DNA, 780 bp, Cannabis sativa
ttaatcaaagggtttataaaaaaatgtgctaagttaaaaaaaaaatcaatcaaagttacactttaataaatacatatatttttacataattttcgaatcccgttaaaagtttacaataatattcaaaatatgttttatacaaaaggtgtcgcccaatgactacaaaatatgagcccatatcgtccaaaagaaccgaacactccagcttaactatcttgatacgtgcaatcaccccaagctctagactcattgttgctcagccttcacctttcctttacctgcacatgaaactataagaaaagcataaaatatataaacatttaactaacttgcaaagaggcacccatacacctacctacaaggcttaatagatgaatcaagaacgttctcatgaaagtgcatcctctatgccacatgcattaagtatctttctaatactagtgttggtagggtttgctcctactccaaatataactaatcgttatagcacatacactctctactcgtccctactagtgttggtaacgctacgttataccccttaataatatattgtaccaatgcactccgtacctcaaccgtactagtattggtagtatataatcatagaaactaacatgtataacacatgcatatttatacatatcttatactaatcttaccttgtttctagattcaaaggtatcgatcaagctaaatagaaatatcgcttctgaacggaggccctatgtcacattacgtaaaacgagtaaatatattgctaaaatgtttttggtgact

SEQ ID NO: 72883 - DNA, 1140 bp, Cannabis sativa
agttcggggggaaaaattgctaattagcctatttataaatataattaaaaattaaaaaataagaaaattaaggagagaacagagaaatagttttgcaacaattttagagcaccacgtcaccgcttcatacttctcctttatatattctgtatcatataaaataaaaaatcaatacatatagaattaataattgttaattaaaataaaaatcaataacttaaagtgagtggagtaataagttatcaaaaggaataaataaccatatacacatattgaaaaagtctaaattgaaattctaaaattaaacaaaaaaaaaatgaagttgtttcttaccttttttttaaatacaaaacttcttatgtttgttgaagagccatcacccatattagtttttaggcattagttttgaatgaaaaaaaaaaaaactaaaaaagaattatcacccaaatcaaacctttggcattaatgctgaaagaaaaaaatatagaaaacatgagacattaataaaaaaaaaataacaataaaaataatattagtatggaataatttattagggttaggcttatatatagatataggtgagctatcacttgtattagtatttagtcattagtaaagaaaagtgaggactttctatgacttgctcgagaagggtgagatcggtgttgtggtgcaaaaagagtaaatataaggtattttgtcatgattttcttattcggcaatcattttaggtttccgcattcggctcttgagcttcgatattgaattttctgagaataaatttcccctattcaattgtgaatataaattgatgtactattgcatcttatagaaactggtgattgctttgctttgcataaaaaaaataaagaaaatatgaggttagtaaaaagtaaatatatatagaataagaagtatatatatataacattagaggtaggtttagtaaaaaattaaaatacgtgtggctattattcttttagttattattatattattatttatatgtgggtattaattatggatatttatttgttgtttaatatttatatataaataaataagtatatatgtttaaatatttataaatttaattaaaaatttaaaaaaaaaaaataagagaattaaggagagaaaaga

SEQ ID NO: 72884 - DNA, 1204 bp, Cannabis sativa
  modified_base (27)..(44): a, c, t, g, unknown or other
  modified_base (1032)..(1035): a, c, t, g, unknown or other
taggatgttaatcaaacatacttggtnnnnnnnnnnnnnnnnnntaaaataatttccaacagttatttaggtgaacaatcatcttgatgccatggaggaggtacatcaagagatgtccaagcagctatccaccttgataaagctttacggggcataagtgtttctttctttttcttttgtttgttggacatattttcatatctatttgtctttggcccttagataaacaaaaaaggggagtaatcatttgtttttaatttcttgttttctcaactctggaccccttttccaggaggagttgagactggtacttgcgattaactttggattaaatgtttgtctgttatttcggttttatgttgtgtttctcagggggagttttgtttggtttggctaactttgttttgcaggtacttttctgttaaaaaatattttgattatctaaagtgccaaagggggagattgtaaagttcttttttggcaatttagatgccaaaatattttttatttatggtgtaatttgttggcttttataaaatcgattttctcaccttatttgttgtttttattgctcttttctatcataggaaagattctatttcagctggccttttcttagtttggaaacttcttgtaagagaagaaattctcttatggaaagtttgctttttatggaaacttttactattcttattttccttattgagttcgattgtgtcttgataagatcagatcaaacacactgtgtttggcaggtatcaagaccaaatacatgatcagacacgtttttggcaagtttccttttctggtctggtttgctgcagcagaacctgtctctgttgctgcaaatcaggattatgtttaggaaagttttgtacagttgttgattaaactttgtcgctaactctagggtttctatgttctataaatagaacctagagagtagccattcgaatcatctcttctacctttcatcttttgcatttttctcatttgtgaagagagaaagttctttttgtgagaacctagttnnnnatctaggttctagtgttttcatatatgttcttactctatcttagggtaggttagaacaacttgattgaacaagagagaggtcatcgggaggaagtaagcactcacacttcaaagatgaagggagttcgctgtttgaatgtaacacccgaactagcataggcgtattacg

SEQ ID NO: 72885 - DNA, 992 bp, Cannabis sativa
  modified_base (664)..(664): a, c, t, g, unknown or other
  modified_base (856)..(858): a, c, t, g, unknown or other
tgtagatcgtattgttcgtgaattagggggcctccgtgagcctgctggctcttttccagagcgatgagtagtttcttcaggatgagtattgtcgttttccccattatcagccatggagaaaaatttccttttgtttaggatggatttttctaatcttttttcacgtaggctcaatgaaagcaccaaactgttaacactgattttcgttaaggataataagcctattttcgtgataggattagcagataaattatcataaatttaagaaagaataataaagtagaaataacaccaggtttttttacgtagttttgtacttaactctgcatagtccacgagtcaatcttattaagacttttctgatacacaactagggctccgtacaacaatcagagtaatatactctaattgtacagaaccctcgttgtgtatcagaaaagtcttaataagattgactcgtggactatgcagagttaactacaaaatcacgtaaaaaacctggtgttatttctactttattattctttcttaaatttctaataatttatgttcctatcacgaaaataggcttattatcgagaacaaaaatcactgttaacattattcatcgttctaattccaataatcaaagatcctttaaagatgatttacatcgagtaggganaaatttaccgtttcacccctaaatgtatcttatccttaaatcacttagattcttataaatgatattttataaactaatataattactgaaataagagctcttccatttatctctattaagccaagctcgaaggaaattgtcatttgacttctatgtctagattgaagttatagattccatatctatgactannnctcccactcaattgtactattatgttctcaagatgtaagtgttcacctgtatgggcttcaacgaacaagtcaaagaacataaataacactcttaagatcgaacctaactatatcaagattaagatcttttgatc

SEQ ID NO: 72886 - DNA, 665 bp, Cannabis sativa
  modified_base (26)..(40): a, c, t, g, unknown or other
aatcactgaaatagtaaaattgaatnnnnnnnnnnnnnnntccttaaatctaacaatctcaacaattcagcgggcatttttaacgacaataaaagttcgggggcatgatttggtacatgtcaaaattcagggagcaaaaatcctaattagcctaaatttagtatttgatgaatattaaagacataaaattttagatacctttacctattaaaaataatttaagtaatttataaaatgtaataataatttaagtatttcagtgataaaagataatttaaatagactaattaagatttttgtccctaaattttaacatgtaccaaatcatgcatctaaatttgtatgatcgttaaaaaaatttgctgaactattaagattgttagatttaatttcatttaattttactatttcagtgattgtttatgtactaaattttgctccttagattttgatattattatgctcctcaaattttaacatgtattaaatcattcccctaaactttaattcttaaatgcaacaatatcaatagttcagaatatatttttaactaccttaaaaatttgatacatgtcgagtgttaaaaaatactaattagatattataatatcaaatactacaaatatatatatatactaaaaaaaagttacgtgcaaggcacgtat

SEQ ID NO: 72887 - DNA, 846 bp, Cannabis sativa
atgacatagactaaatatatgcattatcccatatgaatttaagttatgtgacccaaaaagtccttttcatgtcacttagggggtaccaaggcataaaatatgtgcagaaataggctagataaacaaggagagaagaagaaaaatagatataaacttacaataaaagttgtccaaaatgtaaaaaaaaaaaaaggcctgggatgggccataatagtctctgcttacctaaaataaagagtaaatgcaagaaataaaaagtgtcttaagtagggtgaagtaggggaaatgtataaagaaaggcttgattaatcaattcgtggaggaagacggggacccctacgctcaacgctcaaccagaacgacttctagttttttattcttctcctaaaactgggctataacagcctcaggattggggaagaagtgaaggcgaggttcgaacttattggccttccagcacatacacgctccatcttcaaagcacttttcatagtgcttgcaagtaactggagctagtaaagcatccctctcggccttggcagcctttttacgagttttgtcccagaactcacgaagctcctttagttcaatagtcagattagtcgttgtctccaagtcagtctgatgcagcacctccaaagattgaagcttcataaggagctcatggttctcctctctggagtcccgaaggttcttctcgctcgaggcgataatgtcatccttcactttcagagctgcctgatgattttgctctacaagggccttctcctcttgggcttcattgcgaagggcttccatttggtcctctcagacacgatgaatccttgatcaatcaaagtcttggaa

SEQ ID NO: 72888 - DNA, 1053 bp, Cannabis sativa
aatattatatatataacaatatatcacgtaccgaagccattgcattcttgaccaacttaatatcatcgaaactaacgacccgaaaaatgattcggcgaggattatgctcacaccccggaagccctcttagtggtgtgtgagtgtctttcaagaacagagcagtggccacaaacaatacgaaatcaacaaaagtgttccaaaacagcttcaagatccaccaaagcccaagaaagcagtagtagatcgataactttgagataaaacgattgttatgatcgtaagtgtttattattttcttggtgggaagtgttggtacggcctctggcttttcgatttggcgtgtacaagccaagagaagggacattagtgatatgccgtcccccagtgagtggtggattctgaaaatgataactccttcggcgttgcttgtcttcaggtttaacacgtggacatcccacggtggttttgacctgtccaggaggagattgtttttcgtgaggctataaatgtaattttcaaggaacttgtcaggacttataacctcctccatgtttgggtcgatgttgggtactattatgtgcttgtctagatcaacttttgttactaccggaaaaaaatcacctgtccccaatatgctgtctccaccctgtcctaccaattaattacaactacctcattaatttaatttaattatttaataaaaaattatattaaccttaacagctaaattaacagagttggtattctctctccacattaatagctaacttttctcttaacagagttagtattctctctccacattaatagctaacttttctctttccatgaatataaaaagttttttttttaaaaaacaaatcttttattaattaacttttcctaaattaacattatgtatagttatatgagtacatataattatttatatttacactgttaaatttctttaaggatattaattaattttaaacagacttatatacatatatactaatattacgaatttaatatacttatatgtttatataaatttcatctttagtttttttt

SEQ ID NO: 72889 - DNA, 1131 bp, Cannabis sativa
tggttaagagtgatatcatggccaattatacttttgggtgctattgatgttgtcataacggcatgaacatagtgtcaatttcgcagtgcaatcatagtgatgatagtggatgatattatggtcagtagcaccaattgttaagaacgttcttactcatttgttatgtcttgtatgggcacctagatacaagtcgatattatatgatttgttatatgtttttcttactgagtctatcgactcagagttgctatttcaatgtgtaggtaaaggaaaggaaaaggctgaacaggaatgagcttcgagctaggatggtgtttgtacatgtcatggtgacacgacctggagtgttcggtctcgggacatctggggttttattttgtagtcgttgtgcgaccaaactaaatattttttgattatattgtaaaagtttcaatacgggatcccgaattttgtaaataaatatttaaagtttataaagtttaacaattaaatctaagttttagtttgacacaattttcaagaaaatcctttgattagcaaaggtggcactgtagtcgaaaaatcaatatagcacgcctaattatcagggtgttacaattttggtatcagattcgccaggtttgtttaccaaagatcattaagacatgtacaatcattatcagagaaaagcttggctcacggttcagtaagcctttacttgtttagtattgtatgtgattattaaagcatgttaggaagcatagtagtttgtaattgtttattttaatgcgttgccataaaatccataaagagcggtattaagtttttgagatcgttgtctgacctgcctgacttatgggttcgcaggctaagtcctattaaatggacgtccagcaaagtacaaggagtcatagtaatagggtcgagactggaggcggtcagggaaatcaaattccttagaatccccgtgcacgtgttaaatgttgtggaaggttttagggaggtcgacatgaaaacccacctcaagctcctccagatttggagcagagatttgcgaaaataccagatcatatttaccaacaagacgaagaaattctgagattaaggcagcagggtcctcttgcagcttctacaccacaagttcaggctgct

SEQ ID NO: 72890 - DNA, 610 bp, Cannabis sativa
tgcacagtatgtttaaaaatcatgtaatacgcctatgctagttagggtgttacaggcttggtgtttgacggcttggtcttcgacatttggttgataatggctgtgtgaatctgatttttttttttaggttatttgttataagtttacactgtgatactttgaatatgatttgggtttatttcattctaaatgaatactgtatcaataagctaatctgggtttcttttatttgtgtctttgtaatttttaataaaaaatgttaggagtttgtattaaggctcatataatttgtaatttcagtttaaaattttgtttataaattgtattacattttgttaataatttcaataaatataaatattttgtattttgttattttattttttagttttattattttaggtgaaattaattgtagtaatgcactgaattaaaattattattattatatttaattataattaatatttataatatataaaatctaaattaaaagaattaaatatatttttttaagatatatctaatatagtggcacttttggtgtgttactatatctctaaaaatattaataaaaaagaaaaaaaaaagaaaaataggatatagtgac

SEQ ID NO: 72891 - DNA, 607 bp, Cannabis sativa
aagaacgttggtgacttctagtaagtgatttccgttctcccgattgagtcccaagatcctcctcattttcatgagggatttttcgttcatcagtttccagttgtctcccatctagctactcgtcctgatttttagggggtgtctcattctccctaggttgttcttcctgggtcttttcctgtctcctggttcttgagccacgaggtctaccttgttgtcttctcactgcaggttaaggttgattttgagtattcgtcccctgggccgccttggccgaggctacctcacgctctaactcagtgtttcgatgctgcgcctctttcagacggcgtctcaggcggtggctttttatttcataagttccttctcccatagattggcacctctacgattgaactcttcatccctcgaccagggattctgaacattcccacgcagagctctcctcaagcgtgttgttcacgtactaggaccaatgtcaggtcgagttctctgagaacgtgtggtccgcgcactaaggccaccctcaggttgagccctcttggaacgggtggtccttcaggactacgggttggtagatcttgtggagtccatgggctcttttcca

SEQ ID NO: 72892 - DNA, 739 bp, Cannabis sativa
cctgacaatcttggccctatgtcacaacaacggtaaactgataagtgtctattccaaaacattatctaatactcgtataaaacaatctaagattttctaccaaacctcgtggtaaaaataccctagaacaaaatacatattttttctctaatttatatatcatactatacagctcttcacaagatttaaaacagtataaagaacgtctaaaacggacatccaagtgaaatgttatgaccaaaatacaaaaattggcgtttcccaaagattgaccaaatggaattttggttggtaccatctagaattttggttctggacagtttgaaatacgacttttctcaacttaaaaacctccaaaaaattttccaatcaaagccaaatgctacaaaactctccagaacatctataaggaccataatgaacatatttcatcaagcaacaacaagcataacttaaagaatcacaagtttccattgctgagccaaatttgagttcatgaactcaaacttgctcaactctcaactcagccacctaaaaccaatctaataggtcttaaacaactctaaaatagtccaggaaacattccaaaccagcaaaagatcgtacaaaggctactacacaaaaaacacatagccaacctaaactttttgttaggctttgtgccctaaataaaactctattttaatgtaatcttttatattcatttatcaataaagaaacagatttattttcattactt

SEQ ID NO: 72893 - DNA, 761 bp, Cannabis sativa
atgctaccatacaaagatatgattctatacatatatatatattttaatttagttaataattaataaggaaaattaattgctaatcataataatgtaaatggcaatgcctatattagtatagtttactattataaatttataattgacaccgatcattgctgaattgtaaatttttttagagctgggttttggtatataggactgaactagattagactcataaattatccaacctatgtttgtctaggatcatttatcccatttaacaatgtgggataaataattccatacagatataattgttatattaaatataatatgtagattaaaatgtggtgatatatatattattatgtgaataatatatattaagtgtttggtaaataaattgtgtaacatataatttatttaacctaaaattataacctacactttgtaatatgcctagagtagttgcaagattaactatttttgtaacttcttttggttgatcatattttgtgtaataaaagagatgttacacaattgatgatgaaattcaaatgttatgaaatatagttgttacaaactatattaatactcatttatatatgagacaaatgacgcgttgtgtatttgaattctaagtgatcacctatacattataaaaggaggtctttggtgctcatttaaaagtgagaaatgaagttttctatcaagaaagcgcattgctagaaaaccttaaggcttgataatttccaaagctatttccatgagagttc

SEQ ID NO: 72894 - DNA, 1773 bp, Cannabis sativa
atcaagaaaaatgatagcaattagcattaacaattgggtaaatacatcaacaggattctcttccctattttatcatcttaattgaatctttcgctgttaattttagctttttgatactaatgttttgtgttttaatcataaaaattattggtttgccaaatagagtcataaatttaatctagtggtattcagtccaattccctatggttcgacctcacctttgtgagtttactacttgaatacgtgcacttgcgtattattcataattttcataacaagtgtttggcactgttgctggggaattgtttaaagattgatattgcataagattacattaaattctactttggttactttttcttgctgattgctaacctttttctttcaacattgtcttagtctatttcaggaatttaaggtgtatgcgacgacaaggacagagtattagactaccggttgatcctaaaatttagaaaaattgtagaagaaatagaagaaacaaaaggcacaaaagagtttcagtaacagctggaacagaagaaatcatggctgataatgctaatggcggcaacaacggtaataacggaggtgccgttgaagatcaggcaaatggtcgtagtctaagagactacattcttccaactctgatgggggtccagtcttgtataagaccacccaccgtagatgccaacaacttcgaaataaagactgccatactccaaatggtgcagtcttcagtccaatttggtggactcccctctgaagaccccaatttgcacttgtctaatttcatggagttatgcagactttcaaggtaaatggagtcagtgatgatgccatccgcttaagacttttcccattaaaattggttgatctccttgccaccgaactctattgcaacatggatcgatttggcaacaaagtttttgtccaagttctttcctccagcaaagcctactaagctgggaggagaatttaataatttctgtcagctggacaatgaatctcttcatgaggcttgggagaggttcaaggatctcatcaagaaatgtccacatcatggtattgaaaagtggattttggtccataacttctacaacggactgattggtaataccagaatgattatagatgccgcagctggtggggcatttatgagaaaaagtacaaacgaagcttatgatttgctagaagaaatagccatgaataataatggcaacctaaaagaagtcaaacgaagaaggtggctggtattcatgaggtagatgccatcaccaaactgacagcccaagtagaggccctcacaaaactgatagttgtgcaggcaaaacaggctcaagttatttgtgagctttgtgggggccctcacacctatgatgaatgcccgatagatgtgaataatttgccaatggatgaagcaaaagccatcgggaattactctcaaaataacaactttgggtacaatcaaagtaatacccggaattaagaaaaaggattagcaaaaccctaattagataattacgaataattaaggaattatattattatatagttcaatatatttgaaattatatgaaatttaacatgttaagaccccgttggtgagctaggggtattttggtaattatgacccgagagggttaaattgatgaaactaatttaattacgtgcttaatagaactatattattatatagtatccctgtgttgtctttaaaggtgtgttctgacaggttggagcgatatagtcacaaccgggaatttcgggccgaac

SEQ ID NO: 72895 - DNA, 586 bp, Cannabis sativa
tgagtataaaatacatattacatacagttcttttctttgtagatttataatttttgtttggttttttctgtttattttacttgtaaatgttttatagctaattatttatttaaagaagaagttagtagattttattttatttctatttcgaaaacaaaaaacacattagatttcttaatatatacttgtttctccttacaaatgtatacatattttatacttttttttaaagggtaattaattttatactttaaatatataaataataaaatatatatcattgtcaaagatcaataattgagacacaaaaattacaaataataaataattagtctctcagacaatatctaacctactcaattaacttatataccttaaattatatttattggaattatttactgtggggccgactctttctaccctagagtataaggaatttttttccaccagttatcaagcatgatttggagtttcactttaatacaatgcatttcattgtaggaaattcttttatttattttattatattaataaatttttgtttactactcttttaaagtttttttttaataaataaattgtt

SEQ ID NO: 72896 - DNA, 981 bp, Cannabis sativa
acattttgataatggtaatgagatattttattttaaaagctaaccatgcaagaatttaattaaaccaagggtcttttgatattagttgttttcttaccaggctttataagctagcctcctattttctcccattctaagaactcagcttgatgctagtggatgaggatggtatcgttgaggaagcaagtcgttattcgtttagtcttatacttcttattaaacttccaatgaaaagaatttagtatttaagtttgcattgattgtctggataaaattaaattagctgtgtgctagttagaaataaagaatgatggatgctaaatataatttttgtattttattgacctattaaatctatctatttggtgactacatatacggtggggatattattattcttttgtattaatgagtgaacgtgattttattactaatattttcttatcggtatgagagttactcctttattgttaaataagtattttgtgatataaattaaatgataatttataagtgttatcttcttatttgactacccaagttatgaatattatatatctgccacgacttagggtttgggttgtgacaaggtaagaggtgctcttatgacccaagcgttcctcataacatctttaaaccactcgagcttgatagttctaggagtaagaacccaaaaaacaatacattaggctttgtttttgtgatcaagaatagggttatcttcaatgaattcatggataacatattcatttttagtaaggaataaactttgaaggtagaccaggagcagtgttactaatcgagggatgtaagggtaaggatctataagaaattcgaaattttaaatagaaaagaaaggagatattcctcataagaaagatcttgtagtaactagtagaagcttgtagtaggcgaatccaaccgtcccttcaatcatttaagaaaagattcacgaatcctagccataatcatcattctcat

SEQ ID NO: 72897 - DNA, 778 bp, Cannabis sativa
tggtgtggtgtggacgtgtggtgtgctaaactttgttattgctactctcaagtcaatatacatttatatatttgtatttaaataacccctaagattaaaattaataaagatttttattcattaatattatgaattataaaattgaaaaagcgaaaaaaaaaattgtttaattaagcctattattaattaaaagtatacaagtaacattaataattaatcatttcaattcttgtatttttctattcatagttatttattattgttgttaattatatactattaagccagaagattcacaatatattttttattttcataaaagtcttacttatatgtatattggtcaatgtcgtgggcaagatagagaagttaattaaggtcaaaaaaaattccacagcacatggtctcacgtgctttgatgctacatatacagtcaaagtcttataattgaaatattttatatgttaattgatcttatgtcggaatcgaagtaatgcccttctagatatggataattatagtccaaaaattttatcatttgggatcttaacttacttaatatatgtataaaaaggaaaactataagatatatatttataattcatataacataagcttttgtataaataaagctatcactttcactgggaaaaaagaacttggctgtagtgtagaagatttactgattattacgtatggttggtagtctcatgaagcttccctagtcaatattagcaccgaataaatattcaaggtgtgttctagaaaataaataatt

SEQ ID NO: 72898 - DNA, 1026 bp, Cannabis sativa
gtcaatcatctattccttttgtttaatgttcttttaaaacaccttaagttgttaactagttggttttacatttattttaatttgtaatccatgtggagacgatactcacttatcattacattacttgttatcgattgcatgtacttgcgtataaatattaattttcacaacaagtttttggcgttgttgtcggggattgaaattaaaaattgtgtattattaactatttttcaatttatttttggtttgaggttctaacctcgcttggttacgctgtatttttctttttcaagtgtaatctagtgcatgaacgagcaagaagaagactttgagcttgctcctattgacccctaaactggatgcacttttagacaaaggagaaaggaacaaacggctaaaaaatgctgcaatatggtcgaagggtttgaagttgagggtgcctataatagtgccaatcctattgatttggctgatatagagcccgaacaataagagagtatgcaacccctatgttcaacgagcttaatctgggtattgtgagacccaaaatccaagcacctcactttgagctcaagcctgtcatgttttaaatgctccaaacagttggtcaatttagtgggcagccaacggaagatcctcacctccatattcgctcatttttggaggtgagtgattctttcaagctataaggagtgagtgaagaggctttaaggttgaagttgttcccattttctttgagggatcgagttagaccatggctcaatacccttctccctaattcagtgaaaacttggaatgacttcgctgaaaagttcttgagaaagtatttttctccaacaagaaatgcaaagtttcgaagtgagatcatgtccttttcgcaattggaagatgagaccactggtgaagcatgggaaatattcaagtagttgttgaggaagtttccatgccatgggattcctcattgtatccaactaaagacattttacaatggtctcaatgctgcctctaggatggtgttggacgctt

SEQ ID NO: 72899 - DNA, 729 bp, Cannabis sativa
tctctcttttttttttttgagaaatagaactgttattataaaataagtgagtcttttacaacaacagaaagaatagccgagggaaagtcctcaagccatgtacaaacattatccaacactagagcttgtttagccaaaccgtgagcggcttggttaccatcacgataaacatgattaacacaaactgtagggagataggataattcagtttgaacatcaaatattaaatcttgaaaagatgaacgatttgatgctgttttgcggagagcattggcaaggattaaagaatccgtttctaccatatccaccttaaaattgagttgtcttgcccatttgagactataaaaaagtcccttagcttccatctcttgtggtagacagcagccattaattgggtgagacattgcagccttgacattgccatttgaatccctgattatagcaccaaaaccaattttattagcttcatcaaaggcggcatcaacattcaatttcaggcaggtgggaggaggaggcgaccaagctttcgaaatggatggtgtagcaggcggtgacaaaccagcaggaagagataactgctgtgtagacttataattgtttagaaaattctgagcttttgcagaaataacagtcggctgttgaggggatttaccatgaatgacattgtttcgatcagaccaaatagaccacattgtgcaaaagatcgtttccaactcagatttggtataa

SEQ ID NO: 72900 - DNA, 600 bp, Cannabis sativa
agtttttttttacttcagctcaaaatgctaggattccatttataggatttggacaatgagagttgatgtcataactgtcttaacagaatgttagttatgacaattttgacatgttcgagctgttttttagcaaagttcaaagaatgagggaaaatcaaatctgaggccaaacataacaggctacaataacctcattttgtttacctctaagactaattgaagaggattgtaaatttttaattccttggagttttttatgttgcctcatcaaagtttcatttgagaaacatatccgacttatatgagttaagaaacaaaaaactaaaaaaaaaaatcaattgagatttacaagtaataatccaatacgaataacaattgaacttttcaacaacatagacatggcgatgagaccatcccctttgaataatcttcatgagatgtttgccttcgaatcatctccaaaaatagcgaaacccaatccaactcacaatcgcaaagacggacatacattttttattggtcgcataatttaaattgcttatttttttttattaagagtgcaaaagatcttctatttctcctttgcaaaaacaattgcct

SEQ ID NO: 72901 - DNA, 711 bp, Cannabis sativa
ctttctaacggtataaagatcatcaaaatcggagtaataacctaggacttatgcatattttattaaaacagtttctttcaaatcttggatcatacgatttctgaatacagcccaaaaataaaagttttaaaaatagttacaccccaattctgacaacactttcttcatacaaaatgtagctattttcttaatctttaaaactagataaagatcttttaaaatggaccaaaattgagagagataatgaatttttactaaagacattatttctgaaacaaaacttaaaacgagatatcctaaccgagtgaagataccgacttttgataggtaataactaaaattttcttcaaagaaaatatgtattattgaattatctttccaacggtaccagaaactctggaaaataataaatatcgagagagatatcgcacttttactgaggcaatattggaaggaaatttgaaaaactttaattcgacagcccgcatgaaaacatgaattttttgacatcaaaataatcagaataaaggaagagtctcttcatgaaaaaatatagatcattaaattatcttcaaaaaggtacctagatcattgaaaacggacctagggagagagatatggtagtttataaaagccaatttctctgaaaacgaaaataaaaacacaaatacaaattttacctgaggattttgaagacacggaacgatgatc

SEQ ID NO: 72902 - DNA, 694 bp, Cannabis sativa
aatttgaaaacctaaccaattcgattccaatccttaccaaaccttccagacctgcatattataccccaatagacatattcaaagcaataaaacaactacagaagctcagaatcaactttcaccattaaagagccaaacttgagttctaaaactcaaagcttgctcaaacctactaacagccaccaaaacaagcttaattcaacatatctaaacatatttaacttcagaaacacaaatttaaacacccacagcaacaacagcagcaaaaaccactaaacatgcaaaatccactttcttaaaattcaagaaactaaagaggaggatgctagaaacttacctaaagcttgagatcacctaacacttgctgggaatcagaggaaatactgaagaaaacaccaaccctagcaaccctaggaattttgagagagggagagttgaaagagcgagagtgttcttgcttttttcatgtattttccaatttttgtataaatgaataaaaggtttgttttattaaaaatatatcagcattaaacattaataaaaatctaattataaccttaacataaacccacaaaagacaaaatacaaacgagcaaaaagaccattttgcccttcccatactaaaagtcataaaatgtcacttaggggtattttggtcacttctaaagtttcgactactcccgacattcccaat

SEQ ID NO: 72903 - DNA, 1335 bp, Cannabis sativa
cattgttggagaagactgtcatctcatggctgctctaacttttccttgcccttacctacaccacagagcactcgtgactcacaaagactcagcaagaaaagtaataaataagaatacatgtcatttcactattatagaatgattaaacaatagcattcaagagtggataatataaccaaccatatgcatggaaataaaaatgattataaattgcattgcataatcaggcaagcccatatcataatttaatatcatacataatatcactagatcaccttattaagtgagcccgtgccacaacatggcaccaatgtatcacatcgcctaatcagacgagcttgtgccatagcctggcactaacatgtcactgtcgcccgtaccttatcaggtattgccgacaagttgacacccataaacagttttagtctatgccctaacctagtattctcatatcactgctacccatactaaattaggtatcaccgataggtatatcgtatcacttaatcaggtgagcccgtatatcacatccatagtatcatcacattgtcattgcctaatcaaataatcaacaattacaaaacctgtcatgtcatgtggtacattataattttcttacctcaagttttggtttaagtatgttggccgaccttcttggagaatgattgacgatctcgggccctatgttataacaatagtaaacaaataagtgtctatcccatatcacagcttaatagttgcaaaggataacctaggatttcctacaaaatcatgtggtataaatacactaaaattaaacttatattttttctataaaacatacaccatattgtacagttcgttgcaagcttctaaacggtatatagaacatccaaaatggacacctcattgaaaggttatgacaaaaatatgatttccgatctccctagagtttccaaaaagagcaggccgttttgataaaaatggccgactgttttttggcacactaatctcaaatttttcactctctgaaacactatcgaaacctatctaaatcattccgaacatcacaggacacatatatacaacaatccttacgtaacagaaattaaaattaagcccttaaatggaaaatatcattaacgtttggacttaagttttaaaaagttccaaacttaatttctaactcaaaatcaccttaaattcaacaagtaaacatcaaaatttgtcccatagctacccaagaacaattctataaagtcagaatctctataactattataaatcacaaagtcactatataaaaccaatctcaaaatgacatgtcacacagtaactacaaaatgaagcccaatt

SEQ ID NO: 72904 - DNA, 1090 bp, Cannabis sativa
ggcttttgggagaactttggggtcaagtttttgtatcccacgggttttcagccatacctactcgccactattttatgccacaacgcctttggttccaaagggaatctccacagccatttcatgagcatggctttgtttctcaatgccgaacttccaatacccaaacctccatcttcctgtttcctacatacgtttcctacatggctttgtttctcaatgccaaacttccaatacccaagccttcctcttcccgtttcctacatacattcctatgagactaagtgttctccacctgaagactcgctaccttcccagaaaaaatctctcatcgtcttctttaataattttattacgccctttggagctttgaataaagataagaaataaattgggagagaggataacacagactaaataaatgtcaacctacctccacccatctaatctcgtagcacacttatctaagattggtccccaaaagcaccacttcctaggcgatccacccaatggcatccctagatatttcatagttaactcccagcctcacagccaatcggcaatgcgtgatgtaacacaaccctctcatccatacatattcccaacaactgaattttcttcagatttactttcaagccagaaatatcacaaaaagcttccactaacctttccattttcagcaatgagtcctcaatgttaacaaacaagagagtgtcgtctgcatattgaaaatgattgacttgtatcttgtcttttccaaccacaaagcccgaaaaattacctaatgctactgctttttccatcattctcccaaggacatcaacgaccaatgaaaacaggaaagggaatagtggatctccttgtttgaggccccgataacaaataaattacccccttggtcttccattgatgaaaactgagaaggacgttgacgagatgcaacctttaatccatttcctccatgtaactcgaaacccttcattgaaaaagaatagagatccacttgtccaggatcctccttgttatttattagaaagcctcgcttatggcggagaaaaaccatggttataattgacatcacacaaaaagtcct

SEQ ID NO: 72905 - DNA, 582 bp, Cannabis sativa
gttcttctattacctgcacactatacaatacaatccggaacagaattatcggtctaactgaagattgagaaacaatctaagctggggtaagtagcaaaataaaaacaacataaaactaaatgtaaagtagaaacaaatcaaaacctgcaatgtagcagtgacatcatacttgggaagcatcctggtacaaagattaaagtgtaaaacaacattgttctatgcaaattcataattttcatcaataacaaggggttttttttttttaccaattacctgatatctttcatagacagcattttggggttttctaccaaaccagatactgaaacagaatatctgcttaaacaaacatgataccaaaatcaggtatatgaacaggcatcaattcaatttgaaaataaaaagaaaataaagattgaacctttcaatgtcatcaacaacaggaattgggccatgatttctcttgtagaacaaatcaacgggagtgacataggatcgaaacaaagccgaacgaggtggctctgcattgaaaggctcctgtacccaagaaaagaaaaggagtaagcttttgttcagctccaa

SEQ ID NO: 72906 - DNA, 1349 bp, Cannabis sativa
tgcaatggcaactatcctgctgaagtggttgaagctttagggatcaaggaagctctcagttagataaagaacaaggcatggaataatgctgagcttgagtctggcaatcttttatctgtgcaagcaataaaaaacaaccaaaatatgtcttctacttttggtattattatagacgattgtcgtttgttattatctcttttaaaggatgttaagttacgttttgtaaaacgatcagcaaatcgagttacccatgctattgcaaggcactcttaatttattcctggtggttgcatcttagagcaagatatctagcccgatttgagggatatcttgttttctgaatgctcttaattaaatgaagttgatatttcattcaaaaaaaaattggtgatcaggcaattaaaagtaattaagtacgaatgaaatagaatacatagaagttgagggaaaataaatcatattaaaaccataattaaatatcaagcaatctccatctaaaccctaatgaactgtttagctactcatgttcatggtagcaaattcacacattaattttagaaaagagaagaaaatagagaggaaaagaatgttgaaaaccctctgaagaacgcctccagtattgaatttgatctcccaaattcgtactcctttgaatgcttctgatttccacctgaattgcttctgaaatccactgaagttcacttcttatatagccaatgggagatagaaaagatagcataagatagcacatgcagaaaacctattcaacttcgaattagataggacagatgagcccacgttgaaaagtcctatttctctttgaattgggggtgggttgcggcatgccctttctacgccacgacccgtgttggcttttccacacaacttcagactcttcaggacacgggtcgtggcatgctcttttccatgttgcgacatggtcctcatcttgtgcacacttatctttttatgtgatctttaatcttctttttttctcatatttttcctttgatattttctaatcttttctactttaaatttgcgaaaataaaagataaaaagcgtaaaattgctccgaactcgagtaaacctaaataaaaaatatactaaaattaatctaaaaataatactaaaaacaccctaacaagggttgacacccatgacacctcgaggctgtcaacatccgtgttagaccctttgagtactcgtccaggagctgcctgtgccaacctcctcaattaggccccttcaagtccaagaagggtaaatcttaccttacacctctaggaggctagggcacgatcaaataggctcccacacactcttccatcccgagttgttccaagcct

SEQ ID NO: 72907 - DNA, 1818 bp, Cannabis sativa
tgcagcaatcaactgcaggaaatcatcaaaattggccaaatccaaaactccaaacatgttgtttcggtttgcccatcgagccacagaatgggccacaccattacacgaatgaggggtccagatgacctcgtgaaggttgaatttcgccaagagatcgatgaacttctttaccttgtcttgaatgttgaagtgcagcttttggacatcagaatccctgcttttcattgcgctgactgcattcagcgaatcactctggaagatgacatttctgaagccgaggtttatggctgctgccgcaccttcgcatatagcttcgacctcccctggcagcgggtcactgaagtgtgatttgaacgttgagatgccgaggatagttccataagcgtctctaaatacagctgcccccgtagactgagattgaccaatggccacatcagaattacaagcaatccacccttccggaggtggagtccactcagtattaagagggtcggtgcactcctgaatagagtccaactcccacagcctgctatttatatggtcaattcgcactttcaaagggataggttgttttccgtggaggattgagtttctctctttccaaataacttcaaagataagagcagcccctcctaggaatcgattgagagtcatagcatttggtctgttatctcgctcaataaaccattgcatccactcctcccaatttgaaataaaaggaatagatgttctaatattccaggaacaaccaaaccatatagctctagccagagtacactcccaaaataagtggaaactactttcctcggaggatgaacaattcacacaagttatatcagtgattggaaagagggatccgatcttacctttggttgggaggcaattggataggattctccaccacagaaatttcaatcggttgtgaatttttgcaccccatatgattctccatttcctatccaagtttgcactcggatcatgattcgatagcagtctgcaggcagacttaatagagaactgaccgttctgttccggaagccaaagccaggaatcattggtagagctttcaggcagggagatgttgagaattctcttagcgtcatcccttgtgaaccatttccgaactagctcctcgttccattgttggttcgagataaagttacttaccaaactcactccttccgaggcatcaaggcagggcattggttgtctattctctccgggaacccaaggatcgaaccatatggaagttgcattcccattaccgattttccgacaaattcctttttgcaattcaccgcgtatgcgaagaatggccttccagagtgttgtatcggaggccttaatctccatgtcaaagaagccttcgctcttcatgtatttgtctttcataagatgactccacaaggatcggtctgagtttagaattttccaagcccacttcataaggaacgccttgttcatattctccgttgttcgaaaccccaaacccccattagtttttggtttgcaaagacgctcccaggctatcgtatggagtttacgcttgtcttcagtgtcgccccaccaaaagtctctcaaaagtttgtcgatcttgttggcagtagttacgggaataacatcagatgaagccacataatttgccaaactcgaacctactgtcttgatcaaacaactctttccaacatttgatagaagcttcactttccatccttgtattctttgcatcactcgatcaaccaaatgtttagtatcctctgtcctcttggttgatcggaaaagagggagtcccaggtaggtggccgatcggttcattct

SEQ ID NO: 72908 - DNA, 886 bp, Cannabis sativa
caattatttaaaatgtaccagtgcgccttgttatactcatgaggttctaaattgcgaaattcccttccaccaaataaccttgtaggttgatcaaaaacagacaacgttgattcattttgtgcctcactgagatcccaattacactctggacgattgaattttgtttcaatcccgtgaagataaatcaaacaaaaagttaaggcctccttaccaacatatcctacaacaattgaaccttctgatcgtgctctattcttaactaaattttttagagaacctaagaacctaaaaaattaaaattcatcattagaaaaatattcttaatttttaaaataagatggataaaattttattttaaaaaataattagtattttacctttcaataggatacatccatcttgtatgtaccggaccacctaactttgcctctgaaggtaagtgcactgctaagtggatcatgacatcaaaaaacgctggaggaaaaatgaattcgagtttacataagcacttcacaattcctttctctagtgaatccaagtcttcaacatgtaatgtttttgcgcacaactttcgaaaaaataatgagagctcggaaatggcaagtatcacatcctttttcacgtatggtcgcaacccaactggtaataatctttacagaaagacatggcaatcatgactttttaagccaataattttacctttacttatattgacattccttgaaatgtttgcggcatacccatctggaaatttgactgaccctaaccacttacaaaatttacttcggtcaactaatggcaatgtgtaacatgcttgtggtttaaaccatttatctccttgtttcttgaagtgtaattctttgcgtatgttcatcctttgtaagtc

SEQ ID NO: 72909 - DNA, 1377 bp, Cannabis sativa
  modified_base (206)..(208): a, c, t, g, unknown or other
ttccgaataaccttatcctttctgtcaaggatttgaactagctgttcttcataagacatgtctggttgcagctcaagattttcataactaagcacatgagcaggatcatcaaacgtattttctcaagatagagacatggaatacgttgtgaactactgaaagagctggaggcaacgctaatcgatatgccacttgtccaaccttcnnnagaatctcgaaaggtcctgtaagcctaaggcataacttgcctcttttcctaaaatgcttgatccctttcatcgatgagactcaaaggaatacatgatcccctacttgaaattctacatctctgcgtcggatttgcataactcttttgcctgctctaaaaagcaagcattcttgctttaatcttctcaattgcttcattagtctgttgcactgattccggacctaaatacttcctttcccctgtctcatcccagtgaatgggagatctacattttctgccatataacagttcatagggagccatccctatcgtactttggtagttgttattgtatgaaaactctatcaacggtaagtacttactccaagagccttcaaaatccataacacaggctcgtaacatatcttccagtatctaaatcatcctttcggactgtccatcagtttgaggatggaaagctgtattgaattttagcttggtacccatagcccattgtaaactttgccaaaactttgaagtaaacttcggatctctatctgaaactatggattttggcacaccatgtagtcttacaatctctttaacgtacagatcttcatgctgatccactgagaaggttgtcttaactggtagaaaatgagcagacttcgtaaatcgatctaccacaacccaaattgaatcaaataaacctgtggttctaggtaatccaaccacaaagtccattgtgatatcttcccacttccactcaggtagggttaaagggtgcaacaaccctgcttgtctttgatgttcagccttaatctactgacaagttaggcatcttgatatgaattctaccacattcttcttcattccgatccaccaaatgtagggtttaagatcttgatacatcttggtggtgtcgaattgcatggaatatggagtggtatgagcctcttcaagaatttcatttctaagttccacactattaggaacacagaccctggtcttaaacaacaacattccactatctgacactgtaaagtctttagcttgaccagctgaaacctcttctctgacttttactatctctcgatcagttagctgagcagctttaatacgttctaacagatcagattgcagcgtcaagttatgaagtttgcctacaacaaactcgatgcttgatctga

SEQ ID NO: 72910 - DNA, 1020 bp, Cannabis sativa
tcaaatgatgttgactgctgaagttcaccttgtcaccaagaactgcgattgtcagatggagcgttatgtcttcaataacagaaatgacagaatttacattgtcaacctcgtaaaagacatgggaaaagctccagcttactatcagggttattattgctatctcagcgagataccctttgcagcatactaaatccacgtcagcattgacctagtaaaagcgaataaatcatagctgtgtgatattcaaataaaacccatatttattttacgtgggatgtcatcaaatcccataatttcagggaaatattgttgtgggatatgaatctgattgtaattaaatgccttcttatgtaactataaataggggtaaaatgtactgaaagagggacaaaaaatccttgagagaaaagccctagttttgtattagagaaatctaataagatagactcgtggactatgcagaattttaacagcaaaaccacgtaaaaaacttggtgtgatctttgcattattcttcttatttttattatttctgtgcaaataaatcacgaaatagactttattcatttttaacaaaaatctgctttgccataaaaaatatggatcgtcccatacgtgcctatatttttaaagggtaggttcgatatttttaaattttactttactcactactacaaaattgggcattagatacagtttttaaggcctcttagcatcagttttggtaaaattcgctaccgacgatattccaggcaacgctataggggttaaaaacaactgactttgtagggatcctatggattctgttattataaccgaatcgttagggtctctatgatgtcggttattatgaaataacagactccataataatcgacttcgtagggatcctatggagtcagttattataaaataatcgactccataaggacttcttatgattttctttagctttaaaattttgtgttttgacatatttttttaaaaaattttatgaaaaatctaattttatttttttca

SEQ ID NO: 72911 - DNA, 607 bp, Cannabis sativa
agaggactactgaatgattccagaatggttagtgttgaggaacaactagcaatttttatatttacattagctcataatgagcggaatagagtagtacaaaatcgttttcaacatcctggagaaactatcagtcgtcattttaacaaatatttgcaagcatgtgtaagactagaaaaactttatctcactctagcaggtagaggtgttcgacaagagatatcctccaatcaattattttatccttggtttaaggttagttttcttttaaaatactaatatgttatttggaattatatatattttattaggattgtgttggagcaatagatggaactcatatccctgcatgggttccagtaggagatcaacaaggatatagaaatcgtaaagggtttctttcccaaaatgttcttgctgtggttgtttttgatatgaattttcaatatgtgttagctggttgggagggatctgcctctgattcaagagtcttaagaaatgctatttgggaaagacaacaaaataagctaaaagttccaaatggtatttatttgttatagtgtaggcatgataatttgtttcttataatgttcatgaatctaatgaatat

SEQ ID NO: 72912 - DNA, 734 bp, Cannabis sativa
acatatatttaattagtttcttgaatgtatatgcgtaaatcttctacaaatcactgtccacaaacaaaacaaaattctcatgaatcatcatagttgaacaaatttaattcacatgtcttacaatataaaataagtgagctctaaattactttttactgagcccaaggagaaacaaggagaagtgacataagggaatatgaacatgtatagccttccaaaaaataagtttatagcgtggttaaatgtgtggaggatgcataatagagactgattatatttctttgatgttataatagtgaaagaatgcttgatctgtggggctcatgaagaaagtcgtgatcagagctcggaacagaatcttttgagaaaccataaatgcaactatctctagaatcaaagatgagattttcacaaaatcattttctttgtagcagaaaattatatctgtaaattgaataaaaaaatatacttgagacttctgatttaaagtaacacaaacttccttatttatataaaaaaacattatcactattcctagttcattgtccatagtaatatactatgggcacaaaaattagactcttgaaatataaaatatggttgaaattactgccaacaaaattaaaataagacgaatagcaaaatttcaactaaagatgaacaatattatgcattgtaggcaggttttgatgaagttataaagttcaactagcctttaatattaactcaagaaa

SEQ ID NO: 72913 - DNA, 758 bp, Cannabis sativa
ttcttggtcatctttcggtcatttacttttcctctactagtgttcttcttctcattcccatctacatgagcctcagtttgcaaggctgctgtcacacactcagtcaggttgttaaaggtaaatggggctattgggccacgtatcgcaggcctcaaacgacgcatgaactgttcgatcaccaagggtttgtcaacaacaccaagatatgcataagaggatagctctacaaacttcatgtaaaactctttcacagtcatatttcctgtgagatggactaaaattttgctcccagaaaacttcctcaaaatctcgcaaagtcatcccatcagtttccattgtcctggacaaggtctccaaccaatctgttgcactaacctctaacttggacataacaaaagtaacttgatattcctcaggtgttcctatatattgtattgaaatttatctttatctgcctcaaccacctttcagctaccatgggatcttgtccaccatcaaacttaggcacttggatccaatgaaagattagaaaatgatgactctgtcgagcagtaggatccatctgttaagcgggaactgctcttaaggcttcgagaagggcgttcatagggaactcagcttgtggaggttggacattagcgtgaggggcatcttctgcaaccgttctccttgtctccggtctaagacaaaagctaatcagttatcgaggattaaatgccaataatataaatatgtcttatacatataaataccaagat

SEQ ID NO: 72914 - DNA, 906 bp, Cannabis sativa
tattgaagcgatgaccattgattatatacccatcatgcttaacaaccatgtgtgaaggcccctctgaaatccatattaggttctctgacacattttttgagggatctttcatatcaagatggactttttctttgaaccaactcttgaatgttttatggtgttcattgcgaatccatttttctcttcttgaagaatattgttgagtcaaccatgctaaatgctcccttcaataaaaacatgacaaaataagccatagttacatgaaaaaagaaaaaagaaaacatttataaagtattattgaactcactcgatgtatggttgtactccaattgtattttctaatacatttcgatgtgctagttctaaatctttttcttcaacattctcgaaacgaccgcaagagatacccttactttcttcttttggatcttggcgaggctttggaattccaatggtttctacatttgcaatatattcagagcaaaactcaacagattcttcagctatgtagctctccacaatgcttgcctctgggcgataacgatttctaacatatccctttaaaatcttcatgtatctttcaaaaggatacatccaacgtaagtaaactggtccacaaagttttacttcccgcacaaggtgcactgttaaatggatcatgatatcaaaaaatgtaggaggaaaatatttctcaaacatacacaatgtctttccaatttcatcttgcagcttgtccaacttcgatggatccacagttttagcacaaacagcattaaagaaaaaacacatccttgttactgcatatcttacatgtttttgtgaaacggacctcatagcaattggcaataattgttgcattagagcatgacaatcatgagatttcaatccaatcaatcggaagtcttt

SEQ ID NO: 72915 - DNA, 689 bp, Cannabis sativa
ttagtactaatagataaattaattattaaaatctgtgataatattaaaaagttcactaacagaaaacactaaaaatggacatcataacgacactaaaactgtctgtcaaggatccctcttgtaaaagttttacaaaaagactatatacaatgacaagtcaaaatatgaaataaaaatacaaagtaaatagaacccaaaataactcccgcatctcggcacacatgccggtagggtcaatatgtacattgctaaagaagacggtcacctcatggctactctagttttcctttgcctttacctacaccacatagcacccgtgggtcacaaggactcagtaagaaacgtaataacaacaatcgtataatttattactcgaatattatcatttatactcaaacaatcataatcaaatgatcatacattactcaaaagatgaaacccaaatcactactggcattggaaatggaaattttgcccattttcacaggccgggccgggcccccggcccgacggggcggctttggcccgattacattgggttgttatcgggcttccggcctggcccagtacatattatttcaagtcaggcccggcccgacccgatttcattttttttctgcttgtttgttttcttttgctttttttcagctttggcccgattatatagtaaaaaataatgcaacagagaa

SEQ ID NO: 72916 - DNA, 919 bp, Cannabis sativa
agtagcagataaataccaaagtcctatttttggcggtaaaaataccttccgtcactactttggaacttccgtaggtacctctccgttttttgcattgtaatgtactaggtgtcgtgccatgtcattaatataaaggccacatcactaccactactaacaataagcactgccacatcatatatcttaaaaaactaataaaatgttttcaaaaaataaaaacattaataaaaaactaaaattaattaatcacatctcttactaattaaaaaaaaaattaatcacatctctttctcttttactctctctgtctcctgctacctctttctctctctcaaaatatctcaaagtctcaaccctaaaatggaagagacgatctgtaccaatgggtatgaagaccatgaatggtcatttctctatgtcagtgagtcaacagaggtattggccgtttcatcgtcttcttctcccttcctcactattttcttctttctgcagctgttgttgttgagggtgggcaacagcgtttggtgtgggggttcgccgatggctggagacgagaagatcgacatcgacggtgccgactttgacggaatcggcatcgacaggattatggtttcgacaggacctaatggctaagaagatcgaagccctaattttttgttgaagcctagatcttcgtcttagtccaacaccaccgcttcttcatctcgtcgaaggctagatcttcgtgtcaatccaccggcatcttcttattttttgtgatgtttttttaacatgggactaatgtgtggggcttctgctgtgtttttgacatgtacaacaaaaggtaatagagctgtaacattcattgatctgagattgcatatataaataattagttacaatgtgaaaatctctaaatagtatataagagtgatatacc

SEQ ID NO: 72917 - DNA, 705 bp, Cannabis sativa
caatcttcaactctatatattacacgtgcaacgcacgtacaaaaactagtaatataaaatacttccaaaaaatattgccacattgacctacggcaacatatgcttatcttatcatttcaaccaaaaatcacatttcacaatatggaatttacgaggttagtcttctgaaatgatggggaaatatcttgtaatattattttttttttaaaaaaaaaaaaatctagtaatataagtatggaatgaataagggtgtcaattcttctttaggattttatgttggcgtcttctgaagatctaagtgtaagtattacactcaaatgttaaattcaaatcaaactcatttatttatggttttcaaaattttaactcaaaatcgggttgatttgacacagcacgacttttgtgataacttttcaaacaattaactatattgctatgaaaaattgaatttatatgaatacatttggttcatattaaattttttgaacacaaatttactaaaattaaaaaaaaaatggctcattttatattaatacccatagtatttttttactttcttctcttttctaacttcaccatccatactccttattcttatccataccgatggggtctgatagtagttcgatgctatccatttttttttttttttatgtttttatacttaaaaactagtagcatcaggccactatcagactactatcg

SEQ ID NO: 72918 - DNA, 808 bp, Cannabis sativa
ttttcataaatctatagatggattcaaattctatgcaagcttcattgatgattacactaaatacacatgaatttatcttatggttgccaaacaaataaaaaagttacaaaccgattggagtggagagtacaagcctcttaaacccctgctacaagacattgaaatggattttagacacacatgctcacacactcatcaacaacaaggacgtgttgaaagaaaacatcgacatgtcatggatatgggccccacattattagcacaagatgagctacccttaacatactgttgggatgcatatgttacagttgccttaccataaacaaacttcccaccccattattaaacaacaaaagtccctatgaaatgttatttaagcaaaaatttaattacacactcttcaaagtctttggttgttcatgcttcccacttctaagaccatacaacactaacaaaatggcctttagaaccttaaaatgtgtgtaattccttggtatcaaccctcatcacaaaagggtatctgtgcctccacctaagtggctgactttacatagctcgattgttatcttcaatgcgaagagtttttcttattctaaattgttccataaaagcaacaacaacagtccccataacccctctccaaactgcatttacaataattctcaaaacacaatgccacatcctccaaatgaagctactatacaacttgttctctcactaaatacaaactttatattacctaaaccaccttaaataataaacccaaaaatcactcccatacaaccttgtatcactacacccatggaac

SEQ ID NO: 72919 - DNA, 821 bp, Cannabis sativa
gagtctgggtacgggtttttcgaatctcggtctgggtccaggtctgagtcaaggttcaggttcaggtcttggttctgggtcccaagtttgtgtctgggtctacgtctgcgtctcggtctaggtcccgtgtttcaatgcctgtctaggtttgggtttgtatttgggtctgggtatgggttcgtgtccatatctaggtccgaattccactttaggttaggggcttggtctgtgtctgggatcgagtcccgagttcgtgttcaggttctggttcgagtcttagtcctagtctaggtctaggactaggtttgagcccgagttccggttctaggttcggtctagttttggatccaggtcgtggtccaagtcacactccggtcatgttccagggtcctgatcacgttcttgttcaagtttcggttttgggtcccacgtttgggcctaggtctaggtccttgtccaacttcgggtccttctccgagtccctgatcaagacatcgactatgggtcttgtccaagccccggttctctgatcacgggacaagatttgcatcccaatcacaggtcccagtttatttcaattcatgtcccaggtcacggtctaggtttaggtcaaggtccaggatcaagacttgggtccagttctcggtctcgatccctgttttgggtcccatgtcatgttcaatgttctggtctgaattcaagtctgggttctggtactgagtaccgatttgtgtttggatttagattttggaccgaatcccagggtgggtctttgaccaagtctgggtcttggtccagttacagttttgggtgtaggttaa

SEQ ID NO: 72920 - DNA, 1026 bp, Cannabis sativa
  modified_base (899)..(902): a, c, t, g, unknown or other
  modified_base (958)..(978): a, c, t, g, unknown or other
ccgtatttttgaaaaaaaaactttgagttttccttttttgtttaattttttatgtgagagtaaaaaagtaaagttttaccaaaataaagctatatgagaaaaaatccccatttttagcttattagtggactgctaatttgtgtattttcttagtgagttgtaactcaaatatctatatactagtaaatttagctgcgcgaagtaaaaaagtaaatataaattttgaatttgtgttttaaaaattattggtcgttgtttatatttagttaaattataatttaaatattgtgtttctcaaaataaaatataatgatacactcttcataaatgtacgtaattaaatatttttaccctaactttaaaactttctcttactaacctttaataacaattgtgatcgatttatgatataactacactgaacaaattcgattacactgaaccaaataaatacaatccaattacaaaaaatatacatcaagttaccattgaattagactgaatgtgagtagtttggattgaatcggttctttaaagaaaatttcaaaatctaattaaaaatcgatctaatctaattacatgtaatacatatgaaaaatatattgcctttattcatatataataataataatatctaaattttgtttttatttgttgtttattaattttcgattcacatattacccctaactaaagaaatccctaaaaactctaagaactcatgtatagtttagtttttatgtatttttttagttaatattaaaactcaaacgttgaatagaaataatatttaagatgcccattcatagtctaaattatcttttttttttactaagatgtcaaacagccaaataaattaaattaggctaaatagtaatttttccctccgaactttgacnnnnactaaattgtgccccctgaacttttatgggtattaaaaattccccttgaactattnnnnnnnnnnnnnnnnnnnnnttttgtctaattttagtaagaaaattctaacatagatgaaagttcaag

SEQ ID NO: 72921 - DNA, 969 bp, Cannabis sativa
gagagagagagagagagatgtaaaatcgttgggagagaagtaagtcttgtaactctcaattggctttgaaagattcttataaccttctaaacaatgatcaatggaagaaatgatagttgttgttccaaccgagatgtagagcattgtaactagctcgaactcgttaattcctagtattctcttctattattctatgtttttattcattaccattttttgagtctcagataatttggttcttgaaagtgtgtttgattgtttagttgttctttgcatcataagccttgattgattcacaacaaacttgtatcaaagtaggttcttgaagtcatggctgccacaaaatatgatgttgaaaagttcatggttcgaatgattttgggctatggagaatgaagatgaaggccctgctggttcaccaaggcttgtatgaggctctgcttgggagagaaggctcttcctgaggcaatgtctgacaaagacaagaaggagattcttgcaaaggctcatagtgcaataatcttgaaccttggagataaggttatgaggaagatcactaaagaaaccacaactactggaatttggttgaagcttgaaggattgtacatgacaaatctttggtgaatagattgtatttaaagcagtccttgtattcattcaagatgatggaagaaaaatatgttggcgaacagattgatgagtttaacaaattgatcctcgatcttgagaacattggggctaccattgaagatgaaaatcaagcattgttattactcagttccttgccaaaatcatttggacatttcaagggtacaatgttgtatgggagagaatcaattacactcgatgatgttcaaaggagcttaatcaaaggagtgagttaaagaactctagcaatggtgatggattgtatacaagaagtgagaatagaaaaggcagtaaagaaacaaaaggaaaatcaagatcgaa

SEQ ID NO: 72922 - DNA, 654 bp, Cannabis sativa
aatggagcctcttcaaacatacttttcaagtctacctatgaaatatggggatctagttgatagatctagcaccctatacacaactgatgtatgggttctttggccaaggtcttgcacccttgggatacatctaggtgcctttgatagttggagaaagtcccacaacaagaacactgatggctcatttcatagtaatcaatgtgccatcagcgttcaatgcaataataggtcaaccacccctatacgacccgaaagtagtgatgtcaatttaccacttatgcgtaaagttcccaacaaggcatggggtagggtgcctaaggggagagcaaaaatcttcccggcactgctacaacttggctttgtccaaatccaagaaagaaaagatgcctgcaaaaagctctaagcaagagtccggccaagggaagtgaagtttaacccaaattgaggaggcagacttagatccttgctttggagatcctgtagtgagctttagaccggtagaggagttagaagaagtagagatcgatcccatccttcagactaggaaattaaagattgagaaaggtttagcgccaacaatgaaatctacattgataaatttctaagcataaacatcaatatatttgcgtggtcgcatgaagacattgtagggat

SEQ ID NO: 72923 - DNA, 1146 bp, Cannabis sativa
tccattgtgattttctctctttggcctgtagatattgcgggatccttaacggactagcaaaaactactacaagcctcattcaaactaaaaccatccctcctatcaacatctcttttaagccactccccatacaaaggtatattatccccttttaggtcctccatcaatactgctggtttcgcacacaccttctggtcatgcccccacactccacatttataacataacagtggtagaaaattaaatttaaactgcacccactgtttagccccctccactagaataaaccttccaacaaaggccctcttatttatagggaaattagtttttgctctaacttcgatctttattatgatcagtttaggattgtcccattaagctctataaccttcccagccattccccttggcgtataacattattaatcgttagtgccttcgggtaaaagttcgtcatacggatttaacatgaaagcgaatcaaggttagcatctgttcataatcctaactttgaccattcctcacccagcaataaccctccattgaaagaccgcgacaatgtgtccataatcttcttcttgaacttgtcctcctcgaaggagaacccaacataggtgctttgtccttcttcctatgccaaaatcactacatcccacccaatctttctctctcaaattctcccaaataatatcttcaaaaagttacctttataagcacgattggcaataatgcacccccaccatcgacaactttccaataactttagtcggcgcatcaatattctcccactcttcctcttccgtaacaaaagataagttttctatcctattaacaatctcctccacaacatcattattctcctctttagccatagcaactctccaacatatcacacaaaccacaaaaacctaagggtgcagaacaccactgaacaaatatggtgaaaaccaacaactcataataaactacattaaaaaacaattcaaaaattaagaaagaaataaagaaataaatatctaagaaatatgtatacatatttaagaaacaaattcttatataaaaagaagtcaataataaagaaaaaaaacatttatataaaaaaaaaaaacaaaagggaaaatttttttcccttttttttttttttttt

SEQ ID NO: 72924 - DNA, 1620 bp, Cannabis sativa
  modified_base (1088)..(1089): a, c, t, g, unknown or other
  modified_base (1498)..(1506): a, c, t, g, unknown or other
ggtacccctttgtgaaatgtggtttggacccatgtcaaaatatttttcccctctagtcacaatgatttcgaactactaagacgtgaataagaatattgtttttgcgttaaatttggttaaataggccctctaattaaaaacttgaaaacattctacttttcagggtaaattttaacaagtttttccttactcttacattggttagtgttctctaaaaatctcacccaacacatctcgaaaaataatgaaatatcacagggacgaagccaagagcgttgtgcatcacttttttattggaaatattgagagaaaaagtagttttcaagcacaaagaaacatttcaatccaaatagtgaaaatctcatatttttgatagtgatacccctttgtgaatgtggctcggacctatctcgaaatatttttcccctctcgtaacaataatttaatactactaagaagaagattgtttttgtgttaaattttgttaaaatgacccctaactataaaattaaaaatggtctactttttagggtaaattttgacaaattttaccttattcttacactcattagtgttttcttaaaatctcttcctacacatctctaaaaattttcaaatttcacagggatgaaaccaagagcattgtgaatcacttttttattggaaacattgagagaaaaagtagttttcaaacactaaaatcatcttaatcgaaatagtaaaaatatcacattttttatagtggcacccctttgtgaaatgtggcgtggacccacctcaaaatattttttccctctagtcataatgatttcataatactaagacgtgaatatgaaaattatttttgcgctacatttggattaaatgaccccttaattaaaaaaattaaacgttctacttttcagggtagattttaactagtttctccttactcttaccctcgttagtgttctcttaaaatctcaccctacacatctggaaaaatagtgaaatttcacatggatgaagccaagagaattgtgcatcacttttctattggaaacattgagagaaaaagtagttttcaaacactaacaatcattttaatnnaaatagtgaaaatctcacaatttttataagggtacccctttgttaaatgtggttcggaccctgctcaaaatatttttcccctttggtcacaatgatttcatactactaagacttgaatatgaagattattttttgcgttaaatttggataaaatgacctgtaatttaaaaatttaaaacgttctactttttagtgtaaattttaataaatttttccttactcttaaacgtgttagtgttctctaaaaatctcaccctacacatctcgaaaaatagtgaaattttacagggatgaagccaatagcgttgtgcatcacttttctattggaaataatgagaggaaaaatagttttcaagcactaagaatcattttaattgaaatagtaaaaatctcacatttttgatagtgnnnnnnnnntgtgaaatgtggctcggacccatcaagaaatatttttcccctcttgtcacagtgattttgttggaaattattttaccaggatcttagatctaatcacaagtatgttgattaaca

SEQ ID NO: 72925 - DNA, 934 bp, Cannabis sativa
ctctttgtcatgtacttgtcctctaatttttttccaaagaactgcgataacactttcaaacatgacaaagtaattcagatcttttcccaaacacagtcagattgtgccacaagcttgacgattgataaaattccaatcttcgtcggaataatcttttggcctggactccaatgtaatattagatccttctcgaaataatagatctaatacttcacattaccacatgtcaaagttattggttccatcaaatttctccacctcaaactttgcatttgataacatggtttttctcatagaacctcttgactcaccaaaaccttttaagtcaacttgtgcatcttttttaatatctctattgtcagccataagtgcaaacagataataaaacttttaagcttatgacttaagataatatttttcaaaatctcattaccttattttgaaaaacaaatgtcgcaattgaatttagaacagtccaaaatagctaggtatcggtctgactcagttaaaaatgggtaaaaatggaatcactcagtcccataaacatagttttactgagttaacttggttatcggcagaaaaactccgatggctactagcagtgcatcggaccttcgattgaggtgattcttgcaatgttggaatcgtctcgtcgagagcttcaatttgatatgtaatagtgctatatttgactctaatattgatttgttgtgcgaaaaagcaataaatagcaaaagataacgataaacatatcaaagcagtaaataataaaacacatagaattatgtggttcggcaatacgcctactctacgagagaaagctgatatcattaatctgagtaggaaatatataaaatacagatacaaattttctactaataatatctctaaagtgatttccaaactcaccaaagtgtttcccaaagtttggata

SEQ ID NO: 72926 - DNA, 1042 bp, Cannabis sativa
tatatatataagtttgaatgtcattcttctcacctacttgtgttttaaaaaaaagaaattaatgttgagggaccacgtgtctcacttttggttgatctcattaacttctaaaaaaaaaaagttaatattaaaaggccacatgtataactttatttgttgtgatttacttatacttacacaaacaatatcaagttcaacaatagtgtgtaagtgtcacgtgtaactaaagtacaacatccatctatatacatgtgtcagtgtatttttttcaagttttttttctttttttttagtgtcttaattttcaagtaatatgagtcactataaaagcaactacacaatttgaaaactatggactatggccatgcataaatatttgtttttctcataaatatattatatatagcttcctcctcttctttttgtaaaagaattttgtttctcatctacaaatatggatttatttttcaaagtgggtcaatatttttgtttaataacttttcgttgtcaacgatatttgtagcagtactctttttttaaaatagttgttcttattttttaccataaattttattgtgtctttttttttttttgttaatatttattaacacgaaaattaattatctctatttattaaataagaaagttaaaattctagattttagtaaaaccaacataattgtctcattttgttttgagtaaattgcagcataaatacttaatgttttagattttatacacttaaatactttatctttacttttgggcgcaaaaattcacaatgttataattctcttacacccattactaccacctccgttaactcataaatatagacacgtggagggcttagatgcattacatttatttattttattttgaaatttaatattcttaatatcaaaaaataaatgctacttatttaaaaaaaataagagagatgcaataccaaattaccacaactgagggaatcagtacagtatatgtgaaagttataatgagaactgtttttttttttttttaaacaagtagcatttagttt

SEQ ID NO: 72927 - DNA, 756 bp, Cannabis sativa
atattctctattggtgtagtggtggaagtatttttaaatttcaaggaggttacaagttcaacactccacacactttttttcaaaaaaaaaatatattgttaagattcaaaccacctaaaaactatgtgtaaaacgaaaattgtaaataccattgcataacaattactttaacatcattatgctttattttataatttctattaaaattttggaatatccacataataaaaaaatacataatcatcccacttcaattttatttctatctttgccctatataaattcaactttgaattttttcaagtatgttgacaaattaaaagtgtacataatgcatgtgttgatagtattactaaacgcggattaattaatcattgttttaaatcaattttgtaataacacaacactaaatattctttatccataattatatatgtaagaatctttatccttaattataatagtaggatctactataaaaaaaatgtgtttcaatatcatttcaagtgtgttttaataatgatttaatgatatttttgaaatgaggttaaatagtgtgccgtgaaaagtctagtactttcaaccacaatgttttaatatcatgctcaatgttgttgtagatattgttatgactaataaaatgacatagtctaccatttttttttacggtttaaaatgttatgctctaccatttttttgatatgttaaaaatattatgttataccatatagtttgcatgttttgcaaactatataa

SEQ ID NO: 72928 - DNA, 1016 bp, Cannabis sativa
ccaaaaaattttgactgacacatgcgcttccaagatttccaacgaatttttttagaagtacccacagaaccccaccaaaacctggccatcacagattcaattcccctacaaagcttaacaggcaaacgaaaacaggccatcgcataagcaggaatagcctggataatagccttaagcaacacctctttaccagctctagaaaaacacttgcctgaccagcccctaagtatagaattaactttatccttgagaaaagcaaaagagtgatacttagacctagagaggcattgaggaagacccaaatatttacaaataaaaggtctatcctcaagattaaaagtgttgaagaaaagggcacgaatattagattgggtattgggagaaaaaagaatagaatactttgaaaaattaattacctgccccgaagccctagaataaatatcaaaaacttcctgcagagcagagcaagaggaacgattagcagcacaaaaaagaaggttgtcatcagcaaaaaatagatgagaaattgatggagcagaacgggcaatagcaatacccttcagaacaccagcatcttgtttactcctaagaagagcagataaaccttctgcacaaagaataaaaagataaggagaaagaggatctccttgtctaagacccctagaaggcttaattgatgggctaacaataccattaattaaaaaagaaagtgtagtagtagaaatacatttcataactaaagacacaaacttaggaggaaaattaaagtgaaacataacactttgtaaatagtgccactccacacggtcaaaagctttagccatatccaacttaagagcagcccaaccaatcttgccatttttacgagaattaatagcatgcacaatctcttgagcaataaggatattatcaaaaatgactcgaccagaaacaaacgcactttgaaatggagaaattattttatccaacaccactttcaatctattagccaacactttagaaatcactttatacaa

SEQ ID NO: 72929 - DNA, 900 bp, Cannabis sativa
tcaaagctagaatttgagagattggccctaaacgaagatgaacttgcacagagttgaggatgatctttgtatagaagttaaagtaagtcctagttgatgtggtgtttgcctccccagaaatcaccagtgttcatctacaaaaggattttaaatctgtgtatttatttatttattaaagataaatgaattagcagaaaggttgaccagtttatagaagctggtaattgtttagtatagtatgtggtgtaatagtttaaactattagctattagtcaacaacaggtcttatattggagttaagttattagaatggttactgtggagccctattcagatattagcgtactcctgtgactagaaaattgttataatggcttttctaaacctactatcaatattcgactaatgagttttagatataagctataaagatatatttcaataatctagtcgacaaataataaatggcaaaaacatcctcttataccagccactttctcaggaaccaaccaagccacaaaagaaaaagaaaaagaaaaaaccattaatcatatacataaaatatgtaacactaacatatatatatatagaggtaggtaacctagagtggcgtgaggctggttgtgggtttggagtgtagtggcgggttggaggtgggaacggtttgtttagggatttagtttttttttttttaatatctgaaactgggccacgtcaggcccgactcgaaataatatgtaccggactgggcctaaatctcaataaaaacgtaaatcattcaggtcaaatttgccctgttagtctgggggcccaacccgacctgcaaaaatagaccaaattgtcattcctactattatcagagtactataggggtgactccctatgaaattgttgtatggc

SEQ ID NO: 72930 - DNA, 1128 bp, Cannabis sativa
ggcctcaaaatttggctaaccaataactgaatcgaatataataccgatgctttccatgtaatatacaattagaacaataaagtaaatgaacacatgattttatagaggtttgacccccttagttagcgggcaatgacctactccccttttagttgtattgatactgagagataatactacttagatcactatgaagatggcatctggagtagttccttaaaggttacaatgtaagaatcagagttggcaattctcaagtattagtagtaagtggacgtgagagagagaaaaaggttactagacatagagctagggtttgtacttgcacttaatgacttcaagttttatggtttcattaaggctctttatatagtagagcttaggcccttcaaatccattagaaataggtaaaataaactattatttgcatattaaattagtaaaattcaaatgactaaaatgcccctcaaaaatagatacgttccctctatttttatgggttgttaaggcccaatttgcaatctggcttactggtccacgtgtgaagctgtgcaccataaatcctaccaggccagtgtttggccggccatgcacctgcaggatgcatgctggtcgaccataggatgttcaggaccaggccagcctatgcctatgctggccatagggccggccaagaccaagatttgctagctagccccttagaggtgaccggtttgtcacttcgtcattctgcttgagtattcaaactcctcgttggttgtagtgctgagtaggtgagttggccttcttgttggtgattttactaccacgtggcactaatgttggccatgtagacatgtcacgtcaggtgggaaaaagtagggataacaattttaaagtgaatttaaaatttcacgttatggtggaaatgggggtgtgagccacaaatttaatcaaaatttgttgagatattgttaatttatttatttgattttgaattcaaattctaaatcaattttagctatgtgcatatgtaaaattttgacatatgtttggtgtaaaattttggtaaaaataatttcaagaaagaaattaaatttaagagaaattattgagacaaagaggtcatttatattctaaatcatggta

SEQ ID NO: 72931 - DNA, 914 bp, Cannabis sativa
aaccttggcttcccaaaccttgataaccctctctgagatcagtttctctcaccacatgccatggaaacttgttcctccaagtcatctaaacccaacccatattcgacccgacacctaaacgatccatcctaaacccctaaatccctcccaaacacaaccctgcacacactagagagatgaacacaatgatgtgtctgacgctagaaaaattatgcgagagaggagatctgagagggaaaaagtgagagagaacaaatcgaaaatgaaaatgacacttgcgatggcaatgcccatggtactggagtacatcgttgggatctcagggtttgggtctcggtccttagagttcttggtgatggcaacgaaggtggatcccaagtctttgggtttttattgacatcgacgacattgaggtcttagggttctcgatcaccggtatgggattggttggtgagaacacaaaggtctcggggtcagcttagagggaggttgagagggagagagaataaagaaagaaaagaggaagaagaaggagggggagaagtaggaggaagaacctcattttattctcgatgatggttataggtgaccattccaaattaaaaaaaaaaaagaaaggaaaaagaaaaaacaaaaagaaaaagaaaggaaaaaaaagaaaaaaagctctatcgtggcccatcctcaagcaaatgggcaggtagaagtcctcaacaaaaccctcgaggataacctgaaaaagtgccttgaggaagcaaaaggcaactaacctgaattgctcgcagaggtcctatggtctcacaggactaccaagaagacgactatctggaaaactccattcgctctagcttacggctatgaggcgatgctgcatgtagagctggtgccaccgtctcacaagagaacaacctatg

SEQ ID NO: 72932 - DNA, 3768 bp, Cannabis sativa
  modified_base (391)..(394): a, c, t, g, unknown or other
cacatatacttccatgttttgtccgatctggtctttaaacattttgtttaccaatatttggtatgtggctccagcattttttagacctgatggcatgactttgtaacaatatagacccatatcttttcagaaacatgtatgttcttggtcctgtggatgcattttgatttggttatagcccgaataagcatccatgaagcttaatattttgtgcccagctgtggtgtccacaagctgattgattctttggagtggaaaacagtctttggggcatgccttattgaggtctgtgaaatcaatacaaactcgccatttcttgtccagcttgggtactagtatgggattggcaaccgaagctagggagaaagcttcaattatgaagttgttattnnnnagcttctctacctcttccttcagggctagatgtcgctctttgtccaacagccttcgcttttgttgaactggtcggaagttgggatcaatatttaagacgtgcaaaattacagaaggatcaattctgaccatatcctcgtgtgaccaggcaaaacgtccaggtttgctctcagaaattttatcaattctgattttatttcgagcaacaaaccttttccaatttttagctttctggcaagaatatcttgatcgatctcgatctcttctagttcttcctcaggtccaacattgttgtttgggtccccaagtcgaggatccacatcttcatccctgccttgggaagttccctacttagaaatgttttttcccttgtctgtgctctggctagaggatacttcctttttagccttggctatggcaaggttataacattcccgagcaatctgttggtttcctcttagacaccctatccaattctttgttggaaattttaggcatgattgcaatatcgacgtaacagcctttaagtcatacaaagcttgtcggcctaacatgaagttaaaggctgagggaatgtctaataccaagaattgtgccattatagttatacttgtcggagcttgtccaacagtgagggctaggcgaatttgccctataggtgtgactcctttgctggagaaaccatattcgggcaaaaggcaaggggttagatctttgagttggagccccatcttttcatatgtggtcttgaaaaagatgtcgtaagaggctccattatctatcattgttatggccacaattttgttggctatctggacttccacgaccaacgggtcgttgtgcggaaatctgatcttgttagcatcttcaccattaaatgttatggtgggttgccctgcccatgggatcttcagcttcctctcttcaacggccagactacttcttcttgctcatgttgtactgttcgggcatacctctcctgggctttgcctgaatctccagctacgtgctggcctccaataatgacttgcagatgtccatctattggtggtagtagcaagtcttggttgttgtcgccccattgattttgatcggccttgacatacctctgaacgtgctgattatttttctttatcaggaattcgatttcccgcttcagattgttgcattcattggtgtcgtgaccgtaatcctcatgaaatcgacaaaacttggttatatctctcttactgacatctttttccatgggtgcggacttcttgaacggggctaatgactgagtagccatgtagacactttccatgtgtcctgtcaggactgtaaatgcagtatacttggcatgattctctcggggagcttgttcggttttgctagtgaactctcccttttttacattcccttgcatattattgttgctggaccgtttaccatttgagctcgaattgcttgggtaatggggtagctggatggatgtcctagtagaaggagcttttgacttgccaggtttttgttcaccttctgctcgctgaaggtcctcttcaagtttgataaaaccttctgcacggtcaagaaaatcactaatcgagactactggtccgttcttccttatgtccttccaaagttccccaaggacttcaatgccccctagtattgaagacaactttccgtcctcgattacccttgaaaccttagtagcctccgtcatgaatctactgatgtaagctcggagaggctctcctggtctttgctttacttcaaccagatctcctaggtgtgacagaaattggcgagaggaagagaattgtgcatggaactccaaggagaaagccttccatgagttgaactatctaggtgccaacttgaaataccattgttaggtggcttctaaaagggtggcaggaaaaactctgcaacatacatctcctcttactccttgcaggtccatttgcatctcgaaatacttaaggtgggataagggatcttcctttccagtatacatcttccaggttggcatattaaatttgtggggcaattccaggatatcgatctcgggggagaaaggggttccacgtgctcaatctaacttgagatcattattcctctgaccggccaggccttggaacatattttttagttcgtccaactgtgcctgcgcagctggactaacatgtttggcctcttagtcaatctgagtcacatcagcatctttttgagcgcgggtttcgggttgcacgattggcgtgtcaagttgaccgtccactcctctcctccttttcaaaaaattgtttttcttctaataagagatatcatgatgagtcgtccccaacctatcaaatacagaaacgcttggttgtcacagtgactgattggtttggccaatttgctgaccgacatcattaacctggttggaattattgggaattgatgaattactagacaaggtctgcccgcctacaacttggcccacaggtgcgacctgtgaccggggatttgacgactgaccatttatagtctgggatgtattcatcgctggatcttcatctgtttcacccaaggggatgactgttacgagctgttgcccggcagtttaataggctttttgtatcagcacagtggcttgccgagtacaattgtcaatggctgcttgctgagcccttaatgtttccatctctttgtatctccattcggcaaacatgcgcctctgctcttcaaatgcgaggttcaccgaagcacagagttcctcctgatcatgatgcagggtgttggtatgaccctacacgattccaagagtagcacggagattttggatttcagtgtcatctccaatggttgtttgaacattggtagcaggcggaacggctgtgttatgaatgccctggttggctgctgaactggtattccaagttacttcctcaacaggcacgatttcatccacaggagtcgtcacactgtgacctgcagttgatggttgtccaggatttactgttggcggaccccttgtgtttcttggattctacagtgtaaggatccaccgcctgtctgtggattcgttggatcaaccacgcccctacgagtctgtaccaccatcgtactattcattagatttgaaataaagagcgatccttgattctgctctaaatgaaagcaccaaactattgacctcgcttttagccaacgacaatgagtctgatttgtaagagacaaatagtttaatacgagtatagtataataaagcaaataaagacacaagaattttatagaggttcagccccgagtagctcggctatagcctaatccttgtagtttgtattgacttaagaacaaggagaatggttccttttcttagagctcttacaattatatctctgaatatga

SEQ ID NO: 72933 - DNA, 929 bp, Cannabis sativa
aaaataatttccaacagttatcagccatgttgctcttgcttctcaaagagaggaaagaaaaaaatacactaaacttcagagtgattcagtccaatttgcagaagatgcgaagttgaagacacactaaactttagtaggtatcagtccaatattgcagaatgcaatgttggtaaatcccgtcgagggcactctcctagagagaaaaataaccactgctcaaactctatttacattgatgtgttctttagatgtgattatatatatacatattttatatgtacagtaaaaaaaataaaatttattgttatacgtattttatataatatctttactttctatatataaggattatattagaaaatattttgacaaaatttaagtttgattagagaattaattactttactaatacattttatatattatgtccaaacatatatttcaaaaaaataatgatagttatagatacattcttataatttgtagttaggagagtgtagttataataaaatgtataaattattagaattatacattattaatcaatttttttaacaatatcattaattatttttaaaacaaaatatttatcgtgaaattaaggtttaaatatatatatatatattttatatatagatatgattatatatagatgtaatttttatgattaaatatataataaaattaattttttttatataaaatatttacataaattttatttttaaatatatataataatattataaaattaatcaaaaaaattctgttaagtaattgagatattctattaaagttaaccagaaaacttaaaaacactgttaaaccaagaattgtgttacataagcacattttatatagaatagatatatatttatgggtgactattcaatggttacatttttattataaccatatggttacatttt

SEQ ID NO: 72934 - DNA, 835 bp, Cannabis sativa
ctcggggattatggcagatttgggtgctgctatgtgttcgaaacaggtagaaggaaatgctaatatagctactgattctcttattgttgaacagtgtgctgggaaggcttctactagggatcctgaagggttcaaaccggttactaatggctggaaaaataaagggacaaagaagcaaaatcaaactagcactttgaactcctttgaaccattacaggagcatttggcagtggagacacaagtgagtgacacaccaattgaacatcaagctaatacaggaggagggggagagcctcccattttaaatggatagaatattagcttggaatgtccgaggagctaataattcccataaacaaagtttaatcaagcaattgatttattcacataatgtgggtcttgttggtctccttgagacaagagtcaaggcgccaaaacttggaaccttgtactctaatatctttaatggttggtgttttactagcaatattgcatggcacaaaggaggtagaatggtggttgcttggaacccgaatactttttgcatcaacatactcaaatgtacaagccaattgattcatcttcaagtgtctacttcggatggtatgaattgtcttgtcacatttgtttatgcttttaatgatgaggagggtagaaaagttttatggcaggacttaatggccattgctactcatgatccttgggtagtgttgggagattttaatgatgttttggagcaagaagaaagagttggaagcagagttcaaagtctcaactcccatgctttcaaagattgtattttgtactgtcatttggaagacataaagagtagtgg

SEQ ID NO: 72935 - DNA, 1279 bp, Cannabis sativa
aagaaagagagaggaagaaagacgatgagagaaagagctcaagggtggggatggaggttcggggttactggggccgagaaatcttgtttattagtccctttggaccactgatgaaagatggtcgttccccacctgggttggcaccgcacaagagaaacaaagagagagagagagaagagagaaggcagatgtatgtgttttaggtttacggttttttttttcttttggtttgtatgagagagataattttaaaataaataaatgagagagaaataataaatggctgattgatttcagctttttttccctaaataaaatgcatataaagtttgattgtaccaaaaaaaaaattatttttttgtctgagtgaaagtaatttttcatttttttaaaagaaaaacaaaatacgtccatcatagctggacgctggatgtggtccaccaaaaataataatttaattatatttttaacatgtaacttccttactctttttctagtccaacattaatggacatgatacatatttttttgtagtgcatcattgttggacttgaaatctcttcaaaaaaatttcgtgtctaacactaattttgttggactagaaaaagagacatagaaagggtaatttgtagtagtgaaaacaaaacaaataaccaactgtatcaacacaaaacaaaacaataaaaaaatggtcttgcatgaacaaataaccaaattgaaacaaaaataagaaaaagctgaaccttattatatcttgcatgaaccgagaaattggctcaattgagtttgtgtcgtttgggtaatttttctaagggttttgctatagatagaccatgctttcactttactgtccatacaattataaatttataactacaccccaaaattacatatttaacctttagttaaatgaccaaaataagtatttttaaaagtttttatattatttatattttaataattgcaatcgtagttggtcgccgaattgcctttataaggtaaatatttattaacttgatatatatattatatattttgtgttttattgaatatgtatttatttatatattgtatatatatattgtgtatattatttatgtaaattttataattgtgttgtatatattctaagtaatatatatgtatgtatatatatatttattgtagtgaatgagaatgagatatggagagatttaattagttaagaaataaaaagcttttgaaattgtgttagtgtgagatataatttattatatttgtatgtatatatgattttttt

SEQ ID NO: 72936 - DNA, 2858 bp, Cannabis sativa
  modified_base (719)..(745): a, c, t, g, unknown or other
aaaatcacaaaagagcaactaaacacccttaaagccaaggcagaagaaaaagatagtactaataataataataataatatgatgatgatcaaagctagtagttatgtgactttatcagctcatatttggaaatgtgtttgcctagcacgtgatagtgataacaacaaaatcagtactctattcctcccaatcaatggaagattctctagaagattagtggaaccccaaattccagttggttactttggtaatgtgatatttgcaagtgtagcaaaggctaaggtaagtgatctcaaaacaaagccactttcttatgctgtaaattgtatcaatcaaagtgtgaagagaatggacaatgatcgcttaagatcaaatattgattatttggaacttcatcccaatttggcttccgttagacgtggggcccacacatatatgaatccaaatcttgggattattagttgggttagattgataaattatgagattgactttggatggggtcaacctatttatgttggacctggtggaacaatgttggaaggaaaatcgtatgttttaccttctcgaaataatgatgggagtttattagtgggcatagctctccaaccacaacacatgaaaacctttgagaagctcttttatcacaatttcaacaacaataataatcttgctaaacatattatcccatctactttatgatgatgatgatgatgatnnnnnnnnnnnnnnnnnnnnnnnnnnngatgatgatgatgatggtggtggacttatatgtacgaggctgatgtttgtttttgcaagttgtattttttctaagatttttcttacttttaattttgtagccaattgatgaattagcattggcatataataacatcgaacatcaatttaaatatgatagcacaattatattaaactttcttttttttttttttttattttgttgtgtttgcttctttcaattcatcaattacttataccaattatggtacaacactaaatctcaatcttgagtcactaaacaatatgttgaaaacacctcagactgaaagagcgtataaacagcaaatgctatatatatagattcattatatgttgtccacatattaaaaaataataaagatccgtatgtcattgtaggaaattcaaatacccaaaaaccctacatcatctaaagccaaacagaagaaactatgatcaattaagaccttttacaaactcttgtggaataaagttgcactcccaaaatgatcatatgccttcgatttaaccctagctcgatcttgagcttcaaaccctaaccccttgattatcctgcaaaacccggccagacacaaaaccaagaaatccagagctacaaacaacaacgatctagatcgatttttgttgtggttagaaaagaaagaaaaaaaaaagaaaaaaaataattttttaaattatttatttattttattttttaaattaaaataataatttagaccaataatatttcgacacgtgacaattttaaaaaataagcagctcagttaaaattaggactaacggatatataaaaaacatcaccttgagtactattattaccgctatttttagatgttagagacttatctatatcaaactaaactttatgatgatttttgccccaaattttccttattattattacaacaaattaatcaaacacaatcttataccaactattatttatgatcaccaataatatgagtaaatatcacattaattcccttggcctcgtaacagagggggacagcaatttcttgtgtccacaaattgaccatgcatatttattagatatttattatatttgaatttcttattggaaatgaattaagttgtatggatgagtaaatttattacacattcaccatgcccatcaatagtggttccacatgaatgaatgtcaataatgatcccacaataatgcacattaatatggaagaccaaagggtttacactataaaaaattttacttttagtcacaaataaattctccacgtatttatatttataagttaacagaagtggtagtaacagatgtaagagaattgtaactataggtattttttcctccaaaaatgaaaataattaaaatatttaaatgtataaaatctaaaacaataaatatttatactgcaatttaccttatttttaacaccttaaaaagtagtggtactaaaatattgtaatactatattggaaatgacatttaattgattaaaaaatattagtagataattactcatacaaaagataagagtagacatcaaaatcataaatgcatttgttcccgaggtctacccaataatctcaggatcggcctagattatggtacggtggtcatgatattattatattatataaaattgactaaatcatcaatatatttatataaaggaatgcacaagaagagtttaggtggcattttactattttttcttcctatttttcctattttttagtatattctcttattttatttaaaaaataaactacacatacaaagttaaaagtcccacattgtttagagatgttttaagggttatctatctaggttataaataatacttttatttttctacatttttttgtctaagaaatattatttttttataggtgattgattaatttcttacctaataaattatattcatagatttctataagtagttatttatcttttaatgattaaattttttataataatttttagttttatataaatttatgaaattaatttagtttaagaatttattttaacattctagatttttatattgttgtttgttcgagttaaaaatatttttttacaactaaaatattctcttaaattttaa

SEQ ID NO: 72937 - DNA, 1055 bp, Cannabis sativa
agagagagagagagagagggtatgtgtgattagtttatttatttttaattagctaagggtataataggaaaaatatataaataaaagaattattttatataaattaattgagggtctaaattttaatatgagatattttttaagaatataaaatgaaatttccctttaaaaattaacatttattatgttaaaacttaacggatatgtaagagaaataaaataaaatataatatttttaaataatgtggagaattttgatatatttttacaaagtattacttttagggcttcgccgatgggcattgtccaaagattgttgtagaaaaaaagtaggccaagtgtataaagtgataggagagaaaagagatgtggaagaatataaataaaagggtaaatactattttggaccttgtgttttgatatattaagtattattttgacaaaaaatcagtttagagtcttatttgtacaattttagaaaatataggatttattttatcatttaacaaaacagaaggtccaattaataacttttgcaaaatataagatctaaaatagtatttatactaaataaaatgtggtatcatttgagcacagtattcaataaattaatttttttttatttttacattttaaattattttttttttgtatttttttaaaaattaacatagcaactcatataataactaattaacattaaaatttaggttgcaactcttttagaaatcacaatccaaatcgtattttaaaaaaaattgtatataaaataattaattaaattgtaaaaatgtgtcagtaagcagctatttttgttgaagaccatgcaaatagccttagagatgcttttagtggtagttgggaagtgtcaatttatgcgtgtgttggcgacatgattgtcattttgtggcactgagagaggctcagctttgggtttatgctcctcccttacttaacagttaacacactttgattccctgcatgctcaacacgtgtattgtcgaccgtattttactcacgaatccaaatcaagcccaaaacccaaaacgcaaaac

SEQ ID NO: 72938 - DNA, 830 bp, Cannabis sativa
agtaagaatagatgtgagagtatagcaattatcaacagatctaaacccttgtaaaatgcattgtatatcactgttaagaacaaaacaatgatcattgtcaaattgacggtataccattgatcacaaatctgactaatgctaagtaaattagcttttagtcccttactaagcattacacttttcaaccttggtaatccttcaaaattgagagttcccataccaatgacattttctgttaaaccattaccaaacatgacctcaccacattgtattcggttgatattcactaaaaaatccttgtaacctgtcatatgtctaaaacaaccactgtcaaaataccacatttgagaagcagcacttttatcagaaaaaccagctagacatttttctttttcaatacatttttgtttcaaagcactacgtttcttttgaaaatatttcaaattaccaaaataatttgttttgtacaaattttgcatggtgaaacatttaggttgaatatgccccttaataccccaaaaatgacagattggaacaaatcttcttacctgagatcttatcctttttgaacttactggagactttgcttctgtagacgatatttttgtagcgatcttaaatttgcagcaacatgtaaattcattggaacactagattttacaaattttgtttttccaaaactttcagtatcatttgatccaagaacagcaaatcctctttgagctatattctaaacttcttcaaaaatagaagatccagggttaagcatttgaatatttttcttgaaattttcaagttccttctttaatagaataatttcctcatctttt

SEQ ID NO: 72939 - DNA, 552 bp, Cannabis sativa
cttgtttatttggtattttaatttttgtttatgttatttattaaattaatttatgtggaactgaatattaaaatgcattaacactaatatattactttctgatgtttgacacgcctttagtaattagcatttttcagtatttatagagtagtctataatacatgtttttaaaagagaaatacttaaggcactattcacgttgatagtgtcaaacacttttataaagtgtaatctcactattagtataattaaatattaaattttacttattttattttaataaaaattattaaaaaccgttaatcaattataagacgccgagacctactggtattaggcacattggtgcccatagtaatagtctttctaaaatgatgattcagtgtaagtatttttagtctatttttttaatgatgtgtatattataattatttgaaaccatttgtaaatttttaaaaaattctaaataatttacaatgtaaaaattaatttaaacatcttattatacgtgtgaccacagaagaaataaaaaatgagagggcgaaatatgaa

SEQ ID NO: 72940 - DNA, 853 bp, Cannabis sativa
agaaagctttgacatggcaaattgaaacggaaactaaactaacattagatccattataagttgtttttagcacaattagtgtggctgcgagattctaacatcacaagacaactacaaatatagaattgaaaaaatccttcattctatataacaaaaccaacattaactgcacaccaccatatcaaggcaatataatgtctatgccatttaccatattcaccgaaaccttctaagtctatctatatctaatgacgacataaaatcaaaaaacgaaaacaaataatactgataagcgttgcacaatcgcttaattaagcaccatgcagccaacacttggattcatcaagagatcaacgcacttaagcacgttcacctctgatacgccttgccagttgaatgtccttaggcatgatggtgacacgcttggcatggatggcacacagattggtgtcctcaaacagtccaacgagataggcctcagcagcctcctgcaaagccagaacagcgtgactctggaaacgcaaatcagtctgcaaaacaaaattgtacaatcattagaaaaacatatgcaaggataccaaaattacaccaaatcaccagcaaggctattaaaattacatcgaacaccaaaagttatattaccttaaagtcctgagcaatttcacgaacaagcctttggaatggcaacttcctaatcagaagctcggtactcttctggtacttgcgaatttccctgtgcatcaaaacaaacaattattagttataatttaaacagaaattaaagaaaataaagataaaaagaaaactgatttgcacaattgaaaacaagagtagattgcatacctgagggcaa

SEQ ID NO: 72941 - DNA, 1446 bp, Cannabis sativa
atagttagacattgggaatgtcaaaatttgtcgagattttagagttgacaaaaatacccctaagtgaccttttatgattttagtaaaatggtctttttgcccatttgtgttttgtcctttagtggactttgttttaacttaataattagatttttaatttgattttgagctgatatttatttaataaaacaacctattttcatttaattcattattttatataaaatgcaaagttggaaatgaagctctctctctctcaaaactctctcttgttcgaaccctatagaacaagctagggttctaaattttgttcttcaaatcctatgatttctagcagctctaagtgagtccaagccaaggtacgctcataccaactttccctttggttttcttaagtttcaagttaagagttttgcatgagtttgagtatttcagttctgtagctactgttgttgtttgaagtatgtttctgaagtttaaatattgttagatatgttgatttaagcatgcgctgatggctggttgtgaggtttgttcaaaggttgagcttaagtgctcaaacttttctctcaaatggttgttttcgattctgagcatgatatggtgttttattgctttgaatatgttctttgggatgtatagaacaggtctgaaaggttttgtttgatttggggttgatttgagggagttatgaaattttgaagtttttctgcactgaaccagaattacggttcagtgggacctgtaggatccagaatttcggttggtccccaagaaaccccacagaactggaattccggttggggcagttttgggaaccttagtttttcccatttttatgatatttagggtatgtccatgttacttatcgatagggaaacttttagtttcaactttaagtccccggaaagtgatttagcgtgtcacttatctatgttgtaatcgatgtgatttaggagcctgtaattcgccgagcagttcttccactcaggttggacagcacacttgaattcaaaatcaaggtaagattagtataatgtcatgcttatgttattacatctttagcatacttgttgattatgtctgttataatacattgataggagtaataatatacgtaaagttgtactgattactgataaatgtatattggctgaaatactgatcgatgttgtcacatcaatatggatagagtaggaccggtatattgtgtataggctgacattatggtcaatggtattgtcgtacggacgttctagattcagtactgagtggggcacggggatagggttatgatcgggtgtatggacgccaggttatgatcggggatagagtaggaccgggatattattacgttttatgttatgcttttcatactgagtctgtcaactcacactgttattttcatgtttaggtaagggcaaggctaaggctgaacagccgtga

SEQ ID NO: 72942 - DNA, 781 bp, Cannabis sativa
ataattatgaattatgtactgtgggatcttacggttttgaccgagtaataatagttggacataccgaactaacatgttgtctatcagtgtagacaatttatacgataaatgaggatattgaattcatacaaaagaatagtctactcttgtgaaatctcaaagttgatatctttgcttatgatgttaaggattaatgaaggttatcgagaagtatggggattgaagtgaagatagcataatatttttttttattatttttgaaagatgggtaatctgggaggatcaatggaataatagaaatgtgttgtgagcatatttgataaaggtactttaagaagtgtggtacgagaaaaatgttgggcacctgttcactggagtaacacaggtgataaaagaacacgatggaccgaaaagttccaaggaacttataaaatcatagagtgagttcgagttgtatgctcatttcattgagcatacaaaaaagctacgctgatttaaagcgtagggatattaaatttcaaatgggagactcagtatttcttttgagtattacctatgaaaagggtgcatagatttagaaaaataaaaaattaagccctagatacaccggtccttttgaaatattggaccagaaaggccaggtggcctattggttagctctaccacccgcattgtctagggtgcataatttcttccacatttctatgttgagaaagtatgtgtcaaatccgacatgtattttgagttacgatgatattgaactccaaacaacttattttat

SEQ ID NO: 72943 - DNA, 704 bp, Cannabis sativa
attcttttaaataaacagtaagatgccatgcttgatgaaatcctctttctttcttgggataactgtttacattgttaatatgattagttccaagtagtgattttgagtgtgattgaaatttaagagggtgttattataaatggcctgcatgtatagcgttcaaaatatgtctaaaagttccaatgagatcttgatgaagaaaatccactcttctactgatcaccaaaattcaatttcaggggctgataaaacttcttatgttaacactttatctgctgctactactacagaaaatgggtctgacatttccaatcctgttgatttgtcacttaaactgtagagatgcatatatctatttatatttatcaacaaagattttctgtttcttaaattattgatttctctaatcaattgttgatagccatcaaactttaattttccctcatgacatatatgatatcctattcctataatacatgtacgagagatcttttcaaagttccttctatatataatacacacaaattttgcttttagattagattttgcttttagattaactgctgatctctcgcataaattatagttagtactggtatactaatcctgatcatctctagttgttatttatatgttattatctgcaagatgggacatagcttaatttatgtagtacaaatataagtggcagaggttttggatac

SEQ ID NO: 72944 - DNA, 832 bp, Cannabis sativa
tttatggcttaaaatgagacttagcctttaaatgagacttagccttttaatgagacttagccttttagggttgagttaagggttgagttaaggctctttatataggagagcttaaaccctaattactagataaaataaaagatatccatgtatggcatgtgtcttgttaaagttctctccgtggtcctgtaggcccaaagaactagaagaagttcctcttgccaatgagctttacattcttggagcttcttctttgaagttgttttcaaaattttgtttacggcttccacttgttcgttggcttgaggctaggctacagctgataaacttttcacggttccatgctaggcacagaattcagggaagtgtttacgtcaaactacttcccgttttcagagataatcttgaatggaagtccctaacgagacataattttcctgataacaaagtccaaggccttttttgaggtgatagtattcattgacttcacctcaacccacctaatgaaataatcaattgcaaatatcgtgtatttgactctcccttttcccgtggggagggatcccactaaatcgataccccaaactgcaaaaggccatgggctactcatgagtgtgatttggtgcaagtggaaccttatcatatctctggcattgttcatatttctgggcatactctatgcaatccttcttcattgtaggccaaaaataccctaatgaaggattttctttgatagactaggcccgaatgtatatttttgcaaaagccacgatgaatctcgtggatcatggtgttgatttttgttctggaaatgcacctcaagtatggcatt

SEQ ID NO: 72945 - DNA, 1057 bp, Cannabis sativa
  modified_base (830)..(840): a, c, t, g, unknown or other
gattacacatggagaggagattgtggttatggatactattgcttattgtttattcaaaaataataattaatcaatttgaaaattgaaaataaagtaaccacgttctttccatgacatcgattttaattattatatcatatgtcttgaaaatttgtaagtgaagtatggaaccatgtgaaacttgattattatgtatggagtttttatattttatactcgcacttcaccatgtataagtttcaattttataaagacccattaactaataaaaatatataatagattgtaaaattattaatttaagctttaagcacgcttatttttcctttcaataatctatttcattttagaatgcatactaatctatttcattaaacacccaagttattttagacactaagggttcatttggtacgtcgtattgtattgtattgtattatattatgttggattatgttgtattgtattaatattatttaatgcaatactatatttagtattgacttgtattaatatattgtgtaaagttataatatattttcaatacactcgaccctaacaccaactacaggtccgggtccaagttcgggtcgggtcccagtcccagtccgggtcctaggtcccgggtcctaggtccgtgtccgggtccgggtcccgagtcgtaggtcatgggtccgggtttaggttcgggtttcgggtcatgggtcatgggtccgggtcccgagtttgggttcgggttcaggttcgggtcggagattaatgttgaccccgaatcctttgtaaatattataatacaaactaatacggacaatttgttatgtattaaatannnnnnnnnnnattgtattaaaaattttggtcgtaaaaattaatacaatatattgctttatctaaaaatagtgttctttattatttaatataatacgactcttatacgacgtaccaaacgagccataatgtcatatttactaataagtaatgggaatcaatggtaaggtaatcattcccttacatttgttttcttacattattaaaattaggaaagggagaacttgat

SEQ ID NO: 72946 - DNA, 885 bp, Cannabis sativa
  modified_base (248)..(270): a, c, t, g, unknown or other
gtttaaattaatcttaaaattaaaaaatagttttatttactaaaaatagaaagtgaatattttttattatatgaatatttgtttagagtaatttgtggcatatatacctaagtttaatttttagctataaataaatatttaagtttaattttttacggttataatacttaagttatatttctagaatttcttagatacttagccgccaagtgttaactcattatctacgtgttattttcttattggtnnnnnnnnnnnnnnnnnnnnnnnaaaaataaaaatttaataatctggaccaatcaagaattgcataaggtaatttatttaacacttaacattcaggcacctaaagaagtgaaagaattataacaggtattattaccgttaaaaattaaacttaagtatttatttacaatcagaagttaaaattaagtatttatgccacaaattactttattttttaatatttatttttcctatttgaatagttttttaattattgatgtcgttttacgtcaataaatatatgaagatcgtaaataaacgattgaacgaagatttatagttattcaataaaaccgatgtaaaaatagtttgagaaaattaaagatacacatagttcatttagtgcctattgattattcaacattcaagagttaccagagaatattgttgttcaaattacattgagcgagttaaatttttgaacaaagttttttttttttttttgttctaatacatttagttttaataaattatgttttcctaaaactactctttgtttatagcctatctatttttaaatctttgttgctctctttttattttactgtaaggagtatctttgttgctcttctttgcttggtttgtagaagtttaatattt

SEQ ID NO: 72947 - DNA, 1173 bp, Cannabis sativa
gtaagccttttaatgtccttccacgaatctttgagtggttgaatgcccccaatattgcggcaaaccttccttcttcagtcaaccccttaacatatgtagcttcgtcataaacctgctaatataagctccgaggggttctcctggcattgtacttcgaccaggtcttcaaggtgtgagggaaaatgacgaaaggaggaaaactatgcatggaactctcataggaaggaattccatgaattaaaccttcgtggaggcaatttgaagtaccattgttgggcaacctctgcgagtgtggcacgaaagattctgcaatgaatatcacctcttaccccttccaagtccatcttcataaatacttagatgtgataaaggatcttcttttccggtatacattttctaggttggcattttgaacttttagagtagctcaaggacttcaatctcaggggagaagggtgatctgcgtgcccattcgagttcgagatcagtgagttttgggccgttcaggccttgtaccgtattttaatgttgatccagttgtgtttgcacaaatggatgaacttgttcggtttgttaaccagcctgtgtcacattgagatctctttgaactagaacttgggctcaaatacctagttggacagttggtggaatgtattgttcatccagaccccttctgcaatctaggttggtcctgaggtcatgtgcgacacccaacctaccaaacactgaggtactaggtggccttggtgtctgacttgtttggctggtaggttggctagaaatttcagtagtggtgaagttggtgtgtataactcctcccaaaggacggtctagcaggatctaaccatctaccatttggcccacatgttggacctgtggccttggattggatggctaaccactgtgagtttgtgtggtatgcccagttgcataccattctgatctgcccatgcgaatactggacgcaatttctggttgttgatcggtgacttggtaggcctgccttattagtacgatggcctccctggtacgatcatcaatggctgtttgttgagcgcttagaatttccatctcccagtccctcaattctataaattgacgtctttgtttgtcaaacgcatgatttatggctacacagaaatcctccaaatcatggtgcaaagcattagtatg

SEQ ID NO: 72948 - DNA, 760 bp, Cannabis sativa
gattttctctaaccattgggatattccttatactcccaggttgtttttcctgagtatttgtgggatttccatgattattttcttgcctccaagtcatggaacctcggggccttccgcgtggtcgccttgcagatggatcatgttgagtttgaggagtggttccatgtatagccttggctaccgcaacctctcgttccaactcagttatttcttcaatttgactcagcgaggcattgttgaagttgcatgttttctaattctaccagtaggacatatctagtgggatcatagtcatcttcacttcaactctttgggatctgttcacacgtagggttgaaatttccattgtttcttccagaacgagaggcttcagtcgtgttggttccttgtgatccctgaggttcctttccagggcgatgggtggtctcctttggatggctttcttcgttacgaggggtattagccaccatagatataggtttgtaattgtatctataaggagggtatcttctgagtttttattacaaaggctctcaatgaaagcaccaaactgttaacacaaatttttgttaatcaaatatataaaccttttttgtaataatataccacaaaattaattatagtaataaatgaacacctgatatttctacatgattttgtagttaaaatttccatactctacgagtccatattattaaggataataattagaatacagagtacaataatctaaataaatataatacagtagaacctctat

SEQ ID NO: 72949 - DNA, 851 bp, Cannabis sativa
  modified_base (137)..(138): a, c, t, g, unknown or other
gaattggtaactaattagaagacaatatattacaaaagtgctggacacattaatgccttgtaacaatttttttttttttttgtaaggagaaaactaagtactaactaaaaaacaaaagagagagagagaaaaaaaannaaaaaaaacattaaaaaaaaaaaaaacagcttgtggagtggagggttcggttcttcgttttcttcttgatgtatttcgcatcggcctcctttcttcaaccattttaggctctgtattttgatttgattccccttttggaggtacatatatttatatatataatcaagtagacgtctttgctgattggatttttgtatttttaggttaaagtttggttctaaattgtagtcgttgtcgtttttgagggagttataattaattagtataatttgcatatgaatttataagttttcaacaaattttgaaattagataataaaagtttatgctggagatcaaatttctggatttttcgttacatgtatcgttacaattttataggattttcccgttacatattttcttgtggttattgacaaattttctttgtttatcactttctctgtttctgcagtttttttagctttacttttctcttattacttgtttaacactcatatagtcaagggattaaattatgcgtaaactcgtagcaaaagcaaaagaaaacaaatacgtaaagctttgagtcagtatctagccatggggacagtttcactctctatcgaatttcaacactgcacgattggtatctctttctcataggcaagtcacaaatctcgtgattccattaaattttgttatatatacctttggtgggttttatctttttta

SEQ ID NO: 72950 - DNA, 983 bp, Cannabis sativa
agttttatcttcaactccaactacagaaacaccactattttgagttttcttattctcgtccctattaagacacaaaatctaactccatttacaacacactcaaggtacgaggtgacaagattagaggaccccgatgctaaagagaataactcttctgatgcctctggagatcctaatcttcaaagatcataaagcttattataaaaccaagaaagaaatttattccattgtacttgttctaagtgttcaacccctctagaaagaagaatgttcatatgttttctacatcaaaaataataaagtaattaattattttaaaaatattaactatttgaatggtttgaattaaattggttgttaatatttaaaatacttactgaatatatggtgcaatctccagttatttagaacataccactcagttgttttcttctcttcttcatctaggggtctcaattgtttcttaccgattagatgaccttgagaccaaaaaactaataatttcaaaaataatggagcaacatctacattttgatctggacggttaaatcgggtctccactcctcaagtacattgaacaaaatgttaatgcctcatccatcacatatctttctaatattgacccttctggatgtgctttattacaaacataattctttaactttttcatgtatctctacacccatctcatgtgaactgagccttcaagtactacttcttatgataaatgatgactagatgaatcataatatcaaaaaaagctgaaaggaaaatattttctagcttacaaacaatcttaagtattaatgtttttgcttattctaaatctgagactagtagatttctagcagatataagtttgaagaaagtgcataactcaataattgaggtgctgatcgatttatctaaaaatgcattcactgttaaggatatataattctcaatattatatgtacagagtgttagttacctaacagttagtt

SEQ ID NO: 72951 - DNA, 1720 bp, Cannabis sativa
tttaatttttaattgtatcactttaaaataacatagaaaaaattaacataaaatttaatatacgtgcctctcgcacgtagctttagactatatatatatatatatatacacaatttttacatcaccaacgttggatcaaacttatataatctgaaagtcagaaaaataaataaacataaactgaataacacacccaatacctttctcattttcatttgcattatcggttgtgtagccaaaattttcgttctataaagtaatgacttcatcagatattattcaggacttcagatattacatgataagttaatatatattaatatttgctttgactaatccagatagtattcagtgtgtgaacataaatatacttaatttagacaaaaggtgtgaatatatagataattctattaatattaatttgacctattatttattatgtttcataaaataccctattcttctcattttttatatagtaagttttttttccttctttccttatgaatgtatatatagtagaaaaaatttaaacaatatcatctatatctatttaacaatgtatatatagtttttttccttcaaataaaatgtatatatatatatatgtatatatcattttttattattttaaagttgctattggtatttctggcatttgacacgtaaattctgggtcagcattcaaaatccattagtggaattctcatcaaagataaagtgggccaagcccacctaaatatgcccttcgaggagctatgttagttctagactcgcagagttttccgccttcagcagaccgaacttggaagacacctccggtaccatgaagccagaggggtaagaataaacttatttgtggtgaatgatcaccatcaaaactgattgttacaatagtaacaatattcaagaaaacacaattcaaactagaaccaatcacaaaatcaaaaccaaaacttagatgaaattatataagaataaacttagcttgagaataaatcaatgaatgaatgattttattgattaggaatagtcggtaatatataattaaataagccaaagattacaactcaacatagtaaactataacaaaaaatatgtctcaaaatgagggaaatcacttcaagagtgatactcccattacatccctccacaaacactcactataattttggactctctctctaaacttaactctgaatctaaagtatgagccttggagattggagatcaatttgagaatagaagaatacctatttatagttgttggtaggaatcactttaagttggtgacaaaaccaattattgttataactaacaacagctttctccagattcatctaataagagaaaagatagacttactgactttgacagattaagtgagtttaatcccaacaattctatctgattagactcacttaatctttgatccaaaagaaatgagtaaggacattaatttgttagttttatggtactaaatcaggtacgcagtggaagagtttcatattatctgattattattgtaccatagccacaagatctctatatttgtagtgtacattaaatcaaaataataaaaacaataagtttagagtatacctcttgaagcctatcaggatatcctcaaaacttctcgtaagttgtatcccttaatccagttgatgaggaatatgcaatttggactcacacgaatgtcttcaaaatcgatccaccaaaa

SEQ ID NO: 72952 - DNA, 907 bp, Cannabis sativa
taatcagtacattagttttgaagctacatggatacgcatccaaaaaaactacaaatatacagaattagtggacggactgttgaaaaaatataacttcagtagaaactcaagtaccctacaaatgccgtttcagatacagtttggatatccagcgttaaagatcacgaatgatgaaagcctggagtttgacttgcagttaaaatcaacagaaaaggacatgacaaaacatcctttgtgcataagtatggtccccaacacaaaaacaatatcacaattaccttttttaactgaggttaacacacgacatgaagtccacatgcttgaatatggaattcagtcaggggaaacaccaacacatgcatcaacaaaaagaaaacaaaatagaagataatgatggatttgactttgttgactatgcaaaaatattactgcagaaatggtagctcaactaacaagatagacaaatgatcaacaagaaagccacgatgaagaagcatttgtcatcacagataaacaacatccagaaattgagaaagggcaaatgtacaaagataaggaaactttgaagaacgtccttagctactttgcaataaaacaataattttaatacaaggtgaaaaaatcttgcacaaaggaattttaaattaagttgtggataaagattgcaaatggtcactaagagcttcaaggaatggggcaacagagaatttcatagtaaggaaatacaatgaaaaatacacttgcactaagcatcaaatttggagatcaaatgcaagcttcaacaaagataataagggactgtgttaaatacaagtttttgaacataaaaataacaactacaccagcagatattagatttgagatgaatgaaaatatgggttataaatgaattacatgaaggcatgga

SEQ ID NO: 72953 - DNA, 962 bp, Cannabis sativa
acgcatttcttcatggtgatctccgtgaagaaatttacatgaaattaccccaaggttacaaaccgaaaggagctctccctcccaatgttgtttgcaaattgcaaaagagcatatatgggctcaaacaatcctctaggcaatggtacaccaagctcagttcagctttgatcacacaaggtttcactcaatcaaagaatgatcactccctgttcataaaacgctcccatgatacattccttgccttacttatatacgttgacgacatcatagtcgccaccaacaacactacagcccttcactctttcatatcaactctcgacagtcactttaaattgaaagatcttggccctcttcgatttttcttaggccttgaaatagctcgctgcaaaaatggaatttctgtaagtcaaagaccatttaccctacaattattacaagacagtggcaagcttggtacaaaaccgatttcaactccaatggaacccaatacaaaactcaacaatgaaaccggcaaccttctcaccaatcctacacaatacagaagtctcatagggaagttaatatatctcaccattacaagacctgacatttcttttgcagtcaacaaacttagccagtatcttcaagcaccacgggatcctcatttacaagcagccaaccgcatcctccaatacttaaaaggcacaccaggtcaaggccttttcttccatacaaaatcaccttcacctctacgattacaagcctttgccgatgcggattggggagcatgtttagacacaagaagatcgatctctggctactgcattttcctaggaaattctctaatatcctggaaatcaaaaaagcaacacacggtgtcacggtcatcaactgaagccgagtacagagccatggccaatactgcatgtgaacttacctggcttcattccattatcaaagaactcggcatcaacatccaactt

SEQ ID NO: 72954 - DNA, 996 bp, Cannabis sativa
  modified_base (29)..(29): a, c, t, g, unknown or other
tccacctcttgcatccataagggcccttntaccaaatgaagagaactgtcctccaacgttgctaatttcaaagctatccataagatgagattcaccttgacaattcccacacattattcttctcatacatcgtcaaaaagttcaaaagcattctttggacctccgtttcttcttgttggcagttacttctcgactatcatttacaacttccactcaacaagaggaaggaatttcaattgcggtaaagacattgaaagtctcttcttccttttgagcacacaactttaactcccgcttatgcacatcaattaacgctctcgctgtgactaagaatggttgtccgaaaatgatgggaatattctcatcttcctccatgtcaagttttaaaatatcagcagggaagataaacttaccaatcttcaccaaaatatcctcaattataccccagggatgagttaaagaacgatgtgccatttgtagagtcactattgtgggcttggcttctcctaatcttagtcttttaaacacagacatgggcattaagttaatactcactcccagatcacaaagagcttttgtttctatgaaacccctattgagcatagaattttgaaactacccagatctttaagcttgggtggtagtttcttttgcaggattgcactgcactcctcagtaagtaccaccatctcatactcttcaaacttccttttcttagatagaacgtttttcatcaactttagataagttggcatttgttccaaggcctctacgaatagaatgttgatatgtagtttcttgaatatttcaaggaattttgaaaattgcttatccagcttattcttgtgaagtatttggggatagggaattttgatatgatcatcaatgctgataggaggtgaagtttctttttgttgaagaccgtcaacagtcttcttctcttgtgttggtactagttcttattgatcattgtcttcatcctctgacttgtcttgg

SEQ ID NO: 72955 - DNA, 695 bp, Cannabis sativa
attccaacagttggaattgagaaatgtgaaactataaatttgaattttctgacttcatggatcttagttattgtggaaaactagacagacagtcaaaacaaaatcaaaatttgataagcaaaacctagcacaccaggccatttgtcaatctgggcgttgggtgcttatttcggagcttccgggatgtcattttgatactttcaaggttctagaacttgaggaagaggtctcttaccctatttttgacaattctagattgaatgctcagatcagatttggcatttaaatgatcaaaactagcgcaccaagtagattgtcaacatgggtgctgggctctacttttgggcctcgagtttgtggttttctccttgagtttatttgattcttcattatatctaacgacagaaaaaaatactaagaacacagttttgaaaactagattggaaacatcctagattgacaatatgtcaatctgggcactgggcctaatgccatgtgtcaacttgggcgctgggtcctttttatggccctttggaagtttagtttggtcctcgaaaatagttgagtcttaatctttgctaaaaatagagaagattctcaaaagagttctcagaaaacatcatcaaaatttgcccaagttgacaaaatgtcaacctgagcgttgggctagccccagccccaggtgtcaacctagg

SEQ ID NO: 72956 - DNA, 1518 bp, Cannabis sativa
  modified_base (524)..(531): a, c, t, g, unknown or other
ttattgagaattgttaaaaggtattctataatttttaaaaaatattattaattaatcgtggagcgttacttatagaaaatattaaataccactaataactaataacaatacttaaaaaactcaatgcaagtgagtaataatagctaaaaattaaaaaattagtcataaaacactatccatcaaattagctaaaataactaaaaaaaaaaataaataaccactactcattttctaaatgtagctatacacaattcattcatcaaactaatttattatttttgcttcttcctttctttcttatatttttcatttaaataaataaataatatctaaatatatagtatttaaataatataaaggaaaaatataaaaaaaaaactcataaagcataattaaaagtatacacatccaataatcaaaaaattattagcccacaaaataaaccaagtaatttataacatcaaaaggtaaataccttttgatcctttgcaaaaattaccaattggaccttctgttttgttaannnnnnnnatagaccatgtattttccaaaatgatataaataggaccttgaattggttttctgtcaaaataaaatttaataataatttgatctaaaggtgttacgacaaaactgtttatattttctatatctgttcgtgttaggaattatctttaagttggttatattaaaaaaaaagttgtctaaaattaagctcatggtcctatttttaccattttgaaaaatataaggtccattttgtcacttaacaatacaaaaagtccaatcggtaacttttgcaaaacatggatccaaaatggtatttacccataaaaaattacatataaatgtaatctcaaataatagaacaaaaaaccctcattaacctaaaagaacaaaagactataaaatgcccatatcaacaacataacacttaatcttttggttagatgatctactaatattgacttggtcttgcaatattctatcacaatgtctcatttcttgaccaagtttctaacagtgagatattttatgttatacctaatttttgcaaaaaaaaaaaataaaatggctactcttgcacaaggacccacgtgccaagaataccttgaagatactaaagtcaaccttgcgactttgaccaaggctcataaatatcaaataaatcaagaaattcttcttgagggcctcatgacacttctagagggctcgaaaacaccagccaactatttagcaccgggactcacacacccaagtgtgcccaaactagggttcatgggcctaaaagtttaatcttaaaattctcctaatttactcaacgattttagtcatataatatatcagcagaaagagaatttcttgatgaataaaaatcctaaagttttaagattgaaaaatagaaaaatttaacataaaataataacgaaattaatatgtaattggaaaaaattaacatatacatatcaattgttacacaaaattatcctaaattatatacaattaacaatctgatac

SEQ ID NO: 72957 - DNA, 840 bp, Cannabis sativa
  modified_base (771)..(784): a, c, t, g, unknown or other
tattcagtcatggcatgggtaccttatttagtttcttctgttattacttgaaaaaagaaaataaaaatgttgggactagaaataagaagaagggatgtggtgtccacacaccaataattggaggacgagttctgaaaattaacatgtttttgaaggggcccactgttggcccaactaggagagttggggcccatttaactagaaaacttgtgcaagtgagagttaataataaatggtaaagacaaaagggctcttatcaaataaggtaacttgattattatttaagaagaaataataaagtggtcctatcaaatagttatcaacacaatcacaccccctttttctgatattttacactgtataatattatagtatagtatatagagtaaacttaccaatagaaatttgttaaaaagatactagtgggatatctacaatctttttacatgttaatattgttattaatgcactttaagtatcaagtctcgtatagtgtaataaattttaagaagtatcacaaactaattgtaaagagacacatttagatagtactaaaaactaaggctgacctaagttaatttgggccctaaaaaaaacaacttttttagaacctttttataaaataaataatatttttaacaattattaatatatatatttattaaaagtttatttttatttgggcttcttataaaagtaaatcttaagcgtaggcctaacttactttaatttagggataattacacaaggtactattttttgtaaaaaaannnnnnnnnnnnnntttaaagaatttttttttttttacatttttacgttttccatataaacaatacgaaa

SEQ ID NO: 72958 - DNA, 758 bp, Cannabis sativa
taagcacctgttctttgcttgtgattacagcaggaactgtctccaggaagtcaaaaattggctgcattggagattaaatgcagagtcggtgcaaggcataatgaaaaacataaaaaacaacaagaccagttcagcaacgagaagaagcatgctgaaagttgtaatagctgggttgatttatcatatttgggaagctaggaacgatgttctatggaaccaaaaggtgaggcgcagccaagcagtagtgaagcacattcaaagggagagcaagattaggatcatagagattatgcccaagaaaactaaagatgtagatagagaatggattgtgagtatctaattcattgctagatagaatgactcgatgtaattgtttgcatagatagtctgggggtagattgaggaatttggatcattgtatgtatcaatagatgtaaagttgtgaatttgtaaatgttgtttgagcaatacaagtaccttattcatcaaaaaaaaaagtgttaccaaacacacccttagcgtacaactacaagatcataattcaagaacctagtgtgggtttatacaactgcaaatttatttttaatatattagcttagattaatatttcatcactataaataactgggtcaagtttcttcaaaacactaaatatgcatcctaattatatatttatttaatatatgaaccttcaaaattttcaatctcatggcaaaagaaacaactacgacatcgagtcactacaaaaaaatttactt

SEQ ID NO: 72959 - DNA, 761 bp, Cannabis sativa
gaggaggctcaggcacctctagctcaggactgtgagtagcggctagcatgccagtaggttgtccatgggcttcgctgttcaagacaaacagaaagagttaaaaaaaagcactaaaacatcacaaatgcaagtataacacagcaaggaaggctaatcctcccccgacgctctaactctaccctagcaaatcataaattaaaaaactggtatggtcatcccctataaagctatctgagggaaggaaccaactcgaggtcatgtaggagaaataatccaaaaggatcgaaacaggaggaccagagcccatttgcgatcgacctaggaaacgactcaaattggagaaataaaaactttttgcattatcgccccattgagaatggggcatccaaaacttatataacctcatgtcaaagcccactgactttaagttagaataatcttggacggaaggaatgaagtgaatgttcaaaggagacttatgagctccagaggtactggcaccaggggtcctagagttcagagccagaaaagggaatttaggcctcactggtgtcttttcttttcctgcttcctcttggatgagcctcccaaaagcattttggaggtgagtgtaatgaagctcctactctttcttgtacttatatttgttgtatttgtctttcatggatgagataatattggcctaaaagccttctcgctcccaggattccaggcgttagggaaaattactttggataggttgaaatcattgaccaattgac

SEQ ID NO: 72960 - DNA, 760 bp, Cannabis sativa
ctgttgaattactttttctgctgctgcacaaactcttacagtttttatattttcttatatataactgacatttgcaaaaacacagtttttcatcgtcgattattcccaaataaccgacgccataaggagtttataatcctccccaacccttcaacttcctcattcgatcagccaacctaaaacccccaaaccctctccgccaaccaccttgttaatcaccccccatttaacccttttttcaccattttaacttattttttttttttaaaaaaaaaaaaaaaagaattcttctattttctataccgaaaactatatatatacctgaaaagatcacatttttcttgtttttaagtgtaaaatgaaggtagaggtagtggttatgatggttatacttctagccaccggttttaatagagaaaacgtttaatctcaatgtccattagggtataaatctagtttctactaattttagtaatgtacattgctttattttgtaaattttttaagggtttttctatatcattaagattgtattattgtgtaagtgcatctgctatgacattctgttctctggggatatgccttaatgtatagcctttgagctaacttagcaagtcttggatcttgctcaaataggccatccttatttcacctcgagctgtgtattcaccttgaacttaatttacaactagttgagagtcgctatatatatccaggtggtcagcctgtacttcgtgcgccagattgaggccagcaatta

SEQ ID NO: 72961 - DNA, 848 bp, Cannabis sativa
tactttttttagctacttcttgcacttattttcttggttttgatacatgcatgaaggcacttggtgaagcttatcaagttttaagtgatcccgagaagtgtgaatcatatgacaaacatggaaagtcgggagttgtaaagtaagtttatgagaactttgaattgtatgttgcattattttcactttctagtgcacaacttatgtgattttcttcctgttctaaacttctcaatgatatatggctgtggcttgttaaaagaaaattgatattatgcatatatatttttccttgattgtcttctcccttgtattttaatagatttattgttcaatgataatattatgtgaaacatgcaagttagatttgaatttcatgattctacatcacacaaacagtgcagagaaaagaatattctttcattcttgaatattttaatgagtcttacgtaattatattcatgatttggaaaattttagcgaatatccaaggatttttagctttattgtgctcattatcgctgtttagatattgttttcagtacttgatgaaggtggaataattcaagtggattatcatgttggattcaacagtttctacctctgcataatcacagaagcagaacaggtacaatgagtccatcaatgtggcccacgctgatgttagtgatgcaagttggtggccaacctcgacactcttctatacgcaatttcatttttaacacatgtattaaataattaggttaatataccaatagttaaattttatcaaatagtaattacattagatttcatttgtgacaaatcactcagagaaaatacaaaagaacattaacaaagtgttatcatta

SEQ ID NO: 72962 - DNA, 636 bp, Cannabis sativa
tttccttctcttctcgtgctcgacaactgggttagtggagggagccctgctgtgttgagtgtgctgcttcggtcatggttcgtgtttgggagaatcggatgtgggctctggtttaaattggaaataggtgtagtgtggttcgaatgggagtttctaggctggtgcttgtgtgcttcgaaggttggttgggttcacgggagtggatgggttgtgatcaatggtggtttctggtgtagtcgtgggtggctacgggttcagatgaaagggagatgggatgcgatttggtggtgtgatggtgtggttcgaaggagatggcgtggttggtgatttggtggatggtgctggttcaggtggttcgaaggtgatggtgtggaaactcaggttcaatggagcgggttgagtggctgcgtggttcgaaggtggagtgaagtgtgaagttttgtcgagctgctggtcaaatggaggaaacggctgagtttgaattggaaatgaaattgatgatgatgaagagtgtggtagggctaggaaagtactgggctggtcaaacgagctggggcccagttgaccaaggaaataggcccaaactgagttaaataaggtgaaatggggtccttgaatcaactaaaaatgacttgg

SEQ ID NO: 72963 - DNA, 727 bp, Cannabis sativa
ttggctcaagggtctcacaaaagaattggggtttaacacagatgatgtcactgtgtactgtgacaaccaaagtgctctgcacctaacgaaaaaccccatgtttcatgagagatccaagcacatcgacatcaaacttcattttatcagagatgttgttgcaaggaaagatgtaaccatgaagaaaatcaacactgcacacaatccagctgacatgctaaccaagtgtgtcacacagaccaagttcagaaattgtctgagcttacttaatgttaatggctactgaatgattgttccttcaagtcattaacctctactgagcctcatcttctctcacttttcaaaatggtgaaaataaggtggaattgttgatgttttaaccactttgaaaagctaactgtattaactgttttgacagctcagcctatggttaatgactgtccagctgtcatatctatatatacctcctctccccaactcgatctagacaaggctagagaacaactaccatcacaagtctaagttagtagtgtccaagattgagagagaactcttcaaccgtgaagagagggagaggaggatttcttacttgaaaaagaagaaggtgatccaattttcttcttctttacctcctgtggagattgttgttactgatatttcgcaacaccaaaaagtacaatttaactggaaaaagagagaattatttgagagatgacaaatgcgagtattc

SEQ ID NO: 72964 - DNA, 1479 bp, Cannabis sativa
tgttgcctagattagtctatcttcataaatctcaatgctttatctaagttaaataaattgcatgcttcatggatttactgctttaggtaaaataattaattattgagcgattcgtcttgattacatacaatagggagattgggataattgactgcttcagcattatctgcgggattaatagtttgattggaaactaaaaaattacattctttaataggaattaggaatgattgttgagggtggcgaataacctttaactagtctctcatatcgtagtctcacattaaatttgttttctttaatttttattattgctatttttattctaatcatcaaaaccccatttttttttaaatcttgttactaaattgtgaataattaaataaacatagtcctcgtggaatcgacccttacttacgattatactaaaataattggaagtattggaattaaaaaaatagtaaatttgttgtggcttacgacacgcatcagtgatgaacccacctggcatcactctccatgaaagttatgtcgttgcattctttcttgaaaagcttctcaggtcgctcacttaaattgttcacgttggtgagcgatttctcttttgcttctttagcatatcgttcttgcaacttcttggaatctccagcaatatggggtcctccaataatcgtcaagatattacgaggagttcgtgaaccactcgcattgtttgtgtcatcattatcacccgcttgggtacgatcttctccatttttcttgtacttgttgaatttttctcgtctgatctgttccttgatctcatcctgtaggaaccaacattccagggtggtatggccaatatctttatggtacttgcagaacttcttcaaatctcttttgtcgcgattttctctaatcgggggaggctttctgaagactccattcttctcctcaatcgcgtaaatatgatcgtgagggactgctagttcagtatagttcacaaagcacgatcctccttttctctttggagatgtttccttctttgagggggacttggccagcttcggacttcgctgcctctgagggctgcaacttctcgggcttcttcctctggaagtatttcctctaggacttcgagatcgtgaccgtggtatgggtaactcgtgtttatcattcaccctttctagctcagccagagaattttcacattctcttatgcggctcagccatggtaaataattctaccaacgactctggtcttcgagcctgcaactctatccagaaatcggttcatggtaagacacctataatcaacatacaaactaacgaagactcgggggccttctcgaccttagttacttcaacattaaaacgtttaaagtaatcttgcaaatactcaccgacttcttgcttgatgttagccagggttgtgtaaggtgtcacgggctcaccttttcaggcagcggaacacccgtgcggcaccttgacttctctaag

SEQ ID NO: 72965 - DNA, 891 bp, Cannabis sativa
tggaaaactcgaacctacaacttaaggttctgctattactaaatggaaccacaatatcataggaaacatgaaatcacccaaccaaggcactgaagtggacaggaattgagaaaataagttgttcggggaatctgccaaaaccgattaaccggttttacaggtcttggcaaaccggttaaccggtttgcaccaggtttccccaaacatttcacaacctactcaaaacatgtccaattgccaccaaacattccagaagacctataatgagcttacataatcatttcaaatcaatagaacccagaaaacacacaaactcaaaatatgccatggatgaaccaagcttgagttttcaaactcaaacttgtgcatccatgctaccaaacctccaaacagcaataaaacaaccaaactaactcaaattaagcttaaaattcaaaccaaacataaaccaaatcctaacagtccctaaatctcctatatgcataattaaccaaaaataaaacttcaaaaacacatgattaagggttctggaatccttgttgaattttccagaaaaaaaggatgaagttgttgggttttctttggttttgggttggtcgaacaaggagagagagaaaggaggatgagttctctattttttttcttcttatttctctttattttccaaataaaaaattaatcaattaaatattacttggctgaaaacaatctaaatggccagctgccattcccttaggcagccattaagcctcctaaaatgacaaaaatacctcgtaagcttaaatttaggcaatttaaggtataggaataaaatggtcaaaaaccataaccccgtccaaactcagtattctatttttctccaataaatatcccactaagaataaggttcta

SEQ ID NO: 72966 - DNA, 933 bp, Cannabis sativa
ctcattggaattggacttgtattacaccatctttaattacaagttaacattaatattaattgctaattttcaacatattaaaattgattaagtgttccatttaactttgacaaagccctattacaaatatttttacttttaatcgcaataaaatttataactaaaaataaaaaaattgtgtttaatcataaattataatttctatattgtcactaaaaagtctgtggctaaaggtattaattacaaaaattacaattttgtgttactaaatgtgtttttagtcacaatatttgttgttaataaaactaaattagagataacgtagtatctaaataatatgttttagtcacaagtaatttttttttgtgactaaatcacatttagtcacaaaaaatttatgttagaactaaaaaatagtcactaaaagtagatgttttttttagtgtgtttattattgttgggccccattctttcaccttgtcacgccgctacctcaccttgactctcatattagtatgatattatccgctttaggtctaagccctcacagttttgtttttaagcaccttctcaaaagaaggcctcatactaatggaaaaggtagaacacttaattatatccaagacaactcttgtcataataaaaaaatatggagaggtaaatagagagtgtctttacataaattggaagagccaagtacggagtgagagtgacagtaaaaataaacaaaaacagacatatgtatctagtctatgggttagttgagagctccaagcccggatgggtatgcctggccgtttttatcaggcacattgggagattgttgcaggtaatgtggttggtacggttactcaatttttccaaaccgatcataatctcaggtttccgaggttagatgcttcaatccagatgtatgcgacgtctagattcagg

SEQ ID NO: 72967 - DNA, 852 bp, Cannabis sativa
  modified_base (632)..(648): a, c, t, g, unknown or other
tagtaattacattgtattttaaaatacaaggtgtgtttggatgtcaagtggtaattacatgtgaattcctaatatcatgtttgacatgatagtaagtaattacacagtaattataatatttaaaaataaatttcatcaattaataatatataaataaataataatctcttcataaaataaagtcaaaactataacaatatagtagcaaatatttaaaaaatatattttttttttaagactatctaattgctcttccgttccatatattttgagctattctatctctaaaatcaaacatatattgcttgtcatcatctgttggcccgtcaccaagttcttcatctgaatctgaatcaaaatcaatattgttcaaactttcacaatattgatttgagaaaataggttgatgaatggttggtattttttctttttgattgagagagatggaatatatagagaataggttgatgaaaagttgtatttgggaatatgtgtgtttgatgattgataggattttcttttttatttgagagatatggaatatatagaaaataggttgatgaaaggttgtatatgggaatgttacgtgtttgattgatagaaaaaaggaaagtcaatacattgaaaataannnnnnnnnnnnnnnnntaattaaaataatttgaatttatttttttgtatgtaattacacccaattcacatagggggtatgagaattggagagagtaattgaggccttcaaattacttctaattacacagttactatgtaattacgtggccacacaaacacgtcaaactgtgtaattacctccaattacatccaattccaattcctaggtggctttccaaa

SEQ ID NO: 72968 - DNA, 526 bp, Cannabis sativa
gatttagaatatgcagaaccacttgtgtaaccaaagacccaaccacttcccagttgtgttggtagaacatagcagacatgccatcaagaccaggacttttatcagctcccatagtttttaatgctgaaaaaacatcatctttagtaaaatcttggagtagaaaatcattatgagcatctgtaatagtggttggaattgttgagagaacatgattgagagcccaatgatcctcttctgaagctttgaaaagagtttcaaagtaatttgtgataacagaagtaatttcatccttggaatacaaagtttgaccattaacatcctgtatacttctgatactgttagttgctttccgtgaagaagctttggcatgaaaaaatttcgtgtttcgatcacctgaagtgagccattccacccgagatcgttgttgccaatattgttcctcattagctagcagttcatctaaaatagcttctgccgaggtaatttgttgtgaaaaatcaggtgctgaagttgtgtcattatgtaa

SEQ ID NO: 72969 - DNA, 1415 bp, Cannabis sativa
tagatgaagaagattcttgggtgtgagagttgaaacactttgaaagaactcaacagagaatctcgtctcaactgtattgtacctattcttgctcaatcaataaacaaggataacggtagtgttccagagctagagtagagccatagatcacatcgatctatcacacttgaacaagtatatatcttgttgttgctttctttattttatgcatttattgtttctggttttaagactctgtttgcccctattttctgttgattattgttcttggtttggtaatcttgtcattgataattgtttggtggtttaaagtttagttgatttgattctgcatcattagtcgtaattttcccacaaattagggttatgtaattgatcaagatcgcagaatcaagattctttccgctgcaatattaaagaaactttgactgtcatcaatggggagattcgaattggagaaattcgatggcactgggactttgctctatggagaaaaagtcttaaatggatccttatgcactagaaattttctaaggttcttcgggatgagaagttattggcaggaaagaaaccaaaggaaaaatcagaaatggaagagatgacatactacacgattatcatgtatttatcaaataatgttcaaagaaaaatcatcacagagaagatgtcgaaagcagtttggggtgaattggaagaattatacttaaaaccatcgattactagcaagattaatttgctagaaaggttatacggttttagaatgatttcttcccttttattagatgagaatattgatagatttaatgagattattgtaggtttggctaacataaattacaaggttgatgaagaaagccaggccatcatcctgttgacatcacttccaatcgcatattaagaagttaaggcagccatcaagtatggcagagacgtaattgcattcgaagatgttcttgccacacttaagtagaaagattttgaattacagttggagaaggaatctaagaaagaagaagtgtttttggcaaaggaagatcacctaagaaagcaagttcaaagagtaaacaccatcattctcaatcaagatctaagtccaaagaggacacaaggaagtgttacttctgtggaaagtctggacacttcgaaagattttgcaagaagtacaaggagcaacaaggcttaagcaaatctcacaatggagattggaaggacttacgacaccatcaccatgggaaggattctattgcaatcgctaaagatagtgatgactactccacgaacggagagttgttatctatcttaaaatcctgaatgaatagggagtggattcttgattccgaaagcacttatcatatgtgtcctaatcaagagtcatttttttattataatttagttgatggaggtaaagacctaat

SEQ ID NO: 72970 - DNA, 748 bp, Cannabis sativa
aattaaatcagcaaatcaagcagaggacaagtctaaatccacaggtgataaaggtaaaagtattgctttaaaagttgctgaaaagaaaagttatgatgatgaatgtgatgataaaattgctttattaaccaggaactttcaaaaatatataaaaaatgagtaataaaaaaattgtacccaaattttcaaaaggaaatacttcttttaaatttaatctgactaataaaaaaggaattcagtgcaggaaatgtgaagattttggtcatattcagtctgaatgtgctaatacaataaaaaggaataagaaaagtttcaaagtcacatggagtggtgataaaactgatagtgatgaaggtaattttgaaaatgttgtactaactttagtctcttctaggattgtttgtgattcacaagtaagagaaagactagtacgtttgaataataccattaaaaaaaaggattctaaatcagatgaaactgaaatctgtgaagaatctctgactgagtcttacaaggttatgtatgaaaagttgatacatgttacttctaaaaataaatcaatgtctaaaataaataaaaaaattgtctcatcaaattatatctcttgaattcaaaataaaagaatgtaagattatagtatgtagtttgttaaaagaagaatattatcctaatttttgcccacttaacttggtatgtccacataggcaaaactaaggccacgtagaatatagcctgatagtagacgagc

SEQ ID NO: 72971 - DNA, 1151 bp, Cannabis sativa
  modified_base (1115)..(1121): a, c, t, g, unknown or other
agaccctctctcaccttacttgtttctccttattgttgaaggcctttctcctctcatccgttctaagtcccatgacaatcattttaaaggagtaactacatgtcgctctaccatgtcgatttcccatctcttattcactgatgatagtcttctcttcacaactgtcaagaaccataattgtgaggctatcaaagctatgcttgacatatgcaataaagccatcggacaatccatcaattttgccaagtcttctgtttggttctctcctaacacccaggcccaagctaaaatctctttccttcactctctccaaatggaagataagcccttcattgacaaatacgtgggtgttccttaatgttttcatcgctctgaaaaatccttgttctttttcatattcaaagatccagcaataagctttctgtctggaaccaaaaatcattctctagagctggcaaagaggttttgctcaaagctgttatccaagccatcctttcttacgttatgtcttcctacagaattcccatttctatttgtaaacactttggaaagttgatttccaacttttggtggggatcactgggtaacaataaatgccaagttcattggaaagactagccttcgatatgcaaatctaaatttttggggggtttaggttttcgtaatattatccaccacaaccaagctatgcttgctaaacaagcttggcgtatttttaccaaccataacacccttgtggcctccctcttaaaagctaaatactttaggcataacgactttcttcatgccaatcttggacatgtcccatctttcacttggagaattcccctttgaggtagggaccttcttttaaaaggtttaatttggaagatgggggatggtaaatccgttcatctctcaagcccaaattggattcctggccttaaatcggtctccttcaaaaataacaatatccctcctgaagaaactgtttccttttttatcaacaatcaaagacattgggataccaataaacttgactcttattttgacaaggacaatgttgactctattctcaaaattccaattaaaccatgtattcaggactgtctctctaacaccctaactagcatagnnnnnnnacgtgatttttaaacgtattgtgcagctcg

SEQ ID NO: 72972 - DNA, 1014 bp, Cannabis sativa
  modified_base (690)..(691): a, c, t, g, unknown or other
ggacctgaaacaaaagaatcaagcgtaatatagccctaaaactagaaacaaagagtgaaaactaaccgaaatatgacccgaatcttagactaattttagcctaacagctgggatagtaggctacatttgcaatgtgtgagagaagccctcaatgtgatgacctcgcgattgaagatctatatggtgccttgtatcaaaagtatatacctgatagttgtcttgaatatatataagtgttctactctattagtatgtgtcttttggtaagatatctaaaaataaaaatcgagatcgaacttaagctcaaagcgaacaaaatcatactaatataagagtcaagatgtgaggtaacgatacttgacaaggtagaaaagtaggacccaccactttatgtaaatttatcaaccaaccaattatatctgtatgtataatttttttattaattaaactcttgaatatctcaatgataaatattgtttaagtctattcactatacgatcaagttaaagggccttatgatcagtgcttcattcagtaaattaatcgagaaatttaatcaccgagatgccaaatcatatataattatatattgagcattgctattaggcgttggtggtgcctagcaccttctcgacatgtcacattgcgattggctattaataatttaatacttcctaaaagctattatannaaattatatgggactcgatacttaattggaccaataacgatattaacacataagaaggtggtagacaccactagtatcctttagcatttctcttatatattatactacaataataaaacaattattataataaatgtgacttacctgtaaattaagctgtaaattatcaagctgtaaagtgtcataattataatgaactggttttagtgtatattttcaaatattatatatattcattcattcaactactcatgagaagtataattaagaagtaatgtaactaatcattatggcttctttaattgtattttctctacaattat

SEQ ID NO: 72973 - DNA, 1641 bp, Cannabis sativa
  modified_base (405)..(405): a, c, t, g, unknown or other
  modified_base (983)..(985): a, c, t, g, unknown or other
gactttgaagatctgaaattttcgagtttctagtgtggtgaaccgaaattccggatggtacagggttgcaccaaccggaattccagatggtcaatttacaagaatcgtcgatttttgtattttagccataacttttcactcgtgtgtctgttttagacgttctagataccgttttgaagcttaagaagagctttatagtgtgagaaatatattagagccaaaatatgtattttattctagggtgttttcaccataagatttgatagaaaaccctaagttattttatgcgggttttggacagtgttttggaatagacccttattgatttacctttatcgtgacataagacctgagattgtcgagcatcataccactcaggtcgcccacatacttgactttggactngaggtaagaaaagtattaagcaccgtatatggtaatgttatgattgttatcgtctcgattatgatcaagatctctgtatgtgtttattgtgacttaatgtaaattgaggttaacgatatgtgtttgttacgactcgatggtaatcgaggtaataatgagaaacaattattgttgtttgtgaattgtttataattaagggaaaaacatggttatcaccattgttgtgaataaattaagatacggtcattatcgttatgagcaatcattcttgaaactgcggatatgtttcttacttatcgtttgctttaccaagcaacgatagtgacatatgcaactcgtggataacgagtggtaaggttagaaacagccattacgttatgagtaattactcgttgaaatcgcggttaggtttcttacttatcgtttactttatcgggctacgatagtgacatatgcaactcgtggataacgagtggtgaggattggaaacgctcattaccgttatgagtaattattcttaaaaccgcagataggtttcttacttatcgttgctgtatcaggcaacgatagtgacatannnaggtcgtggttaacgagtggtaagggtaatttatgaagtaccaggattgtgtggttacgatattgtgaaatggattaagcgtgatattatgtgagagtcacaaatatatatatacttgttatattgagatgcgaatatctgcgtatataatacttttgatgtaataacttttcttgctgagtcattgtgactcacgagtgcttcatggtgcaggtaagaggaataaagctatgttcggccatgaatcagaagtctcccaacagtgtacatatcagccgtggtgtcttggcttctgagaagcaggatcaacctcttttcttttatttgtgaaagtgtaactttatttttctattaacggttttgtaacttgttaaaaagaaattttacaaacaggggatccctatattttagtggtatttcataaagaagttttattctgatttaatcaaaaagtttttaattaaacctcacttttcataaactaatagaatagctaggaataagtttgtaaaagcacacacacgtggagtccctgggggtcggggtgttgcatctcctttactgctttcgtcgcattatcacccggtggctcaggagacggttcagttaacacaaacagggcattttcaccaatgagagaaatgttaatgttctct

SEQ ID NO: 72974 - DNA, 1150 bp, Cannabis sativa
atgattatttatgcatttatatattaggttagggttagtgtgattatttatgcactttttttttttttgttgaatcgtatataaaattttaaaatctatatgataaaatcgtatatgaagttttaaattttttgaatctatatgatttttattttattttatataaataatattttattattttattatatataaataaaaaaattatttattaatttctcataaaccaaaaattaagttatatagacacactttatatagaatagataagaaaattttaattataattttataagcactaaaactaaaaatgacagaattttggtgatattcggaaatgatgtccttaatccttatgcaataattttccactatatacacaaatttattcccctttttatatggtggtgtccaattttttttccttataacgtgcaaatagttcaaaaattataagtaccatcgtgttttaattaataatttaatatagtatttggttggaatgaataaaaatatagaaataagaatgaaattgagaataaaaataagaatagaatggaataaaatttaaaatgcattaaaaaaaattgataaaaaaattattaaattttttctcatgttacattagaatgatatttccttttattttaaaatagaatagtcattttactaaaatagtagaaagaacatctcattagaatgacattcaatactttaaaatgcaaccaaacaaagaaatagagtaaaaattatttcatttttattgcattcgatttcattacctccatgccacctaaattatttttgattcatatttaactttgtaattttgtattgtggcattgtgtaccatgttatatacacctataaaaaaaaatgtctgatattttaataaaatttgtatataattaataaaataaatgaaaaataagaacctttgggctaagggaagattcaagctttatcatatcttcaagctttgcaatgttcacaaatgagaagattcaattagttgcaccttaacaaatcatacaacaaaagcaaccaatttatctttagatttcttcaaggagaggtgcaaatcaagcaatctggcccatcacaaacacatggatcctgctttttcccttgttaattttgggaatttttt

SEQ ID NO: 72975 - DNA, 1370 bp, Cannabis sativa
ttaaaaaactagttatacataaacgatttaagtaagagcttacaatgggaagtttactgcaatattgtccttgggagcaatgcttgccccacactcctttgccttgcccatcaaaactaccaccacccattaaagttagtttgtcaatacgttcaaaagtaacccatccatctccatctttgaaaccagcggggtcacttggagcttgcaacgtgccttggagattaatcttaattggagccttacatggtccgtttaatgtcgctcgttttaacttgaatgtgccttttggaattcgtaattcagattgggtgggagatgcacatgcttgtttccaagcattggagagagcctatatacatatgtatgtataaatatgtgagaatcaaaattattgaaattaactttcacattcatattgatatggtgcaatacgaaattataatttgagactatattgttactcaacataatcaatgacaaaggcaaatatattaagcaatgaataatgtgaaaaatttatgtgtatatatatgtatgtcatttacacacacatatatatatatatatataaatatatgtaatacttacttcaccaatatcagtattaggtcgtgcccttacatcaaaaatggaaggattcacagcaaaagtaatgcctaataacaatgaacaaagtgttattgttagattaaattttagagccatcttctcttatgcttaggacactagttttctttaatttaatgagctagaatgaataaactatgtttttctttaagtaacttgattcatggatatttatacagattaatagaaaactattgccgtgaatttgtaactaatcaaagaaaactatatactagaaagaacaatatataacaaaaatactactaaatatatgtattcttgtgtcactacccattcttttctaaaattagtttttttaattcttatacatccatatattatttaatttatgtgtgaataaatgagtacaacacaatatttatatgtagtagttgttttataagcagtgtatatcgtatgttaattttttattactatgattttacttttttctaaagaccgtgatatctctaatattaccttttcgaaatgtccattatacattttcttagagatattattccaattttagcatgaagacaacacaatcaacaagatgtaaatgttgttacgataaaattatgctttatcgtcgattctctgttgcatttgatgttattctgtgtagtgaatataattagaaaattatattatccatgctcataaattgtttcttttcaatattatatctaaaattgattttatttataaaaatacttttaagaaaattatttgtacaa

SEQ ID NO: 72976 - DNA, 892 bp, Cannabis sativa
  modified_base (394)..(407): a, c, t, g, unknown or other
tattattattattattaattcttatttttattatttatgaacttattattaattaattaattaattacttttttgttattattagggtaaataccattttaaaccttgtgttttgcaaaaattaccaattgaacactattttttttaaatgacaaatggactttatatttttcaaaatagtaaaaataggatagctcaattttcaacaattttttttttaatataatcaactttaagataatttttaacacgaacagatacaaaaaatgtaattaattttatcataatatctcttgatcagattattattaagttttattttgataaaaaatcagttcaggatcttatttgtacaattttagaaaatacaggatattattattattattattannnnnnnnnnnnnnattattattattattattaatttgttgggcctttgtagaggctttggggataaaaaaaagtattggggaattgtataacttgaaatcgattctttagtttcagttcaaactgtttttagttttttgaatttaccttcctcttttggtgatctaagattgtaagctccttttagcttctttgaactttgtcaatttattttttgttaaacgttctgtaaataaagctgcttattatattgctcgtagctcttgtttatactcggatcgcagttttaatatggatgatattcctactgaatttttatatattgtaatagttgattctattgttaataaaatttctctcttaaaaaaaaaaaaaacttattattattaattcttttttctaaaaaaaaaatacaattatttatatgatgcttctgtgtttgtatatataatgagacgattattattcctaatatatctcttaatcaataatatagatt

SEQ ID NO: 72977 - DNA, 891 bp, Cannabis sativa
aataggttagagggtaaaggttcaaaccccaccaactacactttatattttctttttaaatttatttacgccccccctcactttaaattctgggtccgccactggccatggagatggtgatctcattgtatcattcttttattttggtggagagtgattctgagattgtgatcaagaacataaaaggggatgactctaattaagggattgaaaactatacaagacaatgcaagtttctcttcacttttatgactagctgtaatttttttttattactaaaaaccgtaattttgcaggtcataatgtgactaaatgtacttttactaagagcatctccaaggagtcagtatatatcatatataccgtgaattttggtccaacaaaactgtatattttgcagcattttgaggttttgtctacagtgcacggtatatatgccgtgcactgtagacactgcatatctttttttttttttatatatataatttaattaatatttattacgtatatatttatattattgtatttataaaattaagaattattttttaaaaaattttacaataaacatttttaaaagtgatgtacaaatttattcctatttgtttcggtacctgataaactttcttattttatttttttatatagtcatgtatattatagttaatataatataacaattatttaaattatattagttgaatatatcaattgtggtaatttttgttaattaatatgatattaatttattttattttattaaataattaatataataataaaaaatattttttttagtgtaatttttgatgttgtgactggagtggaaatattattttacgctaaatttaatgataatataacaccaaattaaatgtatgtagatgctct

SEQ ID NO: 72978 - DNA, 964 bp, Cannabis sativa
taaaaagggtttaatagctagggatataaaacttagataatttaagcgggtggagcggttggagcagtggagccatccgcgaccttgctagcagcctcattagcgacctcttcagtattcgcagtctttgcgtcctcaggaaaaagattccctccgcacccctgagtctgagtaggcgacatagcacgaaatgcttccgccatctcagccgcctctgccccaaggattgagaagtcaaaatttggtaccttggacaaggtcgtatatatatagtcagagaccgcttggccgtactgcttcttcccattctccttctcagtctccaagtcgcgagacaactcctcgaccttcgactgagagggtttggcttgaatttccacctgctctttggacctctggaggttctcgagttctttgtccttagcatttgcttcctgctttagcttcttgttgttctcttgaagctggacaatctgtttctttaaaaggtccacctctttgtagccagcgacaaatgccctcgagaacatagtgatgaactgcagaggccaattctgcagagtgtggcattaattcctcaaaaggagtcccttcaacctttgacataaattcctcgcccacaaacttctcttgaagagctaagatgttgcgagcttgaacagctggatcgatcataaccttcttccccttgtcctaagaaggcttggttttcttcttggacgagtcagcaataggagtcgcgacaacgtcacttttcctcttctgagtaatgacaggagaattcgtcaccgtcccagtttttggcttgcgattaagcactggagcctgcttcaaaaaagtcatttctacgaggacaagaaaagttaagttaaaaatatacaatttacgattatatatcacatatacacgatgagttacctgatgttggttagaaggtctatttggaaagacgtttgtctatctt

SEQ ID NO: 72979 - DNA, 3239 bp, Cannabis sativa
ttgaagaattcataaaaaatctcttgttgtttttttgttaaggacaaattaacagggacagtgcttcttaaaggaagagctaaagatggcttataccaacttggagaaacatccggttctgctattcaatgtcaccttaccaccaacattagggtcgatcaatcttgctgtaactgttcttgcatttgtcattatgatgtaaaaacagattcttgtacttctcaagacattaataaaagcacccaaggtttttctgatgtttctccacaagcttattctgtctctaaattcaatgatgtaaattgttggcattctaaactagggcacccagctgataacactttagctagacttttaccacatatttcacacactggatctatcaaagcattacaattttgcaatgcttgtcatcaaggtaaaagtcataaacttcctttctctttatccaacagtagggccacccaacctttagctcttattaatacagatctatggggtccttcccatgttgtgtctaaagatggcttcaaatattatgtccacttccttgatgactatagtaagtactgttggatctttccattaactcacaaaaatcatgcctttgatgtgttcatcaaatttaaaagtcttgttgaaaaacaatttaacttgcctattaaaagtgtccaagccgattggggggtgaatatagtccatttgctcggttcctagctgaccaaggaattcattttcaacatccttgtcctcggacaagtgaacaaaatggtcgcgctgagcacaaacaccgtcacataaccgaaactggcctcacgttactagctcatgcaggtttgagtatggattattggtggtatgccatggcttgtgctgtgttcactataaatagacttcccacaccagtttttggaaatgtgagtccatatgagtgtctctttggaactaaaccagattataacattttaaagtcctttggttgcagctattttccccatttacgaccatataattctcataaacttgaattgagatcacaggagtgcatattttttggttattcctctcaccacaagggttatttgtgtgaacatccaagtggcaagatttatatttcaagaaatgttatatttaatgaaggacattttcctgctctttcttgttccagcagtgatacatcacaacaggtacagtccctatcccctcttcctagttttaattttcaaactagcaatactccctcattcactgactctggctttatttgtccttctaccacaaataatgcgacggttcctgaggatattgatggtaatgcaccccaaggacaacctacaacaactatgccacctaccataccccttgctaacacatcacgccccaccccatgtgacacactacctattgattctttgaataaccacaggaccactaaaattcctcttacttctcatacaaatcccattcttagcctaaaaactacttccaatgccactttattacctattatatcacccactactctaccaaatacaacctgcccctctatacctgatggacccacacattgcccaaccaactccacattaccccctcttatcccaacggctactactaatgtacctatgcccactacagctcatgattcaattgctactaagcctactgctactatcaatgatagtgaccccacagttcctactactacaagaacccatcaaatgcaaacaaggtctctaagtggaattagaaaacccaaagcatatacagccacaaaataccctttacccgagtccctcattccatctacaccaaagaacactgctgctgccctcaaaaatccaagatggtttcaagctatgaatcaagagtttgatgctctgaaacaagtcggtacatggtctcttgttccctattccccatatatgacagtcattggcaataagtgggtacacacggtgaaactcaatgcaaatggcactcttgatagactcaaatcaagacttgtggcaaaaggatacttgcaaactccaggcatcgattatgaagagacattctccccagttgttaaaccggccacagtgagaattattctcacattagcagtctctcttcattggcatgttcagcaactaggtgtttctaatgctttcttaaatggagaactacatgagactgtctatatgagtcaacctgaagggtttgttgatccaacaaaacctaaccatgtgtgtcaacttcacaaagctccctatggcttaaagcaagctcctcgtgcatggaaccaaactctacgagataagctactggaatggggttttactgcatccaaatctgacacttccttgttcatttatggctcgggtaccaacactatcattctcctggtctatgtagacgattttctaataactggtcctaatgtttctctcatctctaagctggtttcagatctcaacaaatccttccctttgaaggatttaggacagttcattatttccttggtgttgaaatctatcgtgatcaatctggcatgtatctttcacaaacaaagtatattacagatttacttgttcgtctcaacatggaaggagccaaaccttgttctaatcctacaagctcctcggtaaagctctctttgacagatggtgaaccttttggtgatcacactctttatagaagtactttgggtgctttacaatacctcactctcacaaggccagatgttgcatttatcatcaacaaattaagtcaatttattcatgctcctacaactctccattgggaagcctgcaagagactcatgcgctatctcaaaggcacaatacatctcggcctccatatcacccctgccgatgtcccaaccttaactttagaaggttattcagatgccgattgggcatcatgtgttgatgatagacgcagtacaggtggttatgtaatgttttatgggggaaaccttgtctcatggtctgctaagaaacagcaggtggttgctcgatctagtagtgagagtgagttccgtgctcttgcaaatgcggcagctgaaatgaaatggctagtctctcttctctctgaactaaatgtctcttctccacattctccaatattatgggttgacaatcaaagtgccgctatcatagctgtcaatccggttttccatgcgcgatcaaaacatatcgaaattgacttacattttgttagagatcttatcctctctaaacagctatccgttcggt

SEQ ID NO: 72980 - DNA, 1067 bp, Cannabis sativa
tataaccaaatttgatgtctcgacctgaaaaaatatagactaattaatttgttattttatgggcacacattgtgtttgaaataaaaaataaattgttgttccagcatacgaaaatagattaatatatttattggtgtatatcattatgtttgacttcaatttactttgtattgaaaaaaataaaatggtgtaccaaaagaaaacaaactagaagtttattgacatatgtaatagtagactatatgaaataaaatgaattattgatctaatatacgaaaaaaaaaattgtttcaatatgctaaaataaactgataaatttattagcatatccgatggtagactataccaaaaatataaataaaaaatgaaattttgtttcaatatgccaaaataaattaataagtttatttgacatatatgagtataggcatattcgattatagaatatttggtctgatcatattttttttaaaaaaaaattaatgaatttatcaaaagtaaccaattggtattttatcgaaatagctaattggtccaaaaaaaaatgtcgtattgttaatgatttaaatgttatctataacttcattctgtatttaactaatctaaatgcatatattaatttacatttaaaaaatatgggtcacttaaacatttatgatatatacttttttaaaaatataatttactaaaatatagtagcttattagttaacaactcattatttttgaaaataaacttaaaagttactcaaatgtattaatataacaaaaataattaattgattatttaaatgtatatatgtaagttgtagagcgaggtaaccaaaatatatctcaaattatataatataaaaatgattctttttttttttttatatataaaaaaaaactacttgttgttctattatcaacatgatcataagcaacgtggaaggtttctagcttccaaaagagggttacaccagcagttgctcttgctgcattggtgtacctaatttggaaggctagaaatatgaagttttgatagcaaagagataagaatctgaatgttcttatacaacaattgaa

SEQ ID NO: 72981 - DNA, 1214 bp, Cannabis sativa
  modified_base (74)..(76): a, c, t, g, unknown or other
tttcgcttattgcaacataattttcagttcccatcaaagcagtgcgttgtgacaatgctaaagaactgaatatnnnaagcttttacagtagcaaaggcaccatgaagtacaactcttgtgttggtcgccctcaacaaaattctattgttgaacgcaaacatcaacacatattaaatgtcgatagagctttactgtttcaatttcatttatctttacctttggagttatgtcaaaaatactgttgtttatctcataaattgagctccatctatgttacttaacaaaaagacttcatttgaagttctctataagaaagctcctgcctatgaacaccttaaagcttttgggtgtcttgcctttgcctctaccttgaaaaccaaacgacataaacttaatccaagatctcgtccttatgtctttattggttatccacctggtatgaaagcttacactctcttaaacatagaaactcaagagattattcactctagagatatttattttcatgaagatatttctccactatccgacacgaactctcctaattcaataaatcaattactctcacatctagactgccctctacaggaccatctcaacacccttctgaggagcatgaatctgttcccgaccatgatgcaacttcatctcataaaatggacattcctcaaagtgtgattgacatcaactcacatgtcccacttcttgataaagtaccatccacacccagggagtcaataattcattcccctatcacttccaaaacaggaagaactttatccaaacctaaacgtctttcaaattacatttgcaataccactgctactctgtccactgcttaccctattaataaatatttatcttataataggttaacataacactttcgtacatcgatccttgctgcccattccattgttgaacccaccagaggcagctaatgacccaaaatggcaaaaagccatggacacagaaattgatgctctcgaagctaacgacacatggattgttgtcactcttcctgatggatatcatgccattggttgcaaatgggtatacagaatcaaatacaatgctgatggcactattaaaagactcaaagctcgattagtaactaaatgtattgattactttcacacctttgcccttattgcaaagtttaatacattaaaattactgcttgctattgcagtcattaacaattggtctttgta

SEQ ID NO: 72982 - DNA, 1306 bp, Cannabis sativa
  modified_base (34)..(42): a, c, t, g, unknown or other
agggtgttaatcaacatacttttgagtagatctnnnnnnnnngtaaaataatttccaacatgtccatacccgcccttagcctataaatatccttctaattctacacaaagaggggatcacaacctaatagccgaagctctgctaatactattctaagcttttctcttcttcaagagaaactaaggatacagagtacggtttcttgcaaaatattgtaaacacatcaaacacgctcttagaggctgatagactgactcgtggactaatgttaattaacacttgaaccatatcatttatttttgcattttattatttctaaagctcctaaatatctatttttcaaaaatctcagtatacattaccgtttttgtttaagggaaattggttattttgtacacttgaggaactttttggtaattgttgaaatattgtgctactagagaactaagccgcgctttgtgcgatgttgccaaatttttgtaattttttttaaatttgattttttttactaattggtatataattgaaaatataacattttgatgtgtatttttttaaacaatgtaacatttttcaagttattagaaaaataatttggtatttttaaaataccaaattataagtttataggtttaataaactgagcttgtgattgatggtgtagttttattatttaatttttttttcctaaaaaaaaataattagataaagtagttgagaggcgactcaaaaacaaaaactaagaagctttattatatataaatagttgaatactttatttaatttttatataaaattaccgtttgataaaaattaacaacataaaagaattttaatgaaagattaaaatataaaatagtaaaactaaaaaattataaaatataaagagaaaaaataaacaatataaaagaaatatagatattattgctacctgatctctttttattaaaacaaaaatagactacactttgagtatttgtttaagaacattataattaaaatttgtatgaaaagataaaattatatcttaaataatgtgctatttcaataaaaaataattaataaaattatggatatgatataattaataaaaataattaattatctctcatttttatatcatatgagttcagattgttacatctatgaaaaaaaaatttgaaaaaaagtgttttagcaagaaaaataagaaaagaaaaaattgagtttgagttaaatattttttgtatgaatatattttttgatatagtgtaaaaagagatattttttgatatttttttttaattaggtagttaaattaagcata

SEQ ID NO: 72983 - DNA, 516 bp, Cannabis sativa
aaattttatatgaagacagtgtctttagtcgtatatatatatataaagttattgaatatcaaataaaatttgtaaggacttgtaacacactaataactttgtattgtatatatatatgccttttcattcaagattattatgttattggtacaattcataaataaagattcttatgcttaaataaacgcataagaattcattctcttgtatgacaagttttctttatgaccaacatttagaaaaatagaaagttaatttttctaaaaataatcaactttccatagagaattcattctcttgtatgacaagtttcctttataaaaaggaacaactgtaaataaaaagtgtcctaaaagaaaaaaggcaatcatatccataaaattaacacaaaaaatactatttagttcacaaataaattaataatattttaacaactaaattgctaaataataacctaacaagatcattgatctccgaagagattagttgctccttgtgtaacatatagaccatgat

SEQ ID NO: 72984 - DNA, 1519 bp, Cannabis sativa
  modified_base (1154)..(1159): a, c, t, g, unknown or other
tgttagttttatggtacgaaatcaggtatgcagcggaagggttttatattatctgattatcattgtaccatatcccaatgaatcttcagatgtgtgtacattaaatcaaaataataaaaataataagtccagagtatacctcttgaaacctatcaaggtatcctcaaaacttcttgtatgttgtatctttaatctagatgatgaggaaattacaattggactcacactagtgtcttccaaatcgatccaccacacacaaggaatagtgtgggctattaggataaattgtataagctttgttcttgttgagttctcaatgcatgagcaagaacaggagaaaactgttttctttttctctctaggtattttgaaaatagttgtgttcaggaagtgagaagtgtgttctaatttctcaaatcaagctcctatttatagtagttaaatcctttaattaaattatatttaattgtttaaataaataaatatcgacaactaaattcagttactaatatttatgagagaatatctcaactacttgagaaaatatctcaacaaacttaaaatatctataatcacttttcaaattagatagttacctaattgaattaattaaataattaattaacctaaaaagacaaactatagggatagtaacatgctatagacgcctacttttatctttaagacaaggttggtgtcttttgtcatgacatcttttgtcctgacaaatattgtcttaataacttttgtcttttccctaattaatcaatttgaaatattatttatttattacaaaaataaataattaatattttcaattcaaaatagatttttctgaacatcattatacaactctttatccttgcccttgacattatttcaaggtggcgattcgaggaccatggacctataattctaagctctaataaaatagattatttattgagtctcatcaactaaataatcatttcttattaattccatgattactctactataaatatagaattgaactcttagtaattatataattatatttaccgagtttaactacaatgtccattgatataatcaatttcagtgatgagccctccatttgttggttcataataagttttggtcaaattattattttaccattctaattacttctnnnnnntttagtaccattaattcactagtgcaagtatcattcaggatatctaaatttgtggcacaacattctagttcaaaaattaacacataaagggaactagcatttgatccgctaggaaattcaggattccataattgtaaattatgttcccaatcatccatattattagattttcaaaatagaagttgcatgaatcatcttctctgagaaattttatcgagcgaatcaaaatcctaataacatgatcaggagttcatgataactcagaattcaggtcgatctactattgatcatcgttatgatatgaattatgtctttatgataaacgacatgttaataaagaaaacttcattcatatcggtc

SEQ ID NO: 72985 - DNA, 586 bp, Cannabis sativa
cagggcactaaaacgcaaaaatttagtagaaaggtcgtgatttaaaagtatataggcgggcctcaacattggaattcaatgttgaggcagaagaccctcaaacttctcattgcccaaattcatgcttcaagggcacgacatgcctatgtagtgtcgcggcctgcttgtttctttgagaattcctggcgtggattgaagacatgggctgcaacactcaatgagcatgtcacggcctgcctgctattctgatgaaaattagggctttaaccctatcacaaaactatatataaagattttttttgacacttttgagaaaaggacttcaagggatgaaaattagaagtagaaagcggctcgagagactttcatcaatattttttcgacgagttcttttttctattttattttcttatgttctttattaattgttgtgagttattttcaatgactatgagtagctaacttttaattagggttgttaatgaagattgtttgacattttattttggtttaatgtgatttaattcttccccaattttctatgtgtatttgtacttaatttcttttaattgtctgatcaccaatt

SEQ ID NO: 72986 - DNA, 639 bp, Cannabis sativa
tttttttatatttttacggaattatacctagaaatctctattgcaactagcgttacaacctaaattgcaacaaaaaatcgtatagaaatccctattgcaactagccctgcaacgattttagaaaaccaaatcgtaaatttaaaaaaaaaattaaaaactagtatataaagtaattttctaataaaaaagtgtgtacctccgcatacatatgtttctgcaaatggtgttacaacatccatgatgatgagaagtactattactgatgtccctcgagctttagtattggagaaaggagattatttagagtactacgtacttaatctctcgactttcttttataaagtggagatacataatgactctattaagcctaaacttattagaaaaaaaggagaaaaaaagatagtatattttagtttattatatatcttttattttaaataagcgaacgaatatatatatctttctttttttttttttgaaacggatatatatatctttcattcaatagtcaaaatatatagagaaaaccattcaaaaataaagtattgcagctatgggtgaaaatcggttggttatggtcggtttttaaaattttataaccgaccggtcggttacggtttttattttacgaaaacc

SEQ ID NO: 72987 - DNA, 733 bp, Cannabis sativa
  modified_base (599)..(599): a, c, t, g, unknown or other
aaattagtggctgctagggttaggttggttgataattcaaattctaagtttgatttgagttagatatagcttctagcagctagtttggttatgtgttgtaatgaaattgtgcaagtttgagctttgaaacctaagctttgatctttaatggaaaatttgaattcagtgggttttttttgtgaattacaagttggattatgttgtatatacattgtttaggtactctagaaagtttggatgcatttggatgagttttgagcaagaaatgaattgttgggggaaacctggtgcaaaccgactaaccggtttgccaggcctgtaaaacgggttagctggttttggcatgatccccgaacaagccattttctcaattctcatccattttagtgccgtagttgggtgtttctccgtctcctgagttagtgtaatccctagtgactataacagagcctagagtaataggttcgagtttcccgaattagggttttgaccatgtgatttacctggtttcattatgtgattagggcatccatctatcacaagactttctgttcaggtcggccaacacacttgaatctggaaaggaggtaagaactgtntataatgtgtaatatgaatatgtgaatgtatttttgtatgatatatatgcatgctgtgtgcatgattgtatatgtttgggtgatatcatagcgacacaaccattgtgtcagttcagcagtacaagcatcgtact

SEQ ID NO: 72988 - DNA, 550 bp, Cannabis sativa
tttaaaatatgtgtttataaataaatatgtgtttataaataaaataaagtttgaaaatatttttttataagaataatttaggtgtttcaagtaaattaaatatattttttattaatttaatactgaggttttttttaatttctaaaattaatagaaaatttaaattttatttttttttaataaaaagagataaaatttagtgttatttaaagctgagggataagaataataattttgaatagcaatttttatatttaaaaaaaattaataggaggcagaattaaattgtgtcaaaaacagaaaatactaattattttatcaaattaatataaaataaaatacgaaaacatgaaaaatgtgatgtgcggagaaatgagaaaacaaagagccatttgcatttgcatttgcatttgcgttatgaagatgaagtacaatattatataattatagtagacaactggctgacatgacataaaaggaatcaaatatgattgtcgttcaaatgaggtgtatctgagctgcacttgacccttttgtgctttttccaatg

SEQ ID NO: 72989 - DNA, 1071 bp, Cannabis sativa
tggaaacggtctattgtttttactagtgcagacttagaaaaacgactcactatttttacagaaacaacctgccatttttaggcagttttcctgttttgttgattttctcgtatttcctcgatatttaaggctttgtcatgctatttattgagaaaaactcttagttgcgagtttagatcctcgaaaggttttagaaaattgtttacccattttacatgattgtgatttaaggcctctgttcaatacgtgactttccatttaggtcgactgacacacttgaattcaaaaacgaggtaagactagcatggatggcttaatatttctaaaattaataattatagttaaatttatttagtactcatcaatgggtaatacacattaagaagtgttccatatacaatatctatatatatatatatgagtttttaagtttcttatataacattcttttttacctatgataattccatcaaaaaactagctttttcatcaataaactaattttttcatcaaaaaaactaattttgattttatagaagtgaaatttatatgagttttaaattttttttatggtattctttcttatctatgatgatttatcacatattttaagttttttctttttaaaaaaatatcatatttggtacaattaagtttgttatttaccacatatatcaaaaaaaaattccatatttgtaaatatcccaattataaatagataagtgttaataatttataggagtctacataaatataataatatatcataaatataacaaaattatattcaacaatttgcggcaaaatctccttatgttttaatttttatacacttaactcctttattttttttttgtggcaaaacctccttatgttttagtttttatacacttaatccccttattttttttttgtggcaaaattcctttatgttttaatttttataatttttatagacttaatctttttatcttttattttagtggcaaagccctttaagtttacttttctttgtaaatttaaagttttagttagatattaccgttaaatactaaccggattactactgta

SEQ ID NO: 72990 - DNA, 743 bp, Cannabis sativa
ctagtgattaaatgattttgaatgttatgccatgctatatatgttgaaataaagaattatgcgctcaaggcataattaagttagactcggtaaattaataccctaagttttgtaataataaggtctagggttattaccctagaatatatgaagatataagaaagaaaagatgtacataatatataatattgctaatctaatggaagcatgaattagggttattaccctcaataggtattattttaagcatgctataatgtgttgtatgagtaatcaattagtatgcaagttagggttattgccctaaaacttcatatattataatatatattgaaggtattgaatgtacgcatatatgtcaagagttatgtgtataagacataactaggttagaccttgtatacatcatcaggataaactacggaaagaacataatgtatggattatgtatatatgaatcgggttatgcaggtaaggcttaacaagttagacttggtaactataaccgagacaaaccctgttaagtccttattgtaaaataatgtgtgagcgtaccacgtgggtctatactgcatagacataaatagacgtgtgagcgtaacacttgtgtctatactatatagacataagtagacgtgtaagcataacacgtgagtttatgtgccacatagagacaaataggtgtgtgagcgtaacacatagatttatgtcaaatggacgataagtgcggtggcatcaataat

SEQ ID NO: 72991 - DNA, 1064 bp, Cannabis sativa
tatatattaaatgtaagatacacagagattacatataaagcaacatgagatacctgatagcgacgaagtggattgagcagaggacccaacaaaaacgggcggagagagagaaatgggaatttagggtttgtgagtgaatttgagttgagaaagaaagaaacagtagatgaatgaagtggaaagactttgtgtgtgtctgggtttacctaatcattcattgttgaaggagaaagagaaagcgatgaagatggagagtgagagaagtgaaagataaacggagttcttaagtttctttcgcggcatgtcgggaattgaaatggagggagacaaataaaattacctcattttttcatttttacactaaaaataaatttttttttatatttttactttttttaaaaaatgtttatagttttacttaaattcacatattttaattaaaaaatgcttcttttattaatcaattaattaaatttacctctaaatttttttaattgaaacatacttatttttatatgtattgtaccaaaaataccttgacataagagagtaacatagagagtatcttgaagtgaaaggggtaaaatcagtacaatattaaaaaaaaggcaaaagtaatagattttaaaaaagagagtaaaaataaaagagtacactataaatataaaaaaggtatagagtgggatccaaatctatatggtaactcgtgtaaaaaaaatatcaaaccaattattgaaacaacttaagtggtaaaaataaaaaaataataataaatgaaataattcctctaaaattaattacataaatttacataataaactaaaaaaacaataaaataaaacaaattttatttttacgctttaaattttttatttacacaaaataataaattatgttttagttattttatagtttattgtgataattacataaggcgctattttttttgtaaaaaaaaatatatatttttatgtttaaaataaaagattaattttacatttttacgttttttcataaaaacaacacgaaaaaaacaagtaaattatataaaagtaacatgaaaa

SEQ ID NO: 72992 - DNA, 939 bp, Cannabis sativa
acaatgatatgtggaatgtctttttcaaagaattagcaaagtatactagtattggatgtattggatatacatcggactggactgatattaacaatggaaaagatgtcataattttaccgttatgtcttttctaagggaatgtcacttagttgatcttagatcaaaagatcttaatcctgagatagttaggttctagcgtaactgcattgcttgtgttctttgacttgttcgttaaagctgaccaaatggattggcccaatacttacatcttgggaacatgatagtacaattgagtgagagcgctgatcatagatatgaaatctatagcttctgtaattatttagaagtgaaatgatgattttctttgagcttagcttaatagacataaatagaagagctcttattttagtaattatattagtttactaaaatattatttataagaagctaagtgttttaaagataaaatacattaaagggtaaaatagtaaatttgtccctactcattgtagatcatctatagaggatctttgattatttggatttaaataatagataatttatagcgtacctattcttggtgaatatgtgggatgtgtccatgattataactttgtgtggaagagcgtctttgaatcgtaggagcttcttaagtctggggttcgttgggcaataagaactggtgtgaaggttgatattttacattagccatggcttctagatgatgtgtgtccttttgttacttcagatgcccaatatttagtggaccataaggtgagctcgctaatgtgtactaataatagggaatgagatttagatattatgaaaaatctttttaacgaacacgatcaacagcatatattggcagttccattgagtccgaacgtagctgatgatcattttttctggtctaaggagcatcatggtttctactcggtg

SEQ ID NO: 72993 - DNA, 783 bp, Cannabis sativa
gacattattgccatacttactaggaatgtcattggaaataaatagattcacaaagtcaagcataatgctggtggggcattagaaagattgaaatccagaattgtagctaaagggtacctacaaaaacctagtattgactatgaggaaactttctcaccagttgtcaaaccatcaactgtgagagtcatacttactatttttgtatctttcaactggatggtaaagcaattggatgtaagtaatgctttttcgaatggaactctagaggagactatttttatgacacaacctcaaggctttgtggatgaatctagacctactcatgtttgccaattacacaaagatctttatggtctcaaacaagcactaagagcttggaaccaaaaattaaaagacactttgttacagaggggattcattgcttccaagtttgacaattctttgtttacttatggcacaagacaaaatctaatcatattgttggtgtatgttgatgattttatcattacaggccctaacacaacactcatcaaagactcattcaagacataaatgagactttctctattaaagaccttggccctgtgcactacttcttaggcatggaaatattttgaaattcttcagggatgtatttgtctcaaacaaagtacatcacaaatttacttgtcaaacttaacatggaaggagctaaaccaagtcccaactcctcaagtgcaagcataaaactgtcactcaaggaaggtgaaccatttgaagatgaaacactttacagaagtacat

SEQ ID NO: 72994 - DNA, 1761 bp, Cannabis sativa
aaattaaataaatttagtaagagtaattataatatatgtataaatattttttaataataaataagcccccacaaagtaaaatttcttggtccgtcactgcaagcaagtgtgggtgccaaaaaagaaaaactcagaaaaagagaagcagatagatgatgaggggttccaaagagtgagtaaaggcaagaaagtgatggtgaacaatgagcaagaggagactactgtgcagaacatgtttgaaactctaggagatgaaggggaaatcaggaacaacacaggaggggagggagatccctcatcctcaaatggatagatttctatgttggaatgtaagggggattaatagccagcaaaagcataatgaggtcaagcaattgatcttttcaaaaaaagctgggttttttagtctcctagaaacaaaggttcaaaacaaaaatatgggaaccttatatactagtctttttttgggttggtgctttacaaacaataatccttggttggataaaggaagaataatagttgcttgccagcctagtgtttactctgtggatattagattttgctctagccaactaatacattgccatgttcaatcacagcagcaagtggggaatttttttgtgtcattagtatatgcctttaatgatgaaaagaagagagaggatttatggggtgagttagaggaattggcacaaagaatagatgagccatgaataataatgggggatttcaatgagattttgaatgctaatgagagagttggtaaaagagcccaaagcctaccatctcagagattccgagacagtatggagaaatgcaaactagctgatctgaaattttcatgttcatttttcacctggaactataaacaaaagccagaagagaggattttgtctaagattgactgagcaatggtcaacatgcaatggttaaatagctttccatgttctgaagccatttttgtgcctgagatggcctttgatcatagtcctatcttggtaactatatacgaggataaaagctatgggaaaaagccatttaggtattacaatatgtggaagatggctccagattatgacaaaatggtgacacagtcttggaaggaagaaactagaggttcaaaaatgtttagcattgtgcacaagctgagaagattgaaggtagtactgaagcagattaacaggacagggttttctgaaatacaaaagacagagatgatgacaaaggcaatgctggcaaaggtacatgggaaattaagtcaagatctaaggaatgaagaattgatgcaacaggaacagattgtaaggaagaaatatgcagaaatcagcaaggctttggctagcttcatggctcaaaaaactaaaatcagttgggctaagtttggggatgacaattcccaccttttccatgattctttgaaattgagaagactccaaaataagatctactcgattaaagatgagtatggaaactggtgtgataccccagataaagtccaatctgctttccttgagtattatcagaggctattgggatcgaaggcaccagaaagaaggaaggtttttcaatctgtagtagatcttgggcctaaagttacagagtgtcataaacagctactattagcagagtacacatcagaggaagtggaattagttatcttctctatagataaggataaagcacctggtccagatggttatgggagtgctttcttccaggatattgggacttagtgaaacctaatttagtagaagctgttat

SEQ ID NO: 72995 - DNA, 990 bp, Cannabis sativa
  modified_base (26)..(33): a, c, t, g, unknown or other
gacaacagaaaatgcgatggatggcnnnnnnnntcacatgggtaagtctagaacttatttcttagtgggaaatatttgagagaaaataaaatactgggaatagacggggttatggaatttgaccattttacccctagtcttggaaaatacctaagttttaacttaaagggcattttagtctttttaattaggggattaggtggctgagtttggtgttggcagctggccactcaaattattcagccaaggtttatcattttcattattctcatttttggaaaatagggaaaatcaaaggaaaaaccaaaaagataaaactctttctctctttctctccttcggctggggcaaaattaaaggagaatcacctcacttcaaccctttttctagaattgaagtagggattcaaaggttcttgacccaaggtaagccctagtagcacccttctttaaaatctaagtttttacttggtttgattgtgtgattatgctagtaaggggctgttaggtttatgtatgcttagggttcgaattctaggcttagtttgagttaagattagttcctagcagctggttttgatgtttggatttagttttgtgcaagtttaagctttgagttcaaagctttgatcattaatggcaagttgagtttctttgggtttttctgtgaaatacttgttgaaaaatattgtctatgcattgtttaggtgctctagaaagtttggatgcattttgatgagttttgagcaagttggagcttgttcggggaaacctggtgcaaaccggctagccggtttgccaggcctgtaaaaccggctagccggttttagcaggatcaccaaacaagcaattttctcaatttttgtccattttagtgtcgtggttgggtttttccctaattccagagtttgagtactctctaaggggcataacagaacctagggttaaggttttgggttttccaggattagggttttgatcaagtaactta

SEQ ID NO: 72996 - DNA, 1546 bp, Cannabis sativa
tgtgctatgggatctggtgcagagtagacattggcagcactcgacggtcgtgctactggttcggaggcaatgtcaacgttcggtggttcagttgatgctcctccaacaccggaaccagatgcaacgctgctatgctgggaactaataaaacgaatgagctcatccactttatcctccaactttctgttgcgttcctctgtctcacgcacgcgtctctccaattcagatgatgcctggttcgacccatcgacatttttccttttagggcgtggtgtgttgaaatattgggtttgggtgacgccgaaacccatggctcgaacccgaccaccatgctcatctgtcccgagcgccatggtcagcacgtctcttttaccttccacttgtacaagaccctctgccacttgcttgcgtaattcatcctacaaacaaaacaattagagttagaaataaattatgaagcataagaattaatacaaacaaaattaaactttaaacttacaatccgtttaacgacttctgcagttgggccctccacctcgccattagacttagtgcgagatcttttccaaatttcagatctatcaaattcagtaatttggtggccgacctctttctccatctgttcttgaatcatccttacaccacctcgtccagtgcgatggggataaagattacaagccctactctcttgggccctcttcctcttcacaccaaattctggacttaatctcgagtccacaaactctctccattcttgcaaattaattattttttcataaagtttggggggcttctcgagaagatggggagcgacatctttgaatgtaaaaataccttctgttagggtacttttccaatctttccacctatctccacctttagcaattgtcatcctcttatctgtgtctggtacatcaaacgcgacctgcaacattgacaatagtatagttataagtaccttgttttataatcaataatgaagatctcgaataatagaattaattttacctttatgtgttcccataattggtttttaaggtcctggctcactttaggccacgtaatgtctctaagtggaatattagttcgcacccatgctccaattcgggtaacttttgccgtccctcccgttccccagtgttgtccgtagtgattgtactcaatctccatcttttttccctcgctaaccatttttgttatatcatttcgtttgcttctcccgcgagtatttttttgtgtttgttcttcaggatcaccactaccttcttccacggatggctgttcaggatcaacactagatccttctggcaaggatggaccatcatcaccatcataatccaaccatgcactccactcatcgtccccacctcgttccatgatataaaagcctacacaaatttaaaatcatacattagaatatacaagaatagtcaaaataatagctaaatgtaaatatatgaaaaagactaaataccaatacgtgtttgatatatgaatcatgtgttgatagattcgttcaaccataatccttcaccatcatcacgag

SEQ ID NO: 72997 - DNA, 920 bp, Cannabis sativa
  modified_base (524)..(524): a, c, t, g, unknown or other
catgatattatactaatcttacctaaattccaaattcaggtgtgccggtcaacctgagtggaacaactgctctgtaaattataagctcctaagtcatattgataataatacgcataagtgactcgctaaatcacaatcgggactacggtttaaaaccaaaaccctatctactacaacttaatatggtaatatcccaaactagcagggaatcaaccaactagaaacctgaaactgacacgaaacgacaagctgaaaaaccgatcttcccccctactacaaaatccgggtaaccggttttacccaaaaaaccaacaaaaaatcataccctaaccaaatcatttccaaactcaatcaaaccttccagacctacatattataccccaataaactatttccaagcaacaaaacaacaatcaaagcccaaaatcaattttcaccattaaagcttcaagcttgatttctaaaactcaaagcttgctaaaaccttcaaacaactactaattcatgcttaactcaacataatnaatcatattctaactacaaaaacatgattcaaacacaaacaataatcacagcagctactaactcaaaatcatgcaaaatccatttcttaaaattcaagaaaacaagaggtttgtagctaagaacttaccttggaatcgagaacacaaaaaccctgctgcaacaagcttgagatgaggaggaaattaacaaattctagctgcacttaggggttcaaaaatgagggagagagtttgagagtgaaatatgactttccttgatttttttgttatttttgaataaatgaagtaaccttgttttattaaatatctcagcccaaaagtttaacaaaaatctgattttattacttaataacaatccactaaagacaaaagactaatggggaaaaatgaccattt

SEQ ID NO: 72998 - DNA, 1365 bp, Cannabis sativa
atgtggcattaaattagaggtgacagttcaaataaggtccagtacctctcggagataccttagcgttcccttggtttccgggagtaagtggagccttcacctctcctttgggaggcatatcctcgttggcactcctgatgcaaaaagacttagtcgatttatctaatagtcgtgcttcttagatccacgtgtcgttgtcatattggtccacgtattttgggcgaaattaagggcaacaagaacaaactacccaaaatacaaactaattacatgtttggaagtgttaacacatatgaaaacccataaaatgaaaataacaaaaacatgaaaataacaacaaaaattaaaacctaaaatgaaagcaaaagaatataacaaaccaaaaacaataacaaatgcaattttagagctagggcaaaactaaaatgcaactagaaactaaaatgcaatcttcttttttgcttcggttcataactgaagcaaaaaaccaattagcgtcggttcataaccgaagtaaaaaaaatcagtatttgcgtctatggttataacgtcggttgcaccacctgaagcaaatactttatatgtcacttaaaaactgaagcaaaaagccatttttgtagtagtactgttacgaacgttccttacttccttctttctcttctggctgtcagagttagaatttttttaggcaaagacaccttcgacttcttcttcacaggacgacgactacctctacccacagggggagaaaaatcagagtcatcattattaatgactaggattttccgtttagccttgttagcaactgatttatgacctattttagaagccttttttgataatggagatggagaagcagggccacaagtaatagtcattatatatacgaaatgaaagatatataaaaaattgataaaggaggaagtttgaagaagaagaagatggcaaaagttataggaggtgattttcgtggattttgattgtgtgtttcaaaaaggtaatggctggaagttggtttttaaatgaaaaactgagaaagaaaaaaactgaatgctaaattcgaaaaaaatgaaaaaataaaaaaaaaaaacaagaaaaaaaaaagaggaaaagtttatatttgggttgacatttgttaagttatatttttctttcatgtaaaaattccaataaataatttaactataaatattaattttgaaaatattaaatcattaaattttgattcaatgtcgaataataaaagaaaattttgagtattcaagcttaatttagctacttagtttaaaaaatataatttttacactataccaaaaatatatttatataaaaaatatttaagttttatgatcatttttcatcaat

SEQ ID NO: 72999 - DNA, 664 bp, Cannabis sativa
aaattttatttatgtttgtttttagaataattagcaaatttgctccctgaacttatgtcactactaacttgtggcccctaaaatatacggggtgttaattaatctctccaatatattaccactatattaatgtcccccttctgttaagttttttaacagatacccgtttatttaatgatgcggcataagagaatctgaggtggcaaaataatttgatgatagttaaaaatttattgcaatagtaactacccttaccaaacaaaataatatttaattagaaattaaataaaaaaaaacccctaatttcttaccgaattcaattcaatagttatcaggaaagtaacatgaatccatttaaccaattttttaataaaaaattaaaatataaaaataaaaaatccaacatttcatttgagaagtctaaaagtaaagagtgataatagcaaactggtttattttccaaacaatgcagacatcagttcccatcttttcttccaattacagagaatgttttcattcatggataattcaactggaaaatgccattaaacacgtagaagcttccctgtggtgttggcaaaaaatcgaacatctggctaaacttgagagcgtattgttcgtcgacaagctagaaattgtcgttgacgaagacaagcattccacc

SEQ ID NO: 73000 - DNA, 1261 bp, Cannabis sativa
tccccacaaccaaaatcccttcattgtttctagccaccctgctctggtagataaaatggtctctaatttgctttcggttgggcagaaaaactgggatatagaggtgttgaatgatttatttgaagagagggataaagagttaattatggcaattcaactcagtgactctgtggaagaagatctctggttttggaacaagtcttcatctggtttgtatacagttaagagtgcttactcttatttgcagcaggaaactaccacggctgacttggtgcagaacacagatggctataaaaaactgtggcaattggatattcctcaaaaggttcaacatttcttatggcgtgcaacatcggggtgtcttccaactaaagttcagctgaacacaaagcatgtgaatattgaaatgatgtgtccattttgtaatttttctgctgaaacaatatttcacattcttcttggctgtagctttagtcaatcgtgctggtccttatctatagtgagcgctgctggtgcaaactatactgaattcagctgctggtttttcgatttaatagcctctaaacctccggatgtggtgcgagaagcagctatggttagctggaagatttgggcagtccgtaatgatcttgtgtggaatgataaaacttgttcagcgtatgaagtggtacgatcgactagagtcgtccttgaccaatggttaagtgctcaaacacaaaaacatggggcattattaattgatgatattaataatggtaatgagcactggcagaagccaatgttaaatacggttaaggttaatgttgatggtgccatttttcaagcggaaaacaagttcagatttggttgtatagcgagggatcacaatggacaacttattgaagctatttctgggagccgaattggcttggttcaacctgaagttgctgaaataaatgattggggtgaaagaggctttaagttggatcaaacgaaagaagtggttaaatgtagtgatagagaccgatgctttaatggtggttcaggcgatcaaaagttcgatcaatatgccatcacaatttggtctaattgctagagactgtcgagagcttctttctactttaaataatatttctttaatgtttgttaaacggtctgctaacaaggctgctcattgcattgcaagagcgtctagtttaaagtcagattgtattttcagtgaggctaatgctcctttagagttaaggtctattgtagctactgaaagttattgaataaacac

SEQ ID NO: 73001 - DNA, 1119 bp, Cannabis sativa
atagaaaacacctaaaataaaaaaatagaagttccccatacccgaagaggaacatgagataagcatatatcttacttattatatagataaatgtctatccaacactttttgttgtgccttaacagattttattgtaacttaacagagttttttatatttttaaacacaaagtgttaactttaacagaaatgtaatatttgcatcctttctcaaaatagataatcattcacaaatgcattcattcacatatataggcatcctcgtagaaaagaggcaattattcaccattgagatgcactctttcatatatagtcttgtctatagtggaatcacatgccactatgtattatatagtgaatcacacgccaccatcttcaaagcttccttttcgatgtcactgccactttcattgattgtctctgagtcaaattacctctatgatctataagattctgaaattcttaatactctatggctttcttcatcatacatacaaattttgcttgtacaaacaacaactacaagaaaaattttgttatatatgttagtgcttttcaattcgaactactcaagcaagcaacaactactctcatcaattgaaaaatatttgctatcgatcacacattatttcaaaggggaaaaataaaagagtttccaaacgtaaccaaataacatgctcatttacactcatccaataagtacttttgcatcaattaaattttaagattattttctatttgaattttgaaaaagttcaaaataatacgtgtagaaaatttttgggagcattgtatgactatgtgcttaagaaaaaactatagagacttaaaagcaattcatagttagttaataacaattactaatattgttcattggatctgaaaggaattctgaaaaaatatgctattgagaacaaaaaaaataaaagtaaatctattttaaatttggtcttattgttaattaggggatgaatctttcaatttatacgtacaaaaattttgttaaatttaaagtaatgtataatataactattttagaatacttttgctcgatatactatatatgtatttactattgccaatttatgtgtttgttcaatacaataggaatatatatata

SEQ ID NO: 73002 - DNA, 1108 bp, Cannabis sativa
tggttgccgagatctggctgttcttgccattagacctttgtggcaaggcgtgtcctcctttgggtaggagaaggtctgtcttggttcttgaagaacttagttggacaacttgtcgatagaccctccctgatctgttgactagtcttccttggagtggatctttgatgagatcttggcctcttccggtagttctttgattgaactaccttattaggtcactgtcttttctgttgtggcgatccagctttgcttggtgagatcaaaggatgtactcttgatcatccatccatctctggaatttgcgtctttattgtacgaatacatcgcaattagtagcgcatggttcttcaatttggcttgcttggcagacggtctctctaagtctaacaaacttgagatcttctcccaagtccacatggggctcgccaattcctagtctcgtgtctctagcatagtactgaggacaaattttggttgttgttcctgggggctgttcctcaagggtctttcctttagtgggaggcgtcatggagggtattccctttgagagaaaggccaatttttatatccaccgcagtgtttgtgtgactctggccagctgtagtagcaaagatcgaggtgcctaccgagatggtaggattgaccacgtcacatctgtagtgttcatgggaattccagtcatggttgggacatggacatcaggatctacagttataagatcttgagggagaactgatgatgtagatggtgcaacaggtattctcctcgtgttaaccatggcatttgatcagatatgatatcaactttggttgttaaggctcaattcctagtctagcttgctatccacgtgtaatgttgtacaccaaagtcctactaggccaagttctggacggccatgcaccgataggttgtaggctggtcgaccttgtgctatctagaagctggccagccagcctcctcgagttggcttgtttgtcattcgtcatctcgtttaagtattgggactccctgttagttgaactgctgagtaaatgacttgaccttctatttggtgagctatatttctatgtggcgctgatattggcgatgtagatatgccacgtcaggt

SEQ ID NO: 73003 - DNA, 575 bp, Cannabis sativa
ttattaatctaaatctataattgaaagaaaggtttttctatcatgttatttttagtgtattatggattgtatatatttctctttgtaatttcttttaagaagaatcgtataattatatttgtatgtgtaaacatacatatataaattacactttttgttttgaaggataaaaattgaatgttaaatagtatgtcattatataattttagagtgttaattgactacttggagatcaatatttgttgtcacaacaagaatataacggaattattttaaagaatattgtcaattgtcactataaaaatgtagtgaaattatttgcagcgaaatatactcacagcaaaaagtatctttgttttcatggctggacactgaacatcaaatagcaagagtttggaaatattatatattgttgtcgctctttgcgccggtgtacttctattcatcaatttacaattatttttaacttatttcacagtaggctattattattattttgtggaagttgtgaatcttgagattttttataaattatgttttatttttggactatatcatataatttataaacttag

SEQ ID NO: 73004 - DNA, 619 bp, Cannabis sativa
gcgtgtgacacttatcccaaaccgtgcaggtcccatttgtacggagccttcctaccacgagctagaatcctacagtgggtcttaaagtaatgtattttatgtatttaccctaatattggcaggcctagtttgtacaatagccctagcgagttacaggtatgtccagattcaaatcttaatcaataaatatcgcattataccttcatgtgtggaggacaattcacttaactgatttagggtttcttcttctctaagctagaaaaacccaagtgaggaaatatagcaagaaggtagggttctttaacttgtaagacctcattgtaatacatcaaagcttttcgaccaatacattgactcgtagactagggtaaattaatacccgaaccacgtaaaattctatctctattacttaactacttatttaatttctgaaaatttttgtaaatataaattattcacaatttttttagaatttatatgtggttctaaaataactacaatataagcgattatcatgaaaaaaaatattaaacttatttttttttcaagtaacaaaacagataaaagatgtactaaaataaccgttgtaatatacacatatacattcttacactgacac

SEQ ID NO: 73005 - DNA, 1166 bp, Cannabis sativa
gggcataaaacccaacaagaatatctgttaattacctgattgcatgtttatttgaaatatgctagctgatagaaaagagtgaaagtttgagaattctggaaatacttactagatatttctcggaaatatgaccacaggtgtatagattatgcacccaaggcggtctggtagaggtaaccgcgagcttgctggggttagggttggaggtgagggtgagaattctccaccaccacctaattgggaagaattatatgtcgtaatgtaggagaccatccgacaacaaggtgagcaaattcgagagttgagggagcagcgagctcagcgtgctccaaatcctaatcttgattctccggcacctctggtagtgccacagaaagttgggaatcgtctggagccgttggatgagcagttcaggaagcagaattcgccagtgtttgagggtgatgctgatccactcaaggcagaacagtggatgcgtatgataacatccatctttgattttatgcgagttgagaataatgatcgggccatatgtgccatttatatgcttggagaagatgcccgtatctagtgggagatcatgtcttagggtcatgacccgaataacattacctgggatgttttccgaaaattattttacgagaagtattataatgagtctatctgggtagtaaaagtagtagagtctatacgattgacccagggtagtatgacggtgaaagagtatgccaccaagtttgatcgattggaaaaaattgcttcagatgaagtggctactaaggttgctagaaaagcaaaattcattcggggattggatgaacacattgcatgggatgtaatagttgctgccaaacaacctggatttgttcgaacttatgcacatatagttgaattggccctagctactgagggtgcagaagatcagatacgaaagaaaaatattgcgagaagagattcatggaagcagacatctggtgctggttctggtagaggtaatgaccctggtgatcgcaagaaaagggctagtgaatcatcatctgtaggcccaaataaaatattccaaggtaaccaaagcatcatggtgggaacaataactgttagacttttcctaaatgtccaaggtgcaagaggcgtcaccagggcgagtgtcaagctagggcctattt

SEQ ID NO: 73006 - DNA, 810 bp, Cannabis sativa
  modified_base (576)..(588): a, c, t, g, unknown or other
cataatttcttcctttgttattcatatttatcgattttttctatgttatgtgctctcattttttgtgatacagtatgttgaaacattattgatcatattatttcttttattatgacttagaaaataaggttgttatcttctaatttttatcacaagattaataatttatagtcattggtaaatagactcggtcaaatatttatttggtttgaaaacttagtataatttacactttttttttttgtttaatcactagtgacgtattagaacttagctgatgttattgttagcgttattttttctttcttataattaattttgcttcatgaactatatttttatgctatgaatttttgtcgaacttacttattaatgaatatttttgttttttttctaaataaaaagagaataatacaataattaaattaaattgttattgataacgtaattttggtagtttggatatttcaaatagttatgattgccagtctactttatataaacaatcagggttcgtttgttacgctattgtattgtattagtattatttaatacaatattatatttggtattgannnnnnnnnnnnnattgtgtaaagttataatatattctcaatacactcgatcccaataccaactataggtccgagtctcgggtccaagtcccgagtcctaggtccaggtcttgggtccaggtcccgagtcccaagttcagcacccgggtttaggtccgggtctttggtctcggttgggtctgagtcttaggtccagggttcgggtcccgggtcccggatcccaggtccgggtgtg

SEQ ID NO: 73007 - DNA, 860 bp, Cannabis sativa
tggatagttctttgctgtgttagcccatattgttagtgatcaatagctaattggttagcatctgcgtgcataaagtctagttgaaatagaagtatgtgattttttagttaaatgaaggctttgatgagcaagcccattccaactagggttatgtagctaaatccccttccaaactatataaatacatattatcttatcacagttgtatacttttgataatcagataaataaaactgcttctgatttagagatctagggagaaaggcatagttgatagtattgcactatcaaattgagctaattgctatggaccaatcagatacgtatgtctaactattatctattattattattgttctctagattatatgtaaattttgtattttgtgttattttgattttgtaacatgtcgatcaataactggatatgtatttatgcttaaaatatggagtagtatcttggtatagtaaaaagaaaccaacaatatccttaacaaccacagaaagagagcatagagcagcaacagtggcgactgaaaagagtacatggttgatgcaactgatgaatgatctacaccaatctattgtgataatcattctgctattcgtctagcacaatatcaagtgttccatgcacgagtaaaacatgtaaggtgtattattattttctaagagaaaaggtactccaagagaagctaaagatgcaccaggtgaagagtgaaagccaaatagcaatttttttttacaaaaagactctacactgcaagatttagaaactcagaaagcaactcaatatgaagtgtgattgttgaggaagagtatttaaagtcaacacaaaccctttttaaatattcaagaac

SEQ ID NO: 73008 - DNA, 864 bp, Cannabis sativa
tgatacttggggaccttaccacattagttctcattctaattacaagtactttctcactttggttgatgatctcactagattcacatggatttatcttctaaaacataaatctgatgttactgaaataatacctcaatttttatcttatgttaagactcaatttcaatgcactgtcaagaaatttcgttcagacaatgctcctgaacttgtgttcaagaatctctttgcacaacttggaatcatgcatgattttacctgtgtagagacccctgaacaaaacgcgattgctgaaagaaaacatcaacacctattaaatgtggctcgtgctcttttctttcaagcaaaaatgccaataaaattctggtctgagtgtattatgacagctgtttttttaataaatagaactcctactcctcttcttaaaaacaagacaccttttgagttactatttggcaatgcacctgattattctaatctcagaaactttggttgtcttgcttttgcttgcactcttactgctaatcgtaccaagtttgccccaagagcgaaaccatgtgtttttatagggtatccacaaggcatcaaaggttacaaactttatgacttgaatgacaaacaaatttttatatcaagaaatgtgattttccatgaaaatattttccctttttagactcttaataaatctgatattggtgtcgatcctttctctcatttagtttttccatcttctaatatatctaacacaaatataagtgatttctctgcagaaaattattctgataatcctactgctgctataccagaagggactgctactattgatctttcagaaaacactgctgctgtcataccttcaaatatgca

SEQ ID NO: 73009 - DNA, 1128 bp, Cannabis sativa
attaagtatttaaatttatttagatatgttatggaatttcaaaagttattataaagaatatagtttaccatgaagtgtctcttttgtatacatagcaacttttcattctatttttctaattaatgttattaggaaaatgaatatgaaaggtcttctgcacagtagaaagttgttatagaagttcttaattaaagataaaaataaattaacccatttaattaatatagaataataagaggcttttatattattattaatattttaattttattgtatattatattgtttgataatacaagatcattaattataggaatagtaaatttatcaaattaaattaaattgcatcatatacattgtaattaaactatgcgtggtggtgtcttttcattttatgaaatgttatttaattacttattttcttttcataaaatatttaatctttctattttatcattaactcataaaattgagcatttaaaaaaaaagtaacaaaaattaaagcaaatattataataattatttacaattgatatatctaataatattatatggaagattatattttgcctccactctagggtcaaatataaaagtttgtttttattaattatttatatatttgtttttaaaaaataactaataaatatgttaggttatgtttaaaatttaaaatgtataatatttttaaggtaaaatatataaatttaaatgatcataaaattatattttaattatttaaaattatgttatttttaatattctgacaaaattatgtcattatggttcacttggttactgataattaatttcatacaattatttatcttattaatttacataaaaataatagtaagtggtaacaataaccacaacaaaaattaaaatacaaaaatacatatctctattatttttctaatcaattattatacataattcatatatataatcatagcataacaacaaaagttaaatacaaagatacatatatgattaggtataattatattttttttcttttgtaatgtctttctatgaattatataaaaatattaggtttcaaattttatttatgtagtgatctataagtaaaattatcaattcttttttatttttcttatcactatt

SEQ ID NO: 73010 - DNA, 1516 bp, Cannabis sativa
  modified_base (231)..(241): a, c, t, g, unknown or other
taataggtttgttaaaaaaaaagttttgaataaaaaatttaaataaaacaaacacaatattcatgtaacatttatgaaataagatatttatatggttaaattattattttaactaaccgactaaattttgaaaatttagggttgttaaaaataaccttaactatcgcttcaaagtttaaaattaaaaaataaaactaatttaaaatatataggtttatttgaattattttnnnnnnnnnnnttaaatatctaataagataaatgatttgaaaataactaaatagatattttcaatatcattttcaaatttgataatttattataattaaaataatgaaataaactaattttaaaatacatatggttaggcaattattattacaaaaataaaataataaacaaataataatcatcgtaattatatgtcaaaatatctcaaattaagccttttttaaatttttacaaaaatttataggttatttaaatatttaaataatatttagaaatgtctaataagtagaaggatctaaaatttcatttttctaacttataatttatacaaaattaaatatttaacaaaataaccaataaccaattttgaattttgaattttgaattttgaatttgaatatattatatggttagaatatctataaaaatgcctaggttaattttaaatttattaattatttaatttattatataagataattttaatataatattttaaattaaaaggataaaattatcttttaatttaaaatatggctaatattaaaatatttgatcttataatcaaataatatataaatattaaagaaattaactaaaatctgaccatcattaaaaaaataaaataatcaagttttaaatttaaacttcaaattatcaaaaattaataattatcaattaaaaaattaaatattattaattaaaaattgatatttaagtttaaatatattaaaaataatattttattttcattttagggtttgagaataggaaaaaataaaaatttatgaaaaaatcccacaaaatcgcatatggggtgtggctgccaccaaggctgcacgtgcagcccaaataggctgcaaaatgcctgatgcgcgcgcggattggaggacctgcaacatccttgaccaaggtttctcggtcagctgcagggtgatgcatcggcgcttgcagcatcccgtgggtgtgcgtggggcgagacacgggcttagaagggttttgtcccctgtcacgcgcacggatgcaacaccttgtctgagtgcctggtgcactcgatgtgccaactagacactattaacactcgattttcaaaccttcataactttttcgtttttaatcgtaatcgagttccgtaaaaacaaaaattgcttaatttttcacaagaaatccaaataaatattttcacaatgaaaataaaattatgttcatggaaaaattttgtaaatcacataggaatcatcaagtaacacaaaaaccaacatgagcacatccaaatcaacaaaca

SEQ ID NO: 73011 - DNA, 1054 bp, Cannabis sativa
tcattactatattttttaaatatttagatatgtatgtttactaagggagtacgttggtcagtttggtcggtttacgttacattttatttaactcaatgtaaagatcgggttacaaaaatctaagtgcaacaaacccaattaagaagaaaaaacgtttcaacccgcccaatgaattggtcgatttagtcgggttaacccgtccaaaccgagcattaatgtttcttttttcacattcatttgttatactttagttattgtgataatgagataaatataaatattgaatttaaagttcaaatcatcctccattaaaaaaatatagtagtttaaaatttttattttttttataaatatgtatataaattatataatatatagattatatataataaaaacacatatatatacaaaaactctcttaaatatcaggttagtcgggttaattaggcgggttgatattatttttaacccgctcaatataaaaatagggtgggttataacatataaaatatcatgcacatgcgaagcacggggcatcagcctagttataataataaaaatgatacaaaatcatttgcttaaatgttattaatgataatagatgataactcatacatcattattagttgttatttttttaggaacggtttagagttcagttatgagatggaaaaaaataataataaataaaaaaaaaaatcacaaaaataaaatagaaatattctgttaataaaaggacaacgacaaaaaaagtaatatgtaaagatatcggtaagtataatttatattttgggtacatatgctagcgataatttttttgaaaagtatcggtacatttaaagagtgaacgccattagaacaccattatatatggaatcagtctccctatcaagattgtcgtacaaatattctgtgtagtgtgattatgaaaaaattgataataaatgtcatctgagagcatctccaatgagctcatcaaatttggtgttgcactatctttaaatttggtgtcaaaaattatttctactctaaccacaacaccaaaaattacact

SEQ ID NO: 73012 - DNA, 1386 bp, Cannabis sativa
tatgggaataaagggttcggtttaatatcatcaaatgttagcccactatattcccattattctacttttattattgttattattttttttttgggtgaaccagaaagattaaattattctacttttagaaaaggacaaaaatacaataacagagaaataaaaagaaaacaaaacaaagaaaacgatagatagctaaaaatattccaagaaatagaaacacgcaggcaaattatatggttcccaaaagcctgtaatattgccttattatctttttatatggtatatataactcttttacctactaattactattattgctatctttcgatctaataatgattattaaaatttcagtaattaattaacatatgaatatatatgtatatattatgctgccagctttgaagtatcaggaaagtgaagaatactaagtttccaatttaaatgactagtgacaaatcaaatttatcaataactattagctaattaaagataaaaaaagattaccaaccctattattcaaacaaaaataaaaagaataaacacaatcgaccatgtcaaagattgagagagtagcttatcaatacaattcttatctggaacaattaaaactgaacacaaagaattgtaaaagctctaatgaattaagagctgaaccttctattatataggcaaaggatttacaagagtgtgtaccaagaaacagaaaacaaactctgttaaagaaacataggcaagtggacagaaataacaaactaactccaacagtaaaataactaactaaactgaaagtcaaagtttgttatttatcaaagatgattctaatgaaagatggaatcctagggccaataataaactgggaatccccgttgatcttactactgagataggaaaaatcattctagccaaacaaatgcaacatgaaccaaatgaagtagcattgccgatccaccaaatggctaaaatcccgtacaacaaataaaaaatactctagtactatataataacgatatcaataagaagtattgtaacacaattattgaaaataaaaataacacaataaaatatgtaaagtccatgcagtagataaagaaccactccaagaaaaccacattgacgtcccaaaaaagcatccatcaatgttagtcgcacctctattagcagtgaacagccaaaccccacatctatcaagaaatctcgcattatagcaccactgagcataacaaaagggtagcaaaataaattaccaggaccaaaggcttagtagtactttcgttgaagatgttgtcagggtttatttcttgttattgtaaatggattagttagtcttgtcaagacttataaaacaataaagatatatatatcatagatctaaatatatttcta

SEQ ID NO: 73013 - DNA, 665 bp, Cannabis sativa
aaataacaaaaaaatcaacaataacataacaagattgcaacatcaaaagacaatttttaaaatatatatataaatgaccgtattttatgtaaataaaattttaaaaattgtaaaaatatttaaaattatgtacaaccgtattttttaaattttttttgttattttttgtattttttaaaatacttcttataagaaaaattatagcaaatgactccaaatcctaggattatgatagttaatgtccttatttcaaaacttggagaatgactcttttagactatttttattatttatattatttttttccacataaaacaaatcaataatttttttttcatatttgttttagaattagaagcaaattacttaaagattaaggtatatttatattagttttgcgaaaatcttttttatttgaaagttttgtcgatttttttaattttttatgagttgttgtggtttgttggtattaatagtggtatatataattttgttagcatggtatacatatattgagtattaatttagtattgttataatttttttgtagtatataattttattattacagtatattaactttcagtgatacgatatatcaatactattgtatatatttaataatgggataattacacaagacataattttttgtaaaaaaatta

SEQ ID NO: 73014 - DNA, 871 bp, Cannabis sativa
aagattgtcactggatgaagatgagtttgctccgagccaaggatgatcttcatacaaaagctgaagtagatcctggtcgatatggtatttatctccccaaaaatagccagggttcatctacaaaaagatagaagacaagaaatgagagttggattgaggattggttgaaaaataagtttaatatgtcaatcaggctgattaaagataaaaagaaggggtttcgttccataatagaattctcaaacccagaagttcaaaatctcgaaaaaatatttagaaatttttggaaacccatgaatgggtgaatgttaacaatttcaagtaaaaaatgatatgcatttagaaaattagaaggcctaattgaatgttagtcaaagttacaagccctaatgtcatctattctatgatcagtcaagaacagttcaagaataaaaaattttgcagcaagaaattcagaaataatgcatatagtcaacaaaaattgcataaagacaaggaaaatcaacttactcactgttcgaagctttgtgaatttgatcagagggtagggctgagcatgggttaggttggccgggttgaatgtattttaatgacccaacccaatgacatcgacctaaaattttttaatccattaacatcttaaatttttcctaacccaacccattttttcattaatgggttgggttggttcgggttaggttgggttataaccgattaacccctatgtcatataacaaaaaaatattcagatttcaatatcaccaaattctgaaaaatgttcaaacataaatctaaacatatattgttatataatattaagtaaatatacaatatatacatcgaaaacatttacaaccacagagatgtcaaa

SEQ ID NO: 73015 - DNA, 711 bp, Cannabis sativa
acacataggacaatattaatatataatgtttctactatgagatacatggtaatataactatataagatttctatgtatgacatattattcattaatgcataagcatgttattattcaactattaatgaacatttaattaaaaacaataaataaacaatgatgatgtaccgtgtataaattgaatatttctaattttacaatctttgaaataagaaaataaataacaaaactaatctccattgtaacaggatattttcataattttgtagaatcatcataattctcaaaattaattaacacaattttaaataattattatttaattgaattttaatttaatacaccttttaaatcctctaattaattaaaaataattttaattaattaatttttaaataaactctttatttaaaacaatataattatctgtaagttttgtcttaaaataataatatttattatttatttttgggttaagacaatttttatcttaatttagttttaggtttgagtttaaattttaaacctaaaattaattatatttatttattttaaatataaatttgaaaaaataaatattccacaaaattttattattttgacttatgttaacgcaattttcgttaactatattaaagcctaaaataaatcgtgatggatttgcacagaaaataatatcagtaaagaaaaaataagaacacaaagcttttt

SEQ ID NO: 73016 - DNA, 940 bp, Cannabis sativa
tgattgacgatttaatagaattgtatgagaacggggttcaggtctatgatggttttaaaaaagaattttttaatctgaaagctgtgttgttgtggtataaaggtgaggtggagagatataaagcaagattggtagaaaaaggctatagtcaaagggaacgcatcgactatgatgatgtatttgctctagttgctcatcttgaaactattagattaataatttctttagcagcccaaaatagatggaagatccaccaaatggatgtaaagtctgcgttcttaaatggtttccttgaggaagaagtctacatcgaacaaccattgggctatgaagtaaaaaggcatgaaggaaaagttttgaagttgaagaaagctttatatggcctaaaacaagcgtcgaaagcttggaacactcaaattgacaagcactttcacgacaagcatttcaccaagcgtccatatgagcatgcactctatatcaaaattaagaatgaagatatattgattgtatgcttgtatgtggatgactttatcttcactagaagtaactcaaggatgtttgaggagttaaagaaagatatggcaaaagagttcgagatgacagatattaggctcatgtcttattacctcggcattgaggtaaagcaagaagacaaagacattttcatcactcaagaaggctatgctaaggaagtacttaagaagttcaagatggatgattctaatccagttagcacaccattagaatgtggaacaaaattgtcaaagcatgatgaaggaggaaaagtggatccaactcttttcaaaagccttgttggaagtttgcgctacctaacttgtacaatgccagatattctctatgctgttggaattgttagccgctttatggaagctccaacaataactcatttgaaaattgcaaagagaatacttcggtacat

SEQ ID NO: 73017 - DNA, 1877 bp, Cannabis sativa
catagaacaaaatcaccattagagacctaacttaggttctctaacttgaaattgaataaaactcaacactaacattaatctcagctcaaaataacaaagataataacttccaactccagaattaaacaacatatcaatccaattcacacagccatcaagaatcacaaaaattcacatcaaaacctaacctaagctacaaaactcaagaagaaagaaagaagaaagggttaccttgatcaaagccctcaattaccactaaaattccttgatttcaacttcaatacactaaccccagctgctgccctagagaatagaaagagagaaagagagagagagagagttgaatgctttctcttaaggttttctagatttcttctaacttgagcataccaaatgaatatcttttctttctttttttttttttaaaaaaaaaatctataccctcatattcaacaataaacacaattccaagtaagacaaataaagtcttacccaaagacctttttgccctcaacatattctgatatacagagtcacccaagggtagtttagacattatacaagtcccgaccaatttacaacacctctaatacccaacaataacaccccgataaaatattctaaacatataaatgcgactctctaaggcccaacgtcgctttccacagcttccgaacacaaacacagaattccgaacacaaacacagaagttaagtaatttacataaaatagcatattgacatatatgaacttaattatattttcacaacatgcattttataatattaattaaatcccgtatataaactctagttaaataatagaccaatttattaatcttaagcggtctttacaattgttattatttttatgtcgaccttccatctcatcatcatcatttactatgaataaagatggaaaattgacatatgtccgctgggtacctatcatgagaaagagaaaattttcaaaccccgaatattaaatagggcagaaatagaaatagcacctcatgtcctcgagttcaatttttttatttattatatgatattatttttattatacacatatttttgtgtgtttttgtagtttattagtaaatttttaagtattgttattttattttagataatattgtatattttaaattattagtatacataatattttaattttaatgtaatttatatttttttttatttaattacatttgctataaataaataaatgtcttgttggtattacatgcccaatgaagattcctcgctttgtttttgatggagaatatgtggagatggaggcaaagacaaatattaaaatagttaaaatggctgtaaatgtttaaaaatttattatttcattaaaaaaaaaaatcatgaatgtttaaattgtttacatcttaaattaatttgaaaaaaatataataataatattaaatttagaatttagatttaaataactaaaaatttatcagagttagtattttattaaaatgctaatgtcaatttatagtatcttatacttatttttattatttttgaaaaaaaaatagttatagatattttattttataaacagaaataaagtttagttatagatattttgtttaaaactgaaaaaaaaaatatattaggaaaaatgtgaaaaaagataaaattgtttaaagcaatttaattaaatagttaccatactaattatttttaaaaataagatatttctatccacatatatatattttttttccatctcttttgatcctattttttgaaaaccttaaaaaaataattataagaaaaacttgacatatttacttgtctttttttttttattattttatttctcacttcagaaactatttatatataaagtttcctaat

SEQ ID NO: 73018 - DNA, 700 bp, Cannabis sativa
ttttttttaatattataatatatgattatcttctataaaattattttaaaaaggatattttagttgctgagatgatcactaaacatagttttttttttcttttaaagaaaggtgatagaaaatggcagaaagtgaggatattcaacctcttgtttgtgacaatggaaccggaatggtgaaggtattgattcaaaacctattattttgttatcttttttagagcattgacgaattcccttgagatgcatttttaagttcaattatactattggtattgatattgaaattttaggctggttttgctggtgatgatgctccaagagctgtatttcccagtattgttggtcgccctcgacatacaggtgtgatggttggtatgggccaaaaggatgcatatgtaggagatgaggctcaatctaagagaggtattttgactctaaagtatccaattgagcatggtattgtgagcaattgggatgatatggaaaagatttggcatcacactttctacaatgagcttcgtgttgccccagaggagcatccaattctccttacagaagcaccactcaaccctaaggccaatcgtgagaagatgactcaaattatgtttgagacattcaatactccagctatgtatgtagctatccaagcggtcctttcactttatgcaagtggtcgtacaactggtaagcaatcaata

SEQ ID NO: 73019 - DNA, 1536 bp, Cannabis sativa
  modified_base (55)..(58): a, c, t, g, unknown or other
gctacacgctcatatgtagcaatgagagtacttaatcagcttggtaggcctagtnnnntttttgaaatggggtttggaaccctattgcctaatgcgaaattgattattcgagaaagcagattaaatctgtgctaatcagaattaaacgcagagaactaagtgtcgatttagtagagttacctttggccgagttagatatcatactctgaaaggactttttgtctaaatactctgccagtattaatcacgaacgggaaatggtaacttttcatccggagaatgaggaaccatttatttttgttggatcggtacaagcttctcatgtcctaagaatttcagcgctgtaggctagggattgtatacgcagtggatgtgttggatttctagcggttttaattgattctggtaaacctaagttactcggacctgaggagatcaaggtggttaaggaattcttggatatgtttctcgaggaattaccaggactaccaccataacgggagatagatttcattattgacctagtacctgaggcagacctgtttcaaaggcaccctaccgtatggctcctgcagaattgaaaaagatgaagatacaacttcaagggatgcttgatctagggtttactcgacctagtgcgtcgctctggggagctctggttttgtttataaagcagaaggatgggactctttaaatgtatattgactgtcgggagcaaattaagttaactattaaaaacaaatacccctttacctagaattgatgatctgtttgatcaacttcagggtaagatgattttctctgagattgacttgcactctagctattatcaactaggaatctgagaagaagacattccaaaaatggctttttgatctaggtatggctattatgacatcctagttatgtcgtccgggttgacgaaggctccagcagcatttatagatctaatgagtagggtattcaatgatttcgtcgataactttgtaattatatttattgatgatatccttgtgtactctcggtttgaaccagaacatgaacaacatcttcatatggttccgcaatggctctgagatcataaactctatgcaaaaattcaaaagtgtgagttcaggctgtcacgagtgtcttttttgggacatattatcagaaaagacggaattatgatagaaccagggaagattgaggcaataaaaaatttggcctaggccgaaagcagtcaccgaggtatgtagttttctcgacttagcgggttattatcgacattttgtggaaggactctctaagattgcaacacccttgtctgagttaaccgaaaagaatcaacggtcactgtggtcaaataaatgtgagaaaagcttccaagagttgaaacgacggttgattacagcttcagttttagccctaccatctgatcaagagaagttttatgcatatccaaacacagggtttgggctgtgtgttaatgcaaggagacaaggtcatagcttatgactcacggcaactgaaagattatgagtagcgttatccaac

SEQ ID NO: 73020 - DNA, 1323 bp, Cannabis sativa
aaagacagttataaaccgttgggaatagccctttttgtagtagtgattgtactacaatgttcccaagatgtaagtattagaaagatcaattggttaacttcaacgaacaagtcaaagaacataaataatacagttaagcttagaacttaaccatctcaggattaagatctattgacctaagatcaactaagtgatattgacttaaaaaagatataacagtaagtttatgatatcttatccattattaatattgttccagtccgatatttgtaatattccaataagcctaatggtaaataattaaggtttatatattatgggctaatcaggtaataagtgggattatgatcctactaatctatttcagcgtaaattttaattttattataaatggataaataagcgtaatttattaattatagagatttatatagcatgtgttaatataatatgagttgtttgtgaaataaaaatatttcaggtttggcgaccttagagattcgaacaggggccaaaatatcataataggttcaattaatagaattgatcggaatattacagtaagttgataatataagtattggggtaattagaagtatgtgggatttgacctagtgtcctagaagtagagatttcttagtgactaaaaagtagtaaaataattattattaataaaattttattaatattattaatggtattattaatatatacatattaatattattattatttgttatacctaattttcgcaaaaaaaaaatggctactcttgcacaaggatccacatgccaagagtaccttgaagacactaaagtcaaccttgcgactttggccaagacttgtaaatgtcaaatgagttaaggcatccttcttgagggccccatgacacttctagaggactcacacaccttgtgcccaaactaaggttcatgggcccacgtaagcgttttcaccctagaaatctcaatccgccaaaaaaaccaacaaggacttgacttatttgagcaagaaaatgacttaggtttgtgcatcaagtcaagatggcatcaaattctcaagacaaaaaggcatatgtgcccactgccatatggaaatggcagtgcccatcaaaattggcgggcactgccacaaggaaatggcagtgctcatcaatcttgatgggcactgccacaagggaatgtcattggtctctccttacaaaccatgaagggaaaattattcaattgggtttcctaaacaccaaggagtgaaaaacaagtgagagaaactatttcccacctaggattttgttggaattaattttactaggatcttagatct

SEQ ID NO: 73021 - DNA, 778 bp, Cannabis sativa
attctatataaaatgaggttatatcacaaaatctttgtttatgagaaattatttggtgacttttttttaaataaaaaaataacaaattattagatgttgccacgtaaagggtcagcatgcatgtagttagttaaacttaaatataattaatccacctaaagtgttgcaattaataataaactagaaaataaatcgcgcttcacgtgcggttgtaataattaagtcataaaactatatcaaatttcaaaaattgatattttttatttaattttttttaataataaaagtaattattctaataaaattttatttatttttttctcataaaataaattaatattatgaaaaaaaatcatcatatatcgtcaaacatgaaaaagatattataaattaaaaatatttcacatatttaaaaaaagatacttgataaatttaaagaaaatttattattatttggtattgattattcttatttgatttatttaatattataatgtttgaatttatactatttatatatattacatggacatatataattttgaattactttgttaaaaaaattattattataaaaataaataaataggatgatttagaaaaaaaaaaattagtgttttttttataaatataatgcattatttctatatctttctgttgtcatcaccgtattagagtgttcaataccgtatctcctctgttgtttctcatcgtatctcacttgtcactatatctttactgtatctcgctcatcatcctcactgtatcattaaaatat

SEQ ID NO: 73022 - DNA, 960 bp, Cannabis sativa
aaaacaagtctagagaccatgttagaatcattatatttctatttttctcctataatttgagacatcaaccaaattcattcctctaggctaaactaaacactagacaccttcaaataaggatttagtaaaaaaggtaactaaactaagacttttgcaatagtttatggaccaagtctatgttggtcattttattagtaatactaggacactcaaaattcagcaataacattctcattccactttgaaatttatcagaagagtggtcaaaatttaataccagataatttgtgtggaattcgaagtgtcctagcattaatttccttccctgcaaaatccaataataataattattataataataacaatagcaaaacatctagtactaccctctaccttaaggaaaaaccattagagatgttaatgggaaaattaagacaaaaagtagagttatgatagatttttgttttataaactcccattacagtgataatatatataggtgatatataaaaactatgatgagttcttgaatttccaattaaaatgtagatttaacttataatgaaggccaaccaaagagagagagagatagacccttcagattattgactaccaaataaatgaatgagttctataccaaatatattgaattatatcgtcgcaatatattacctcacaatttagcatttctaattacataattaacacttcaaaatatcattgtggaattatatcaaacacttaataaacataactaacacatttcaatgagaaatataatcaaacactttaccgaaaagccaaatcaaagtaaattggtttagtttaaatatatataattacatgcatattaatataaaagtaaagccattcttcctggctcaaatgaacaaaaagcaataccaataaatattttaatatcattaaacttgcaaaaaatagcttcttcaccataaagat

SEQ ID NO: 73023 - DNA, 604 bp, Cannabis sativa
tgcatcacttgacagttgccttgcgaactgtcaagtcattagtatgagaaaaaagccttgtctcaccgaacacttacgttgggcccaggcgcattcttctagaataagaaatcatgccctaaggccatgcatgggaaattgtgtgaagtagaatcaaactagcaagacgaaagtagcctttgaaccaccattatgaacctataaataatctaagaatataaaaaaaaaggggatcgaaataatcattctctgtaagacaataaataaataaaaataactcgtggactaagattaatgccccaaccacgtaaaaatactcttcttaaacgcattaaatactcaaactaacctgaattaattgttgacaaaaatttcggtcaacactagtacactacagcatacaatatattaaatattgttgtatatgtaatgtatatatttaataatataatatatttattcgtagttaaaataaattaatataaaatgctagtaaatttagataacataattttatcattatataaattttttaaaaatattaacgtgaaataaaagtagttttattatatttactatcttatttattatatttggtcgtttt

SEQ ID NO: 73024 - DNA, 984 bp, Cannabis sativa
  modified_base (929)..(930): a, c, t, g, unknown or other
aactctctctagactagaatgggtgtttggatcccgcaaagttgtttccaactcaccatctttcattatttttaattaagaagacacgaagaatccaaatccaaggcctaaaaactgaaaagagatgaaccaacaccttgaaagtcaacccgggtgcctaggatttttagccagcgcccaggttgatattccaactagggtttcagtttttgtgtccgtcttagtgcaaatgaatcaaaaattttactttgacatgaataaaacctatcacaaacatatttgaggcaccaaaatcaaaatcgaaaaactttccactttgagcacctacgacactaggtgccccaaacacgtagtgcacccagcgccctagtcgatatattgtcaacctggggcgcttccaatcaccatattgaagatgtatcctgagaattttattgtctccatccaaaattaagaatcaagtactttcaagaaagaaaaggatccacttggaagcccaaactgggacccagcacccaggttgatactttgtcagcctgggtcgtttctaacaaaaattcagaagaagtcttcggggcgtattctctgttttcatcaatgattaagattttggtactttcaaaaaataaatggagtcatcgtggagccagaactgggacctagcgcccaggttaacattttgttaacctagaccatttccagtcagttttccaagaagtcttccaagtgtattctctgtgttcataaataggggtgttcacggtgcagatggtgtagtttttgactattttttcaaaccaactcgcacatgcggtttttccaatttcccaaaccgcacccacaccgtgaaactaagaaaccactgaaaccgcaccgcaaaaaatagtgaagtgaagtgtggtttttgcagtttggactatcaccaatanntaaactatcacaaatacaacaaagcttgagaaacacttgtcaaaaataccataa

SEQ ID NO: 73025 - DNA, 725 bp, Cannabis sativa
tatatatatatatactagtgaaggggttatcacccgtttctagacattgttttcatcaataatatattttaattaaaatttattaactcattacaaataaaaaaaataattacaaaaaccttaaaaaaaaatatgaaaaaaaaagagaaaaacaacaaaaatatataactaatttaacatgtaactataattggtacaaataaaacaaaatatatacataaaaatatacaaattacgaatatataatctaaaatataaaaagagcaaaagactatacaaaaatacaaattactaaaatataatcttattcaagaaaaatataaaaaagaacaaagactataaaaaaaaaatatataaattactaagtaatcttactcaatttgaaaaaatataaaaaaagcatgaactacaggaaataaaggagcaagaagtttgacacatataagtttttaaattcaacaatcttaataatttgtgaagattttttacgtcctgaaaaatttaagggcataatttagtacatatcaaagttcaaaaaacaaaaattctaatcagcctttattttattttaaagataaaattatattttctcttaagttttctaaaataattacaaacaataaataaataaacagaaaaagttaaaaagataattttatgcataaaaattatttttattttatttttttcatttaaaatccaaaaaaaaaatatttattaaaaat

SEQ ID NO: 73026 - DNA, 1139 bp, Cannabis sativa
ttttgttgtggtcgttcaacgcatgaatgataatgaacaatgcctttggtagcatagaaggaatgcatattgagttctttagcattgtcgggtctaatagcttttatggatttggaatattttgtgcaaaccatgttatagaacatgggaatgatagattgcacatcggatttgtttttaagcataaaagtccatgtaaaacgagatttgtcatcgacaatggtaagaaaatacttatatccttcaatgcttatgacattgaaaggtccccaaatatccatatgaataaggtcaaatatatcatcaacaaaattatggtttgatatgaatggcaaccttttttgtttggcaatatgacatatatgacaatgttggttttttgacacatttgaaccagaaaagaactttttattgaatgtattggaaatgtacattgagggatgaccaaggcgtttgtgctattggtctccattattagaagaaagtaaagaacaagtagaacttgcaataggtatgaaatcttggagaagaacatagacctttccaagtcttttagcagtcccaatcaccacatttggggaatgagcctgtaaagtgcaaaatcatggtgaaaatataccatgttagtgggctgactaagaagaaatgttggaattgataatagattgatgtgaaatgttgaaacaaataaaacatcataaacaataagatgtggatttatttgaactgtaccaattccttgagcacatattcgattggcattagggagggtcacatgtgatggaaaatctttgttagaaaaagataaaaaacaagattttgtaaagcacatatggtgagttgccccactatcaattatccaagagtgagtatgaaaaagagattttttaccagccatattagaagcagcaacagcagtagttgggtcctcatgggtctgaccttgacttagttgttggctaagaagggatatgagttgttggcattgagtggtgaggtcaatggtggtgttactggtctcggtggggttggcaataacactattggcagcagtctttcctttcttagatttctttttatttccatatcccggaggaaaaccatgaaggaagtaacacttgtcaacatagtgccccggt

SEQ ID NO: 73027 - DNA, 807 bp, Cannabis sativa
gaagattaaaacgtcgaaatgataagaaaacccgccttgtacaatcttgtaatatagtgttacaagctttagctcattttgtctatctctttacaatattcacaatgttcaagatctgagtaataaacaggtatttagtatcttgtgtttatgtaaatacaggattgtgtttccaataattcttatattccgaaaaacataaaacaatgccaaacatgctcttagagttacattttattcatattccgaaaatactaaacatacctacaaatagtttatacccaagaattttcataaaaaagaagatggaaaacaggaaagaaacaattatatgcaaagtcattaatctgcaatccaattaactaacataaccacccctaatgccctcctaaccaccaaagaagattttccctttcaaaaaataccattaatgttatctcagtagtaaatatttagtaagtatgcacttaataatttacaaaaccaaatgtgttgtgttcaaatcaaaataatttcaagccaagagtagagactgttaccattaatgtatctcctcctgtaaatgtaatagccaatcaaaactagtccgatgaagagaatgacaacaataattatcactgctttcttcaccttggaataattaccattactaccaacaagtgtttcttttggagctgagaaagacaaaaacaaaatataacaaaaacagaacatgtgaacttgaaatggatataaaaaacattttaaaaatagaaatttacccaatacacttaaaaacagaagttttttacatttttatgaactttt

SEQ ID NO: 73028 - DNA, 1197 bp, Cannabis sativa
  modified_base (58)..(63): a, c, t, g, unknown or other
  modified_base (264)..(267): a, c, t, g, unknown or other
aaaaaagtagcaactgacataaaaattgaaaataaaaaagagagccaaaattgactannnnnnatataaaaaagacaaaaagaaaaaaaaaactttttgaagcttaaataagtaaaaaaacagtaaaaaagaaaaaaaaattaagaaaagtataaaagtaaaatgttgttgtcaaattaaaaatgtaatgtttgaaaaaaatgtagtacttcgtgtaaatttttcaaatagaaagaaactcttaaatgtaaatgtaaaataaannnnaaaaaaataaaactaattaagttaaaaataaaaacataaaatatggaattggataataagtttataaaaatatggcatatcaaatactataaaaagtcttaaatgtgaaaaaaatgtcataaagaagtgacaaacctataaatgctatatttttctaacttttggatgaaatcccatatttctttaattttcacaaacaaaaaaagtattccaaatcaaatccaataacaagttcatattcgaaaaactgctccataaaagaaaaagtgattgatatagagagaattgtaagatcattagtatttatacatatactagttaaaaggcctgagctcgatttcaaagaaaaaacaaaaggcctgggctctcatttcaaaattgactacaaatttatagtaaatgataatagtgaataaatagaggaatgatatacttactttattttatttattttcatttttattttcatattctttaagatttacgtacttttaaagatgatatcctcattaaaccccttagattaattcaaattatatgcgagacttaagttaagtagagagtgagggtatattgggcaacctacttaaaaaagtgggtatatttttaaaaaatataatatgaaggtatttttgattaatgaaaacaaaaaagaggtatttttcaacttacccgtaaataataagtatgttcattaaactccccacacttaatttgaaaataaaagagggtaaatactattttgaatcttgtattttgtaaaagttattaattggattatctgttttgttaaatgacaaaataaatcttgtatttttcaaaatagtaaaaataggaccctaagcctaatttttaacaatttttttaagggtaaataccattttggaccctttgttttgcaaaaattaccaattggaccctgtattttgt

SEQ ID NO: 73029 - DNA, 901 bp, Cannabis sativa
aagagaatttttgtaaccatttggagctaactgatgaaggttttatcaacaaatatttaggggttctccaatggattggtagggttaataactcaatgttccactacatggttcaaagtgtctcttctaagatgaatgtgtggaatgctaaattttttttcatagttggcaaagatactcttatcaaaattgtgatctaagttgttccttcatatgtcatgtcttgtttcaaactacccattagcacttgtaagcaacttcaaagacttattgctaatttttagtaggggtcttttaataacaatacaaaaattcactaaaaaaaagtggcctagcttatgtgctttgaaattttatggggggttggggttcaaatctatcatatgctacaatcaaactattcttgctaagtaagcatggagagtttagactaatcctacatcccttctttatcagttgttaaaagctaggtatttcaagtataatgattttcttattgctcttaaggggcactgtccttttataacttggagaagcattttttggagaagagaacttcttttgaaaagccttttttggagtgaaaaatgggaaatccatctacttgattgactattattggattccaagtttgaactctctttctttgccttacgattctcctatcataaataatattgtttcctttcttattgatgaggaaggaagtttggcaagcttagctttcctttctctaattgtaattgtaacatttgtttttctctttcagttttttatagttacaattactttttaaaaaaaattagtatatatacacatagcaactaaaatatgtatatacatatacacaataattaatatatatatatatgggtgactattcaatggttatatttttatt

SEQ ID NO: 73030 - DNA, 2042 bp, Cannabis sativa
  modified_base (47)..(47): a, c, t, g, unknown or other
tcaaataactccctcatctgacggctgccgtacatcacggattacantccgtgaaagtacaataacgggacaaaatcacatccctatatatatctctctctcacgctctttctttctttcttttatttttttctatttttttttgtttttcagtgtacaatctttctttaattctacatgttttttttaatcttttttcttttgtttatttagagtacctcgaagaataatgagaaatagcaatgacatcaatggacaacatcaagacctcaattttctattagtatttcttttctttctatgttttataatatattttttagtagattacgaattattgttaatatgatctatttattcgtaatctctcacttatcaaaatatttttcgataatttgacggtaaatgaactttttttatgtctgcggctttactattgtcaataacttcgaattatctatgatttattcattatccttaatttcttattggtatttattttctctctatattttataatatatttcttagtagattactaattattgtcaacattctatctacttaattttttatataaatttataatatatattctaaatctttctctcactcatcaaaatatctcttgataatttggagacatgcatactttttttatgtcgacaacttacacggccgtcgataacttcgaattatttatgatttgtttattagcataaattatttgatgtagataaggttaattttttttttttaattatagactcttgaaattcatgaaaagtacttataaaaaggttattgaaataaagttgaggatggaggttattaaatatatattatatgtcaaatatatatatacataaaagtagtaaaatagttacttgagaaaattttatatgaaaatactaaaaattgatttagttttatgatttaattatcactaaaccaaatttaagcgtatgggaagtgcggtttatttactattcactctttaatttcttcaaatatttctatttattcactttttaatctcttatttttataatatttttaatctactaaataccattagcctatttattctctacttaattatctcacttttttaattttttttattcagtttataaatattaatagattaattaattaattaaatatctaaatatatattttttttaaaaaaattaaatatctaatgttaaacttaaatctatataattaatctacttatatatatgtattatcattctctccctctctcagcctctttctttttatttttttctatttttttttttgtttttcagtgcacaatctttctttaattctatatgttctttttaatatattttcttttattaatttaaagtaccttaaagaataatgagcaatagcaatgacatcaatagactacattaagacctcaattttctattggtatttctttttttttttctttctatattttataatatattttttactagattactaattattgttctcacttataaaaatatttctcgataatttgacaacatataaattttttttttttttttatgtctgcgactttaccatcgtcaataacttcaaattatctatgatttaattattagcctcaattttttattggtatttattttctctctatattttataatatatttcttagtagattactaattattgtcaatattctatctactttattttatatatataatatatattctaaatctttctctcactcatcaaaatatttcttgataatttggagacctacatactttttttatgtcgacaacttcacgaccgtcgataacttcaaattattcatgatttgtttattagcataaattatttgatgtagatatggttaattttttttaataataggctcttgaaattcatgaaaaatacttataaaaaggctattgaaataaagttgaggatgtaggttattaaatgtatattatatgtcaaatatttgaacacttcttaatgggtattacccatgaatgattactaaa

SEQ ID NO: 73031 - DNA, 990 bp, Cannabis sativa
tcgtcaaaatggcataaatatcctaggagaataaagctatgtgggttcaatttctagagagaaaaaagagcttcttcaaagtttctatttctagtgagagaatgaaaggggtaaagtgaagagagttttcccccgaaagacttaaatagtttctgtaggaccactccttcacttgccacacagtaatcaactaaaagacatttagaagagcaaagtagtcaagttactacaacaaatgagatcagacggtcaagagtaggtatttcaaagactaaaatcgcaataacatcaattcagtaaaggctacataagttccaacttaactggtaagtccctatttacacagacttctgaatagagacttgagggaaaatgttatctcaatttttactcacctaacgtgggatgcttacatggaaaatatcaacaccatgtggcaagacaactcaccaataaggaggtcaagttagcaccttagccaatgggcgtcttgacactcaaacgggacgacaagtgatagacgggggctagctgaccaacttttggatagcacaaggccgaccagcctgcttcctacaggtgcttggccggccaggatgggacctcgcaagattttgggtgcacaaccttacatgcggactgcatgctaggctacgaattgggccttaataacccaataaaatatatagaaaatacctatatttaaggggcattttagtcttttgtattttaccaatttaatatgtaaatatctacttattatatttgttaattaaagtttatgctctcctatataaagatccttaactcaaccctaaaaactttaagtcagtaagtctcattcaagccgacaagctctcagtctgatatcattctctttctctctcactcacacgaccactttagcttctctcaatacttgagatttgctatctttgatttctactttgtaactttaagagagctatatcccacctatagtgatctgaa

SEQ ID NO: 73032 - DNA, 738 bp, Cannabis sativa
accagtcttaaggaccactatctatgctaattattagtattttttttccctaaaaagacaaattaagagatcaacaacggcaacttttgcacaatagaaaaaaataataatgaagacaaaacatatcaacacaaaaaataaaatacaaaactgcaccaattattgcttaagacactaatgtcgttttatgttaataatttattttaaataataataaatgctaaaagacattcgtggtgtctaacatcttcattagttataaatatcgagtctcatataatttaatataataacttttaaaggatattactaatcaatcgtgtggtgacatatttaaaagtaccagacatcactgaacatcactaatgtccaataaaaatactctaataatatttatggttcatgttacttgtgtttcattaatattataaatattttattaagtgtgactcttacttttttctttctttattcactcactaccattattttgtataataaaaatatttgtgaaatattaaaaatggtcactttgttttatttttccacaccctaaaaatattgttaaaaaaacgagatatacttataaaaaaattatatatctttatttttttggaaaatatattaatgtttttaattaaagagattcaaccataataatagaaagtaattcatcaaaagcattactcaaactgaaaaaagtgtgacctttaaaaaaacaagagtcacgaacaatat

SEQ ID NO: 73033 - DNA, 791 bp, Cannabis sativa
ataattttttttccttattaacatatttttgtaattttttttcaaatataaaatccacactcacaatcaaatgcaccttaaacaaaaaaaaaaatataaatttaattagataaacaccccttataagtattattaagtaataaacaacaatcatttcaaaaaaaaaaaaaaaaaagtaataaacaacaacaaaaaaaaaaatgaattatttgtagagtaaagtctttatctctttgccacttgtgtgtgtgagaatttatagttctctcttgtttgccaaaactacaaaactaaaattacttattcttaaataaaagtggaaattgcaccgtatacttttttttttgttaatccatttcatttttaccttttttttttctatatatttaatttatactctcttttattagttatatcccgattatactcttatgtaatgaaaaaaacattcctcacccccctaacagtatccttatgtgaggatataatcggtagtggacttataaaaggggtccaggtttatttcaacttacccctaaataaaatagggttacagtaattaaacatgagcgaaattataagaaaatatttttattcaaaacttaataccatgctctttacccacaaaagatttatgtactattttcatggagatagttctccatccacttttcatgtgggacttttcaacatataatttaaataactaattttaattttcatatatatatatatttgaataaaaatttaagtattcattaaactgagaaatcagccaaagcaatggcaac

SEQ ID NO: 73034 - DNA, 508 bp, Cannabis sativa
agtaattgaagaaaaaccaaacttgggtacctttgattcctgttttccagacagtgttggagtagataaggcccgaaacaatgttgtgtagcacgctgaacgttagcttaagccggtaatgagatccttcccggagtgtgaaaaggaaattgtttcttttgttttcatcaactggtaaagaagtgttgatttccccaaaatcattagagattattccaatggaatggaatttgacttcaggttccatttggcctaataattaagaacaaaaccaataagagagcaaaacaaagatatgggaaacaaaacaaaatcaataatataagtctttaaaactcactactcagatcactttccaaggaaccaagcaatttttctttccatctccttaagctattatcatcctgcaaattagcattggtagatctaaatcagaataagggtaagtttggttggaagaatcttgcattggaacgatctttcttttcatttcaaactcgtggaaaaa

SEQ ID NO: 73035 - DNA, 1075 bp, Cannabis sativa
agagagttgggctggactggctggtttttttttttaatctaaaaagggacgaacttatatgggaaataatcacgaagaaaaaaataatcctaccaaatcaaaaagaaaaaaattaaacatgaaagtcgtagaataaaatattagattgattgatttttgagaaaaataccagaaacttagatttcaattgaaaaaggatttcttaaataaaaagaggagaatcagctgcaacaaatgattgagttactgtcacagcccgtggttgaggagtgagatgagaggaatgctcgatttaaaaagttaccaatagtatttttgagatttattttattatatataataaaaagtgaccataaatttttcataaatcattttatttttattaataaattattttatttttaatataaataaaaagttttctcaaaaaccaagataggtacactgaatagatatattttcttttgtaaaaaacgaaaaaagagtgagcttatccaacacagtaatgtcaatccccaacaatacaagtggactcaggtttacttttgaccatgtctatgggagcaccagttctccttcgtctgcaatgtttgaagaatgcattgctcccctggttgatggtttgttctaaggttataatgccacagttcttgcttatggtcaagtaatattacgtttcgactttcgaacaacataaaaaagggagagcaagattgttttgccttgcaatttcggggatctttccctaatgttaacaatttcttatattgcagactggtttgggtaaaacgagtattttcttatagaattagaggtgacaaaatagattttgacatggccacataaacacaaacaccacatgcattatgagttagggttggaaaaattagacacggatcgaaaaaaaataaattgacacgacacaatacgaacttgattgacacgttttttttctaattaaaatacattaaaaaagtattaattaataatataagtgtgaaagcaggcccggatctgggcatagacgggctaggcctgtgcctagggcccacctatctcaggggcccaaaaaaaa

SEQ ID NO: 73036 - DNA, 751 bp, Cannabis sativa
cgaccataaccgaccgactttcacccctagatgaaatatccatatccaccaccagggttccccgaaggatgtcgtcgttgcagattaggttattttaatgacgaaccggtgaagcctggatctttatgcccgtattgcgagtctcaccgacacagtaaaaacttttaaattattatgatatgattgcttagtggttagttttaatgtttgtttagtctttacttatgtttaaaaaatttcacttgtttcgtgtcaactgtttaaaagttttcatttttgtcttaaagtcgacgatatatcgacatattgtcgacaaacataagtcaaaaaatgacgacataatatcgacagactgtcgatacattgccaaataaatgtaattattaaaattaattttttatcgacatgatatcgacaaactgtcgatatcatgtcgataatgctcatctctgaccttccttcacatgttatcgatatttcatcgatattctatcgacaaactgtcgataacctctggaaaacccaaattctgacagaaaactagatctaccatttcaaaccaaaaaataccagttctgacaaatactacatatataacgaaagtaaactacatactattactaatgtttaatgaaatgcttaaaacacaacttacccattataatagtgaatgattcttgagtgattgggggtgtggtttggttttccaccactgagagagagagagagagagagagagagggagtgagag

SEQ ID NO: 73037 - DNA, 909 bp, Cannabis sativa
tgaaagatatctaggattgccatcctattctggaagagataagaagaaacttttcagcaatgtcaaagagaggatttggaaactaatgcaatcctggaatgaaaaaatattttcagctggtggtagggaagttcttcttaaagtgattgtccaatcaatcccaacctatgccatgagttgcttctgtttgcctgaatacttttgcaaacaacttgaaagtatgatggctaacttctggtggggtatgaacgaaaaatggctcaaaaattcattggcgatcatggaattttctttgcaaaaataaaggtgaaggtggtatggggttcaggtccttcattcagtttaatcaagcattattggccaaacaagcttggcatctcctagagaacccgatttcactcttgggtcagcttcttaaaagcaaatattttccacacaattctttcctagatgctcatatgggccattcaccatctctaacttggcaaggcataagatggggtagggagttgttgattaaaggactaagatggaaaattggtgaaggtagatctatacgatgtagccttgacccttggttcccaagtcactctaccttccttccaatctgctactcggggccttcacatggtgttgtaccaaatctcatcaccgaggagagacaatggaatatccctttattgcagtagtatttttgccaacttgatattgagaggattctcacaattcctttgagttactttggcactagagataaattgatatggcatcatcaatcttcgggtattttcacggttcaaagtgcctatcatcttgctacatcgcttgctgatgaaaatctcagttctagctccacatcggaattagcttggtggaaactgttctggtcacttcaaatccctcaaaagg

SEQ ID NO: 73038 - DNA, 1042 bp, Cannabis sativa
ataatttccaacaagaatttcatccaagtcatgtccaatcacggttggaacgacttgcgatttccacgccaagaaatttaaccgttcgagtttaattgtgagagaagatgtgagagaattggaaaatgggttccaggattggttttgattagttgccagatgtgcaggagctcctaccggagtttcaatctgaggatttgatgatgatgagtccattgatattggtcagtggctctgataccatgaagacttacagagataaaagcagagagttctatgagaacaacattgagaatttgagcaaatgaattcttgaccttacaagagatcaagtcctttatttatataaggaaagtacatgctagaactaaacaatacagagagagaatacaataggatagttacaaaacaaaatattaactaattactgacagatttaactaactaattttaactgatgttatcataacatcataaattaggtataaaaaactaagataattctcctaattttgtgccttaaaattttaattttgaacactaaaaacatgagcatgtatgtatacacatacatagatagagaaacacaatatattattattcttttaaatgaataaaaataatatttggatttgtacaaaacaacaaacataacattaatcacaaggtacaatttgtaaaggttctaaattttgataattaaacctaaatacttcttttcatttgcctatttcattgcatttacttatatatatatttgtagttaggtcattaataaaagttctataaaattaattttggtccatttattctaaaaaaactaatttaacttttatttagagaaataataattcactatcctacattgaaagaaataaattcaccgcaaaagaaattataaaataataagagtatttttaatggagacaattttcattattgacaaaatacacacatcatcctaaaatatatattttctttattttctcttccatataagattccacatcttttcctgtaaaaattactctaatagtgagca

SEQ ID NO: 73039 - DNA, 1254 bp, Cannabis sativa
aacatgaataagatcaaagcaattcttggcaatgttatggttggaaatgaatggtaatttcctttgtttggcatagtggcatatggaacaatggaaatgagaatcagaattggaattgaaatggaaactcaaatctttatttaatgaatgagcttttacacaagaaggatgacccattctataatgccaaatggtgtcatttgttattctagtatcagaaaatgaagagaacacagaaatagagtcatgaaaatgattagaattcaagtaatagaggctgccacatttttcacccatcccaatcatcttgttcttgacattgtcctgaataacacaattatcatgagtgaaaatgaaagtgcaattagctgtagctgtcaatgagtcaacagataacaaattgcattgaaaattaggcacatataggacatttttaagaacaagattattagataagataacagtaccaacacaagagattttaacatgtaaaccagttggtaacaaaactgttttaagattggaatccttgtaagttttagaaaatagattaatgtcagggcacacatgatgtgtagcacctgtatcaatgatccatttggagttatgagcatgaaaattcttaccaaggaagtgtgacacaacaggttgttcatcaggaacagaagaggttgttttctctgcagctttctgagcaagaagagccatgagcttttgacactgaatattagacaagctggacaccaaatccttttctcctgaattattctctgccttttcatcatctacaccagtgaaattagcagatgctgaaccagttttgtttggatttcctttggcatttcggtttggaaattttccatggagtctatgccctggtggatatccaatcaacctgaaacatcgatctatagtgtgtccattcattccacaatgcgtgcaattgaattttgatcgaaaaggttgaactgcaccagcaaattgtccagcaccagtagcattagaggaattctcactatcactggaagtaatagatccaacaggtccagaagttaaactcctttgcctttcttcttgaacaactgatgcatatgctttgtttacagtaggaagaggatctctcatcagtatttgagatcttacattactgaaagagtcatttaacccaaccaagaactcaagaagtcgatcctcttcctgctgttcaagaatgaccttcatagcaccacaattacaaacaggttgtggtctaag

SEQ ID NO: 73040 - DNA, 1125 bp, Cannabis sativa
aagatccacaggtctgacggccacctctgtttcgccaaaaatttctattacccctgatgttccgcaagcttcagccttctgtttgtgatcagggttgccactttcggtccccttactgatattaccactagcagaagggttcgatgccgtgacaacatcctttccagtctgctctttttctacatgttgctcagcctcctcagcaactaaggctagatctaccattttcttgtacaaagtgtcatgtgaagtggtaattttcaagtcccgactgattgttgtggcattcagtccttaaacaacatatttctatttcctggtgaaatctgtgggcaccagatcaccaacaaccttggacagctgatcaaactctagagtgtattcagccaccaacattttcccctgagtaagtttcacaaagtcttccatgtgggaagtcctaatatcgatgttataaaatttctcttcaaatagattcttaaattcttcccaagtcattacatagacatctcaagtctgccccacaatatcccaccagacgcaagcatggtcttgcaacatgaaggctgcactgttcgctctctcagttcccgtcacccccatattatcaaggatacgggtgattgtgctcatccactacttggccttaattatataaatagctcccagaaaagtcagaggttgtagtttcacaaaccgctcaaacacagaatctctatgcggcattataaacctctggctactcaccactggcacaggtattggtggtaacacttgctcaaaaggggaagccggtgctggttgccttaatcgacgcaactcttcctcatgaggaagtatgatacctcgcatttcttggaacatctactgctagtcagcaggaggattagcattgccaaccccggcattatcccccagattctgtagaggtgctggcggtgccgatggattggtttggtgaaccccaggctctatttgctcaccctgtggtctagatgattgtgaagagtttatttactagtacccttgtaatcaacaaccccagcgagtcaagcaccaataccacacttatgcacttattgccttaaaccctaagtcaattatttactccatataaataaacac

SEQ ID NO: 73041 - DNA, 908 bp, Cannabis sativa
aaaattagaaaggatggaagaagatggggtggggtggggttgtgatgtgatttacatattacatgcatgggtgtgcgtgtgcaacaaagttgagagttttctaagcacacaattatcttttatataagcttctctctcttctattaacttttatagatgcttgcccaccatatcttcccccggccctctcttttcctcaatatatgtttttttttctaatttcatttaaactttctctctcactctcttctatttaatttttcattgtcagcttagaaacaacgcattgtttgtatcccacacacatctttttttttttcttttatgccaaaacccaaaaagtaagcactcatatgattgtcaaaagccacttatcgtaggccctccattatatatatctatatatatatatataacaaagacacactcatttgtgtccttttcatgactcccttattgctcaagcctctctctctctcattttcattttcatttatttgggttgcgttatggctccacaatatatagctttgcatgtatgagttggctaaactccaattcagctctatatttttatcccttcttcctataatatctaaatctacctccctcttttttttaatattgtttttttgaaaaaaataataaagaagagaataaaaatagagaaaatctcttttaggtcacccacccaactttaatttttatcctgtagtatgctatggtgccgagtaccaccataagtacgtaataccgaattagcagttttttatattaatttatcgggaggaagtattaacccaagatctatttgtatataacatagaacacaataataagatataataattaggtatgtgtacctgattgatccatagcaattatctctgattgatccacagcagtta

SEQ ID NO: 73042 - DNA, 1238 bp, Cannabis sativa
tttttctgctggttcccttcagagggataccttatagggctaggttccctagacttaggctttttggtacgtggtgaggactcttctggtgtttctccaagtcctgtagggatggctttaggatgcacatggatccctgcagcctccatggctttctgcatggcgagcatcacctcttgcatctttttgtttcgctctttttgggctgtgatctcaacttcatgatcagcatcctttttccttaagagctctagttttgtgtaactaccttcgtcataggcgttgtactcttcgaagtttccttcgtattcgtcgtcgtggatttcttctcctacctcagagcccacgttaacccttgaagccacttccacatcttcatgatcttgggcgtcttgaggaggacggggttgacgcgcattacgagtttctaccattgttgtttttagtttataaggttgttgtctatttgcagacgcttctttcagctctcaatgaaagcaccaaaatattgaccgaggttttcggccaatttaataatatgtaagaaagctgtaggaaaatgcacgagatttttacgtggtttgggtattaatgagccttagtccatgagtctttagtatttatgagactatttattacatagaatattctgggtagcttttctctctttagttcttatgaaacccaacattctcgacccctgccttaatgtatttggggggtatttatagtgtttttgtggggtgatccctagaaccgagctacatgtctttctgtatttttcaataggggtacacattcccaactagcataaaataagaaatgcatggtctataccctaactatcttaggggttaggtggatgtaatctattatccgttcttgactgatgtgatccctcataaagtagtcgtcgctagctacattaatcatagcgtaatagctgcagaaggggggttacgccgtcagacttaatatttatggcagttccaatacgccttctcccatgcggcattaaatgctaggtgactgttcagatggcgtttgattgatacctcccggaaaagtgctgctatagctttgccctccgggagtacgtggacccctcacgctttctccgggaggtaggtttcttgctgatccttttgacttacgaagacttagccaaattattttaaaaccatatccctcaaatccaagtgtcgtagttacattggtccacgtaatttggacaaaat

SEQ ID NO: 73043 - DNA, 1017 bp, Cannabis sativa
atgcagatgcaactggttcactggtgagaacaaaggctgactgtttgttggaagggtgaagatctgaactgacagagagtgtagaggagggtagaatcttgaagtgagtgggatcaaaaatatacaggccattgtggagagtcccagtcaataggattgccttggtaacctggtccttaacataacaagcatcagcatgaaactcaaaaagaacattgttatcacgagcaaatttagacacacttagcaaattcttagtaatctcaggaacatgtaataaattcttaaggattaaaggcttattatacgtattagaagcaacacaggtgttaccataattttgaatggacacacctgttccattccccacaaagatttgctcttgaccattgtattctgctgtagttgtgagattatgcagatcgggagtacaatggtttgttgcgccagaatcgggataccagttgcaatcctcagcaggtgtagtttgagtcaaatgagcctgcattgatgaagtttcagcaggtgcagcaactcctgtgaaacttttatcgaatcgataaaagcaatcgattgcagtatggccaagcttgtgacaaagctggcattgaggcctgttttgattctgaactggttttccccctcttgtgccttgatttgagcctctcccaggattgtagtaagatggtgaacctcgagagaagttaccagtataaggtgcacgattagaggaattatgagaaaaatttgaaggaggaaaactgggataagagggataaaactgacctctttgcagagcaggatgtctgaagttcctgtgataatgtgcaagatttgcttcgtgttgcagaaaaacttcagaggatattggtgtggagtcagcagtagcaagattaacagattgctcgatgtctttgtcagatttttcgattcttgactctgaggctagaagcagggcctcaatttcaccaaccgagtattcttcaattcgactatttgaagatatgataaacgtat

SEQ ID NO: 73044 - DNA, 924 bp, Cannabis sativa
cgtccatctaagcccatcacgtagccaagctcagctaacatcccccaatgttgttgagtgcctatgctgctgctgcctgctgccccaaggcaggtgcatttcactcatatgtcgccatcccgcaagctaagcatcgagtgatgtcaaggtccgccgagcgaacccaagttagggtctcacagaaagcaactacatcacattgtcgacaacttatcgacataccgtcgacaaattgtcgacattttaggtcaaaaaaataaacttaaacaactaaattagtgtgtcgacatcctatcgacacacatacgatatcctatcgacatacattaacaacacagacaaatctaatggtcaaattactttcatgtttggtcgacattatatcgacaacattgtttaaacacacaaacagacatccaaatatattgatatcctatcgatatttcatcgatgccactgtaaaaaacacagacaccattgaaacatatccaacatctacaacctatcacaaaaaagagcacaaaatctaacaaaattccactaatctcaacaacatgcaataattggcatccaaatctatgaaaaatatatttttttttttcaaaaaaaaaccctacctttgactgaacttggtggtggtggcgatggttcctactcatggtgacgacagtagttcctgattgagtttgggtcgacggttccccgtgggtttgggtcaaatttgagagcgacaaacctcggttcgagttcgcctggttcgtgggtttggttcgccggttgctaggtttgttggtttcatggtggagatgggtttggggtttactggttttgttggttcctggttcgtgatggctcgacggagatgagatggtggcctggttcgtgagttcgtaaagagaaaaagacaaagagagagagagagag

SEQ ID NO: 73045 - DNA, 546 bp, Cannabis sativa
ttcatatgcttgatcccaaaaaaactaaacagctgtagggtaaaagattacagaccaatcagtcttataacaagcgtctataagataattgcgaaaatgctctccatcagacttagaggggtgttggagacaaccatacatgaaactcaatctgcctttgttgaaggcagacaaattcttgactcggttctcattgctaatgaaacagtagaagactacagaagtagaggcaaaagcgggttggtcctgaagttagattttgaaaaagcctatgatcgagtggattggaatttcttggatctcgtattgtgcaacaagggttttggagtcacttagagaaaatggatcaatggatgcctgtcttctacctcattctcagtattcattaatggaagaccaagagggaagttctctagctctcggggccttagacaaggtgacccactatcacctttcttgtttactctggtagcggatgttctaggaaggatggtggttaaggcagtaagctcaggcaacttctctgggttcgagattggaaaagag

SEQ ID NO: 73046 - DNA, 1529 bp, Cannabis sativa
  modified_base (616)..(622): a, c, t, g, unknown or other
ttaagtccttatcacattgttattcataattattgtgttgtctacacagtcgagaataatcaagattatgtgattaaactattagtccaatgatttattaatacacaggattgacactaatatgataatcaacaacttgatttacttacacttaaatagtgctatgtgtttccaaggcattagtaaagtaagcttgtgctggatgtattgttatacatcagactagatcgatattcacaatggaaaagatatcataaacttactgtaatgtcgtttctaagtaaatatttcttagttgatcttagatcaatgatctcaatcttgagatggttagattctggttcaagtatattatttgtgttctttgacttgttcattaaagtcgacaaagtggagcagtccaatactcacatcttcgagacatagtagtgcaattgagtaggagcgctaatcatagatacataatctatagcttctttaaatatatagaagtgaaatgataatttccttcgatcatggctaaatgagattaaatggtggagtactcattttagtattatgttagtttactaaaatattatttacaagtttcttagtgttttaaggataaaatacnnnnnnnggtagaacggtaaatttatccatactcgatgtagatcatcaatggaggatcattgattatttagattaagtaatggataatttatagcgtatttatattttgaacatatagagtattctatataattaggagcttgattatataggctcacggttcctacactagttcatgagataatattagcttgtagactcagttaactgattttaattaatcaattagaattctcaattaatatattagactatgccttatttatgaatttttactaagcaattacttaattgagaagaaaagagattttagggtttgtttattaattaagcgactttgaaaggtttaattaataaataagttaaatgacaattttatttaataattaattaaaattataaaatggataaaatttatatttaaagagatagaattaaaatatggtattggagaaagaaagatacgtttttaataaagtggcaagattgaaacccatagggcgcataagaaaaatcgaccatagggattaatttaattttatttttttcattctataattaatttctaacctaacccttatagaaattatataaatagataattataggctcttattttcataacctgataacctagtttcactttgtcagacaaaataagagagcaccatataatttttgaaatccctagccttttctcctcttattttcatgccctatatggtgaaggagtatttgcccatgcattttaagtcaatactcaaatataatgtggaagattgtgaagaattccatcacctgaaggaaaaattaggttcagatcttggtattactctacgacaaaaaggatcaagggttagagatatgaatggaaggagccattacattctgctgccaccaatataagatttttt

SEQ ID NO: 73047 - DNA, 963 bp, Cannabis sativa
atatgaggttggatggttttttgcaagtaaattgatagttgggaggttttgccgcaaattactcttgtttttttaagatattttatagatatgtacagttagattaaatttgaatcacaacgttttaaaaaaaaatatttttttgttatattgttaaatttaatataagagatacttataatttaaaaataaataaaataatagtaaaatattttttagatatgtacagtaaatttaaatttaaatcacaatgtttaaaaataaaataaaaatattttctattatatagttacatttaatataagagagatatatctttttgatgtaaacataactcctaaaatttctttttcacacccttttaactttttaataaatacgaaattctctcttaataataaatattaaataaaaattttctccacacctcaacaaatattatttattaatgagaaaagaaaagtggtacaatcttatcccacttaaaaatataaatgactaatatttattatatatgattatatatataataaatgtgtgcaatttaaaagtatgtcacaaataacacacaagtataatatatatttatgtggcaagtcaattttttaattatatgtttcatccaattattttaatttatttaagataggtcccacctattaaaattgacttaaaatatataaaagatgattggttgaaactcataggtgtaaaaatcgacttgccacatcggcccaccaggccaccacttgccaacaaacccaaacccaagcactgagaccaccaaccaccaccaccgaacctcctctcctacccaaaacttaatccaacaacccccaaatctcacctacctaaatttttctctcttcatcctcctcgacttctctcaaccaccatcgtcattcgccaccgcccacctaaccctcctccaaccagaagctcattgaattcgtatttgtttga

SEQ ID NO: 73048 - DNA, 1074 bp, Cannabis sativa
tttttttattctactttaattaatacaactatatataataactcccttattgaaaaaaaaaaaaaaaaaggtatatgataaacactatcaaaaatgctacttttagtgatactttttaatcaacatacataaatttttttttatgattgattaaatattattttaatttagtcaaaataaaaattatttgtcactaaaaagtagtatttagatacaagtgttgtggctaaaaacacacataataacaataaattataatttttgtgactaatatttttagttacatattttttagtgataacataaaaatgatgatttatttgttcagtcacaattttttaattttagtcacaaattttagtgtgactaaaatgtaaaattttttatagtaaactaataaatatataattaaaaaaaaatattaatctacatatacaactttaaatgaagtgataattacaagtgagatgcgtatacaacaattattttaaaattatatgatgagtattctacaaatttattatcttcttttttctatttcgtgtgagtattgttctgtgtttgtaatttttcttcactataacatacatttgaagataactttttgtgtttatacataagaaaatgtgtgaggattgttcagtttcttatttttataatttcttagagttctttatatagatttatcatttgtttaaatatatttttttgaagtaattattgtacataaaataagtttaaaattatttaacatgattttattgttctaatattcatatttttaatttaaattttcataattaccaaatattcatatatttttacattgtataattataatataacgttgtgataacataaaaataatgctgaaataacacaaaaccataaaaatataaataaataaaaaatcttaaactataagaaaaaaaaatataagtgtatgatgtaaattttcctagtttacacacatgaaaatagaaaattatattatatacccattaaattttatttgttttaatgtttaccttcatttttatattctttaagatatacccacttttatagatagta

SEQ ID NO: 73049 - DNA, 1241 bp, Cannabis sativa
aatttaatatgtttatacatttatttatttttttttaaaaaaaattactctaagcaaatgtattacactaatattattctaaaattactttaattatttaatggtaatctaaatataaaaaagaaatcttataaaggtacatacttcataccaaatgatgatgtgtgtacaagacatcataaatgaactttgtactgaaattttaatagaataaaaaaaacaagttatatgcaatgaaatgatgagaaaaagaatggaaaaaaaataagagaaggagcaaaattatggggtgcagaaaactaagttaagtagagggcagttagtaagtttgaaatgacataatttttttttatttcttaatcaattatgcaatgtgaccactcatttttatataattttttgagacaaatacaatgaaagaataagtgaatgtacagaatgaatggataaaataagagaaagattaaagctatgcataaagtttctcaaaaactttaaacgtcaataacttttgattcggttgtccgttaaaggcgattttttttaaaaaaattgggtattattttgcgttctacgcatcccaaacagactacggcggtttggccaactattttgtccaaaaaattctattttgtatactaaaatcatgttatacaccccctttcacctaattttttgtgttttatttttctatttcacttaaaataaactaatagaattcttatgttaactattagaatcatgttataaaataatataaaatagataagaagaaaggaagaagaagatgaagagagaaagagaaactgaatgagaatttctcagttgtttattctaatagggtgaacccctatttatacaaaaatatgactaaaagaatgggaaagtaaatcaatgtaataaaagaaaatacagccaagaaataatggtaataattaatttggaaatttagacatccataaataatatttcattatactcccccttgaatgtctataaaaactgtctcattaaaaaccttgctgaaaaaactttgtcaaaagaaaaagagcacagtgtaaactaactccccctcatttagacattcatggagatcttctaatcgataaattttgatcttgtgtgccgtcttcttaaatattgatgttggtaataattttgtgaataagtttgcaagattgacacttcattgaatatgttggataccaatatacatgctcttgaaatgtataaagaaaaat

SEQ ID NO: 73050 - DNA, 704 bp, Cannabis sativa
gtttagttgctcttttgtgattttcaaagtggaaactttaggtgcattagaaagattattactagtatcagtagtagtactatttttgtcttggtggttgttgttgtggtattcaatgtgattaaatgtgggattaggtgggtttcgaggtttgagtagtgttcgatctagaaagggtaaaatagtcatttcaagtccacgagtgattcttgaccatgattcaatgaaatgaaaacttgaagttccgtctactgtatgatggtcaaaaccaaacccaattgacactccaccacacttgaaataagtaacctaaaattaaattaattataattaataattcagagcttataatatataatattgcaataactaatttgaaacaaaacgtaactaagttataattgtgtttttctttttaatcttatatactatttttacaaaaaaaaaaagaaaaacaaaatactttaagtcataataaaatttatgattagaaaaaaattaattataaatttttaatcttttattgtgattaataaaatttattggctaagaagagtagtagttacaaaaattataatttattatgattaaaattaaattagtaacaatttgtatataaatattatattttaatccaaaataaacttttattataactaaaagttacagtcaaacaaaatttatattataagtaaaatatcgtc

SEQ ID NO: 73051 - DNA, 642 bp, Cannabis sativa
  modified_base (349)..(353): a, c, t, g, unknown or other
  modified_base (421)..(424): a, c, t, g, unknown or other
aacatataaattggtttgaaaagttgtaaacaattttttcttgttaaatagttgtatttgcagaccttaaaaagtgctggtaggttgtaaatggaagttgaagtaatgcatcacaagctaagctgatttatcaaaaaaaaagttaaacataaatatttatgttgcaaattattcttttcataaatctaaaaaaaattataaaaaataaaaaatccttgtatgaggaactgtaaaataaaattgaaatactttataaaaccatttttctagcaaatttgttttttttaagaaggtagataatattttggaccttgtgttttgcaaaagttattaattggaccttctgttnnnnnaaatgacaaaatggaccttgtattttctaaaatgatacaaataggaccatgaactgattttttgtcannnnaaaatttaataataatccgatctataggtgctatgacaaaactgtttatattttctatatctgttcgaaattatattcaagttggttatattaaaaaaaagttgtcaaaaattaaactcatggttctatttttacgattttgtaaaatacagggtatattttgtaatttaacaaaatagagagttcattcaataacttttgcaaaacacaagatccaa

SEQ ID NO: 73052 - DNA, 834 bp, Cannabis sativa
tgcctccttgtcaaaagaagtgaacagtctccaagaagaaagggaggttcttcgaactgtcttccgcaggttggaagcagagaagaagtctaaggaggaggagcttgtcgtcgaagttgagaagtacaaggctgaggctgagcagtagagagctaaggttgagaagcacatggcagaggccgagtagcagagagctaaggtggtgaggctcggaaggaaggtaaattccttagagacagcaggtctcgagattttttatgacttctggaaggctaatcccattgcaaacttcgattacttgggcgattccaaggacatgtttctcgagtattgcacttctcagatggcttatggagaatccgaggtgaccacttctacctctggccaaaacgttgacatgccactcgcttagacaatagatcctccagctcctactagcccagaagacccgtacaaagtgcctgggactccagccgtctgaatacttatttttttaatctttttttatatttgtccggccataaggccttttttaagacaaagtgaccgaccaagcggtctttaaacttggaattatttttcatttttaagacaacgggctaaccgggcagcctttaatcccgattttcgtgcttttgttatctttaatgaatttgatcctctgtttataatcatcgtgcaactatgtttgttttatttttcaccaaattctttgtacagatataggtgccccccaagtgaccgagcagacttatgactctaggtcacttataattctttgcaagtatgctcttttgtctgttcggggttttgggttcgacgaaaccttttgta

SEQ ID NO: 73053 - DNA, 1842 bp, Cannabis sativa
tcataggtgttggagaagacttggcatcagccatttgagcctttgccagaagatcccgagcgtacttagcctgacacagatgcagaccctgatcagtatgttgaacctcgattcccagaaagtaatgcaaaggacccatgtctttaagagcaaactgagaattgagagtggcaatgagattagtgattgcaatcgggtcacttcctgtaacaatgatatcatcaacatatacaagcaccaaggtggtgaatgtaggagtgtgtagtgtaaacagggagtgatctgaattggaggatacaaatccaagtgatactaaactgtgttgcagcttgtcaaaccaagctctaggagcttgtttgagtccataaagggccttatcaagcttgcaaactagatcagtttggccaggaacttcaaaaccaggtggctgcatcatgtatacctcctcttgcaattctccattgagaaaagcattgttgacatcaagttgtcttatagtccaacctttggacaaagcaagagtcaagacaactctaattgtcactggtttcaccactggactgaatgtttctgtgaagtcaaacccaggttgttgatggaaacctttagcaaccaacctagctttgagtttttcaactgtaccatctggattctccttgattctgtagacccatttacaaccaatggcctttcttccagcaggcaacttgactagagtatatgtcttatttcgggttagggccagaacttcatcagccatggcattgttccattgaatattttgcaatgcctcttgcagtgttgtaggaactttagtaaccataaaggtttttggcttgtgaattccagatttggatctggtcttcatgctgtgtttattttgttgttcaggattgggtgcacaactagcaatatctggtaagatagcttggatagtttggtgttgctgctgtaaatcaactgttgctacaggaatggaattagcaacaggagcaggtgtcgactgctgttgctgtgctactgctgtgtgctgcactgtttcagcagatgcctcatgttctggtgtttcatcttgtgtttcagcactttgccttgaggattgacctacatcaaacacagcttgttggcttgtgggccaactgttaggtacaaaagcagatgtaataggttgagagatatcagataattgaggattgtcaaataaaacatgttggtcaattcctgctgcattatttgacagcaaatctgtcatggtataatgtgtcttaggatgaggacaacttggtataatggcagacacaactgaaggttggacagatggaacacaagtgctactggtttggacagatgactcttcataagggaagacaaattcctcaaaaacaacatcccttgagatgtagagcctcccatttttatcaagacatttataacccttatgattaaggctataaccaagaaacgtgcaaggtgaggatctaaactcaagtttgtgtttgttatatggccttatatttgggaagcatttgcaaccaaaggttttaaaggatgagtaatcgggtttgatgttgaacaaggtttcaagaggacatttattgttcaacacaggtgtgggcaacctattatgaatgtagactgtggttctaaatgcttcatcccaaaatttgagaggtaaggatgcttgagccaacaaggcaaggccattttcaacaatgtgcctatgcttgcgttcagcaagaccattttgttgatgtgtagtaggacaagggtgtctatgatgtattccattttcagcaaggtatgtggaaaaggatctaaactcacccccccaatcggtttgta

SEQ ID NO: 73054 - DNA, 709 bp, Cannabis sativa
taaggagaatgggaagaatgctactactgaagaaacacatgcatataacgactgggattttgagggttataaacctaacactaagtcagtattctctttcttcttttatttgtttttttaaaaaaaaaaaatcactacataatgttatgaattattcacatttctataattaatgtatttttgtttttcgattgtagaaataagttcgtggctgacgctaatgacattgattttgattttgggatcatgcacatcaaaaagaaatattggtttcaccaacttcagacttgaggtcaatttttgtctgattctataagtatattgttttatcagttcaagaccaagttacattattatttattttatagtttgattgaaagtaacctattacttttaatttctttaatttatgccttttatttttcaatttgttataaattacgtggttaattgattatcctctctttttaattgcagcatatcaatgttattatgtattatcttaggaaaaagatcatgcacagtggtaccatcaacatattggttacgactactgattcaattttctataaagttgttagaactacttatgagagttacttagctaacggtagcaatgtgatcaaccaggaaagcattattgcaaaatacatgtctggacaatcattatcatgtagtgttccatggtattaccttgatcatgttgcga

SEQ ID NO: 73055 - DNA, 717 bp, Cannabis sativa
atttaagtgtttatatattataattatgttttatgtgtgactcgtacctaagatcttcaacacacacctacctatggccacttgagttagtctcaaatggttgaatgttttttctttcaactatatagaaacttatttatttgtaaatgaaaacatagaatagaatacttttatgtattagatttttattttggacttaacattaacgtttaaatattctgttaaaaacatagtaggttagtgttatactacaatctttattatttttatagagccgtatgtttaaattatttaattacgtttcaaaaatttctaacattatacactattctcatgtaattatttatattctattctttgatatatatatatatatataatttttggtgattctacaatataccctcttaaaagggatgtagtgatacactctttatttgtttcggcatctagaaaaattttttagtctattttttttcatcttcatatacgttatagttatttaagatatcctaaaaaattttgaaaaattcagaataatttactatatgaaaaataatgttcaaatagtttattttatacgtgtataaaataaaatagtcacgcgtgcaacacactacttaaacgcagtttttagcgtattaaatttttttgaatttcttaaaattttataggatatgatgtcttaaataactataatttacatgatcatgagaa

SEQ ID NO: 73056 - DNA, 1078 bp, Cannabis sativa
ctccgtttaaatttattaaaagaatatttggaagtaattgataatacatgtttctgtctaaacccaatgattaaaaatctagatcttatacgtggcctgtaaacttatatcgctaaaaaataaatattgaaattatgccacttataaacttaaaactttgagtacttatgtccatatttaccctctcatataatttgtcaccaaaagttgtaatggccacaacggacatccatttcagccgcctactttccggcaccaatagttgttttatccattgccacttgcatttgccatttgactacgctgaacatcaaaacgacttggtatatgtgacaaactttatactagactactagtggagttttttttcctaaaaataaaaaattataataaatcatattcaatataatccatttagtctaaacttgtcaatttcgatggtctaccctctaccaatataattcgtagacaaaagtcttactaaagaaagagaattgtatttgatattacattgactggtcagctctataaaatgatatatatctctctatatctaacatcagaagaatgaatccccacaaaatgacaaaaaaaaaaaaaaaaagacttacttttgtctttttgtgaatgtttttttgtacaatttttttttataatatttattttataattctttttataatattttattttattttgtgattctttttataagtttgtttatttatttttttaaattttgttttttatttatttttagtaatttttttttaatttattattggtactcttaatatgcttagtgcattatccttaatgtgtttaatgtcatttcagtgtaattccattttttttttttgtattttttaaatttattttttgtatttgctattagtatttttaatgcacttaatgtcatatgggtatgatactcaataagtggtttgtaatctttttttgtcttgtatttttttcatttgtgtggatgatcttcgtacttgctattatttttggtaaataattattaattagttagtaattttttatgaatattttttgtaccatttactattttttt

SEQ ID NO: 73057 - DNA, 705 bp, Cannabis sativa
tcacaattctggtataatgaaacacgacatataatacataggcatagcttgaacaactttttttaagagaatttcttttccttcttgtgagaataattttgtatgccatgaatttagttttaaccaaatcttatctttgattggtcgaaatatagcttttttatttcttccaaccaccattggcaatcccaaataagtctcaatttcttctgtcatcgtcattgcaagagaggagacatattgtactctaactcctccaggagtattgggagaaaacaaaagcagtgatttgttgtaattaatcatctacaaaaccagtaagccaatattataaattaattactaaaacttaaaatgtaatctcaataaattttttgtaaataatttatacctgtcgagaacaatcagcatatagtctgaagattttttaactgatgctaaagttctctatgaagctttaaacatgagaaaactatcatctgtgaaaaacaagtgactaattggtggggcatgactagctattttgagacccaatatatctctcttttcctctgcatgtcgaataagtgttgaaaatccttctgcacatataagagaaaggtatggcgaaagtggatctctttgtcttaagcctctactcggtattacttccccataaatctgcccatttaattgaaaagagtaccgaactgagtagacacattt

SEQ ID NO: 73058 - DNA, 1303 bp, Cannabis sativa
ggggtatactgctacctagtcatgcctttcagactgaagaatgctggtgcaacttatcaaatgatggtcaaccggatgttcaaaggcctcctggggcaaaatatggtggtatacgtggacgacatccttgtcaagtcaaaagcatgcactagccacgcggacgacctagaagaattcttcgaagtagtcctgagatacagaatgaaacttaacccaaagaagtgcactttcggggttaagtcggggaaatttctgggcttcattgtcagccagaggggaattgaggcaaatccagaaaaaattcaagctctcctgagcatgccttcccaaaagaaacacaaagatgtccagagcttaaccgggaaggttgctgccctgagcctttttatctcccggtccatagacaaatgcattcccttcttcaacatcctgaagaaatgtcagaaatttgaatggaccgatgagtgcgaggaggcattcaaaaaactgaaagagcacatggccaagccaccaatcctatcaaagctcgttctcggagaggacttgttcctatacttggctgtctctgagaatgcggttagcgcaaccttagtacgggaagaggagaaaactcagcatcccgtgtacgatgtcagcaagcgcatgataggagcagaaacgcaatacccagtgatcgaaaaactagttttttgccttctgatggcctcgagaaagttgagaccctacttacaagctcacccaatcaaggtattaaccaaccacccgctccagcaagtcttacgaaagccagaagcatccggaaggctcctcaattgggcaatggaattaagccaatttgacctacactacattccacgaatttccataaaaggacaggcgctagcagacttcatcacggagtgcaatgaagctgaagctactgcaaacatacccacaccgtcagtcccggcatagaaggtattcgtggatggagcctccaatgagaacggatctggagcaggggtcgcaatgatttcccgagcggacttcgactccaagcagccctgcggtttgacttctcagcttcgaacaatgaggtcgaatacgaagccctgatagcagggctgagattagcaaaaaccgtcggaactaagagagtagaagtctacagcgattcccaactggtagtaaaccaggtgtcgggggaatatcagaggcgcggagaaagaatggccgcatatgtggcaatattccgcgaactgctccacgagttcacggactataaagtggaaagaatccctagggaaaagaatgctcacgcgga

SEQ ID NO: 73059 - DNA, 762 bp, Cannabis sativa
gttggatgaagatgtctgttggatgggcgaagtcccaaatcctattttctctgttgttgtaaacgatttgcagttttaataacagtgaaatttctcaaaaaaaaaaaacattaatatttcagtatacacttcagttgcatgtacaaattaaagtgcaatatataatccgtaatccaaggcttgtttttgacaaaaatatatatatatttacatgtatattatatgtattgttagcatcaagacagatatagcagttttacaataaacatattaaatgaaaaataatatacgtatataaatatattaaatttatatcccaaagtacaagtcgaaatctaggatatcgaacactaatacgcatgcgtatatgttcatggaccacgtagtactctcaattaattatatttatatataattcttttcatatctgcgagaggatatataattaataaatatctatatgagacttggaaaaattaatattggatatatgcataggaagatcgatgacaatattatgtttatatatatatatatataaccattcttagtttaatttgctggagaaaaagaaaaagaaacattctttataatatatacattgataatgatacatacatgtgtgagatactaaaaaaaaaattaaaaaaaaaaatcaagaaagaaagaaagcctagctagaataatattgtaggtttaactagatgattaaaattcactttgaaaatggaaaagaacattaattaatatgaagcctttttt

SEQ ID NO: 73060 - DNA, 908 bp, Cannabis sativa
tactaatctaactctaagtttaaattgcctaaagtaagcatatacaagtaggagattctaagaacgaggatttatatcatttcgaggtataatgtcgggaatataatcatatgtgacatttgatttcataagagaaattagagtgacatcataagcagatgatttataaaccatttatctaatgatatattatttaaataaattccaaatgaataagctaagggaaaacattaaaggataattttatataagataagaatccaacgatgtcccagtaggcgagagtcaaagttactcttattttatgaatctcttcattgtttcatattgtaaacactaatctaagttgtcatctgtggatgtacaactagatgttacatttacaaatacttatctatcgagatctaaacactactcgaaaaatgagttttagtgacacacattgagtaactctaaaattatttagtgacacttcaacgcgcgtcactaatgagggtgactagaaagataatttttaatgaaacttcacacgtgtcactgaacccttttacattaactttttgcgcgtcactataggcgtatagagtcaagttttgttagactgaaaatgtaacaaccacacacatgaagtgtcactatatcttttttttaattattaatatatttattaattcaaattttatatattgtaaataatgtttaattgtcaaaaaatcctacaaattatatatttgaacttaaaaaattacataacaaaaaaatttccacattcagtttttgtcaaccacgaatagcaacgaaccctattccttcgtcgacaatgaataactacagagcttcaaatatcataatcgagaccttcactgcctcgccggcgaaaggggattcaaaagtcgagatccacagca

SEQ ID NO: 73061 - DNA, 851 bp, Cannabis sativa
atatatatatatattaatcctcaaaatttcatatatactgtttaacaatccacgaatgcataattttggggtcatactaaccaatcttaacacttaactctacatactaactattttgagctccaaacttcaatttccttttgctactcattgttgttaaaatactcttgttaagtatcaatatgtactaaaaagaaatacagttagaaaaaactccagcttgctctggaaacttcctaggaatatctcccttttcatctggcttcgtcttccagtttggtttttttcttttgctttcatttttcgtcttaaatctttttcttctctttcatttctgtgcatttattgttgatgcctttctcctctctcctcaccagtcttctttttttctctatgtgttgatttgagaggcaaagaggatctttttaatgtgcatttaattttggctgctaatccctcttttctcgagtttaatttattgctgcagagtttaatctttggccaaactccattcctccatccaatcatttatttaattcccgtcgatccttcttctattgggatattctgcagtaaaagatcttctcttcctggtgcagagctatggctaggatggcctgatctgggttttcctaggttcttaatgaagcctctttcatccaggtatttctctttttttgtctatttaaggttaacaatttatgggattactgctatacctatctcctctttaatttccttccttttctatacttctcctattccttaccaaccctcaccatgagtatttcccctcaacaccacgaacacagtattaacctcactgaagaagaagctttagttcatgaatt

SEQ ID NO: 73062 - DNA, 579 bp, Cannabis sativa
catcaccttcttcttagctcaaccgtgttcttcttcttcttcactcaactccttctcccattcccatttcagtctcatccgaaaaccccattcactcaccattaatccaactattgaaccctttcaccttcccaaccacaaacctgaatttagaagccataggcctccgctgaatgatgcaatcaaaggagaaccatttagtccttattatctttctcccactccaattcaagttctgcctgaaataaaaataaattgattattaatttaaagtatatatataaaatatatattactcaaaatctaaaaataacactgtacgtgtgtcttacctcgtatcgaattaaagataggtgtcaataattccaatcgacaccaccacccctttccatcgactctgtaattaaggcgaatgtgtgctccagcactttagaagatgttaaaatttttgaacaccatgaaagttgtcggcaattatgccaaatgaacattcttaagctttgttaattgttggaatccacacgacatctcctttagttgtgggcaatacgattagagaacttactcgattacagacct

SEQ ID NO: 73063 - DNA, 886 bp, Cannabis sativa
aaaagtaagctctagcatactcggctcaccctatcatgtcatggtcccatgattaccctacatgtctactagttgaaattataacatatgggtagaatctttataataagggtcgtgaagtagctatatcctatttgtgccctactcaagtagagatctcttactaataaacatgtacactatctccctatattagtcacccctactcgaaatgaaagcctatcaaccttgacaggtcagatgtactctctccaggtggtgacaacaaaaagaatcattgcttgataccacttaatgaataaaacataccaattcaaaagcataggtactagaacacttaatagcttacatctaaagaaataaggtgttctgtctatggtactagaatactaaatcaaaaacaagttagtgtattaaaccgcttacatccacagtcgatttatacttgtagactgagcacatagatctaaatctaaactatcgaaagttcctgatttctcataaactctactgttgcaaagtagtataagctcaatattatcaatatatctattgaagcatgatgaaaactaatgataaccaaaaaaaaacagaaatagtacagtaaaccaaacaagtacctgttcctcctccttaaacaagtgcttgctaattgatgtatgaagggctccagtacaagaggctaattctctccaatagctttcttccttttccacatcagaatttaaaagcttgaataactgatcaaaaataaaactttctcccttgtgttcaagagagtaagttcgagcaacattctttacacgtatatccagagctggaaagatgacctacaatttagaatagcaaaatgttacagcaccggttcattgcaccataacttaca

SEQ ID NO: 73064 - DNA, 757 bp, Cannabis sativa
  modified_base (147)..(157): a, c, t, g, unknown or other
aagaacataaataaccctcttgagatcaaacctaaccatatcaggattaagatcttttgatctaagatcaaccaacttagaaaggtacaacaataagattataatatattcatgatattaatatcggtctcagtccaatgtatactnnnnnnnnnnnatactagcatactttgccaataccctagaaggacataacacttatccaaggtgtaagtaagctttatcgttgattatcacatcagtgtaaattcagtgcactgatgaatcatgagacataaacttttgagcatataatcacaattaccttccattgtgttgatatcactatatttgtgaatagctatatgttctgaatttaatgaaaattgtatataaaaccataagcatgaaaaatacatgtaaacttaaataacttctaatcttctattgataacaaataggattatattgaaatgagttttatttgagacataaaatcccaacaattattccccaagaggtattttgagtatatgggagtgaaagtgagtaataacattctatgggtatattatatgtgcgtgggagatggagaaactacccccgtagggataagtcgagcagtaaacccccaggggtaagtctagcaatcacccccctagtgtgagtaaagtgactaacgccctcgaaagggatggacaagtacctccatagtgggttaaacaatcaccactcccttaaaggtgagtcatctacttaagggtgatagattagtcta

SEQ ID NO: 73065 - DNA, 1154 bp, Cannabis sativa
  modified_base (32)..(41): a, c, t, g, unknown or other
atgttgaataaaatggattacattgaaattgnnnnnnnnnnagggcataaaacccaacaccatcaccctataatgtcatgttaggcccaccaacgttgtatgacttaaaggctgttacgtcgatattccattcatgcctgaagattccaacgaagaatggggtagggtgtctaaaaggaaaccagtagattgttcgggaatgttataaccttgccgtggccaagactaaaaaggaagtatcctctagccagagcacggacaagggaaaaaacatttctacatagggaacttaccaaggcggggatgaagatgtggatcctcgacttggggacccaagaagcaatgttggacctgtggaagaactagaagagatcgagatcgatccagattttctggccagaaagcaaaaaagtggaaaaggtttgttgctcgaagtaaaatcagcattgattaaatttctgagaggaaacctggatatttttgcctagtcacaggaggatatggttggaattgatcattttgtaattttgcacgtcctaaatattgatcccaaattctgaccagttcaacaaaagcgaaggctgttagacaaagagcgagctttagccctgaaggaagaggtagagaagctatgaaataacaacttcataattgaagctttctacccggcttgggttgccaatcctgtactggtacccgagccaaacaaaaaatggtgagtttgtattgacttcacagacctcaagaaggcatgccccaaagacttttttccacttccaagaatcgatcagcctgtggacgcaacagctgagcacgaaatattaagcttcatggacgcgtattcagggtacaatcaaatcaaaacgcatccaccgaaccaagaacatacaagtttctgaacatagatgggtctattttgctacaaagtcatgtcatttggtctcaaaaacgctggagccacataccaaagattggtaaacaagatgtttaaagaccagatcgggagaaacatggatgtatatgtggatgacatgctcgtcaaatccagtaaggctggcgacatatagatgacctagacgaatgcttcaaaatcctcaagaattacaacattaaactaaatcccttaaagtgctcctttggagttagctcgggaa

SEQ ID NO: 73066 - DNA, 746 bp, Cannabis sativa
  modified_base (614)..(636): a, c, t, g, unknown or other
ctagcgccaacaaacgaatgtactgttatttaaacatttttttggtaaaccatgagaattgttgaaaaaatttcattacatatctcttttaattttaattttatttttctttaattaaaattcatctaaaaaaaatataaatttgttatgtttaaaattatgtattaattatgtgaatgtgtgagaataatttagatacaataatcataaaaaaatatatatttaattaaattttatttaaaatcaaatttgattaatatatatatataaaaaatatttttcaacttctctcgtaattgtattaccactaaatcaattacatcttaacaacactttataacaaggtttgagtatacatattttatacatttcacttttcagatttgtacaattacaatttttcaaaccacttagcaatgttaatctgtctaagaaccactataaaaaaactgatacttttagtgacaatattttagtcacaacataatttttttgtgactaaatgtgacttttggtcacaaaaaaatattacttgtgactaaaacatagtattttattacaagttgtcactaatttaattttaatcacaataagtattgtgactaaaaatacannnnnnnnnnnnnnnnnnnnnnntttgtgactaatacttttagccactgacattttagttacaacatataggaatcatgatttataattagtcacaattttttttctcttttaaaagtaagattttttgtagt

SEQ ID NO: 73067 - DNA, 1210 bp, Cannabis sativa
  modified_base (729)..(731): a, c, t, g, unknown or other
gttatagagttaagtatgcaacttcaactaattttagattctaattgttcaattgaattggtggaatgtagtcattatatgattttatttttaatcatcaataattttacaattaatttgtaattaagattagaataaattacggcataaatacgtaaatttaattttcttacaaataaataactaagagcatttccaatatagagttataaatatagtgtattgctatttttagaatattttgctaaatcttaactccaatagttatgtaaaatgtatgtcaaatttgattcaagttataaattatgccaaatttaacacaaaaataagatgagttaaattttaatccacaataagtactatattttttaattattttgtcatttattaatgaaaaaaaataatatttataagatattaaaatataaataaagttaattattttgtgtattttcaatgagtattaatgatgttattgacttttatagttattttgcatcttgtgtattagaacacaaatacaaaaattgggttaaatatagcttcatggtatattttgggccaaatttaatctaaaatatataccatttattggagatggtctatgtttaatttttggcagtaataataactaagttatattttcagaactccgtaggtacctagttgttaaatgtcaagtcattatccacgtgtcattttttatgggtatatttaaactattttttnnnaaaaaaattaaaaatttaatgaccttgaccaattagggattgtcacgcgataatttacttaacactaaacaattaggtacctacagaagttcaagaattataacttaagtatttataccgtaaattactcttaaagttatatataagattattttgacgtgtgaactaacaccattgtattctttaatgattccttcacgaaaagaaaagtttaacccaaatcaatattcaaaacatattaaaactcatagaaacgatggacttgtttggctacttaaaaattgttttcaacttttaaaagttaatacttaataggggtgtctgaccaaatttttaacaacaattttatgaaaattgagttttaaaaaattaaaaaatagacaacttcaaaatattattttctattttcaaaaataatttttatttttttgtctaatatatttttttttggctaattagtaatttttcccctgaacttt

SEQ ID NO: 73068 - DNA, 713 bp, Cannabis sativa
  modified_base (664)..(669): a, c, t, g, unknown or other
ataaacatgaaaaatacatgttaacataaatcacttcaaatcacttaaattgataactaatcacattgtaatgagttttatttagggcacaaaacccaacaattgcattcccgtgcaatatttttttcttcgagacatcccactccacttttagttgggaacttaatgcacaggtgaaaagctgatgtgacagcttttaagtcatatatggcttgtcggcctaacatgacattgaaacctgatgggacattaattatcaggaattgtttcatcacagttatgttcctcggagcttgtacaacagtaagcggtaggtggatttgtccaaggggagtaacattctggccggagaaattatatctgagctgagtgcaagggattaagtctttaagttggagtcccatcttctaataagtttttttaaaaaagaatattcaaggaagctccattatctataaccaaggtgtctttttttgggaagatgacatggctggcatctacttctataaatgttattgctggagcccccacacgtggtacttcaggtttcttttcttcccaaataatgattgcttcattttgctcataatgtaaggctcaaggatatttttctctagttttgcccaagtctacaacaagatgtgtgttgggaatattttaccannnnnnagatttactaacaagtatgttgagttaacatcctaaatatgaat

SEQ ID NO: 73069 - DNA, 758 bp, Cannabis sativa
tatttttatattatgttttacaaaaccgagattatatttcaattataatcagtttgagttattagtttttattcataaaaacggttatatttatatctgagacatttacttctggtgatttttccagtgacttttccgatgacggtgacttttcagcgactagtctggcgatgatggctttttcggcgactttttcggcgacactaactttccggtgactttttcgatgccagtgactttttcggtgccggcgaattttcggcaaaacttattgttgttttacaaatatgggattttcacttttagtttttttttacaaaaaatatggcataaaaaaatccatataaatgtaaaaaaaaaaaaaaaaaacccataaacttatagtgttatttatttatactataaaaaagtaaacaataccctcaattttcatatttataaaaatttccctatattaaatatatttgtgatcacactcttttatgtttgaatttgtatacatttaacccttgcattttttttttgtgtcaatatcctttaaacatcccttttattagaattgttaatgtatgtacatgtaatatgttattatttgtgaaagtaattttcattatttaaatattataaaaattattttaaattattttttaaatatgaaatttatgtagccgcaatttatcttattattttaggctgagatacaaaatgatcctaaatttgaaaattaagttaataaatgtctcatttaaaaaaaaaaa

SEQ ID NO: 73070 - DNA, 941 bp, Cannabis sativa
aggagatctgctaatacttatgccaatgtcttggctaagtttgctcttacggtggatgctgattgttcttggttggaggaatttctacctccacttatgactgttatgtaatttttcttaagaattaatgtaatggtctttttctcaaaaaaaaaaatatatattattaacattaaattattttaaaatttaactataactatctaaaattaatttaaaaataattattaaaatcatatattttatttaattaattttaattatgcatataaatttttaatacttcatgttaagatgataatcaatataaatgggtcataattaacacttaactattgtttttataactttaaaaaagttgcctctatgtacataaacttgggtaagacaaatatgctagactgaattttggtgaaataattttttaatattattaaatctgaagttgtcattcggtttagatccagggacggacccataagtagcccccactaacaaaaatattgccttttaaaaagttcaatgtaatttttttaatttgataattatagaccaaaataataaaaaaagcccccataaaattaaataaatctagtaagaattattataatatatgtataaatattttttaatgataaataagcccccacaaggtaaaaattctggatccgtcactgtttagatctgaaactataattgatatcatgaatttgctaatttttttttaccaaattaacattaggatattaatttaatctatttttaaaatataagttccaaattattatcaaacaaattataaaggctaattatatattcacgctaacataattctcaaattggtaatattttttgaattattattaggtttatttttattaaataaaaaaaaatatatcaatatattattttaatccctctcccaaatacatgtgtaaaca

SEQ ID NO: 73071 - DNA, 616 bp, Cannabis sativa
cattgggtaaaggttactgggttttgaaactaagcataacaaaatgcagatctttaattagaaacaaacaaattgtagacaaaccagcattatagtctgaatcttattacctgagaagcacccaaattatgagtgtatcgcttaggagtgcccgaaacttctagagaataataaaacgcattaacatcgtccatcatctcctcttgtgatggaagatcaaatcgatcggacagaaggcctgcaatccacttgctctgaagttcacacaaagggaaaggaataacctggaaacaaaagtattcaaataatgtttattactagtcataaacaaaactattattattgaaatgtaatgatgttgcttaaagcagaggtataccttccatggtaacccaacaaaggaaagccttggagccaaggctggtgggaagacatgcttataaagtggtccaacacgattgtcgtcaacagtcacaatgccattggtttcaagaaaaggaaaatggaatttgtaccttaagggggaaaattgaagttaaatttcagtttattttttttaaaaggaaaaaggaaatttgttttgctttctatgcagaaagagccttagattcaatgt

SEQ ID NO: 73072 - DNA, 916 bp, Cannabis sativa
  modified_base (860)..(861): a, c, t, g, unknown or other
atctaagatgtaatcaaacaagaaacattaggagacattcaagaaaaatctatgaaagtgagctatatgttagatgataggggtgtatattagaattcttacatctacacaaactcataacctattcgagatggtggttactctgggagtggaggaattattctagaaggatgtaaaaagccatctatgataatttaagctccatcagtaaagatacacaacttttttgcttttgatcagcactgaaaagttattcaactgaagaaagttcttaactgtgttatctctattccattttcgatcgaattagagatatgtcttctgttaattcagatgcacttaataaatagtaaagaattcagtatccctagttgagtaatgcatatagaaaatgatgttgcatgatattttatgaacacaaaggaagtaatggtggagtaaggagtagcttaccatagatttacagttccagtaatttgggtttagtcaaattcactacacttgatccagatatcaagaccattgattgattgaaatgcacgtagttttatgttagtgcaagtgggagtttgtttggattttatgccctaaataaaactcatttcaattcaatctgatttgttaacaataaaatattagaagtcatttatgtttacatgtagtattcatgttcatagtttaatgtgcacaaaatctgttaagtccacaacatatagttattaacaattacagtaatgtcaacacagtggaatgtaattgttatcatatgcttcaaaagataatgtccctgattcatcagtgcactggatttacactgatgtgcactgatgagataatcagcgataatgtatacttacacnntggataagtgttatgttctttctacgacattggcaaagtatgctagtttcggatg

SEQ ID NO: 73073 - DNA, 529 bp, Cannabis sativa
tgctagtgctttatttgttaaagcacctcctaagtatgttacttatccccattaccattacatcccgcgacaccctaagcatagaagattccctccccaaccaatgcatcctcgccgttcacctccacctccccctcatagtttattcccgccacatcctcgtcgttcacctccatcttctccacatagtttattcccgccacctcctccccgttcacctctacctccctcacctagtttatccccgcctcctcctccccgttcaccatcacctcccccacctggtttatccccgccacctcctccccgttcacctccacctcccccacctagtatatcgccacctcctccacctagtttatccctgcctcctcctcccccacctggtttatcctcatcacctcctccccgttcacgtccacctcccccacctggtttatccccgccacctcctcctcgttcaccttcacctcccccacctagtttatcctcgcctcctcctcctccacctggtttatccccgccacct

SEQ ID NO: 73074 - DNA, 925 bp, Cannabis sativa
tcatcactacaaaaaattttacacaacaagaaaaaaagaatataggaacgattaaatttgtgactaaaagtaaaaaaattgtaactaattataaattactattcctattgtgactaaaaggtccgtgaataaaggtattagtcacaaaaattacaatttattatgactaaaactaaattagtgacaatttgtaactaaatactatgttttagtcacaagtaatattttattgtgactaaaagtcacatttaatcataaaaaattatattatgactaaaaagttgtcactaaaagtagcaattttttgccgtgcatgtttttgcttttcatgtaatcttagagaactcactttgcgatcattttggtattcactacaatgttatcgtcatataaacaagtagtagtattattaagttttaaattttaatttgacttaataaccttgctgaatttttaaattacaaaattaaataagtgtaataattttaaattaagggttataatatataataaaatttcaattataaaattatatatgctataagtttaaattataaagagttttgttataaatattttaataatttaaatctaaaaaaattgctaaaagatctttgttaatttaataataaattataaaaaattaattaataattataaataatttaatgtaaaaatataattaatgttaattaaagttttataaaacaaatatcaagttactatcaagttacaagttatttttatttaatttttaaattaattataactatttaatagtgatatattgaatgactaaaaaaatataatcatgatagttatatagttaatgtaaccattaaaatttcttccatatatatagtactatagatctctaattctcaactcaaccctccaaatacctttttgtttatttgaggttatt

SEQ ID NO: 73075 - DNA, 1478 bp, Cannabis sativa
  modified_base (1095)..(1100): a, c, t, g, unknown or other
  modified_base (1228)..(1243): a, c, t, g, unknown or other
gttttttaattcctagtctcttataaatacatttaacgatctcactaacaaaataattttgaggtgtgtgattcttttatatttttttaagtggttatatctgctttattattttacatttattttgtggtgttttagttttgttttagtagtttttttattctaatttttcaagaccaggcttgcaaatatagctactattgcatctggtgttaaggctgtacagaagatggttagttttttttaatccttttgctgtttgttttgtttgatttattttagtattttatacagttatttagcattagctatttatttaacgtcgatttcactgttttttctcaatcttcccagaattaatgattgtttttcgagtgttttcgtattgttgtggtagttctgtgcatgggtgtgaaagatggaggcattgtccttgatatttagtgtctgcagtataaaagaaaaaaaaagtccatgtcagtataaaaacaatttttgccgtgtggcgatatttttgtaaagattgggccaaaatccagtatttttgtaagtttctctttttattttagcaacctagtctattttaattataaaaattaaataggctccctatatgcatctaggctcaaagcaaacatatcggcacctgcacacattgatttggatggatcctatcatgttactaggtttatacacatatgaaagaagattacaaaatttatctgttacaaattatttatttgatctattgacaattggactatggctaaaatcatatcattggatttgtcaacaagttaaccatagcaatttagatcaaacaatcataggttttataaaaataaatttgaatatgaacaacaaataaaacacacatgcaacaacattggatagatgattatagaatttatttaattcaattaaataattaatttaaaattaaccctataaatttaaaaaattaggtttgtaacaaacataaatatcttttcaaaattatcaactaactttttaaaatttatgttatttttaaaagaaaataaacttaaatatctaataaaataaaatggtaaataaatatcatttatctaattnnnnnntttaatttaaataaaataacaaatttttgaaagttgataaaatatctggttaatttttcaaaattatctagattattttattaaaataaaaatatcacattttaaatttcaaataagatcattttatnnnnnnnnnnnnnnnnaataaaaatatataaaaaaaatatgactttaaatttatattaagatgaaataatcaaattttttttaaaaaataaccaattaagcaaaaaatgtagatattatcctttttgaagttcaaaatctactgatatctaaaattaattaaaaaaaattaattaatttcaaactaataattaaatttaaaatttgaaaaataaaaatctacatacaaaaatacacaaaaaatttgaaatt

SEQ ID NO: 73076 - DNA, 1138 bp, Cannabis sativa
  modified_base (1111)..(1113): a, c, t, g, unknown or other
tgcaacatatattataaccttattattattgtttctaatatgtttttactggacataaaagtttgtaacaatatactagtatatatatatataaatatattgacacctaagacactataaaaatttttacttttagtcacaataaaatttgtgattaaaagtgaaaaaattgactaattataaatcatgattcttattatattgtgactaaaaagtccatggctaaaagtattagtcagaaaaattacaatttattgtgactaaatgtatttttagtcataatacttattgtgattaaaactaaattagtaacaacttgtaactaaatactatgttttagtcacttgtaatattttgttgtgactaaaaagttatcattaaaagtaatagtttctttgagaatttttatttttatttatatataatataaatagaggttataaaaatatattctaagcattatcatgcatgcatgcatgcatgcgtatgcatgattcatgcctatataatatttttacacacatattcatggcattatgaatctatgctataatctatatagcaaatatattgttaattacaaagttctaattaaaatatcatttatacatattagtaaaatattttattaattactttttttattatagtttattttaaaaatttcagctttggtcatcaattctttgtcgcagtgtttcaaactacctttcacttaattttaaactatttatacatcttataaaaaattaatcaaattttcacagttatatattttgaatatgttcattcacatttataaataatttagtaacattttttattaatttaagattaggcataggagttacaaagtttgtcattatcatggatattggattgcaactctaggcatgattatatatatatattcaaactatatgtaacttataatttatgttactatttgacaaaattattattttatcgtacttaattatttaatttaaatattatattatataaatatataaacatgtatttttatatatctttttatattaaaagtgtctagcatttcttggtttaacatttcttgatttaacaaaatatacttaaaaataaaagaatnnnctgttaaatttaacgattaggtttg

SEQ ID NO: 73077 - DNA, 806 bp, Cannabis sativa
  modified_base (553)..(567): a, c, t, g, unknown or other
gaattaacataaggttaccaatccatagaaacaataataaaatcagtatcaaaagtttaagtcattttttctcaacgtcatcagcgtcacacaatttgctttaaaaatttgttatccctcctctaaaattctaaaagtttgaagagacaatagtcttttaattgctcataaacaaactttacattagtgggatgaaacacaaaataaataaataaatattattataaatttatattttattttgactacaattaaccaaaataagcatatcaatacataagaaattatagaaaataatacaaaagttactataaaaaaatattttcaaccgaaaaaactaaaaataaatgtgaaataatttatcttgtcaaatataattagtgtcggtgaaagatccacgagcatttattcaataatttaaataactattataacttgaataacattaataacttcttaacttaaataaccatacattaacttaaataatattaattcaaattctctgtattttaaaaaaattgaaaaaactacaataataataataataatnnnnnnnnnnnnnnnaataataataataataattgctcaaaaatcaaataactgtttaacacttctaaaaatatatatatatatatataaaaataatgatattagcaatttaaatttaatttttaaataaataaaagaaaacaatataacacataaaaaaattgacatattcaaaactaccaatataactgctatcccaatatcccacaattaacccctaagaacgatcatttaaatggccatggctaccgcta

SEQ ID NO: 73078 - DNA, 1081 bp, Cannabis sativa
  modified_base (27)..(29): a, c, t, g, unknown or other
actaatcagattgtaaagagttttatnnngggcataaaacccaacaccatattaccaccctcattctcggcctctatcccctcatccgagccactacccccaaccatagaacactcctcctccaccataggcttacccatgtcacaatcgggtaattcatgcatcaaagaacactccccaccctcaccttgattagcaactatatcacccaatggctcatttatctcatccgattcacaccttggcaccaccttccccagatcattaccaaccatttgagccacacccgcctgtgtgcctttcaaagaagatgatacacccgcaaccaccttaccaccttgaccagtcgcaagcctagacttcacccctacatcacgctcacggccctctaacacagaagtgggagccaactcctcatgtgtaggacctgagtaacgaacccgccccctctccacagcagctagaattctcgaggcctctcccatagacatgatcggcctattagacggcaaattgtcacgttttttctagtaccgaacacgatcacggggtggcgaactcggagcacacatccaagatccatacctcccacgatcgggtctaggattatccccaacaaagaccttcaaaggacaatccaatgccttatgcccaattataccacaatcaaaacaaaagtcaggtaaatgttcgtattgaaataagagtgaaacctcattacctagctcgtccaccgccacccgcagtcctcgtttaagaggttcagtgatattcatccgcacctcaccttcattgtgccattgacgagcttgatatcttcaagcttaccaatcctctcggcccattcccgtgcaaacaatttcgtcatgcacgccaacggaacgttgttgatcgatatccaaaaggacgtaaaatcaaaattcatttttgaaatctctcccaatcccattggcttcacaaaacaaatcaattgtttatctattgtccacggtctgccaccgtaaacccgctgcctattttcacggctaccgaaaacgaatcggaaaacattcttggagctcaattcctccacctgaaaccg

SEQ ID NO: 73079 - DNA, 819 bp, Cannabis sativa
ccaaatctcattactccttttagtggtaatttttttcttaagttgaaaatgtaaggcatggaatgggaggtcatatttaaatttcaaaataagaataataatgatgcttgaatataagaataaaaagagacatataaataaatgattggttcactttaatttgttttaaccatattatttatttatgattaataaatgaaaaaaaataattaaaaacttaataaatgtgaaaaatagaaaaaaatagaaggaatgtgaaatagaaacttgaaaggttgaaaaccgtaaaattcttaaagatacatttttgtaaataatagaatgaactagaatagtcactacttattataataataaataataataataataacaacggtttttataataacataataaaaaaattagtcatcatggttttaattaaactaaaatgtaaacataattaatataaaaataaagaagtagagttctatgtgttccaacataattaatgaaataaacataatgtaatgaactataaaaataaaatatgcttcacgagcgattgtttatgataattctaaattatatattgtaaatacttatatttttattacctatcattgagaaataaaatgtattatatttataattaatttatgattataaatatttttttttgttttttaattaatatttatataatttaaaaagagtacaataaaaattatagggaacttctacaatagacaccccaaatctgatgcattccaaaattttaaaagatcataggttaaaatgttaaggcccaaagtattatggtggggtgaagcacat

SEQ ID NO: 73080 - DNA, 742 bp, Cannabis sativa
taagtaagatagtataaaaataatttgaagtcataatatagaaatgaacaattagcactaaagaattatatagtgcttacccaatattccaaggaataacgaacatttggtggttattattcatcgatgattaccaagctgccaatcatcttgccgcattgtcaaaagactgactcttctcttgatcatttttaccattcactgcgagaagctctggctcataaaacttgaaaaattttctcaaaccgtttatgctcacccagatgtgcctgctaaaaatattgttaagtattagtgtcttatattaatttgactagaattcgatatataaggttaattagataagaagagtatacatcattccaaacagcattccttggttgccgatgaagtcacacaatgcaacctactacaaattctatctagataacgtgatttcggtatgcggtgctatgaatgctcggggtacaggaattgtggttacatcacgtttatctttgaggttcaggaattcaataaccatccattttaacgatttagggatcctatccatgaccttttgcgagaataattcatcttcccgttcacgaacgccttatggagaaagcatgggagctttccccttcaatgcatcacgtcttgaaggcagttggcagtggaccctaaacaaaatagaacataatatatcaaatttgatccaaattctaccgaaattttggcagcataacggttgtaattgaat

SEQ ID NO: 73081 - DNA, 954 bp, Cannabis sativa
aaaaaaaaaaaaaaaaaatctccacaaaataaatttacaaataaaatatggctttattttataaaaacttaaacatatggaaatataattccacacaactaacataaattagaaaaaagccataaattaagtaaaatcataatttctccatatttatcaaactttaagaaaaaagtccatattttacataatttcttctataaaaaaaggatattgttcaaaaattttaaaaaaatggcccagcccaactcgaaactggctccgtcccaactcgcaccagacccaccgagcctgaaagttgaaaactcgttctcccatacgagcaggctcagtatacatatttcacgcacacgaaactcgaatctaaaaaactcgaaacccgtaaaactctttgatgtgtgcactctctgtgggtgattgttatattttcttgtgtatggccaattatgcattataatttataattaatatttgaaaaactaataaatttttaattttaaaaatattaaagtagctcaattttataattttattgaaatagttttatttatttatttattttttttttagaagatgaattttagaataataatatctataaacctttataaaaaagagaataattttttgggcttttgatagtcaatttacaaatatagccctcattgagctataactaaggtaacagctgtcaacaagtgtgataatttctagaaaaaatgctttagttttgctccacgggtcaactctttaatgccaggtgtggtagataattttttttatcttttcttcaatttattcatatttagcttgatctctctctatctctttcactttcttcccttcccctttatgcgctggtctcctgtatttttgcttcgccattgccggtctcactgctgacggtcgggttctctcccgctacatgcgatccgagtgcatcaattataacta

SEQ ID NO: 73082 - DNA, 1038 bp, Cannabis sativa
  modified_base (35)..(39): a, c, t, g, unknown or other
aggtgtgcctgccaacctgagtggaacaactgctnnnnnattataggcccctaaatcacatcgttcataacacggataagtgacacgctatgtcacaaccgaggacttaggttttaaaccaaaagttttcctactattagttaacatggcaataccctaaactaacatggaattaaccaactaaagctctgaaaataacacgaatccaaaacataaaaattttaggaaactgatttctggtccggttaaccggttttacagggccagtgaaaccagttaactagttttacacaaggtaacctaaaaaatttgaaaacctaaccaattctactccaaaccttaccaaaccttctacacctgcacattatacccaaacaaacatatccaaggccataaaacacctcaacatgcacaaaatcaagattaaccattaaagactaaagtttgagttttaaaactcaaaccttgtctaaacacaaaattaacccatcaattaacttcaaatcagctcaaacaaccataatatatcattaaaatacagaatccaacaactctaacaactcagaaatccaacatctcaaaaatcatgcaagagaagctatttaaactaaagaaaccatagaaaatgaactaggaagcttacccaagcttcaaatctcaacaatgatgctaaataatctcaaaattactgaagaaaatccatggttccttgttcatttctacggttcacaagagagagagagagagagagagagagaaaaaaaagactagaaagaagcggtttgcttgatcttgattttcttcgaattttaaataaataaaaataaaatgaagcttatctatctattttcagcaataaaaaacagatccaattaattaaatataaaccactaaagacaaaataattctcttggcaaaaagaccatttttccctttacgtaaccaaaaaggtcataaaaccaaacactcctaatgtctaattatattgtctcacaatactaaaaatagcaaaatgtgatcctaatagccaaacaccgc

SEQ ID NO: 73083 - DNA, 914 bp, Cannabis sativa
  modified_base (795)..(796): a, c, t, g, unknown or other
gctattgtaccataattaattaatagtcaagtttgactgaaatgttaattacaatcttttattatatttttttaattaacttttacgtttaaaatcacatgtcaaaatatttttttttcatagcagtattcgttatagttacagtatcatccttataaatttttgaaaaatttcgaatagtttacagtaccaaaaatagagttcctcatattcaaatttaccacacgcgttcaaaaaatttcaaacgtataaactattcgaaatttttcaaaaatttataggatgatattgtaagcataacgaccacccccgtaaaaaaaaaatttgaaaaaaattattccgacatgtgtttttcaggcgtagaggttgactaagagattgtaacaggaggttgacggtagcactcttcaccataaatatgaaaaaaaaaagttttaataatacaatagttagtggactttgacttggacattcacatattgaacctaaataaatataaaaattagtatctttataatgtgcagtacggtgcggtttgaactgcatattaacaattcaaaatcgcaaactgcaccgcaccgtgtcatgggtgtggcaccttgacttctcgtgcgaccgtgtgcctcgtttccatctctcgaacaactcccgccgagtcatactcgcaagcatccatgagtgcggccatgcatcgaaggtctctagtcaagatactcgcattgtccataaatttccactacgataagacaagttccaacatcgacactcacctagtcactcgtgaccaaggtagcnngtgtggcaagatgccaacaccaaggtgacatgccaacacttctaatcatgccccgttcgatactgtctgaacaatctccctcatcgcccaaggactcccatacgtccatggaccaatc

SEQ ID NO: 73084 - DNA, 950 bp, Cannabis sativa
  modified_base (692)..(698): a, c, t, g, unknown or other
ttgttgggaatgcaaacaaagtcttatattggctagaaatgaaaagaattatgggtatataaggatggatatatctctattgatatgagggctcaagcccaaagcgaacaaatagagatgaacggtgtctaattaatgatacttgacacaatctttatgaatttgataacattttcaagattaaaactttgctataataatgatatatgcttgcagtattagacaaaagttttttaatctaataatttcaataattcaaacgaatttttaacgaaatgaaaatttcagagagcatgatttagtatatatcgaaatttgagaggcagaatcctaatcaaccttaaaaaacgagaaaattttatttttatggggtttaagagatacatttgcatacataaaaaaaaaaaaaagataattacataaagcactaatttttgttaaaaaaattatatttttacgtttaaagatttattttttttttacatttttacggtttttcataaaaacaacacgaaaacaataataaaatttcataaaagtaacatgaaaataatatctaaataataacaaaaataacatatagataacaaaaaatcaataataaattgacaagagtacaatataaaaagaccgtatttttagtaaataaaattaaaaaaaattccgtgaaattgtatttttataattttttnnnnnnntttttgtgtatttgtgaagtaatctcaaaataaaaagtatacctttgcaaaaatataacttatttttaaaaaagttattttattagaatttttttttaaaaaaaaaacatatgaaaaaaacaggataaaatagctggttataagagagcctatcctcctctaattactccagggataacccattactattatttaattttgggatattggcggctaaaccacttgaattttacggtttgtgacacttaacca

SEQ ID NO: 73085 - DNA, 1568 bp, Cannabis sativa
  modified_base (1166)..(1166): a, c, t, g, unknown or other
gatgaacagctagaaaggagacaaacaaggagacaaacagaaattgatgcagaaattgatgaaaaattgatgaacgagaaatccctcatgaaaatgaggaggatcttggaattcaaccgggagaacaaagataacttgctaggaatcaccagcgttctccaaaacccatagagcgaggactcgtacgtaccatgataggggaaatacgacaaattgctctcgagaggaaagaacagatcgtgaagaggcaagtgtgacttcaaggcgatccataactcatagtttgattaactcgaagaggtgaaaatactgaacgagctaatgatcaggagagtatgggaacaagaaaatctacgagccacttaaaaacaaggtctataagtaggaatcagtcaatgagtaagtcgagatctacaagcaattactcccaactggatctgcgagagcacttgaatcggaagaaacctgaccttcgccaacagcttggtctaaagcaagaggatccaatccaattgcggataaacatgctggaggacaagttcaagagatatcaagtcggggaattagggaaatcatctggatacgactctgatgaggaacatgagctatatcacccaaatattatgaataccccttttccttcgagatttataaacccgcatgtctcgtcctatgatggaaccacaaatctgctctcgcatttgaataactttaacacgataatgcgagcaagtaatgtgacgaacaatttacgctgtattttgttccccacctatcttgttggagcaaccagtacctggctttacaagttcactcgtcatttaataatttcctaggagaagctgtttggggatttcaagaagcaatttcaagtcgctagggataggcgacccgaagcggcctcgctaaccaatataaagcagcagcctgacgaaacacttatggcatacttaagtcattttagcaccgctgccactaaggttagaaacttggatgatagcatgcaacttacagcttttcaggcggggctctccactgatccattaaccgccaggggcaagttgtgggatgatctacaagaacgcccggtaagaaacatcactgagtacaacgagagagctcaggtgtttgttcagaaggaaaaagcccgaaaggaaatgaacttnttgaaaacaagctcgggaggtaaacccagcaatgtttaaatagggactgcttccacaagaattgataactcgggggcttttggtcgaaaaagaaatgatgcaattagggaaccgttgaaggatagaaagaaaaaaaaagaagcatgacaaatatgtgccagtgtatactatttatatcgagcttaatgaaactcgaaaaatatttaccttgcacatgagcagaaggttgcctttggcaaaccagagcctatgaggaattcgaggagcaaaagacatcctaataaatattgtcaatttcataaagatattgggcgtacgaccgacgaatgttgccaattaaaagatgagatagagagtctcatcgctggaggccattttaaacagtatgtgaaaagatagggc

SEQ ID NO: 73086 - DNA, 1191 bp, Cannabis sativa
  modified_base (1147)..(1154): a, c, t, g, unknown or other
cacacctgaattcagaaacgaggtaagatcagtataatgatatgcatatgtatttacatgtttaacatacatatttatggagcttcttagattacattgatagcgatatcaatatacatagagttgtactggatactgatagatgtaagtttggctcaagtacaagatcgacgctatcacatcggtacaactagagtatgactagaggaccgagtataggctgatattatggtcgatagtacagtcgtaggaacgttctagactcagtactgtgttggacacggggataggattattgggtgtatgggcccctaattataatctgggttatatttatgattatacttttcttactgagtctgtcgactcacacctattgtttgcgtgtgtaggtaaggataaggctaaggttgagtagctgtgagagtgagcatgtgaagattgtacatgtcgggatggttaggtctggagtatggtctttgggacagctggctgtattttatatagtcggtaggcgacaacttttgtattacatactttgtaatagttgtaaatattttatacttggtatcccaaatatatatatatgttattattttgatatttacctttatttaagtaaaaagttttaattactcacaatgttcaataaacttgttgattagcaacgagttgtacaattaatacaaaaatcacaataacacgcctaaactagtagggtgtaacagaaatattggaagataattaagtaaatcttaagatcaatatgtatgttagtcgataagggtagtattttaatactattagactacaccaaataaggtttctaggcttgcgttaacgctaaaaagtcaacttatgagatgttgattactctgggagttgagcagtaatttttggaggaactgtaaaaaacctatctaaagtctctaactctacctgtgagactgaatgttaaagtggccaggaaagctactagataaatatttagcctatgaaaaattctatacatttttggcattattccagtaatagattaattattagtattacttcttgactaacacagatatagtcgccaaatagttagaatctagtatccgaagaggagtagacatatagaaagaaatttcacaatatcaaggannnnnnnnttaaggaaatgtaatggtagaggaaaggttgtattaa

SEQ ID NO: 73087 - DNA, 879 bp, Cannabis sativa
tttttctctttaaactattttttttgagagaactctttaaactaattagaatatgttattttgaaagatagaacattaaaggaaagagagaaagattgtaaaatattaaaataatcttttggagcatgaataactgtagctaaatgtattctcagtaatttttctattcaattatttaaaatatattattaaaattttaatttatttattttacttcaaatttttacattgactatacatctcatattctctattttatttctttatattatttaaatattatatttttaatatattttattcattttataaatataaaacatataatattatacacacatataaaaaaactaaaaaaataatattaaagtatgtttaactgaatagttatttctacatttagctaaacattatttattgagctaaaaatgtataaaatagctaaagtttacctggaagctcaattttataactttttctctataatttgaagattagactattttaactcatttattcatttattggatcaataagttgtttgacatatgacatttttaattggtaaacggatctgttagaaaagaagactagcgaacttacagaaaatgtgtcatcgaggactattaccgctaattttcgaggttggagactaatctgcattaattttaagttttttgggacttatgtcgtaattattccaaatataaataagcttgattttgtcttaaaaaaatattagtttgttcaacgtttgaaagtaactttgtaattattagttatggtaattactagggtggtaattacacagtttagtaattactgtatattttaaaatgcaaggtgtgtttagatatgaggtggtaattacatatgaat

SEQ ID NO: 73088 - DNA, 665 bp, Cannabis sativa
taaatattttattatgaaaatagtcgtaaggatcatgacctcccttttcatcattataatttaaagtataaattttacattcacaaaatttattaaaattaatcatcttatctaaacatttcatataaaaaaaaattctatcattaatatttttatataaatccctcaatttttagttttcaaaaataagcaatattgtgacggctccttttgtacatatcatactacattcacctttatggaaaaagatattttaacgacacctcaaacgaaaatataaaaactttataataatagtagttaaattgttagttttagtaaataaaaaagtctaaatagtttttttaaaataacttcatcatgaaccataagacaagtttattaaattcaaaaatgattaactttctcatttattttattataaaagtacatgtaatttttttttattaattttataatttttaataattatcacaaaattattattttttatatattttaaaaataataattagttttttttatatataataatacacataaaaatattatattttatataataataaaaaaaaaaagattaacatcaaggccgacaaagttccccacttaccatataaaatgaaaataagatataacacgagagagactaaaagatttttgta

SEQ ID NO: 73089 - DNA, 1412 bp, Cannabis sativa
tgggtaggtggaccattcactcctgcattcacaatagaaggtgttaaatcaattattgcattgtttgctctagtaagggattgttagtttagagagccttcgggaacagtcaggttagtcaagttgactgctggagggatggctaacgaattgactgttggaggaatagctgacgaattgactgctagaggatgaattgactgcttgaagaatggctgacaaattgactgatggaggaatggctcatgaattgactgttgagcccatattttgattgactgtggttgtttgttttccgatagtgacattagttacccctattgttgatggttgtccgatcacttggcttgatcctcctattggggtatcatcaagtgattgcattggatcaattagaacttggaatcttcttcaactattgttcggtgttgccatcgaagcagtcaatgactcaagttggacctttagtgcgacattctccttcttgaacgacgcattttctctttccactgcttgagtgcactccaagttttctttcatttgagtcgtgagagtggcgagttgttcacggaagttggtctgttcctcatagatctctccttcctccatgtgctccaccattgctctagtgtgggttgactcctttactcgattgtagcttgtcagagccccacggtgagcgtcgaattgtagatgctaaaatccataatcaatcgaagatgatcgtacgcaggcactgacaacttgtagaacaaagaagagagtaactgggaaacctttggacaccgagatggtgccgggcgaagggactctggcggtcaagtcagcaaaattgttaacaatgtaataaaaaagatgagaataaatgatcgaactaagttaccacatatcttgactgtagaaataagtatgtagttttagagagaatgagtgagtgaatgaaagtaagaagtaatgggatgactaaaattgatgtgcctctctcagtagctgggagtggctcttataggcatccatggaaaggtgttactcatgacccctcaccgccccttgtgaagctcccttctcccacttgatcagggagatcattatttgggtggtcagtttgatgattgatcactttagagatctttattaaatgagtgataagactcagtcttgtatacgggtcgaatcatcgtgagcacaatgttggatcatggataatgttaatgtttgacttgactgtatcgttttgggcctgttgggcttggtatgttgattgtatcgtcataactagttaaatagtccaactctatcttgtttgagcattctttggaagcatcgcatgtgacattgagcctgagcccaattttggcctctacacatatataaatttatatacacagaacaaatatatacatatatataaa

SEQ ID NO: 73090 - DNA, 1077 bp, Cannabis sativa
ttatttttatttttatttttgatttatttaagtcgggtctgggtccgggtagggtgttaggttcgacaccaaggctagggccaggtttgagtttggtcagagtctcgtcatagtccaaaatattgattaaaaaaaaactgtttaagaaaataatgaaagtgattttttttttattttcaaaattttaattttcaattaaaaatttaaaaagtgaaaatagttttataaaacatgtttttgaaaaatattttcacttttctaatttaaaaaacaaaaaaaaaatgattaaaaaaatgttaccaaacgacacctaaatatataattttacacttatactattaatctattttatttagaaaaaaaatgtgtcaaatatgtcaagttcgtattaaagtaggtcgtgtcgacttatttttttttatatccgcgcctaatttttataaccctaacttgtaatttgtggtgtttgtgttcatgtggctgtgttgaaatcccgttttgccacctcaacctctatgagaaaagaattaaaatagtagagaaaattaattatcaaattatgaaattaataaacaaaattaaggttagagaaaataccaattataacaataaagaaaccattttttttccacttaaataatttttacatgaatctttgttgagttgtggaaatcgactaagagtgaaaaatatgatggatgtgtgatttatttaaatttaggattttattaggattaggaatatttataattttatataattctatgaaattttacgtgtatataatagtaatgttaatgaagtatttatgtaatttaattttgtagctatttagatatacacatgtatacatatttgtatagatgtattttttataaataaataaataaatatatgaagatttttatttaaaaaatagtaaattaataaataaaagagaaaattatggagattaatgaattagtatttataaattgaataaaaaaattaaaaagggaaagaattaaggacataatatatagatgtctttgaagagattttagagcgtcatgccaccgcttcatacttctcctttat

SEQ ID NO: 73091 - DNA, 748 bp, Cannabis sativa
aattccgtgtgacagtatttttgtaaaaattaacctaaattccagtctttttgtaaatttcccttttgaaaaggcagttcaacattttttttagcttgacaattgtatgccaactttattttatatattttaattttcatatttttttttaaaaaatatcaatttttatagatgacgtcccaattatactctttaagttatgtactagatttaagtagagggtgagagtatattgaacaagacacttacaaaagtggatatatttatatgaaatatagtacgagaatatttttgattaatagattaaaaaaaaaagtattcctcaaattatctcatttagcacaattagttgtaaagaaaattaagtaatgcactagaatactttttttttttttttttttgccaaatttcatttttatggtttttacggttgtaatataatatatatacatttaaaaaaaaaaaagttaaaaaactgagaacaatagtaaaggataattggttgccccaattctaaggtaaccttgtgtttctcatgttttttatttttaatttttctcataaaataacaatctttttattttaaaaaaactatattcttacatacattgtgtaaaactccctaaaatgtgtactttctttttacttttttctttaaaaaattgaaatgtagaaaaaaataattataaaaatacaatatttgtataaatatttacaaactcgtaaactttttttttttgaataaaaa

SEQ ID NO: 73092 - DNA, 965 bp, Cannabis sativa
ttcagagttgtgagcaccactcttagtaaagttcaaattcagacaacttaggggttgtgatcccttttactaaggctgccaaggtgtcaaattttacctggttgaccacatgggtggtggtctgcatcccagttggagaatctattacccatttggggtctcctttagaagttcccacttctagcgatctgttcttagttaagaggccacgcaagtctcttggtgttcaaagtcaatcatgtacttcagtcaacttgggtcatgttgttgtctcctaaccatggggtcgtgaaggcaacactggtgaagcctcaaaatgaactccaaatcatcttgggactatcacttgtgggactggacattcagagttttgtaaacgctacttccctaaaagcagtcttcagctggaccataagtatgaagaagagaattgaattgactgctgctcaagttcaactcctctccgtgtactcgagggacgtactcatactgctggccattggggccatgaacaaagtaacaacataattcacccctttcatctcggaagtactttcgagtatgaatcagttcattggtccttacgtgccagatctcatagcctccacttttaaatcagtgtcttctactgcctccatcattttgagttgtaggtccatttccccttgcagggtctcaaggcctagtgtcatgagagcattgaggaggacttggtagaggagtcctattggttctctcggtgttgtaaggcctattgtaggctcttgttcaaaggtgctttccctccaagaggtctccatgcctggtgtttgtatagttctcgctcagttaccaagtgtcgtagtggcattctaagcattaaaagtttctccttaagcacttgttcccatgtgactagttggttgacatggattctctcacccacttagaaagacccctacggagaatagttttgtgaccagaac

SEQ ID NO: 73093 - DNA, 1196 bp, Cannabis sativa
acgaaagaaatgaacctggccttcttggccaaatggggatggaagattttgaatggttatcaatctttatgctgcagagtgttagaggccaaatatcttcgtgggaaagattatctcaactgcaattataaagattctgactcgtggttctggaagaatgtggtcaaggctaaggcaattctgagaaaaggggcttgtaagcttgtgggtcatggtagagacaccaacatctggagggatccttggattcctcatttaaaaggtttcattccgaaaccaatgggagaaatcctggctaacttgaattgtgtggttgatctcctcacaaatactggctcctgggacacttgtaaactaaaaaggttattcgataaagacacggtctctgctatcttgaaaggaggcaacccttcgggccagggagtggatagatggggttggaccttagagtctaatgggaggttcgcgagtaaatctgcatatcttgctcaagctctggaaagagctggccatggtgagatggccccaacactttggaacaaactatggaatagtaaagttctggagcggcataagattctttggtggtgcatcctctcaaaggcgctccccgtccgatttgttattaggagaagattccaaatagaggatacctgctgtcctctgtgtggaaggggggaggaatctgttgaacacctatttctatcttgtgatgtggcgttacacctgtggcgctcatccacttggggcatatatccggtttgtggcaacgggattcgggtttgggactgggtgaaatttctttagagtcttaataacaggggtgtctgagtggaggaggtctttctctatgcttcgattgttgttgataccatctggagggcgcgaaatgaaaaagtacacaataacacttacccggatgtcttaaaatgtatcgaccttatttactcttcctttgcagaattacatgcttctctggtgccatttccgactctgacattgacgaaaaaatggattccaccccctgaggattggatcaaactaaattgtgatgttagagtgggaccggcgagcatgtgcacagctgttgtagctagaaaccatctgggtaaggtgattcagatccacacgactcagttggaattttcggatactttgtgtggagaggcagtggcctgttgttcagccatttctct

SEQ ID NO: 73094 - DNA, 1421 bp, Cannabis sativa
acgtgttttacaagtgtggaatggaaattttattataggtaataatagtttttttttctttgtcgtacatataatcatatatatatatatatatttttggaactcaaactattcttacactatcattttgttttttaaaactcttaggaaagagagagaaaagtcttttattgaagaaagagaattgtatatttgatattacattgactggtcagctctataaattatatatatggtgtaagttgaacccttatacctgaatatgtgtaaacccaagcacgaataaatctatagccaaacaaacaaaatgagttctaagacgccccctcaagattgaaggtacatatttgtaacattgatctcggagagtaactccttgaattggaaaggaaaaagaggctttgtaaagagatcgacaatgttgtgcttggttttgatgtggagaagtttgagctggccactttgaactctttctcgaacaatgtgacaatcaatgtcaacgtgtttggtgcgttcatggaagaagacagggttctcaaatatgtggatggtggccttgttgtcgcagtacataagggcaggtgtcgtgtgatggatgccaaaatctttgaggagagcaagaagccatatgagctcgcaagttgtgttggccatggcacgatacctatgcttcgttggaagaacaagagactgtgttttgtttctttgatttccatgagatgagtggctgtcccaagaagatgcaaagcccgtgacggatcttcgagtgtcggggcaagttccccagttagcatcggagaagaccttgagttggaggttattggcaacaaagctagtttcagcataggccttgagttggggtgaggagctgctgtagaagaagagcccttggccaggtgtacccttcaagtattgtaggattctttgggcagcgtgtaaatgaggttggcggggagctgaaataaattgactaagcctgttgacagcaaaagagatgtcaggtcgagtgatagtgagataaatgaggttaccgattaagttgtgataagaagtggggtcggccatgagggagccggtgtccttggagaggcggacattgggttccattggagtagatagggccttggcacctaagtaacatgtatcatttataagttgtaaggtaaatggtctttgtgaaactgatatgccattagtagagcaaccaacttctaagccaaggaagaagcgtaatgggccgagatctttgagtttaaattttgagtcaagttttcttttgaaagtatcggcattggtggtgttgttgctagctatgacaatgtctctacataaattgaaactgcaagaaaagtatcattagtagaccaaatgaataaagagtggtcagaaggtgattgtgcgaaaccatcattaagtaaggt

SEQ ID NO: 73095 - DNA, 505 bp, Cannabis sativa
aatttagagcatttgttatagcgcgtttttagtgcagttctttaaattttttaaagtttctctattttagaaaaactgttgtgagtaatcttatatgtaaaatactaaaatttataagataatttttcttagtttattttatgcgaccacttaccacgatagttgcacaacgtaaatctataatcattttgcaaccataatgattatttataatagcacagtgtaattcataatcgtttttttgaccatacaaaattattttccacacctagaaaaaaaatatttagcctaattttttttattaattatgtacattataatttttagactcatttataaattttcaaaaacttcaatataatttacaatacgtttaaatattttgttgcacgcacgatagttttatttaatatatttttacgtaaatttatataataatcaacggagtaatcttaatcgcaactgaaactttcatagcaacttatataaaaattatagaagcaac

SEQ ID NO: 73096 - DNA, 1100 bp, Cannabis sativa
agtggattaagataacccatagcctacattgctaagtttcattcatagattctaaaaattacaagccaaatttcacaacattagaaaaaagtaaatatgtaaagcgagggttttatgaaaaaaatctaaataacactatgatattcatactttctatgtattttaacatgggaaatagaattaaatagtgaatgagtgggagtaacttactcaatagtgatgcccaagctaaaatcccctccaataatctttagttctcactttgagcattcctttgaaatggttcttggagctatttgagaggattttgagaagtgctattattttttataaagagtgaagagtagaatgggttgtaaaaaaaataaagaacctatttaaaggctataagggttaattaattttttttatttcacttctattgtttgtatcccaagatgcttaaatatattggtggtcttctacatgtctacactaagcagtaccagtatatgcaggtatggagtctaagaacacggggtttattttttctacaagtccatcataatattataaagttatgataaacttggggagcaaatgttatctctcaaaaattccaaaataattgtgcatgaatttttattctagatatgaaggtccaacaaagaggagctcattagtaaaaaaaaacaaagaggagctcattagccaaataggagctccttagccaaataggaactccttagccaaataggagctcattagccaaagaggagctccttagccaaggaggagcatattagccaaataggagctccttagccaaatatgagctcattagccaaggaggagcatattggccaaagaggaactcattggccaaggaggagctcattggccaaggaggagcacattggccaaagagaggctcattggctaaggagttcattggccaaggaggagcacattagccaaagaggagcattttggacgtgctaagctcccgactccgttaggtgctaaggtgcaaagagctcctcagctgccaaattatctcaaggacctgatgggcacgaaccgacccaattggctctcctcatgtacccatgaccatccgg

SEQ ID NO: 73097 - DNA, 1109 bp, Cannabis sativa
ggcgtcgaatttggtggccggatgtgggagatatggtcgggtcacgaactgggtcccgtcgacccgagttttagacccacgggtgtttttctaggcaaaagagatgagaaaaaatgacacgtcatttttcaatccagaaaatagctcaaaaacgacatgtcgtttttctggtgtcccaaaatcccacaaaaaacgacaagtcgtttttggtatgtcccgaagtcgttttttggtgtttcaaacccctcaaaacgacatgtcgtttttggtatgtcctggagccctttagcgaaacgacaagtcgtttcttgtcttcggcctgctgcatgtcgttcgaccaaacgacatgtcatttttccaaaatgacatgtcgtacggttcctttattaaaaaaaaatagcaggcgcgtgggggcgcatgcaggggtgtttttgggccatttttcaccattttcatgttttttaattctttattatttttttatatgtacaatactaattgcatgaattttattcatatttggttgataattttagtattgtggcataaattttgtgatttatttcaataattactgcttattttcttgcttatcgtaagattaagcatggaaaattgtttggtaatgaggatcacttaaatgttaatttatttaagtattgtatttttctccaattaacattatgatctttataagtaattaattatcttatcgatgatggttgcttattaaaaatgcttaatatagtgaagaaaattattaaatattatgagtcacaatttatctatcctttcgatagtgaattaatgtatttgattataatatttaatagattgttcttacctgtgtatgagttctatcttgttaatttgtctgagaactctagcatgcataatgatcatttgttattttacgatcatttatttatgagaagagagcacaaatggcatgattatgtcataacatgcatttaatggttattgctcttgtttctcattagctttaagcaatccaagaacctctgccatgttaacgctgaacggaaccaaccacaagcagtgggtagaatctctcatgatgaatttgactcttatgagagtggattttg

SEQ ID NO: 73098 - DNA, 1333 bp, Cannabis sativa
agataatcaaaataattataacttacctcactattatttacaagtgccaaaaaaaaaaaaaaaatccaatgatacttattttttttttttttgagaataatcactgttattataaactgaaatcatttacaacaatagagaaaataggatagggtatttctcccatccaacttatgtcatcatccaaccctaaagcaaatttagcaagtccatgagctgcttgattagcagatcttttaacatgagacactaaaacaccagggaaaaaggataaaagacaccttacatcgaaaataagactcgaaaaactagataaatcgtttgtagctgaattcaaagcagtggaaactctcaaagcatccgtctcaatatgcgttatagtcaattgcgattgtgtagcccaattgagagcatgaaaaagtgatttgcttccatttcatctgaacgaaaactgccttgaaccacctttgaaagggcagccactaccatgccatcgtgatctctaagtatagctccaatgcctaattttttctgttcataattggttgctgcatcaacatttagtttgaaaccatttgatgagggaggagaccacggtatttggttgctctggacgggtgaagatgccatctggtgtgagtgattcgggcctgcaactgctactggttttggggcagttttggctttgctaaagtcattatagaacccagtggtgtaggcaattattgaggaggtatcacgcgattttcccccatgaaaaaccctgtttcggtttgtccaaacaccccacaaaagacatagaaaaagctcaaaatcctcttgattgtacacacctgagagatagtgcagatagtctcctttaaacatggattgagccttattgaagtctattctaaatttcgatttcttccaaacagcctttgcatgttgacatccaaaaagagcatgtcctatggattcccaacttgatgtacaaagagaacaagcggctgagtcaattttcctcttaaataaaccagcagcagtaggaaggatttcctgaaaaactttccaagcaaagatacgaatttttggtggcaacttgagactccaaaaatacttccaccaatcacgattaacatctgaagtggaagaaataagttgatcctccaaggtggttgccaaatggaatcctgatttaacattataaattccatttgaggaatgatgccatatcaatctatcatctgctgcaaagaaacttaaaggaatggttagaattttgtcaacatcaataggcaaaaaccagtcatttaagagctccaagttccattcccgattgtcagttataaga

SEQ ID NO: 73099 - DNA, 1722 bp, Cannabis sativa
  modified_base (1121)..(1127): a, c, t, g, unknown or other
  modified_base (1682)..(1685): a, c, t, g, unknown or other
tggctttaccagggtgataaaggatttcacaatcataatccttcaccaactccagccagcgtctttgtctcatattctaatctctctgggtaaagaattatttcagactcttatgatcagtgtatatctcacatttcttgacatataggtaatgctgccaaatctttagcgtaaaaaccactactgcaagttctagatcgtgagtagggtacctctgctcgtactcttttaactgtcgagaagcataggctattacctttccagcttgcataagcacacagtcgagaccttgtctcgaggcatcacagtaaaccataaactcaacatatatagtattttcaaattctttccttgatcactcctaatctaaacaattttactaatgttacaatctttttcaactcttaatttcaaacacaagtgtttgaaagcttcaaaagtatcagatttttttctcaaaaaatccatccatgaaaatcgggaaatatcatcaacacacacaaaaatatacctcttaccattcaagctttcaaccaagattggacccattgagtccatgtgtaggagttcgagagctataggagtattaacatcaggaatactcttgtaagaaatttttagttgcttaccaagctgacatggtccacattttcccaaagactctttacctaatttaggtaatcctcgaacaattcctgcattagacaatctctttagatttttaatatgaatatgaccaagtttttcatgccataaatcagtaatattatcaatgacagaatgacaagtagcatacatagtgagagtataacaactgtcactagatctgagctcttggaagacaatttcatcaagaatattatacacataacaatgatcactatcaaagctcatagtataaccttgatcacaaatttgactaatgctaaggagattagcttttagtccatcaaccaacatgacattcttcaatctaggaagcccttcaaaattgagagttcctatccctatgaatttttcaacaagaccgttatcaaaagtaacttctccacatttcattggtctagtgttctcaagatattctttttcacctgtcatgtgtctagaacaaccactatcannnnnnnacatgttagtagcaatagttttaaaataagaagaacctaccaagcatttatttttgacaactcatttttgcttttgtaaaacatgtttatttccaagataattagatttaaacatattttgcatagtgatgcatttaggtcgaatgtgaccttttatcccacaaaaatggcaaataggaatgaaatgtcttccattccctttggaattgtcaaacttactgtgctgcttcttttctgtaacaacagagtgttttgccgaagtgacagaatcctgcaaggtagcgacagttcttccagaagaaaaaatatcaaatttaacaaatgtgttattgaaatcaaattgagtagaaacataacctagaccaacatgattagtttggcaagatttttggatcttttcaaaaatgttggaacctggatttaacattttgacattctttttaatgttttcaagttccttagtcaaagagataatttagactcttttaagatcaattcagatttagaacatttaattttttcttccagctcattgatgttgttacacaagtcttnnnnatctttaaccagggaacgattttcaacacaaatttcc

SEQ ID NO: 73100 - DNA, 958 bp, Cannabis sativa
tgatctatgaaaactcaaaatatacatatgctatgatatccaatgatcatactacgcaacatacaaaaacattgcatccatgctacacattattcttgtattaaaattcttatggacgtactatgcatcaagttcatacgaaatcctacagtcataccacacccactatgcttatcgaaaaattcttgttacttttatacaaaaattctatggtcatactatgcaattcatggataagttcaaaacacaaaaattccattatttgttacaaattcgaatcaaagcatacaaacactacacatctaagattatgaataatatattgttctatgaacaccaaaaatatcaagaacaccaagaacacaatggtggagaaaaggttataaacacttaccaacaagagagaccttttagttcttcaccacctaaagcttccctccacaccacttgaaaatgagaagaagacaagtgacaaataaaaacaagatgggcctacttatgtatttatatagtacaataatgccatggaagaaaaaaaatctgaattacaaaaacacaataaatatctcacagccaacccatcatattgcttgtgccaatatatcaccaatgatgctaagtaagttataaatagaagccaaaatataaaggtacatgatatacatgcttttggtgctatccacacaaataaatagtcaactaaaagctacattaaatatatgaggtatatgtactattaaatcaaacaagcattatgtcttcacaagaagacaaaattctataaactacatcactcccacgtgacatccatcccaaaacaccaaccaattctactagtatttggtaatggggtgatttgacacaatgcattaacttgtagtatactctaagtacccatctcatacatgctgccttccactcaaacataaaggggcactcatcccaactaaacacatgt

SEQ ID NO: 73101 - DNA, 854 bp, Cannabis sativa
tttatttactccggtgacctgtaagcaccgcgtgaggcgcttcgaggatggagtttttatgtgctggaaatcgaacaagtttgaacctcgcctccacttcatgcctgatcccaaagccaccgtggtgcacttctgggaaaagaataagaagttggtacaagcctttgctgagcgggtgggtcctcgttttcctccgagagctgattgattaaaccccttctcttttttctcttatttctctccccctaagataatattttaatttttagtttatattatctttattttttgttatgggagacatatttatggcctttccccaggcctattattattatgttttggacaacttatattttaagtgcttatatttacttatttctcgcctcttttttgtttttgatttttgcccgtctgcatgtgtttatgccttagtacctccctaagtgatttaaaaaggggctttttaggtcacttagcttagatttcacatgggataatgcatatcctttgttcgtcacaggttaagttacaaagtataaaggtgaaaccaaatactgaattcttaactattgatagtatttccagagatgatcagcattctatgctcggggcattatggaaccatccattcgcttcaatttataggtctcggagcctatttatcttcgatttcgtatggcctttcccaatttggtcctagtacaccaatcttgattcttggtaggctgggaagacccttcttaggaccaggtcaccaatggcaaatttcttatttttgactttagagttgaagtattttgccactttcttttggtatcttgccatgcgtatttaagattcttcccggagct

SEQ ID NO: 73102 - DNA, 651 bp, Cannabis sativa
cagtattacaagaagacctgtcaatctgtacataaataagagaaaggcacatttctaaactctttcacattgaacaacaaatagctgcctagtatcttactttatcccatatggcttctgcactatcttctacccattcagacaatcttttattcgttttcaaccaaatttcctaccagactgccactgttcctgtcctccataatagtttcattccctgacacaaactggacaatgaattcatcacatcattgggcatgcaccactagttgttgaaggagttaaagagcctaaaccatatatattcatagtgaacgcatgacacaagaaaatgcagtgttttggtgtgtcagtgttggtctttagatattggttagaatcatgcgtgacacacacacctattgtagctagggcccccttcttatacgcacactatgtgatgtcctatttattttcttgaagtgggagcaataatttttttttttggtagccgtcatcttaggatattatctgatgttactggttccagagaaaaaaaaggaagaaagaagaaagtataaacatgtagactaggatcagaaatttgtaaatcaagttgtatattttgtgtttttttgaataagagacaggtcacttgtctaaattttagct

SEQ ID NO: 73103 - DNA, 948 bp, Cannabis sativa
ccttaattatagtgcatatatgtttttattgattccgcactttatacataatcatatatgtttcagtttatacatataaatgtctaacaaatagtacttcaaaaaacttatgttattattagtttgtgtagtttggcttttggaacatttggagtgattatgatttagacaaatttgtgtttattttagtttacgtaacgcgccttttggaacatttgcgaccatacaactatcaaatgattataatttggagttgggtgattgttagtttatgtactgggtctttttgaacaaattaattttttagttatggtaatgatattatttttgtacttcactccaaatttctatatcgtggatgatattaacaaaccttttgatttgtaccataatattagaaaactaaggtttcaatttaacaacataatttttttagttagaatccataacaagtgttacttaagaaatatttttaagaaaataaagttaaatctcagttttgaccaaatagaaaatataaaacataatcattttgctaataaacataaatattagttttgacaacatagaaaatacaaaatatattattttgcaacttcccatatctttaaccaaatgtaagtttgacaatgattcatacttaacaaatatttgcagatcaataaagttaaatcttagttttcacaacatagaaaatacaaaacatatcattttgcaacttcctatacacccaaatataaatttgacaatgatccatacttaacaaatatttgtacacaatgtagaaaacatatcattttgtaacttcccatatctttaaccaaatgtaaaattgacaaggaaccatactttgcaaacatttgtactcaataaagttaaaacttagttttcacaatatagaaaatatagaacatatcattttgcaacttctcatacctttatataaat

SEQ ID NO: 73104 - DNA, 1449 bp, Cannabis sativa
agatagccagatagaggagtaacatttctcgagttattggtttcgccaaaactagaggcgtcactaaatgccttttgatgttctgaaaggcctcttcacactcttctgtccactcaaatttcttgttgcctcgtcatacattgaagaattgcaaacacttatcagttgactttgaaatgaatctgttaagtgcaaccatccttcctgttaggacttgtacttctttaggcttttttagtgacgacatatctatcgaagccttgattttttttagggtttgcttcaatacccctcacgttgactatgaatcccaaaaattttcttgaggaaaatccaaaggaacacttttttaggtttagcttcatattatacttctttaatatttcgaagcattccgtgaggtttgtggtatgactcccacttttcactaactttaccaacatatcatcgacataaacctccatgtttcatccgatttgatttgcgaatatctcgttcaccaatcgttgatatgttaccctagcattcttgagcccaaatggcatgaccttatagtagtaaagtcccatgttggttacgaagctcatatgttcctgagcagtcttttgggcatgccttattcagatcagaaaagtcgatacaagttctccaagttctgttaggtttcgggacgagaacaggattacctatccacaaggggtgaaacaccttgcgtataaagtcattgattaacaacttatccacttcctattttagcgccccttacctctcggaatccaagggtctccttttctgcctctttgctaggtagtttggatcgacatttaaatgatggcagataatattagggtcaatccctatcatatctccatggttcgaggcgaactgatcctagttcgcccttaagaaacttattagctgctatttcaactgctcgtcctggttcttcccaatgtacacacacgttgtgggatttcttgggtcgagaacaacttcttccaattcttcaattagttttaacaagtttatttcatcttgaattcgaggatcaagatcttcatccttcttttctctttcttctgccgagaccgccattaaccggtgaccgacttttctatgttgtagctctatgtgatagcaattgcgagctagcatctgaccacctcgcaccactcccacaccctctggtgtttgaaacttccgggatagatgcttgatcgaactaactaactctagtccgatcaatgctgggcaacccaataatatattataaggcgatggcaggtcgacaaccaaaaagtcttgcataattgtggtggataggggtgcctctcccaaggtcaatgcgagctcgattattccctgactggtgatactattgccaatgaagtcgcacagatttaccatgcaaggcctcaatttgggctttttgagccccatcttcttcaa

SEQ ID NO: 73105 - DNA, 713 bp, Cannabis sativa
  modified_base (686)..(688): a, c, t, g, unknown or other
tttgatctaaagatcaagatcaacttggacttggtgatattgacttagaaagatataacggggggaagccacctgaaaaatagagtctggcatgagggctcaatatccaaagtgattcaaatccttttaacgggtggattattgtaatgaccgcatgattagattatagattagtaaaggcaattaacattaattactgacatttcataattattcatgattttatatttattgtgggtctcatttttagaaatgagcattagagttataatttgtaaactccagagattttatttaaattcaaagaatattatttatgctaaatatgaaatgtgtaatttttatgatttttgctcggtgacgatagaaaatgcgatggatgaccgttagagtcacatgggtaagtttagaacctaattcttagtgggacaaacataagagatattttgaatgtcaagtttaggcgagattatggttttggaccattttacccctaggcctataggttacttaagctggaagcaagggtaaaatggtaatttgtcttttggtgagtttttgtcttttattggatttgtatagaattgttattcaactagtatttatagaaaattaggttaatttttgtaacaccctaactagcataggcgtgttagcgtgattttaaacgtactgtgtagctcgtnnntaatcaacgaggttattaaaaatcg

SEQ ID NO: 73106 - DNA, 1185 bp, Cannabis sativa
tccgcactttgcggattatcgtgcggattggattggtgcggattggattggatcggattggattggatcgactattttatgaacacccctaactctaaactatagatgagtgataagtaataagtaataaaacgtttttcagatgtggaaatattggtcaaaggagagttggttaagttagttatttcctaactaagttaagagcttcgttttttgtagccactgacctaaagatcttgatcctaagcctataataaccacattgacttgtcttttcagatgagggttcagattgagattgatagttagagagagaaaagattgagaggtagagagaggtatagagaaaagagagagattgtgtttggattttgtaagaagaatcttttgtaaatgaagaagattcttaggtaagagtgtgagagttgaaacactttgtgagtactcaacagagaatctttcttgactgtattgtacttgttcaagctcaatcaataaagaggatttggtggttttctagaactgaagtagagtcattgatcacatcgatgtatcagactaaaaccagtatacatcttggtgttgacttttttatttatgccttaattactttctggttttccttactctgttcatccctatttttctccgtttgttgtttttaatttcttaaatcttgtcatcgttaattgtttgattgtttaaagtttagctgatttgattctgcactgttagttgtaattttcccacaaattagagcttggcaatcgatcaaaaacgcataatcaagattcttttcgctgcaattcttgaaggaactttgaatgtgatcaatggtgagattcaaattggagaaatttgatggaattgggaactttgcgctatggagagaaagtctgaaaggaatccttgtgcactagaaagtctccaaggttcttggagataagaagttattggcagaaaagaaactagaggaaaaagcaaaaatggaggggagggcatactacatgattatcatgtatctatcaaacagtgttcaaagaaaactcatcacagagaagacgacgaaaggagtttgggacaagtttgaagaactatactttaaaccatcaattgttagcaagattaatttgctggaaaggttatacggttttagaatgatttcttctctttctttagatgata

SEQ ID NO: 73107 - DNA, 626 bp, Cannabis sativa
aaaggatctaaaattatttatttgagaaaactattgtgctgctcattttctctataaagtgataattagtgcatcattttggggtggctttactttgaaactttgctttgactgaacataattcgttcttatggaatgaacattcattgtttactttatgtatggaggcaaggattggcttcgagtttctccttgccattgttggacatctaaagttgaatcggctaccaagcaatcttggaagaaaccctccttcaccaatctactgacttcaaccttcatttgtctacactcgtaggttgcatggtcgtgttcttcataaaaagcacaatatcggtcgtgatcccttttctttgggtcagtaattattttaggcgaccaccttgtctccttcattcccctcgggcatctcattagtttcgttaaggttataatcgtctaaggaagcttttcttcattgaattatcgtccattatggctgaattttctcttaatattttttttttgtgttgcttttcctcaactttgagtgctacgtatccccataccattgctagagctcttgtcagtgacaattcttgttctactatcatgtctttctttaattatgatctgtgaaccgatcc

SEQ ID NO: 73108 - DNA, 506 bp, Cannabis sativa
aacgaccttaaaagtttagggagcataatttggtacatgtcaaagttcgggggacaaaattcttaattagccttatatatatgataacttattattatacattttcattaattttaattaaaaaaaaaattgataagaaatgtataaataaaattttcaatttcaataccttctaaatataaaatatattttcaaaattaaaaaaaaaaatataaaaaaaacaataattctgctaggattacttatcatatgctcgatgggataaattgtgatacaaatatctcatataacaaaaattaatccaaatttaaatcacaatatagcataatgtaaaatttacatcacaataaatactatgattttatatttacagttatttttaatattttattattaaaatttagttagcatgctcacttgcagtaaatgactttcataattatattattattttattattaaattttatatttactattgcaagattattattttatatttttaat

SEQ ID NO: 73109 - DNA, 1064 bp, Cannabis sativa
  modified_base (30)..(35): a, c, t, g, unknown or other
taataaaatcataattaactgctaatttcnnnnnnaaactaagcggtctttacatgaggtgactgagcagctggtcggagctcacaacgagccttccctggagctgctgatgggagtagtcctgaaggagtttacgagagtgagtctttcctaacagtttcctttaatccttctttacttggctcatattctaacattttttctctgtgctcactggtctgaagatggcttacacttattctcaagctaagtctaccgcttccaagaacgctgccacgtccaaaaagcttcttgctgccgaaggacttggccagcttcttgctgagggtggaagtggacttggccaggaaggacgctgatgaagccaaggttcaactcagagccgtttgaatggaactgggtgaagtcaacaaaaagcttcttgctgccgagaagaaggtagctgagctgaccaaggatttacaggcttctgaccaacttgaggctgctatgacctccttatccaaagaagtgaccgacctccaggaagaaagagaggttcttcgaactattttccgcaggttggaagtagagaagaagtccaaggaggaggaccttagcgctaaagtagagaggctcaaagggaaggtgaatgccttagagatagccagtctcgagattttttatgacttttggaaggctaaccctcaggcaaattttgattacctaggcaatgccaaagacatgtatctcgagtaatgtgcttcccgagcagcctatggagagtctgaggcaaccacttttacttccagtctgaacgttgacatgccccctacctagacaacagatcctccagctcataccggcccagaagacccgtacaaggagcctgggactccacccgtctaaacacttcactttttatccttcttttttttatatctgtctagccataaggcctagacaacgagaccggcccagcagtctttgaacttggaattatttttcatttttcagacaacaggttgaccgggcagcttttaatcccagttttacgtgcttttgttatctttaatgaatttaat

SEQ ID NO: 73110 - DNA, 949 bp, Cannabis sativa
aacgattagtaattgaaaatttgaaacttgccaaaggatcattgagtgctgactgctgaggatactttttgtactcatatttaattgcacttgatcattatacatttattcaccttattccctagaaagatgcaaaagatcataaaaaattggtacctaccaccaaataaaaaaaaaaacataaaaaatgtggcaatttgaaataaaggttccgtattatattttaagatagaattttaagattcaatactaagtgagaatagaatcatactttctcttatgtttttgcctgctgactaactaggttattactatgaaatgtgaatttatcctaaccatttcatcttatgcacgcagatggaactttccagagactattcatgatctcctatcttgatgatgagatacttgtacgtatgcttaccaaatactctttccaccaaaacatagcttgatttcttttacttcattgttattttggtaattttaaacacgatatcatgtggtgctcatggccctgtgattctaattctatggaacttagtgaagctaaatcagagagtataaataggcttaggtagacagactaagcatgaatataattacaactgtgcagtgataaacagaaccctaacaacttcctatcagaattttgacagcctaaccatatacactctaacactgtgatcctaattctatggaacttagagaaggtaaaacatatgtgacaggagttgcagcacaatatattcttgaataatgcttggtatggaaattagttgcaactctttttaatgcctgtaaaagtaatgtaaaaaatatttttatattcaatttcggatgtagtcctgctgctcctgttgcattttataagtaatttaacaatcagtgaagtaatttaaaaataaaattacacatatgatactttacattacttctgtatgcaatg

SEQ ID NO: 73111 - DNA, 881 bp, Cannabis sativa
gccttttcaatctaatcataacagagaaaaggaaagaccgccaccctgagaaggccgtagaagggggagtgccaaagctaaataggcggaggagagaaagcggacctagaaacagggatcgtatcccaaatgccagaaagccctaagcatctcaatgataaggaaagtaagagaataagggggaagaaaggcgaagatctcaaaagaaaaagaggagggaagatagtgggaaagtgaaaatacaaaaatatacaaaataattaaaacaacacatataaaaggggtagaaataaataaaaaggggacgaggacgaaaggaagataaaaaaagggggaagaaaaaaaaagagaagatgaaaagaaataaaattatgttaaataaagaagcagagtatatatacctgaagacagcaagatctagcacagagaagttgaaacgagcagcagagagaaaaacacgaaatgaattttcgaaattgagggtcttatactcgagagtgcgtcaccaaaacacgaagggaggttagggaattaatagggcatttataagaaaaacggttctcgaggtaccaccattacatcaaggataaccaccacttcttaagaaattgaaaaattaaaacataaagaaactatacacatatataataataaaaaatgagaaaccaataatgacgaatgagaactcacattaaaactgctaaagcagttatcaaaggcagttccagattataaaactataaatggaactgggggtagtagtgtttgggggtaaaaataaaacttagaaataaacggcccaataaaataacaacgcaaaaaggcccacgttaaaaggcccacaagaatgaatgcatccaggcccaaagatatagagggcg

SEQ ID NO: 73112 - DNA, 1076 bp, Cannabis sativa
gcagcaagaacctgttgtttccatgagagaaaattgtgatcatttagtctaatagacagattacgattgaaataaactggattgaactcatctaagttatttctcgatcagtttgggttcgaagctccattcagttgattcacagatctgttggtgttggagttgttctgaattgcattagtgttggcaccaacatttgccatgttagctgactatgggggaaataactctgataccatgttaaacctcttcgccatggatgaaccagatgaaaagcaaaacagagtacgaagagagagaagaaaggaaagaggagagaaagacagtaaaagagagattgaaagaaagagcaatctactcattaatgaatgattagaagcattatatagcctcagattacaagagagatagttacaattaacagagttagttacaactgaaatgaatacaaaataacagaacaaactaacactgctaactatcataacatactaactctcctaacatagctagacaataaccacgttacaacaataatccatacctcacaagcaactcaaaaataaagaatgagaacttagaaaaaatgtattacaaacaaacatgcatttaattagtattgcgaactgaaacatagatgataaattgttatgagtgtaaaaagtacttaatgtaattgtcataaaacaaattgttttctcaattttctaagttttttaattctatcttaaattttctttttaattctttcatttttttattttactttatttaattagaaattattaattaatttattattttattcgattttatttaattagagttcattaattttataataaaaattagagatcattaattaattaaaaaataaaaataaataaattatagaaccttaaagcatctatgacattctttaagagtgtcaaaaactttcatgtcacttaaaaatatattattttattttatctctctttcacgtcattttttgcactttttgtttaaaaataatattcaaatataagcatctttaaaaattattaaaataatattatattgttatttaatatata

SEQ ID NO: 73113 - DNA, 1250 bp, Cannabis sativa
attatttagttttaatgataagtctattttaaaattaaaattttatttttcacttaaagtttcttgaaagtgatacattaaccatacaagctaaaataaacctacttaattttttttgccctaaattacatttttagttatacattatgaatacatatttacaaataaaatatattttaaatattaaaaaaataattatataaaaattttactagaacaaagataaatatataaattaaaataaaaattggaattaacaaaaatagagtgaaaaacaattgaaaaaaatattaaaagtaaatggccccccctgttgtttgttgtttgatcctgcctccgcccctgtctaggagccgtagtgggattttgaactcttagaatactcacatcagatactttaaaataaaatatataaagaattaaactaaaaacacattacattatatgctctaaactctttctctatttaaaaacttttttaaaattcaacatttatagaatactattaattactttaaatatattttattaattgtttgaaattttaattttactttttatgagaggatatatgtaaatattaatactatatgtttaaaaggaataaaatatattaaaatttgaaaaaaaaaaattagtaatgtattttaaagaatttaatgtagtgtataatataaaaatttgaggtgaaatggaaaaaataaaaaaaaaaataataagaaaagagtagagaaattgatgagaataatctagcactacactacacaacatattaaaaaattaattttagattcatggcaaaaattacaactctatacatataaaaacaaaaaatattgttattagacatcagtggtgaccaacaccttttataggtggcgtcctacgattaagtaataatatttcctaaaagtcattttcataagttaaatgaaattagatacttaattataccaataacgaaatgacaccgaagaagctggtatagtcatattaacaattctaaaaaaaaaaaaactaaggaaaataccatatttttgtaaatgacacgtggcctatatgcatttaacctctgttcttctgaaattagaattacaataattttataaattaaaaaaaaaaaaaaataaaagactacaacattaattatactagagcaataagttaagcaactcttctcttccttgaaccttaagatatacaaacatagcaccttcaactttagaattgttgtttatgatctgtcacat

SEQ ID NO: 73114 - DNA, 1572 bp, Cannabis sativa
  modified_base (696)..(699): a, c, t, g, unknown or other
tcacaaattttgttgtgactaaacgtaaaatttttcgttgagtttattggctatagtgttagtactagtaatggaaatagtttctatataatattgttcatgatcatggacaaataactttcgaaaattatgtgtatattgatttatatatatatatattagaatgtttacgtatatacttagttgtatgaatttatttagataatgtatatattttttttgtaatgctttagatgatgtatatatgaatcttatgatatactatatcatttaaggtttcattaaataaataaagtataaaacgtaactttatagtttatataaatgaaggctagtcagattatatgcttgtttcattgtagtgtttttatagtatagtatcttcaaataaaaaagtctccaaaaattatcacaaattataaaaagttatgctcttcataaatagaattaaaattaaaaattatcacaaattatcaacgttgttcataattaattatcatttaagttaaaattctaaattatcttcatcatatacataacaaagaaaattagacactttatttataatattcgcttttcttgaagggtaatttattttctatacttaatttattttgtttgctaatggagataatttatcattttaaatatttatgagtttagtggagtattatgagattttttttagtgacaatnnnntttcttttatttttattttattttgagggtgtgtataataatgctagataaataattaaattatttgtgaatattaattataggtatattaataataataatatgggtaaatatattatagcatattttttagtttattattattataattaatacgtacgtacgatatgtatatatatatatatattatttttttaaaattttaagttgttgatttagggttatattaggattaggactatatatataattatatgggtagtattcacacatatttctaagcatattagatatattttatgatctgtataaatggttaaaaaatgtgatatcttctaaatttggtaaataattacctaatggcatatttagttaataaataatattttagtaaaattttacgtaaaaagtatttgtatgaattcatgttttacgttaaaaatgttcatatgagtacatgcaatgtgttggtgtgaatcatagtgataaatgattgtgtttggtgtgtcatgcaagtgaaattggcctatgtgctgtgtagtttgatgtagatttcattgttaatcttatgttatccttgaatatattttaagtgttattgtgttttattggatttaggatcttgtccttatcaaagaaactcggtgagaggtttgagggagaggaaaggatatacttagcaattgaggtaagaagagtggacatctgtgcacagagtgtacactactacaaaaaccacatttagaggcagtttttgtggcctttcagcgtcagttttagcgaaattcgctaccgacgctgataagggcgacactatagggttgtgaacaactgacgccatatatacccctatggcgtcggttattagctagg

SEQ ID NO: 73115 - DNA, 735 bp, Cannabis sativa
attgatcttataacaacaaccgatatcggcaataaattttagaggacaatgatgacaatcgaagaattaatggttgttattaattcagagtgggatgggaccatctgatagggtccctatcacttgtcatgatagagtctaccagataaagatttcaaatttcattgttatattatgaagcccctcacaatggattgaggtgttagatccctcaaatgggacaaaagaaaatttgaaatctttttgccatgaattcatgacctcctgcaacaagtttattggatagtataaaattttatgatggagaaataatttttaaattgacttttttattctattttaattacaataaggtttctccaataagactgtaaaatcccaaatataatgaaagtttttaaataatattactctaaccaaattactaaagattacactatataggtgggacaatgtagaccattgcatctcttttttcttttcctttttaataatttaataaggactttatacaataaaacaaataattaaataatttatttataatcaaaacttatatcatattaataaaataatataataataaataatatattttttagtgtaatttttaatattgtgattggaatgtaaaaaaaaaaattagtattaaaatagtaaactattggtgttgatttaacaccaaatataacttttatgattggagttgccctaaatttgatttttttttttttt

SEQ ID NO: 73116 - DNA, 1305 bp, Cannabis sativa
  modified_base (74)..(74): a, c, t, g, unknown or other
  modified_base (145)..(145): a, c, t, g, unknown or other
ttgttttccagtgactgtggttgttttgtggcatcgtttgttgaatatttcattgatatgaaaccaattcctcncatatttgatgttgagaaataccgcgataggcttgctacgttgttcttcaagtatgctcgcatgaaagaantggattttattgatagtgaagatgaggctcctccaaagggtccatagaaaaatttgttttagttatgtctctgttttttttggcaaaaggactatttgtttagattttgttatttttataatcggattatgttgacaatcgtagaaaatttgttgtttctatcaagtgtttttatatggtaattggttttattttgtaactagtttttgttttttagtttatatattcatttaatccacgaaatcatctcattaaaaacctaattacaaccatcgtataaaacaacgagccttacattttaaacacttatgtaatatttattggtacaacttaattttaacttgcttttaattgatcatgcaaacatttaatcatttaactataattttttatgtcatttttatattaatgatcataatatcctttctctcttaataatatgttcaaaaaactctaaccatatgaaaagtttcagttaaaaataacaaaacaaccaataaaaataatttgtatgtttatctaaatgtttcagtatagttatttttaagttgctgaatagttgtttgtacttctaagctgtaattcttttgaaggtctttttgttatgtcccttttgtccacacttgccacacttgttttgcttttttgtttcccaagctgccgccattcttcttttcctcggccttccagacttgattcttcttttggaggcaacactatgatgtgtcaaaaaattctagtagttcccattctctaaggtttccaactgggtatactgtttcttcatatgtttgcagccatgcttttgatgtgtagtagtgtgcacagtagttgtatgtgtttatgttcaagtcctttatgacggcaactgcatgtttacatggcatttcatctttttgaaatctgttgcatgtgcatgtcttgtccttcaagtttactatatattcttgttctgtcttcatctattacctcaaataggtttcgatttgctggtttcacctgcatgttttttgaagcaactttaaaacagccaaaaaattatggaaaaacaactttctcaatttactgaatgcgaccaataatatcaacttactattaatcgcaatgactgtacatagttccctatgagttttttctcagatgatggtgtcagccttgtt

SEQ ID NO: 73117 - DNA, 759 bp, Cannabis sativa
cgaccgatgtacacccctagtttagagccatgacttttcccagttgtcccatgtggatcaacccaaataccactcccgatattcatgtcactgtcgttacctatggagatacctagcaaatagagaacctaataatggttccagtttatagtcattactttttctcgttgtcccatgtggatcaacccgaataccacccccagtattcatgtcattgtcgttatctatggagataaccgacaagtaggaaacctaacaacgactctagtttatcatcatgacttttctttcatagtggtcatgaccgctttctcactttcataatggtaatgaccattaccttgcttttataacggtaatgactgtcaccttgttctcataatggtaatgactgtcactttgctttcataacagtaatgaccgtcaccttgtttttataatgataatgatcgtcactttattttcataacagtaatgatggtcaccttacttttataacggtaatgaccgtcaccttatttttataacaataatggtcgtctcgcttctttcataatcaactaactcacaaatgatcttaatcgtatctggcatgctatgtggtatagatgtacttttcttacctttaatccagattcaatgctgacaaatccaagtggagaaaaatacctgatgatctcggccctatgtcgcaacaacggtaaaccgataagtgtctattccaaaacactgcctaatactcgcataaaacaatctagg

SEQ ID NO: 73118 - DNA, 800 bp, Cannabis sativa
  modified_base (579)..(614): a, c, t, g, unknown or other
ggcataaaacccaacatacatgtcgggtcctgttacagagagaatactacatactacatttgatctagatatcaaggtgttgagatcatttgaaatgcactttttcttttatattagtgcaagaaagagtttcttgggttttgtgccctaaataaaacccatttcaacataatcagatttacaaattaataaaagatatgaacttgttttatgttgcatggttcaaatgatttatttcatgattatgcttaatgtatagattctattaagtccagaacatatataaatatatatatattttcatgattatagtgtcgtcaacacaatagaatatagtcatgattacatgttcaaaagtttatttctaatgatttgttagtttacttgatttagactgacatgataatcggcgataaggtatacttacaccttggataagtgttatgccctttctagggcattggcaaagtttaccagtatcagaagtatagagtatacattagaagggactgatattgaacttagacaatacatcataaacatactgttatataattctaagtcaatatcaatggttgnnnnnnnnnnnnnnnnnnnnnnnnnnnnnnnnnnnnggttcagcttagttgtattattaatgttcttcaagttgttcgtggatgctaacaaattgttctggaggatatgtacttcttgggaacaggggagtttaattgagtgggaacgctgatcataaatatggaatctatagcttctataactattaagaagtgaaacgatgatttccttcgagcttcgct

SEQ ID NO: 73119 - DNA, 876 bp, Cannabis sativa
  modified_base (90)..(90): a, c, t, g, unknown or other
tatatataaataatattttattaaataaaaatagaaagtcacccataaatttctcataaactaagaattttagttatataggcacacttnatatagaatagatatatatatttggggaaaattatttatttagttacaatttttaatcgcaatataaatttaaaaaaatacggaccggccaagtactacacgccacgtatgtgatcttcaaactttatggatgaaaatagttgcatataatttgctgattatttttaattttatcgtgcatttcttaaagtgattctaatcacttcttaaaacaaaaacaaaaattgcttaattttaatgaatacatattttatggaattgcaatttttctagggttagcatatattatataattgttgattggtctttattaaattcatcttgtgactaaataccaaataatcaattttaatttgacgtaagtcatttttacaaatattttactttgtcaccgttgaaaaataaagaaatgtaattgtcacttttatttaagtggtggtcaaagcatgtgaaaataatgaaaagaaatcgttccgttaacctttcaaccactacactgagtccactccaccacataacatagttaattaaccaaagaaaatgagaaaggtcaaagaagacaaaaatattttaagaccaggcattcttgtgtgacacggttcttttagtttgctccacacgcaaaccaatcactaaacaaaaaaagagcaactcaataccacaaatattaatattgatgttgtacttcatatcttatatatatatatatatatattctcgtacctcgtctatagcttcatatagttgtaattaagctagctcatattctcaaaaaaaaaaaaaaaa

SEQ ID NO: 73120 - DNA, 1021 bp, Cannabis sativa
agggaactttgagagtgagaggttgcaccatcaggactaaaatcagtagggaatgaagtgttttcagcaccaaaagggtgcaaattaggtagctcagaccattgaggatagtgaacaacagtttactgttcagcagcataagtgtttaggaaaccactcctagaaaggaattctgttttcattgaaaattacatttctagatatgtaaatcctccttgttgaacttaggcatttgtagcctttgtgagactcactatagccaagattcacaaattttagtgagtgaaattgaaacttttgtgtttgatagggtcttatacaaggaaaacaagcagccccaaacacttttaggaaggaatagtctagtttggtgttaagtaggacttcaagtggtgatttttgattcaaaacaggtgtaggtaacctattaattaggtacacagctgtttggaaagcatcaacccaatacttgagtggcatatgagcttgagccaagagtgttaatcccatttcaactatgtgcctatgcttcctctcaggtctaccattttgagctgaagtgtgaggacaaggatgagtgaaattgatgccatgttcaagggtaatatcagtaaaagattggtacccaccaccccaatctattctgatagttttaatggtcgttccaaattggttttcagcaagtgctttaaagtgtgtgaaagcagcgagtgcatcagatttggattagagtgggtaaatcaaaacatatctactaaaatcatcaacaaaatgaatgtaaaatttgtagtttgtgtttgacatgatgggggctagaccccaaagatctgtatgcaccagatcaagaactttagaggcacagtttgctgaatttttaaagggaagggcatgggatttcccatactgacacgcatcacagaaatgataattttcattgcttgaaggattaacattaacattgacattctttaggacttgtttcaacactctactagacggatgtccaagtcttctatgccac

SEQ ID NO: 73121 - DNA, 842 bp, Cannabis sativa
tgcggtttacgaaaatttttgtacatccctattttatatacatgaaaaaatcccaaaccttaattcatttccattttaaattttaaaatagtatcatacgtcatgctatagtcatccacacaaatcattaaagaaaaaaaaaattccacttattttcattaaatttatttgtcaaagaataggaatgttcaaaataaaaaaaggaattaatagataaatatggacacgtaagttatatgtcatgctatagacatagctcactattcgaacattccacactcaaattattaatctatttaattcatcatatatattactctaattttgctacctttctttttttcgaaaatggatttgattagttttgggaattagcaagaaatgacagtaaaatagaaaaaagtaataataaattaagagaatcgaagaagatttggtgtttgactaaaagctggcatcaaattctgttccgtccgactttttccaatacaaactgatttcaaactctaatttactaaatcgttgcagtcacggtgacattaacgaaacccataacatttataaatttagagtagaaatagtaataaatttcaaaagttattaaatattttttaatattgtattataataatataatcttttatttttaaatgaaaaaaaaaccatttattttcacaataataagaataatattgctgttgatattgcagagtgttaatgcaattatgcaagttgtgtttctcgtattaagtttgtttggatctctcgtacttcaaatggagctgctcaatctctacttgtctaccggctttggcagcttctatttttagttttgggttttt

SEQ ID NO: 73122 - DNA, 912 bp, Cannabis sativa
ataacattttatggaagtctaaatgtaagtggtgagaaatgttcttttggtgtgtgaacaagttaaggaatttaaactactgttgtgtcaaaattcaattaaaacttcaatttgtgaaaaataaaaggctatttcttttttcaattcgacctaggcaagagcttgaaacgactccaactaattcatcgagctaaagtcacggcttgtggcctcgatttcgaaattcgttgaattgtttttggtggcttctttggctccacaatggttggtattattggtcaaccattgcaatctaggacacgtacacactgttaccttatgaggaggccaatttttgagctggtcacagacaacaattacgtttaatcctttaaatttggatgatgattttctaacttgatagttgcctatatcctaccttgggatttaacacagcatttgttttgggtccctaggctacagctatggcaaacctacaaacaattcacacccatatgatcaatgacctaaactcaacgtgcctacgattgtctatggttgggaccattcagatttttgcctatatggaaagagatcaaccatcatacttattccaactcttacaataaagtttaaaatgtaggaactttatttttgtgtgtacgtagtaaattatgtgtgttattagggctccttgtatatttatttgagcatgtgcattttttgagtttatgtttaagttttgacaggtcaacaactaatgttgaaatatagttgacaactgtcataagctattaaagtcggtttgtgagagttggagttatatgtaattcctcttaagggcaatttacactaatgtatacattatataattttattacaataaatgtgcataataatttattttcctataattatacattttatctatta

SEQ ID NO: 73123 - DNA, 2210 bp, Cannabis sativa
ccgaggtggagtaggggcccgcatctgttcgggcccactcttagtcagcttagacccactccttgattgttcaggcctgtccgaactccttcctcgagactccttgggcttggcaacttttggagtagatgggtttgcaaccgctagctcctcagaaagatcaatgacctccccgacaggcgccttttccttggaagaggacccctcaccgcctttagacttcttggctggaggagatgcactagaacttccaccaattctcttattcagagcgccaagcatcttctgagacatgtctgcacggaacaaaaacagcatggttagagaaaacaggcatcagaaacataaggcataatagtcaagaagcttaaaaatgagatgaagtaacatgcaagatgattgcccgagcaagactcgaaagtccatcatcacctgacatgcctcttatttcagacataatagctttcccttttcgaagcacgggagaaggcggctgagcaggcgagatgggctccctaatgcgaattgcatgttcaataggcctgggcggggccggatgagcttgtttagctcgtccagcatcagatttcctcttcctccccttcactggtttgggaatgaagtccttttgatagagcccgtacttcacaaagttatcctcgaaggtcaactggatgatattccggtcttctcccggcaatcgagcgagcttttgagctccatcatagagagcaagagtgaggggagggcggtgatatgtcgaaatctgttggaaccgagtacggtaatgcccgcgccattcaccgtgaagtactcatcaacaaaaagcctaattttgctgatggccgagtcatcggtgcccgtcaaccagttgaagtccggctgagaggaatagaagtacccctacctgccttgcttaggggtggactttaaattaaagaaccagctgacttcatgaggagaaggcataccccacttctgggaggcgtagactacgaagaggggagacagatacttaatgcccttaggagtgaactgggccgggcagagaccgaagaagttcaccacattcttgaagtattgatgcaaaggcatcaatgccccctactgggcatgggcacccaaccaagcgcacatccccttcttagggtttgtggcatggttgttgtgggcgggaatgtagcaatccaaatcgcccaggtagccaccctagtcgagagtccacaggcgcgcctcagtaaccctgtacggagggcttacccatctggcgcccaaggaaccttgccttctgtgaggaaccgcagtagtaagctcctaactcacgtagtccacgccctcaaccaggacatctccgtcagcatcgaatggctcccaagcctcattgtactccccatagtttgggggttcaacctctgcctcttcctctgcctcggaggaaccgctaggacgtacttcgtcctgctcctcaatctcctggacctcagcgtcctcttcatgatctccctcctcttggacggttggatcctgttcggcgctgggcaaagtggcgtgctgagccacttgaggatcagatgcatcattctatggttgggtacaagatgtgggggagagtgtccttcactagaagaaggtgggctagaacaaagatggggatggtcctcgtgcaaaagttgaagcaggtcttggttgattcgatgttcgctttcccaaaactcacctgggttcatctacaaatgacaacacacaagatgagtgtttggtcagaatagagaatgataaacaaaccaaatatgccgaccaggagtactcaacagattaaagaacaagaatgttcaaagaaacgtcaaaactcaagaagtttgaaattttttggagttagggcaaaaatttcatgaagcttagaataagcaagatgaaagagaggcattatgtagttcagaaaacaagcattatggacttaaaatcgcatgaaatcatgacaaagaacactcacaaggtttctgaacctagggtttcctaaatatttttctacatcaaagtcgaaggtgcattcgaaatgtaaacatgccaaaataagcataaaggaaatcaagaacatactcaagagtctgatatctggattcaagcaacgtcaaaccaacgagcaattttgatgaaggcacttcagcaaacttaaagccaaaaacctctcttttcgctctgaactcact

SEQ ID NO: 73124 - DNA, 746 bp, Cannabis sativa
ttttgggttgagattgatgaaagagttttgtttgcgcttaggatcaagttcaacacactagcagatatcaatggcggtcacattctacgaccttggctctgctgctggcctaaagaaacttgatgagtaccttttaagtcgcagttacatttctgggttagtactgtattttgctaagaatctagattagtattgttacgtagtgttttatacagtagttttgttttccttttctgatctaattgaaatttctacggtaatcacaggtatcaggcttccaaggatgatatcactgttcatgctgctatttcaaaagctcaggactacgtgaatgtgtctcgttggtacaaccatatcgaggctcttttgaggatctcgtaagggttttcaacttttagatcttttctttataagtttggctttatcatcttccatgtatttatgccttgttgcctagcttggattgttcttttatgattacaatttttcttattctgtattgtattgctcttcagtggtgtggctggtgatggtgccggtgtcgttgtggagggatttgctcccatcactgaggaggcagtggctaccccaccagcagatgactcgaaggtaagtacagcaaccttcatttggttgaaaattcagtaaatgagtgttcataatcttgtatttagcgactattaacattatgaaacttccaggcatctgctgctgaggatgatgatgatgatattgatttgttcgga

SEQ ID NO: 73125 - DNA, 1011 bp, Cannabis sativa
agtgattgagttggcatcctatatgagttttcttagttattctctattttctcaacttttatcatttgtttaattttaattattcttttcacttaataatccaatggcttttaagttttttgtggttgagagaatggcttttcacttttaatgtaatgaataataattgataaataagtatatatctttttctaaagagtatttatattcccttgaatatttaatataattaataaggaacatcaaaagtttcaaaaagtaaatgaaaatatgaaataaataaaaaattttactctttgaatgttttatcgatttagttttcaaaaaaatacacatatatatatataggtaagtattttagccaagcatccaatccaagttggagtatacatctagaagatgaaattcaatttgctttagttcagaggaataatattctgttttgctttaagaaaacataataagttcttccaccatatataattatataatatgattgagcttcttttttactattttcattttcgataatcttttcttaattacatattggctaattatgcaatacctcatttgattttgagggattaaaaacttcaagtgattgtgatctataggattgattgagaatttcacctttttggtatcctacggtttgaaagagctcatttgcaaagtaggggtaaatagtatatgaaaactggtaactggataacttttaagagcttttgtgcactgttagaataaaataataatattttttatttttattttttattttggtaggaaataacgttaaaattagtaaaggaattaatactacattatttcgttttacagcttaatcgaatacttgttgggtctttattaataggtggtgatgatgtttttaaattattttttatttcttttttaaaatagaacattttctgttaatttttctatttctttttcattatatttagcattgggcacatcttcactagagccctttagaccttttatctattt

SEQ ID NO: 73126 - DNA, 623 bp, Cannabis sativa
acctatttgtcacacacctgacacggctggaagcaccactaatgaaactatgcagcctgctgatgaagaaaatactcaaaaccagattgttcagcaacaacacccgatgattactagagctcgtgctggtatattcaaaccgaaggtgtatcttggtcaagataaaatggatttatctcttcatgagccatgtttagttgaggatgctcttagacataaggggtggaacaaggctatgaatatcgagattgttgctttggttaaaaatggcacttgggtgcttgtcccaccagaagaagctcactctattgttggctgtaagtgggtttttaaaataaaatataatgcagatggcagttttcagaaattcaaagctagattagtagcgaaaggcttccaccaaaggccacgagtagattttaaagagacattcagcccagtaataaaagcctctacagtgcgtgttgttctgactttagccgtgacaagaggctgggaaataaggcaaatcgatatcaataacgcctttctgaatggtacacttgaagaagatgtgtacatggtgcagccaccgggttttgaggatccttccaaacctggctatgtttgtaaattgaaaagat

SEQ ID NO: 73127 - DNA, 1268 bp, Cannabis sativa
  modified_base (1227)..(1242): a, c, t, g, unknown or other
ttcattgccatcatcttcttcctctctttcttcaaggttttggtcatcatcaatgccgtcaaacacattctcgacatcctcccctcggttctcggtgttggtcatgccttcccctttagcaccgcttgtctaggggcaagaggcgagggagtctgccttctccataacagtgtccaagggagttttcttgcttgtattcttttaggtattcaccatggtcaaaatgatgtaacaactagtaaactttcctcagctctcaatgaaagcaccaaaatatttactgaaatttttggaaactgattacttagagcttaaggaaaatataaaacaataaataatagataaatagttttttacgtggttcaggcattaatgatccctagtccacgagtctattgtattagccttgcgggcgaatgtttaaatattacaaatgtttacagtatgaatattaactctgtattccttttgtttctcttggtaaagaaaaaagcttatagaaatttcaacagaggttttgtaagtaaaatatttgttccaccctttgcacataaaaacaggggtatttataggcacatgtgcgggtaagggcatatccctcacccacctaggggtttcttactcagcacgtttcaatcattggtgtttacaacatgatgatgtgaccattggtaggtagggaacttcctcatcatatggtgtacagctgctataacccaactcgtgggactaaggacacgtgtcgtccaacggtttcaccttggaaagttggtgtctaaacaagctattggacaaaaatgagctatagagcacgtacgtgcactaccaatgtctgacacaggggacaaaatcgaatttggcgtcaggaggtacgcaaccgtcagatttggctccatgtaagtcatacctgagtgagttccacaaacgtctggctaaaactttcccagaccaggctaaccctctaccatcctggagcagttgtgacttcaaatctcttctagtagcagttttattaatcagaatcccgtagtcctttctacctttgctaacagggagagcttttggataacctctggcgtataacatgttcggtgaagaagaggggcgaaagttatatactaactatgtatcatctgtcatggtgccctttcgtaactgccatgtacatagcatccaggaatacaaacaacatatacatacacatatatatgttggaaatattttacnnnnnnnnnnnnnnnntaccatgtatgtttcattaacatcct

SEQ ID NO: 73128 - DNA, 1060 bp, Cannabis sativa
atgttatttttaaagtttggattagtttagggttgtagtttagggattttggttcggttgagaaatcctaattagggttgtgttcagtaggtttcaattgatgatttagggttgtttgtattgttgtggttgtctattttgaggttgagctcaacaatggcatgttaaattttactgtgtttttattgttgttttggtgtggtaactgccttagaatatgtatgcaggtgttctggaaagtttgattgcatttgggaaagtttaggctaacttgcgcaatttttaggatttgctggtgcaaaccggtcgaccgattttataaggtctgtaaaaccggttaaccggtttacaagtaggacccccaaaaattgcaaattgtccaatctatgttattttttgagtttagtttggttttccctgatatttagggtagttgtatgttatgtgtgtcattaagattacccttggttataagttagggttttggaaaagtttattcgagttatttacccaattgtgtaatgtgacttaggacctccattcatctcgagacattcaagtcgactggcacgcttgaatctagaacaatgtaaaataacataaagtatatatatatatttatatatatatatgtgaataaatacatgttattggttgcttgcactactaacactaataaagatgtagttttaagggtattagtacaatgtagagtatttagggtagttatagtgttaccaacacgaggaccgggggtgcggagtgcatgtggtacaacacttagtaactcttggaagtataataatggtcttaacaacacgagttcagagttggtactctagtgcatacggtacagtggtcgtacttccattgagagtgttcttaactaattgatgagtttcgtaattgatcaggacggcttaaacataaagccggtattgcattactcatatacatatctgtgcatatcttactgagtcggttgactcatcagtttgctaccttgtgtaggtaagggtaaagcaaagctggaggagcagtgagttgggcctaggcaagg

SEQ ID NO: 73129 - DNA, 709 bp, Cannabis sativa
attgattttatttacaaatatactttaaagaaaattatttgcacaaatatcattgtgccatgtcaacctacatactgaaattcaaaataattaccgaaaatttaaaaaaaaaataggaaaatctcgtttttaatttttttttttacttttttggagttttgaaaaagctaactatttacttagagtgtacacatgacacatttatattggtacacacaatattattatttcaaaatttattttgaaattaaataaaattataaaaataaaaaatagaatattaaaaaacataaaaaatattctaaattttgaaatattttttataatttttaaataataatattaggtaaactactataaacgtgtcaggtgtacaaaaatgtacacataaataatccatgttgacagttaactatgtaaaatagatgtaaccttaaatttgctaacagttctttgaagggtttcactactaaaatttgagcttggagggttaagtgtaagtagattgataattaagagggtttacgtgcaaaaaacttaatatttcagatactattcaatttatttacaaattattttataaacctctaaatataaaaataaaaaatatatttttttataagtattaaataattcaatattaaaaagtaaccaagatcaaaataactgatctaatctacacttttgaggattggattaataaatttga

SEQ ID NO: 73130 - DNA, 783 bp, Cannabis sativa
aatgattaccccttttcgctgctttgcctataaataccactgagcattgttcacaaactcattttcaccaaccttctttgttaagcaagttcagaactaaaagagaggtttttagcttcaagcttgttgaaaaaattcacaagaactgttcgttaagctttacgcaaactgagtccagggtcgatcattgagtaagttctcgattccttttactttactttgcacatttactttctgaatgtgatcttaactttgctgtagaagatatgtagaaaaccctaggttcagaaactctgcgattttcctttgtaatgattcatgcgacttcaccattcatgatgcgtacttttttactgcacaatgtctgtctttcatcttgcttattcaaagcttcgtgaaatttttgccctaacttttgaaaattttcaaacttttgagttttgacttttcgtcgaatatttctattctttaatctgttgagtactcctggttggcatatttgcctgtttaatgttcgatatcccgaccaaacactcatctcatgtgttgtcttttgtagatgaacccaggtgagttttgggaaagcgaacatcgaatcgactaggatttgcttcaactcttgtacgtgaatcaccctcgtctttgttctagtccaccctcttcaagcgacggacattttagttcaatcttcatgtctagccacaggatgatggctcgcattaaatagacaatgcgtaaagtcaacgcgtctgaccctcatgtggcccatcacgccaccttgcc

SEQ ID NO: 73131 - DNA, 725 bp, Cannabis sativa
agaaaaatccggaagagctaaaactggaacggtgaccatggcatgtttgagagcttcaaaggtagcagtagcttcatcattccaacagaatcgatctttcttcaattgctccgtgagagaccttgcaatggacccatacccctttacaaacttgcggtagtaacctgtaagacccaagaacccgcggagacatttcaaacttgtgggcagcggccaatttaacattgcttggaccttgttggagtccaccgaaaccccagaagcagatataatgtgacccaagtattccaattgctgttgagcaaaacaacatttcttcttgttagcataaaattggtatttagccaaggtatccaggactacctgtaagtgtgaaagatgggcttccatggttggactgtaaaccaatatgtcgtcgaagaacacaagcacaaaccgacgcagatatggcctaaagatttcattcatgttggcctgaaatgttgctggcgcattggtgagtccgaacggcataaccaagaactcgtagtgtccctcatgagtccgaaaagcggtcttaggcacatcctcaggtcgcacccgtatttgatgataccccgatttcaaatccagcttcgaaaagaccttagcgccatacaactcgtcaaggagctcatcaatgaccggtattggaaacttgtcagcaatagtttccttgttaagcgcccggtagtccacacagaaac

SEQ ID NO: 73132 - DNA, 824 bp, Cannabis sativa
caaaatgaataacaacaaaatacacaaaatgcatgcatgcatgcatgcatgaatattgaatgagcccacgtgggaagattaacatacctctttacatatatatatatattaattacaataattataatgtatatttatttattatgaggattagcatttttaatgggacaagttaattggttttcttttaattatcaatttacaatatgatttaataattaaaaatattcaccagcttcctatatttgggttgaagaagtgatcaccttggcataacactccgctcactcatggttgttttctcacctcccctacttgttttcaaaaatagatatgaaataattttatttagtatactttatagtaatatttaaaataattatgatttcgataatataccaattagttacttttcataaaatgatcaactttagataaaagtaattcttgtagataatattcaatttttaatagttattttaaaactatatatttatttttagtttatatatattatattgattaagatgtatttttatgttatattttttttctactgtgtaacaatatttatgttacgttttatactatttaagaatgaatgttaactatacgatttaaaaaaaaaatgataaaatagtaactacactacaagaaagagtacattttatcccactttttttagttaacaaaaataaaaaataggataaaagatatattgagactttttatccctcttttagatttggagccttaaataactaaaaaaaaaattagacaagggcctgtttggtagaacgtaaaaaaaatatcaaaggtaaaaa

SEQ ID NO: 73133 - DNA, 1149 bp, Cannabis sativa
caatttattcattaattaataaatcttcatttttggtttgtcctcaaaatgtttaatctaaaggttcttataaaaatatcatcatgttattaaaaaatgtgataatttaaaagtgataatagtatagaaaataatattagagttttctgccttaattaaaactccaattatatataactattttattattaatatatataaaaaattattttgacttcgttactaaaaaatactacttttatgaccaacacaataggtgctggacatgaagagtttcttttaacatttcatatccaacagtgtttgaaatgaaaaatattacaatatatgaaacaatgctcaacatgaaaaataataaaagatatgatatgtaataatatgaaaccattttcaatgagtaatatccattgatagttattaaaaaaaataacaataaatatcaattttagaaatttaaaattattggattttgatcaaatgactaataataaaagaaaatttaagttgttgtgcttgaaatttaatttagctatttaattaaaaaaaaaatatctctcattttatattatatcaaaaatatgtttttgttaaaaatatttaactcaaattcaatattttttattcctttaagccgaaaatcgattaatatgttcaaaatatttaaagtcctaagcttattagtacactgaatttgcacatactaactaattaatagaaatctacttatattagcaagtgttatgttctttccaaaatattggtagatagtgggagagtttttatttggtacacgcttatttgtttcgatatttaagtaagttttttaatttatttatttacttttataatcatgtactatttgagactacaggtacatcttactttcataatcgtgtacatcttatttgtttcgacattcgagagtatttatttatttatttacttttataattatgtacatcctaattacttgagactatcattcaattttaaaaaaaaaaaaatcatgtagtttatatttctaaaataagattaaaatattttttataattattttttttataggcaagttagttattatcattattttaaatttattttcagcactatatgtatataatatacaatttaaaattcttaaatttgata

SEQ ID NO: 73134 - DNA, 835 bp, Cannabis sativa
  modified_base (518)..(522): a, c, t, g, unknown or other
tcaaatgtcacaaaaagatatctataaaatagagaaaaatgtgtaaaaaaaaataaagctaaaacttcaagcctaaattttactacaatctactgagatttttgaaaaagtcaaaacataaaagttctagatctctctttcagcttttcggaacatcttgaatcgtccgatttcgagcaatatcaagaaagtgatggccaaaatacaatcagtcgttgcaacatgaaatttctgaacaaaaaaagataaaaagatagcgagaaaaaaggatagagttgcgatttttatatcttgtttaagtttaaactttaaatcttttttagtaacttttaggtaaccttgttaatctatataaacacgttattataagtgtttttaggaggttttgagagctaaaaaaactcaaaaactcttaattaggaagcaatcaaggagtataaattttggagagcaaaattgatattgaaggctttctcactagggttttcaacattcttttcttctctattttcttattnnnnnctaaattaatatgtgtgaaattactattagtgaacatgagtagctaaacagtttattagggtttagatggatattgtttgacattgaattttggttttaatatgatttaatttcccctcaatttctatgtattctatttcatttgtacttaagttcttttaattgtctaaccatcaattaattgtttatgattttaatacaaaatctgagaattgattgtcaattatgctatagtgaaatagaatcaaatttcgatataggacgagagtacctatatggtttggatagcttatatggtttctatgtttaatgc

SEQ ID NO: 73135 - DNA, 1025 bp, Cannabis sativa
actttggtctcagtcctttttgtagagtttgaattgttaaaattactttctgatcatctccctctctccgctgtagatgttactgcatgtgttcagttttacacaataaaaattaacctcatggtacggctttgtaaatgatatcacttcttttttattttttttaacaaaattttgtgtttgataaattgactggaatttcattgaattataaaactaaaaaacttaactttttgaaagaagagttagtgaccacatttcaggtgtttttttccttctttttaagtcatgtattttttaacttattattattattattatttttttttttgattcaacatgtatattttaacttgatgaaaacactttggttccataaaaaaaaaggccactctggttaaagaaataaaactaattcgatgttatatacagtttttagaaaaataaaatttatcttaaatctgcttcaatgtaatagtataaatgcccttaaaaaaaaaacaatagtgtaaatgtacaatgtcatttaatattccttctgttaataatctttgaacacttatgttaaaaaacatctctaatcaaaaataggaaattgatgagcataattgtatttaaaagtatatgttaagagtgagactagtatagtaactcatatttattgaatgggaagggaagctatttcaataagcatgattagcagaaccagaaaaggtagtagtacaccaaaaaagaataaagaaatataattctcttaatttttttggaactgattagtttagtggtactcatagagtcatatgttagacatgaaaaataaagcacagcagtatgtctgtgttgtcttgaacacgtgggaaaagcctttgatgtcctttggtaactaacaaccatatataaaaacttggaaactatgcatttgatgttcatcttcttaaagagttcttcaataagttaaatacttcaacactaagcagagaaagaatgttcaagtcgaaactggccatttaacaaagaaagacgga

SEQ ID NO: 73136 - DNA, 784 bp, Cannabis sativa
aaaaaaaaaaaaaagtaaatgagagcaaatatcataatttataatttaagaataaatagaagtgatcataatttcttcaatcttaagagattgttaatcttaaattagtgtaggtaaattcattatttatttccatttcttatcccataagggccgatcataaagttaagtaaattaggcgtgcgcttcgggttcccaaactcttaaataaaaattatcagtatatagataaaatattaaaaaaaaaatatatataacaaataatatttaatgtagtgatgaaaaatcttattttaagctaagagtattaagagttctaaaaattttaccattacacacatactaaacatatcattaaactctcaacaaaattactcaaaagcttttcaaaagaccccaatatcatatatatttaaaggattagaattttattcaaaagaaaaaaaattctattgcacaattttggcttaaaaaaaagaatgaaaagttcaaaatcaacaccaaaatttacgtaactctatttgaaattgacttacaacaatattttccaatccactatcaacaaaaataatattacaaagtcattcaatgataattcttcaagaaaataaccccactaaaaatctaattcaaatattataatttctttattttctcgtgttgactatttttctcacacgcttaggtggcgtttggtaacacttttttaatgagttttctgtttttaaaagtggaaaagtgaaaatatttttcaaaaacatgttctataaagatcggaagagcg

SEQ ID NO: 73137 - DNA, 1127 bp, Cannabis sativa
  modified_base (46)..(80): a, c, t, g, unknown or other
  modified_base (1015)..(1028): a, c, t, g, unknown or other
ctttatatgtgtttaatttatcgtcttagaaagttcatatttaggnnnnnnnnnnnnnnnnnnnnnnnnnnnnnnnnnnntcctggtaaaaatattccaacaaaccctaatctcaggaaacctaaacttataactctaggttctattatatcctccacggattacactaactcaggaaataggaaaacacccaactacaacactgaaatggacgagaattgagaaaattgagcattcgagaaccctgccaaaactagctagcctgttttacaggtactggtaaaaccggctagccggttcacaacagttcaccccaaaatttccatttctttctcaatcctccaccaaatgcaaccataatttccagaacacctatacaatgcatgtacaacataatccaaccagtatttccccgaaaaactcaatgtaaacaaacatgccattagagatcaaagttaaggtttctatgctcaaacttgcataaaacctattccgaacatcaaaatcagatgctagaaactaaattcaactcaaatgaaccctataatttgaaccataaaaaaactaaatcacctaatcaaaccaaagtaaaagcttcaaaaacacaagtctatggattctagggttaccttagcttgaatcccacttgaattccttgctaaaagcaccaaagattaacagcaactcccctggtttatggctggttcgaagagagagaaaggaaggaaagaggttgttcttgaattttcggctttctccttatttttctctattttcttcaaatgaaaagagataaactaatttaatctcttgctgaattaaaatggctaggtgtccacaccctaggcagccaccaagtcaccaacttggaaaattacaaaaatgcccctaagcctacaacttaggtattttccaaaactaggggtaaaatggttaaattccataaccctgtcttacctcggtattttattttctccaataaatttcttgataagaaataaggttctaaacttannnnnnnnnnnnnnctagccatccatcgcattttccattgtcaccgagcaaaaattacaaaaataacatatttcatatataattcataaaacacccctagagtttaataaaat

SEQ ID NO: 73138 - DNA, 598 bp, Cannabis sativa
ttaccagcgcaatactaacttttgccagcataaaaatgtgctggcaaaagtgatatttcttgtagtgataggtggacatatttcgtgtccgatgggaggtccgatactatttaaatggagtccgatgggtatatatacatatttattatgtatataaacatgtgcttttcttttctctttcttgttcgaatacatgtaatatattattatgttcgtttaaatatatattgttgtgtatgcatatttatatatataagtttgtttatgttttatatcatagttttaatctcttaactaatcgatgctcaactttgaagatctattttctcacattagagttttgacgtggttttccattagtttttggtttttctttgtcttaattaaggagtggtacagtttaaagaggagatttttatatttctttctttctttctttctttaaatggggtcgcttttttccttatttgtacgattttaaataccccatcagacccccatctggatagtatcggagatcccatcagacacgaaatatgttcaccaatcagttactatgcatcatgttgggtttagtgccctaaataaaactcatttc

SEQ ID NO: 73139 - DNA, 741 bp, Cannabis sativa
attctgctcattttttttaataatttatttacgtagcactaacatgattttaatttggtttaattcaagaataaagataaaatataaatacataaataataatctaatgatgaattatgagaatatatatatgtatttttagagctaattaatatttatatatttaatatcaataaaatagattttatgtagcttaaagttgttaaatatatagactaactttaccggtaagatggctacataaacaaattgtttaaaaaaaaaaaatgtatttgaaaaagggggtatttgtaataatttgtataattctttggggaatttttttaacaaaaaaataattcaaagagtaaaattttataaggatcatagtcaaggatgaccttgtgattgggtggaccttaggagaaaataaaaaattattgatccttttacatatataaaaaaaaatatgtggtattttaaaagttactgaaaaaaaatgtataatttaaaaaaattattacataaaataccaatttttttcttaaattttcatatttttatgtttaaagtttttttcttatatacaagaaaaccacatgaaagtaacaagaaaacaacatcaaaataaaataaaaatcaataacaaaataacaaaagtacaacataaaattataccaaaagttcgtacttcatgtaaatgaaatttaaaaaatcgtaaaaattttgaaaactctttatagaccgtatttttgtaatttt

SEQ ID NO: 73140 - DNA, 1490 bp, Cannabis sativa
tcagatactatcttgatgggtattgtgactacaaattatgttcttgacgaaaaagtcgagaactttcttcgaggttacggaaaccagagggtcagcctctgtccactttgtaaagaagtcgacagccaccactgtgtactttactcctcgtcgccgtgtggggagtgccccaatcaaatcaatcgcccatgttgcaaatgggtatgacgaggtcattattcttagttctgttggtggtactcatcatattttttgacaaatttgtgtgtgtctttatttatagttggcaagtaatatccttgtcgaattattttctttgacaagcttttcacacctgcatggtctccacaaaagccttcgtggatctctctaattatctcacttgcttttgtggggaaacccacaccataggagaggcattgagtaaccccttcgatataattttccttctaccatcgtgtagtgagggactgaatacaaaagttttcgtgcctcgtttttgtctgctagaagttgcccgttaagaagatagttgactatgggtgtcatcaaagtaggtgagttgtcaatcatctgaacttgttccttttcttatatactcggttcgtttaacacttccaccagtaccaaattcaagttatcaagttcattttgcgaggccaattttgccaagccatcgacattaaagtttttctctcttggaatttgcttgactttaaaataatcaaacttttccaagttcttccgaaccttctctaagtattttgccatttttaaacccttttcctggtattctcccataacttgatttataattaactacgaatcactgcaacacactagatcctcgacctttaacacttcagctattttcaaaccagctatcaaggcttcatgctcagcctcgttatttgaagtgtcaaattggaatcttagggcatagggaaacttaaagttttttggcaagattagtatcaccccgacacccgagccattttcattagattttccatccacgtacaatttctaagtgtctgtgtctcgctagataagtggatgttcatttggaattatcctttctatcaggaaatctaccaatgcttggcttttgatgaatgttcttggatgataggtcatgtcaaacttccccagttcaatagaccattttatcaatcttccaaaagcatctagttttgacaaaacttatctcaggggttgattagttaacaaatttatcggatgtgcctggaagtaaggcctcaatttgtaagatgtatggattacaaataaagcaagtatttcaagagggggatatctcgattctttccatagtaacatgttactaacatagtaaactagttgctggttcatttcgtcttctcgcactaatgatgcactaattggattctccgagatagccaagtacaggagtaaagtctctccagctataattttggccaatactagaggcgttgatagatgtttcttta

SEQ ID NO: 73141 - DNA, 686 bp, Cannabis sativa
ttccaccatcaatttgagaatagtcaataaaccagtctttatttggactcatgtggtaagtacagccactgtcaagaatccattcatcattgtccctttgatctgagctagtgtatgcatctcctaactttgaagattcaccttgttccttgatcacaataaaaatatcaccatctgaactatagtgatcatcaactgctgcatttgaatcatttcctttatcctcttcatctttgtgttgctttttcttgtcccttagctcccaacaatttttgatcaagtgaccaaccttgccacagtgatggcatttccttgtttcctttggtcttgattttgatcttgagtttcccttgtgtcttgagtgatttctaaacttggattgatccctaaatctggaatttcctcttcttggttgtcttcctcgaatcatcaaggcttcatcatttctggtttctagttttgcagccttttgccagtttagttctgcatctcttgatcttagagtgctcattacatcttcaagcgtgagagtatctctactgtacattataacagttctcatctccttgaactgatctggcagagcatttagaattatcacagcttgatcctcctccttgattgtttctcccatatttgttagggagagaacaattctgttgagatcatccaaattttgttccaat

SEQ ID NO: 73142 - DNA, 1423 bp, Cannabis sativa
  modified_base (620)..(622): a, c, t, g, unknown or other
ttagattaaataagtattttcttcaatctcaattcccatgggttcgaccttgttcttcacaatctccttagtaggtaccacttttggtcacaacagtaccatagcctggtactcacatgtcattgctgcctgtacctaatatggtacgccactaggaagaaacccaacaacggtttcaatctatgctatagcctggcattctcatatcactatcgcccgtacctactaaggtacgccgccaggtatattgtatcacctaatcaggtgggtccgtatatcacatccatggtatcatcacattatcattacataaccaagccatcttttcattatatgacaataataaccatatctgaatctcaatatcgatcaattcacaataatattaattgtattgtgatataacatgttatgctttacaatatacttttcttacctttaatccagattcatgtatgttggccaacctaagtggagaaatacctctgatgatcttggccctacgtcacaacaacggtaaaccaataagtgtttatcccaaaataatgcttaatagttgcaaaggaaaccctagggtttcctactaaatcccatagtacaaatacactaaaataaaactnnnattttggctctaaaacatataccatatggtagatctcgtcgcaagcttcaaaacagtatgtagaatgtccaaaacagacactcgagtgaaaagttatgacaaaaatacagtttttgatcttctaagaatttccaaaaacggtgaaacacgaaaatcttaaattttgcactcatcaaaacactcccaaaacctatctgaatcattccaaacttcatagaacacatatataccatagatacaatgatccttacataacagaaattaaaatcaagcccttaaatggaaaatgccattaacattcggactaagctttaaaaagttccaaactcaaattctaactcaaaatcacctcaaattcaacaagtaaatatctaagtttgtcccatagttaccaaataaaaattcaacgaagttagaatctccataactactctaaatcacaaagccactatataaaactaattgtttttaacttaaaacgaaactaatcattaccgtaagctctccttcttcaatgatttactatcccgctactaccgaagcttgaatcgttaggtttcgagttgaaaataaaaaaaaaaatagattaaagagggagagagtttcgtcgcacaaaggagagaagaaaggatttagttttttcgttctttactgatacgtttatgttttaaaacatataatatatataaacttataagaataggtttatatataaataataataatataatattaataaaaaatttattattaatagttatcttatgatttcttagccactaagaaatctttaattttagg

SEQ ID NO: 73143 - DNA, 684 bp, Cannabis sativa
aaaaaaaaaaaaacaagactaaaatctactaccgcgaataaataaagccttactactataacaataacaaagtggtgtagcaacatcattcttattgttaactaggaaaatagccaattaatttagagtctaataaacactgactaatcaccaataaggagttaagaaaaataaataagcaaaaaaaaaaaaaaatagaggtttgacccccttgtatttggataatgacctactctccttttagttgtattgattgtgagataatatcgtgcagattactaaggaagacaaagtgaattctagctaaatctcttaggatgttacaaagaatattcagtgtggtgttcttaagtgcgagattatgatctcaggtccatttcccttgtaatttcattcactatttatagggagaaggttgttacagttggcttcgtaaaatgaatgattagaaagtaaatattcctatattctagggtacaattacaatcatttgtgactcctacaatcttgggtagatcagtcaaatctgtatctgtaggatgcagttggagatatttgtggaagttgtttgaggaagaaatcgacttgtgtagctttgcctgatattcctggggttgtttcttctagccggcataatgactatctagcccgactctccttgagacttgtctttttcgataaagt

SEQ ID NO: 73144 - DNA, 979 bp, Cannabis sativa
agaaagtaaattttgcatggaggtcgctttcaactaaatcaacaataaaataattaagctagcacttaaaaagagagaaaaaaagaaaaaaaaagaagaagctaccactcaaagtacaagatttaccccaaaatacaagtttgcttcaacttagttttaactatatttttgaacaaataattatgtcattaaaattcacacttaaaattatttttattgcaagtttatgaatttttatttgaaaattttattttctctatgtgttttctatatatttatgaaggaaaatttcatttataatatttttgcacatgtgaaatatatatattatatgtgaagtgttagttcacttttcattatatttttaaacatatattaaacaattttttttgtataaaatatataattatcacaacaaattattgattttttaattattttaaaataaatctattgatattttttattatgtatagatattttatgtaatttttaattttcggtaaaattattttaaattttttatagttagtcagctataattctaataagaaaatattaatattaatattatagtaaaaaattttaaaaataaaatttttcaaactgtatgaaaataatataatagttattatttttgagtatttaataaaaagagtattattatttttaatttattttaatattattcgattggaacattttgaattattgtaatacacttttgtagcaaaaaaaaaaaaaaaaaactattcaaaatttgtacattgtttgttatgataaaaaaaaaagtcttcttatattttttattttccaaattcatctattattaatttttttttataaaaagatgcgtaaaatttcaatattataaatatcctaactagctaatctattattaattttttttaagaaaaaataaaaatccttataatttcaaaaaacatatataaattagtattgataattaattaatgtt

SEQ ID NO: 73145 - DNA, 1118 bp, Cannabis sativa
gtggtaaatgtgtaataaaaataactttgtaagtagaaatgtagtaataggcgtgtgagggtaattttgtaataaagtgtctaaaaaggatttttcatgtaaaaatttctaatttttattcaaataaaaatctaataaaatttcttattttttattttaaacttccaaaaaatgtgaactttaatgaggctagtccacctatatctaaagtcggccttaaaaagaaagtagagagtatatcaaaataacacgtcaaaaggtcttagagaagttacaagcttctagctgaatgttttgtttatagagattcaaagtagtacaagctaaaggatcagatcgttaggagagtaaatagatcggatcaaatctgatccaacttgattcagattagttgttgatccaacccgccatcttgttacattcaacttttttttggattgaatgagatccgaccctgttttacgagatcgggaaaggtcctaaattttaaaatataaacattaaaattcaatttattatttttaaccatcagactattttttgtggggaatttataatttatgtacattatagtacttaattacattatatgtgcataaaaaattatttacaacttatcatacattgtattaactatgagaaacatattcttaatttttatgtacaaactatatatggtaaaataaataataaacatacatgttttatttataaatttgtatttaaattttaataaacacaatatatcaacatatcatcacacacttggtccaaaaaaaaaaaatatcatcacaaatattatcttaacaaatatgttagattaataattaataaacattatcaataataatataaatatagtgtttatacataaggtctgtaaagaccgcttagttttaacttagaaattaatagataattagggtttaattatgaaactagaatcaagacacggtggactgtaccccctccgtccaaaaatcacagttaagtgccacggtggactatctacgtgtacacacttatacacatgacacgtttttagtggtccacataatattaatttctaaaatgttataaaatttaaaattaaaaaaaaatctttttctattttcttt

SEQ ID NO: 73146 - DNA, 1311 bp, Cannabis sativa
ccagcccccgaacttgtttcgaacccgaatcccaaaccagtattgagattttatgccccaaataaaactcattgcaatatgatcgtatttactaattaataaaaaatcataaatttttttatgttgcatggttcacctgaatactttcatgattatatgtttaatatataaattttattaaattccaaacatatagttactcgtgattatagtgttgtctctacacagtgaaaaataatcataattatatgattcaaactatttagtcccaaactattgcatcattctcatcatctggatcaagggatacaacatacgagaagttcagggatacccttatagtgttcaagaagtatatattctaaacttataactattttatattttgatttaatgtacacacatctagagatctattgggatatgatacaatgataatcagcaatataaaatcaatccgctaagtatctgatttagtaccataaaactagcaatacttagcttgagtttaatccaatctatctttttttcttttcctcccttagagttttttctttaacaaaattcaatgagttaaaatcatcaagcaaaggctcttcaacaacctgtgattttgcccatgtatagaagatttgacgagtttttatgcactactcttcgacaatgattcatctcacttatgatcataaagtgaactcatgcttgagcaacaagcacaaaagcaataacccactacatctcaacaatggtttatctccctcacaacagatagcttcaacatacaagactttaattttttttaccctagttactaagagatcaacactgggggcaagagcagtaaagcacatataatatcaacgaaatttcaaacataatggcgacaaaggtgatggttaatgatcaagcatcaccatatattctaatcacattagaccctgaaaagagtgggtcactccctaagagatctaaagccatacaagtagcttatgtatggtttcaggtgaaccaacatcggtcctggtagtaaaataagatcaccgctcatagttgaaattgaccaatggcaaacatcattatgactatattcatagtgatcgacaccaaatctcattagaaggtcaacatccagcaacctccaagccatctcactcatctaccacctatttatcaagttctcagcagcaactggtatcggccgtctccttggaaaccaaagagtagcatgtaaaatgttacaacatatcattgacattcaccaagaaaaactcctcagctgtgctaacagccaaggggatgaggaagacctcc

SEQ ID NO: 73147 - DNA, 941 bp, Cannabis sativa
aatagtgtttcgtaatgatactagttttgttctagcttatagtatacttggacaattggaatagttgtttctctcctaatgttgtcgaggctttgtgtatctagtactttggggtcttgcttgcttgttgccttggctatggcggtgttagagtatgattgtcttactatgtttaatgtcattcttcataataaagttgatcagtcttatcttggttgtattgttagagatatttttgcttattgcaacaattttattgatattttttaaatgtactgtcctagtattgctaatagtgtagctcacactttatcaaagctaaccctgtctttaactaattagtatatttggtggtctagccgccctaattatattgcaggcaaatttttatgattaatgttattgtctaacactatttttcttcttaaggtttattctactaagtttactcttgaagttttaataagaccgtatttttttaaaaagaaaaaaaaaagattattccatgttattatcatgtgtgttctttattaaaaaaaaattatatcttcacattattagagtcaatgttatcaaacctagaagttattaattaaatatgataatgtacatcagttaaaaaaaataataatacaaaattgatcgacatgtacatcaggacatgtaagttttgcatatgatgatatttagtcactaattaatgtatgggtaaatagtggtggtagtcaaaattttgagtttgtaagtggtatatgtaatttttttaacggcatgagtacttaatgtttttaaaattgtatttttttttttctaattttgtcagtatataagttgttattgtcttaaacagaacacatataagattcaaattctatatcaccgggtctagttagaaataatgtagtgtcaattacttttaatttttttaataaattcaaaat

SEQ ID NO: 73148 - DNA, 780 bp, Cannabis sativa
tcaggtttgtgtggatatttattaaacccatgtcaaattgtcaatgatgtcatatttaaggaagagaaagggaacatgtcccgagcttcaaaataatgatagtgcaggtagagagagagagagagagagagagagaaatcacgcaactcgaggcagcatttatttaaaaattaatttttattttattttattaaaaacttaatattatttacttttagttttcactttattattaaaaaaagattgtctattcaaattctttagcttgtcttatgaatagacagttagacaatagacactgtaggcactaggcactaggcactgtagtcagtacgccaaccaagagtcaccctcaagctttttcttctccaagggcggcactgtgtggatgtgtgcattctttttttcttccttcacttctttatttatttatttctttttttttggtatgtaataggaacatatagtatacagtaacaattaatggacaaatttatctcattatccaaaacaagtccaaataatgttaaaaataaaaaaatggtatttttaaaaattaaatcagcccataaattaagtattcgggctcagcccaataggacccgaaccgaccacgctcaacccgactaaacccgacccgatacctgacgcacccgaacacccgaaaaccgagttcagatatgcatttacaagacccgaagcccgaaaacccgaacccgaacgcccgaaaacccgaaaacccgacccgtgtgcacccctaaacacaaccatcaacggggt

SEQ ID NO: 73149 - DNA, 1507 bp, Cannabis sativa
ccatagctttgttctgcgtttgcttccaattaactttgagactatcatttgtggtatggaccttggcataacccatgccaattcaaactcctctagcacatgtctccataagcatcgaataaatctgcaatccaaaaacagatgttccacgtcttctccactgtttttacaacaaacacaccagccatgggatatatacaggaacggcttcctcttttgcaccttgtcatggacactcactttgtctaaggccacgagccacccaaatactttaacttttgatgggacacagcttttccataatgtcttggtccaaaccaggtcctcagtcgagggatttgatgtcaaccaagagaaggctgacttacaagaaaaaactcttgatgggtccggtttccaaattcgactatcatccgaaatacttaacactcttacgtgttccaccttttgcattaaagatataaggcttggcacctctctatccattaagctccttctaaattggaaattccaattctccacccatccacctggttgcccttcatccgctatcatttcttttataggagcattccttccttttgatattactgctaaatcagggaattcactcagcaagggatagtcgttaagccaaatgtcttcccaaaatcggatcctatcccctcttccaattttgaagtgtaccaaccccaagtactcatcgtacagatctgagatatccctccacgggcctttgggagacaaacgacttccattcttggaatcccagaaattatcagccctaccatatctgcttaccaccaccctgtgccacagcgaattttgctctaagggaaatctccatagccacttcataagcagacttttatttcttaactctaatctcccaattcctaggcctccttcatctcgaggcttacagatcttctcccaagccactaaatggtccccacctgtagattcactgccttcccagaagaagtctctcatcattttctccattgttctaatcactgacttaagtgctttaaatagtgatagaaagtataagggaagagatgatagaactgactgaatgagtgtcagcctaccccctttagataagaatgcacatttccatccatctagtcttttggcacacttattcaacactggttcccagaaactccattttctaggtgagccccccaaaggcagacctaaatattgcattggccaacttcccacttcacatccaattctacctgcgagccttgcaatagtattttcatccatgcatatgcctagtagttgacttttgctcatgttaactgttagaccagatatagcgcaaaatgcttctactaaccgcaacaacttgtatagcgattgctcgttattaacaaaaaataatgcatcgtctgcgaattggagatggctgacatggactctctccttgcccacaaagaatccagcaaggttacctgaactaatcgccttgttcatcattctccctagcacatcc

SEQ ID NO: 73150 - DNA, 895 bp, Cannabis sativa
caagccagaccatggcgtgcgaagtagtagaagacagcgatggcaaccacgaaacaccttaaaacttaaaacacttggaggagaaatggctttgtactggcgccgttgttgatttgatacttataaggagactattagactataatataaatatataccaaaatcataatataatcgagagataaaaaaaacagttttgatactaactattagaatataatataaatatgaaaataaagcatatatgaacaatatgtaaagcggaataaattgtaaatatatcgaagttgtatatgtaatgaaaggatcgaaatacttctagttattgatgtttaagctttaatcccagcaatagcttcagtatgggaattcgggcttcctcactctctcaactctctttagatagaattttgttgtttgtacagaattagtaaagagctcggaggccgatgagaatcttcatcagtatctgccccacattaattgttagaatattttgacaactaattcggaaaatcaatcaaataatgaatatcgaaatttgaccttattatatagaatatcattcaaataatattgttcagattcaataaatataatatattcatttattttaatattaattctttaattttattttataaatataaaatattctaatatgtaacactttctgcaaaggcactttctgcacttgtccccaaccaatgatgaaatttgcatacattgatattacatacatggtctttgctcctatggtgaagaaccatatgaggatatttccttcaatattcactacaaggattagcacttttgcaggcgcaatttagcgcctgcaaaagtccaatacagcacctgcaaaagtattatggacaaatttttgagcgtcctccag

SEQ ID NO: 73151 - DNA, 983 bp, Cannabis sativa
gagagtgatgagggtgttatttagaggggccacatttgcacttccattgaggaagctggaagctgcttcgagaacttctctccgaacagcatgccagttggctttgtaaaattgggagttgaagccgtccgggcctggggctgtccagaggaagctggaaaaacgctttttcaatttcatccaaggagaaagcctcgcttaagagggacttatcagcgtcagagagagagctgcgaattccctccaaggctagattcatgtccgagtcagcggggtttgatgaggtgaagagatggtcgaaatgggactcgatctctcgagtaatgctttcctcatcggagatcatacctccattttgcatatggagttggtgaattttgttggttttcttcctttgggaagcaaaacggtggaagaacttcgtgttcttgtccccttgagctaaccattgggtgcgagcgcgttgtttccagtaagcttcttccttgtagagtaaagcatcaagccgggattggagatcttttatagtagcaatagtacggtcgtcccaaataagggtagaccgggccaaatctaactccttctccagcttactgatttgctttttgaactggaaattttttttgtggttccaattgtttagcttttgagcacacgaggattgggtagcaatgagactggggatagcttcctctgaggtcgagggattagtccaagagtggttgaagattctatcccagtttgggtcctgtaaccacacattctcaaaaaggaacctcttgctatggtcccttggccgaatccccggggtcggggatgtgacgagttccaaagctctgtggtcagacccaaaaaaacccaagtgggtaagagtggcatcggggaaaagattttcccaaggactgttggttattccccagtccagccgttcttgaatatttttaggatgggccacactgttgttccaggtgagcaaaggcccc

SEQ ID NO: 73152 - DNA, 1068 bp, Cannabis sativa
tttatattaaaatatgtgaaacttcatattaaatattgattatgtcaagtaacattggctagttaaaaaattattatagttgtagaaatggctaggcttagtgcaaataattaaataattaaacacacatcatcaaaattccatgttaaatattttcctttcacccatatctttctaattacttctaggttagtcattcattctttaccaccatcatctttacaacttatactcgcaaaaagtcctatatcaaattagtcatattaattatattattattatttaaccttgttttctcattatatatatcatctagtgattctcttattaagtttcaaattgacataaaaatgtgataatatacgttttttcataggttttttttttttttggcatggctgtgctagttctttcacaaatattgctagcaataaggattggttgcaccacttcatgttttaatcaagtgagcgtagcaactttacagtcattttgtattactatttggatgaattaagattttttctccctaaactttaaaaaatactaaattaaattctcgaatttttcgttaaaaattttctctgaattattgagattgttggattcaagaaattctgtctaattacattcaattctactaacgtgacaattgtacatgtaataaatcgtcccatccaaactttgatatctactaaattgtgcccccagaactttgacatgtatcaaattatactccctaaactttcatccacaccaggcttctgttagtaaaattaaacgaaattgaacaaaagtcattgaatccaacaatttcaatagttcgagaaaaatttttaacgaactgagaagttcaggaggcataatttgctatatatcaaaaattaaagggtaaaaattctaattagccaaaaaaaatatttatgaagtattttatttcttattttgtgaaaaagaaaaaataatgaatgaaaatatatataaggaaattccatgatgaatcttattgaaaagtttatcatgccttttttttttaagtccatataggtataattgtttacatgaaaa

SEQ ID NO: 73153 - DNA, 980 bp, Cannabis sativa
gtgctttccacaaaagccctcatagatttttttattatgtcagtagcttctgtgggtaatacacatagtaagagaggcataaagcaacctctcctgtacagtttgcccttgactatagtataacgaggtattgaatacaagtgttgtgtgcctcagttttatctgtagaaagtttcccgctgagtagatatttgactattggtgtcatccatgatggcaaggcatttatcatctcaacatcttccttttcacatatacttgagtcgttcaaaacttcgaccggaacaagattgaacttatcaagttcattttgcgaggccaattttgccagtacattgacattttagttatcttctcttagaattggttcattcttaaaataataaaacttctccaagttcttccgaaccttcttaaagtatttagccatttttaatccttttggctagtattcacctagaagttggttcacaatcaattgtgagtcactgtagcatataagattcttgacttttaaggcttcgactatcctcaagccaaccaacaaagcttcatattctgcttcgttgcttgaagtatcaaattagaatcttaacgcatagtggaatttgaagttatcaggcgacatcattatgactcctgcctcgagccattttcattcgatgctccatctagatataatttctaagttctgtatcatgcttgacgaggggatcttcttctgagattgatgttcttgggttgtaggttacatctaattgtcccaactcgattgaccattttatcaatcttcctaaagaatcaggttttgataaaacttatcttaatggatgattagttaaaacttttatgggatgttccttgaaataaggtcgtagtttgcgagatgcatgaatcaggcataaggcaagtttttttaggaggggatatctggagtctgcccctagtaacttttaactataatagtaaacaagttgttg

SEQ ID NO: 73154 - DNA, 1193 bp, Cannabis sativa
gtttaagcatatcttaaagacaaacgggcccttagggattttgtaaatatttaataagtttgcgtcaatttataaaagatgctcagctttattgcatcggttagtaacggacttgagtattgtctgcgtcaattatcaatagacgaataaaacaaacattttttttaaaaaaattcacattcccgtcagtttacattttagcgtctaatatacaatcgacacaaattactaattgtttgcgtctgttagaaacctacgcaacaactcagccactattttttgcgtctgtcctcaatgttgaccgtcgtgttgaccgacgcaaattatgatttttgtagtagtggataccatttcattcgagacacaataactgaaggaaagatcaagctccagaatatttcaacacatgaaaacccctctgatatgcttaccaaaccacttcccacagcaaaatttaaacattgtttagacttactacaaattacagcttagtatgttggttttttgatttactttctgttatttgtaagtctgtaaaatttcagtttagagtctttattttgattctgtacattaggttcctaggtggagatttatgaaaggttgtttagttaccaaatgtacacgtgtcatgttagttaggctctagttcggtatgttaggtaagttagttattaactaactcctagctattcctaaggcatatatataaatgtctaactagtgctacaccaatgctgtaacattcatacacactcaattaaaaggcaatatacttttactgaagtttaatcttgagagtttgagagagatcaatgcaagactttgcataacaaacttgactttaaatttttattccaatagtataataaattttcatttataatcaacataatcaacaataatggctcaaacaaaatgatgctttacaaataatattttagagtaataacacacaaaaataaaaaaaattaaaaagtcaacaacgtatagtcatcaatatatttataatcttgaatagtttagaataatatttagttattatgctattaaaaaaacacttattttgtttttttttactatgtaacaattaatagcgacatgcaaaatctaataaagtcataccaattgaggatcttagcactacaactataggagtatggctcagtgcatgattgattcgaaatcatcac

SEQ ID NO: 73155 - DNA, 1405 bp, Cannabis sativa
atacttactctaggtaaatagtgtattttaatttgattcccaaattactcattccaatatttcaaaactcacaataactcatctccctctttcttttccatctctctcacagtactacaaaatgagtcgttatagcttcctttatttcaattgattaaaaaaaatttaataagaatttggaggattggtttttattagttttgactttttggtctttgaaatttgacatttaattagggatacattataacatccatagctatagagtacacccaatatctatacatgcatattttctttttggtagactgggaaaagtgaaacattgtattgatccttcaccagcggttatttgataattatcattgtcataggtacacgcagtggctgatgcatgtaacctatgacagtagttattactaaataacaggtactatagggttttaaaatccttctcttcgtcgcattctcctactcgtcttcctctttctttcaagggaaaaataatgaattaaataaacaaataaggtttaaaacctcaaggcacggtgaaaagaagcccactagatcgacaagacttaagcccgaaaagtaaaaaggacgactgaaaagcccataagaaattagatagtaaagacaaaattacagagaatgtccaagctcgatcaaagctaacataaagtctcaatttagatataaaggaccgataacacttgaaataatgttgagttagaacaatgacgacaccgtgtcgagatagaacaatgacgacacgtacccagataggccaagaatagtaccgtgcgagataaaccaaggagaacaatgtgccaagagaggccaaagtaggcagcaccaagaagggccaatgttggcacaacactgagataggccaaagtccacaccatgacgatataggctaaggatagaccaaggtcaatacgcgacgagataaaatagaaaaagtactaagataggataaaatatacctcagttccgtaaagagcaaaatcaagacagataagaaaaattaaatttgagaaaagttaatcataactttaaactaactttaagagaattaaaatagctcacggggacacgtgtcagccacaaatatttaaggaatgactacagagtcatgcatctaaggaatgtactgtgaaaaaagtcaagaactcacatagaacagataaggacaaaaaaaggaccagaaaaaggatgcactatgaacttgaagagaaaagaacccatcaaaaatattgactaaataattagatcaaaaggaaaaactcacaattttcggtcaaaacagtttagctccgtccgtggaaaacctttcgtcttcctaatgatttttacatctaaaattctcacaatttttggtaattcctgagtctttttccct

SEQ ID NO: 73156 - DNA, 981 bp, Cannabis sativa
agcttgaggaacaatttcttatttatttattttccattatttaatgatttgtaaggatttttctttaaattttcattttcaacttatttttcttatcatggttatttacacgtgtgtggtatttttcgaagcgttttgacaccagggaacgcgcatttattgccatttaatgccttatatgtgggtggatttaccttttcatcttccttttatcttgccttggccaccttttgtattctatttaaacaagcattctcctttgttcatggtgtctctttggcatagcttctaagtttctctcttcacacgtatatattttttgctttcttttcccctgcttcagaaatgtcaaactcccaaggttctcctcttcccgagtcttcaagcggggatgagttccattatgacgtcggggaccgatcccccccgagtccttcaattttttctcgttactaccggcccagtggcgaagctattgttggaaggatgatgagggcttacagggctagacgcaacgatgcgtgttcgtcttctgatgaggaatggctacagaatttctttgagaacgagggacataacatttcaaccaccacaagggtccccgctgaattccacgcccttcgcctccgcgctgagcgccaccgggataatcgtcgaatgcaagctcggaatcggcgggcttgggatgaggacttggagagggagcgtttagctaacgagaggcgaatggaagaatgcttaagggagggagctcccttttacccctggcttccctacgggctgtcgtcggtgccttaggagggttgttccagggtctaacgtaatcccgggttccctgtgcatactttgctggcaccatcccgaccgcgagcacttctgactcctaagttttaggttttgtttgctgttttttatttccttgtgtatagtctttgtctgtattcgatcgtcgtttagtatgtctctttttttttttttttt

SEQ ID NO: 73157 - DNA, 1931 bp, Cannabis sativa
tataattaatgtttgaatatcctaaatattcatctgtagtgaagtaggttctgtgagatattgtactacggccggatgggtgtaataatatgcatgttagttgaatatcttaaatattcaaccatagagaagtaggttatgcaaatacatttactgcggtcgaatgggtggataaattttgtattgttaatgttattttgtttgttttgtattattttatatgttttgtttgttattttaggcattttttaaaaattttgggaacgtcgaattacaactgttatgctgctaaaattttggtagaattaggataaattttactaaagaagcataaatattgaaggaaaagtacatagcataaataactagttaattactagctagtcgtaagaaattaagtgacataacacaaataattatatacacatttatataaactttaaaattataaatgacaaacaaacaaatgaatgaattcactttagaaaaagtcattctattcttggatccattccaatcaactaaacactaccctagttagttaattacaacttatacaacttaataacgtgcactaaactaaaacaagaattatagtaatatttaagttaatatgaattaattgtgagaaacctagttaattacattatgtaagtagtaactagctagttataattagttactaattaaatactaaaatttttttgttaggatttttgttatggataaatcatgaatgcttgaggagagagacagtacgatttcaagtaggattcgatacatttttagagtttgccttaaagaattcaaaaaatccaaaacatattcattgtccgtgtgtagattgttgtaatagatcgaaaggaaatattacgatgattaagcaccatgtgtatttacgtagtttcaatagaagttatactacttggtattggcatgacaaatatttagcggggggtagatgatattgagggtaatgattttgatgatcatccattgaacttgcttgacgaagcacaggaggaatttcttaatgatcctaaaaatttcgataattttctaagtgatgcagataaacacctgttcgtggttgtaaaaaactaagattaccaacaatggtaaatttttactacatcaaagcagaaaatagagtgagcgataaatgttgtactcaatttttagctgtttttaaagatatatattttcatttgacaactgcttcctaaaatctacatatgaagtgaaaaagactttaaattccatgggattgaagtatgaaaaaattcgtgcatgtctgaacgattgcattttatatcgtaaggaatatgcagacatggattattgtctgacttgtagtttatcctgccataaagtaaacaagagtaaagagaatagcaaatgtatctcccaaaaagtgatgtggtacatgcctttgattccatgacttaaacgattatattgtagtgcagaacattctgaaaatttgatttggcatgagaccaagagagtgaaagatggaaaactcaaactacctgcagattcctaagcttggataaagtaaactacataaatcttgaatctaagccaagacatatttgtctcggtctgtctgcggatggagtaaatctacatagatctctaagtagtcgtcatatttcatagcctatcttccttgttatgaacaatcttcctccctggttagtgatgaaacggaaattcaatatgctttctttaatgatatcaggcccgcaacaactcagacataatatcgatgtatatttggaaccattgattgaagatttaatagaattgtatgagaatggtattcaggtctatgatggttttaaaaaagaattcttacttgtgattcaggcaaacataaacgaaaaaagaaaagaaaacgtgtctaatgttaggttttgtgccctaaa

SEQ ID NO: 73158 - DNA, 977 bp, Cannabis sativa
  modified_base (64)..(72): a, c, t, g, unknown or other
agaccaagacggatattcctaggctcattggcaaaatcaggccatctagcatcaattgttttcnnnnnnnnngagtcagctggatgtctcatcataccatctttcactctatcactggcatcttgtgtttgataggcatcttgtttcactttagatgtttccctctctgtttgctgcatttgctacacttagtgtttgattaccactcagtttatggatttctactgttgctaacttgctatttggtactgatcgtttccattcaactctatttattcacagattgtgcgtaagtgggagactaacaaatcttggcttcctaaggaaaaaattgatgaggtgattaattatactcttgcagtctgggtgctcataatctcttgttttattgaatgttcagaagttagttttttatgacttacattgagggattttcaggtgttaagtgatgctgacaagttaaagacttggttggatgaaaaggaagttgagcaaaagaagtatgaagtatgttattttataattactatttagtcactaagagtgtataattatatttctctactttgttttataattgctttgtggattacatcaagttgaccacaaagaattacaatgattttgtcaaaaagatgtagataatagatatagaatggtttgactaattgtatatagattacattttggagcttttttaaaagtgatgttttggttagaaagagttttaaaagcttgaagcaatacaatcttcttaaaaaaaactatatatttagattgtataatatatataaattttgattatgtatatcttttttatgggggtttatgtaatccctcaatatgcttcgaggtgtgagatcccacacataagacaaaattcttttactatagatccaagtaaactttttattatttgacctctcactacaagtttctcaaccgatttctagagtattgtaggggaaaaacttatt

SEQ ID NO: 73159 - DNA, 586 bp, Cannabis sativa
actcaacaaaagaaaaaagcaccttgttggctctgcgccattattgtgggtacgtggtctcagctgcaatattcaaaagcagggacaggggaagatctagcacaaaacgtagagagttcgcactgcattaccaacagaaggctagcttccattccatggtggtaatgcagtgggaactctctatattttgggctagaaaacaaaggagaaatcgaccaaatgaatcccaacctatcctaacatccctttatataactctgttaatttcttgcctttcaagaaaactaactaactttttttaatttaatttcaaaaaaatcaattaatggaaaatcaatccaataaaatgtacgtaaaatcctcattacattatttgtgccccaagaataggaactaactatagatattttcccgatattaatattcctattaatttgtcccatcctaaaaaagtcttattaataattcaataaaatcagcttccataatcaataaaatttttaatataatatatgtacgtataagaataatatgttgatatttttatttacgtggcacccaagttaattaaaaaataatattccta

SEQ ID NO: 73160 - DNA, 1397 bp, Cannabis sativa
  modified_base (1140)..(1140): a, c, t, g, unknown or other
gcaggacagccatccaccgagcaactcgaagcagacattgcttccttatctcgggaagtgaccagtttccaagacaaaagagagggtctacagacccttctttgtaggttggaggaagagaagaaagctaaggaggaggagcttagggctaaggttgagaagcaaaaatctgaggtggtgaggctcggggagaaggtaaatgccttagagacagctggtctggagatattttatgacctttggaaagctaatcctaaggaaaactttgattacttaggtaattccaaatacatgtttctcgactactgcgctgctctggcggcttacggggagcctcaggcaaccatttccacctcacctaccgatcagagtgttgagcctccttccgaccagaatgacggttcttaggtcccttcaaatccagctgatccatacaaagagcctaggactcctgccgtttaagtgcttctcttttactctttttttttgttcggccataaggccttttttaatacaagatgaccgaccaagcggtctctaaacttggaacatatttttcatttttcgaacaactagcagaccgggcatccttcaatcccgagtttgaatgcttttgctattcttaatgaatttcatcctttgtttataatcatcatgcaattgtgtttgttttatttttttaccaaatgttttgtacaggtataggtgcccccaagtgaccgagcagacttatgactcttggtcacttttttttacaagtatgcttttttgtctgttcggggttttggattcgaccaaaccctttgtacgcactggatggtaaattaataacatgctaataaactcgacttaatttggaattttaataaaaatctttattcatttattgatcgaaaatatgtttgttaccgtagtaacctacatcaaagctattatgttgatttgacctgatctttagcttaacatgaacaaaaaaaattgaagataaaaatcgtactttcaaaggtggtcatccaacctgagtacttaaaaattttatctgaacctttgggcgtggtccgctcagaaggccattcacttcagggcaaatgttcttttatttagtacttgatatggtcatccgacctggtacttctattngtagtattttcttaaatgttccccgttccaataccttggtactagaacgagttgcattttttcatcatacttacccaacttttatgcccttgattctagaacttcgaccacttgatatggtccttcccagtttggtctcagcacacctgtcgtactgtcttccgtgttcaggaatactcttcttaggaccatatctccaacaaataatttttgtgctttcacttgtttattaaaataccgagctactttttgctgat

SEQ ID NO: 73161 - DNA, 861 bp, Cannabis sativa
ttaatattcaaaattatgcatatttatttaatccatatataatgctaataaaattacgcatgtttggtataatttttagaaaagctaaaaattactttttggaagagttgtgataaaaaaaaaatgtttagtaaacagtttgaaacaacttattaaagaatttataaaaaaactacagtcaaaagttaaaattggtacaacttaatttttaaaaaaaattattttaattaaaagactaataaatttatttgtactaaaaatatatttacatatttttatatatttaaaataaataaattataatgaaataaataatatttaatttttttaagaaaaaatatatattttatatttttaatattagcataccacatgaagttagagttttttttatatatttgagtattttattttcttatatgtgataaaaatataatttaaaaatattataatttatttttatcaaaataattaaaaatacatcgggagaaataattaaaatatataaaaaaataaaaattttatatatatatatttgtgattataatgaactatattataacattattatcatgatcattataatataatcttaacatcttagaactctttaaaatttataatttaccaaataatttgcttattttttttccacagctactttttctcacagcacaactatagttgtttttcctcacaatacagttgtgtcaaactagctcatagataccactattaaaatatgtataccacgctaaattttttatatataatcattatatatagtaaaataaaaactaaatatcatcttaaataaatgatatactatatacaacaaaaaaatatataccatacaacaaa

SEQ ID NO: 73162 - DNA, 1100 bp, Cannabis sativa
gggcataaaacccaacatattgttcttcttggttggtatgtgatctcaaacttgccgagctcagtggcctatttgagtagtcgaccgaatgctttaggttttggcgaaaccttacttagcggttgattggggtacacttttatggggtgtgcctggaagtagggccttagctttctggaagccaaaagcaagctataggtgagcttctccatgagtgggtacccacttttggcgtcaataagccttctgctaatgtaatatacatggtgttttacaccgtcttcttctcttgttaggataacactcacaatacgttttgtggctgataggtacacgcctaggtcttcattatctagggctttagacagcactagtggttcagccatttatttcttcagcccttggaatgagttttcacattcctctatccactcaaattttttgttacctctaagaccgttgaagaaggttatacatttgtctatatacttggacacaaatctgcttaatgcagcaatgcatcctgttaggctttgtacttccttgataattgtcagcgacttcatgtccaaaagggcttgaatcttgtctgggtttgcttctattcctcttgtgttgactatgaaaccaacgaattttcctaagcttacaccaaaagagcatttaagggggttgttcttcatgttttaactacaaaggattttgaagcactcgtctaggtcatccgcgtgcccttagcctttttggacttgacaaggatgtcgtccacaaacacctcaatgttgcagccaatgagatctacgaaaatcatgttcaccagcctttgatatgtggcccctacatttttcagctcgaaggacatgactttgtagcagcacagacctaggtccatcatgaagctcgtgtgttcctaatctagtggatgcatctttattcaattgtaacctgaatacgcatccacaaaactaaggatttcatggctagtatggcttatataagatagtcaattttggggagcgggaaccagtcttttggacatgctttgttcaggttggtgaagtcgatgcatactctccacttcttgttgggttttggcacca

SEQ ID NO: 73163 - DNA, 701 bp, Cannabis sativa
aaaagatattgaggtcaaaaaataaaatttgggatatggagttgactttgtacgtagttaggtgtgttcacatgcaacgatatcaattcttgaaaaaagtgtatttttttacatgcaaattattattagagatatataggtaatttttcacgagctttgtctcctttctaagatccttataattatttttatagaaaatttttataatttactctttaaaaaagttgtactgatatatttttatttattttagtatttgaaataatttttcagatatattttttttcatggttaagtacattatggttatttaagacattgtataaaattttaagaaattcagaataatttaacacgtcgataaaaaattcaaatattatgttgcacgcatgattattttattttatacgtgtgtgaataaactgtttaaatgctggcttttatattgtaaattattttatatctctcaaaattttgtaagatattttaaaattttaaataactatgaatatgataaaaaaaattggattatttttttttctaaatggtacattagtacatcctttttaagacgatgctttgtagaaacacccaatattatatatactgcaaattaattttttttaagtaattaattagtattattaaagatttttttttgagggaaagtattattaaagatttaaaaggctaattatgac

SEQ ID NO: 73164 - DNA, 1230 bp, Cannabis sativa
aaacatatatatttcagtttatacatataaatgtctaacacactatggatgaatatgtaagatattcaaactcatcttacatgtatattattctgcccatctgaccgcagcacaatatatcgcaaaatctacttcactacagataaatattttacatattcaaactctactaagaattcatgattaattaataataaaagttagtaacatcgagctagctagaaaccgatcaacacaaaataagtcggatccttgcaaatttacctcacagcctacaatgtaaaaaatactacaaaattaaaaaaattctatattttaactacttattagttatatattttagctagttagtaataaaaatacattaataggaatgaaaattaataatttattaagtagttgtaagtaataatttactagctactaaaaaaataaaaaacacatgaataaaattgaaatcaaatagaaaaaaatgataaaaaaaaaataatttctcaacttattttagaaattaatttctaaagtttttgttttaatactctcatatgtcattctcattcataatatttaacaaaactatttgtctaaaatattcaatatatacatatacaatacataaaaaatatacaatataattataatatttctatacatacatatacaatacatatacatgcaattacaaaatatgtatacatacaatacacattcaataaaatataaaatacatacatatatatacaattaaaaattagatttttaccttattatcgaaattctaataccgacaaaaatctggccaaccatgcacaaccttaaaaaattataggaaaatcctaaaaaaaatttacaaaataaaaaataaaggaactttcattaataaaattattagagattagacttatacattaatggatattaagattcaacgatttctccaccaaaagtggcggccggagctacaaccaccacaatcaccacctctaagctcagtttaccctaaaaaaaccaaacaaaaaacgatcaaactctaagggatctatttgtgggtatgaaaagtgcaagatttaaaaaaaatgggcaaaaacggatgaaaaatgaagaaatgaggggaagaaaggggtggttgggcgagggtttcgtgggtttaagaggaggaaagtctgctggttattttagggtttgaggaaaacgatagttggagaggattatataaagacatatggcgtc

SEQ ID NO: 73165 - DNA, 1025 bp, Cannabis sativa
ataattaaaatatgattttctttgtagtggtgttaatggtctcttgattgataatggtggtcctttctcctcttctttgatcttgtgcaatatgaattaaaacatacagagaaagatagagtaatatcttgtaagacaaagtaagagagtagtaggtttgtagaagaaaaaaaaagtaactcaaatgtctttattttttttagtagtgaaaaatctatcttattataatatattattatatttattatctaatgaaaatgtaatatatatgtaagctagaatatgagagatagcataaaaaactgatattataataattaaattagatggttgaaatttttgagagtgagcaattaaaataattaaaagattttttttagttaagaagtaaaagaaattttttttatagcatgggcttaagcccacactggtccttcattgaatcggcctttgcttttagcatgcgccaaatttaaactacattatacactactattggtatttaattttttgaatatggactaaaaaatacatgtacaccacatttatagcactccattaaaaatactcttagccgtttgttttctaaaaagtaacatttttgtaacatctaatggttcccagcaatatgagtcgatgttaaaaacatcaaacacattgaggtactgcatgattggcctaaaaagtatttctattaggcatcagtagtgtctagcactttctagacgtgtgtaacgccctattagttaggcacgctacaattttttcttaattattgtgcactctccatgctaatcaaaagtgtttgttgaaaaatgtgaataattaaaattttcatattaaactttaatcttaaatatataataatttacataatttggaatcccgttttaaaagttacataagtttacaaaatacgtgtattacaaaagtcatcatctagcgactatcaaaagtgagcttaaactgtcccgaagaccctaaacactacatgtctaactgtcttgatatgtataatcttcatc

SEQ ID NO: 73166 - DNA, 2087 bp, Cannabis sativa
tctacaagtttcttatgcttcctggaagatgcagcccacccgagatcgtggcaacatgtctgtccattggaggtggggcgagtttgggaggatatgtggttccaggtcctggtgcaagtaatgctaccacaacttgcgctggtagaacagggagtgtaggcagtgatgttataggagcttgagaacgacttaccccctccagaggatttatggcattttgctatcctaaaatgatcatatgctcgtggctgaccccttgtctgagataaatcattgaaatttagacccattatcccaaatgtcccgctcaaatcaaagtctcaatctcatctttcaaataatcacattgttcgtcatggtgtggcccttttctccgtgatactttcattccttatttaggtaacgcctattccttcctccgtgcaacatccgtagaggctttttatagtggaccatattgtaggtcgctctgtaaacatttttccatgtgtcaatcaaactggtatacttagtgtatttaggatcgtactccttccttgacttcttttaagagccattacggttattgcctttaccccttcttttgttctgagtatggctcacatttgatttcggagcctctgtcttctcctgcccgagagctatacttcacccaatctgtgctaccatgtacccaaaaaaatgtgtaggtgcgagaccggatgtaatgggtttgtaaatagttggagaaaactaagtcccaggaagagttaaagttggagccagaacttgaggtgtaaagctaggtgtagctacgaaagggtctagagccagagggacttcggaggcttgtatgtaagcgtcctcaaggttgataatgcctgaattcgtttttgctctctttctttgcaattctccccatagcaaagaaccaacatctagtctggattgaagggccatcaacttcatgttatcactgactttagctttagcagtagcctccatcatcctttggataaaagcctacaggctttcgtcgtgttactactttacattggtgacagtgctgactcccatgtccttatcacgcacaccaatgaactgtttgtggaaggttgactataagtctttcaagctatcaatcgatcctagagccagttgcttccatgagtcttttgcggacttggtcagtgttagggaaaagcacaaacacttgtcatcatcgctaacacgtgccacttgcatcattttattgtattttgctaagtgtgctcgcggatctgtccttccctcatacaactcaatgtgcgacatcttaaagttttttaaaagcaaggtctctgcgatcctccttacgcaaggttctgggtcctcacctcagaatctgaaagggccccgctctgattttggactagctttgttagcgctgctatctgctcctctaacctttttatttcgctattgggaagatcacgtcccctcattttttcactaaggtggtttctgagatcacctccacgtggcctcactttttcacttttattaccttttttcttgcatccaatcaccgacaaaaggtctatagtggaccagctgtcctcagaatgtccatcattcgtccttccatcctggttaacagaatcactagggtggttcttccatcccttggacttaagtacctttgtactttgcccttttggcacgactttgcctctaggagcaaaagggtgtctaggctcgaaagcactagtggccttatgcatcctcgagggctggctgatcagattcgtgtctttccaaggaggtttaggagcagactcctgtggaggctcacctaccttgcatttaccttatccttgcaaggattcaaggtttcagtctcagtttgcctaggagcatgttctttagcaaatacttccaccgaagggtcatcgtcagactccgacaagtccttgaacttattttggagacattccatcattttcttcatttttttactgatttttgtttgttttgctaactccatctgagtagcttctagttctttagtcactggaagcaagtttggatcatggtcatagtagtaacctgttggaaattattttacc

SEQ ID NO: 73167 - DNA, 1560 bp, Cannabis sativa
tcctaactttgtatccacaatggcaatgtggtaagaagccatttaaatacttcagaatgtggaaaaattatcctgaatttgactctaaacttcaggaaatttagacacaaacaaagcatggctccaaaatgtacacattggtcagtaggcgtaaagctttgaagcaggtgtttaaagatataaatcagaagggtttttctgatctacacgctgctactttaaaaacaaggctggaattggaaagtattcaagagcaactacagaaggatcctctaaataatggtctaataagtattgaacaggaagtgagggatcgatatgtctaagtgtagagaaattattccccatttttgcagcaaaaatctaagtgtgcctggatacagaatggagactcaaatatagccttattccatgcaaatatcaagcaaagaatctgacataatcagattttttcaatagaacaacaagatggagcaagagttcatgagcctcaacaaattacagatgcttttgtatcttactataaagctttgttgggaactaaactagaaggaaggaagaaagtgtcaagcagaattgtaggcagaggccctactctctctctcaaagccaagcagaaatgctcacaaagaagtacactagggaggaggtgaaagaagctgtgtttggaattcttggaaacaaatcacctagccctgatggttactcaagctttttcttccaagataattgggaggtggttggagaggaagtttttcaagctgttacatccttcttggaaacaggtggaatacttaaagagataattctacagttcttactatactgcataaaatgaaatgtctaaacattgttaaagactttagaccaatagcttgttgtaatgttgtgtacaaaattgcaaccaagctattgtgctctaggcttaaagtgattcttcctgatttagtttcccaaaactagggaggctttattaaaggaaggtttattgggcataacattatgatatgccaagatctagttaggcactatagtaggaaatcgaacaaggctagctgtattgtcaagttagatctacagaaggcctatgacacttttgggtgggattttataggagaaatgcttcaagtattccagtttcctcaatctttcatctccctgatgatgaattgtgtacgaactcctaaattctccctcatgtttaatgggacattacatgggttctttgaagcaaggagagggctaagacaaggagatcccatgtctcctttaccttttgttctaggcatggaatatctctcaagaattattgggaaagtgggacagaaacaagactttaaattccatcacaaatgtgctggaattatattgaatcatcttgcttttacaggtgatgtgcttctcttctgcaatggagatctcaaaagtattctatacatgctacatggccgcaagctattctcaataacttcaggcctacaaccaaatccctccaaatcagttatctacaacagtaacatgtccagaacaaagctaaaccagattgtaaaagcatatggc

SEQ ID NO: 73168 - DNA, 1034 bp, Cannabis sativa
tttttaaaaaaaaaaaaaaaacggtgtgcattataatgatagttaggggtggacagccgatccaatctaatatttttttactcattcaatctaatccaatcagtaattgaatttgaaaaatcatcatccaatccaattcaattagagctcaaaatccaatccaattactaattggattggaccgttttattaattggatatccaattacacacctaatttcaatattaacttaaaaatatgaagaaaaatacgtaaaaactataagtatcaccttttatttaaatttaatatttcataaatgcattatcgttacaagtgtaatataaccaaaaattttaaataactaaaacaacaacattcttaaataataaaatagaacaaaatatcatgaaaaaaacaaccaagttttacaaatcaacacacaaaaaaattctaataaatatatgttatattttttaatattttttattatataaataattttttaacatatataaatgtaattggattggatcagtttttaattggattatgagattgacatcaataaccgatcaaatccaattagaatctaacttttagcatataatccaatccaattgaaattggatatccaactttttgtaattagattggattagatgatgcccactcctaattataataggaattttcatatttttgagaaattttaaataacaaaatttttacatgaaaaatacaaattgacaatttatttacaaaaatatctccataaggcgttgacaataattttatctttaataaacttttatttaccaaaatactacttaaacatatccatttatgtcagtccaaagtagcttccagccattacccttttaaagcccacatttaaaacccatgaaacccacctcccagccataacctttgccatcttcttcttttaaatgtctcctttatcagtcttttttatatatctttcatttcgtatatataatggctattacctgtggctctacttctccatctccattgccaaaaaaaaaaaaaa

SEQ ID NO: 73169 - DNA, 1106 bp, Cannabis sativa
ataatttaaattttcttgatataaaattcaaaaacttataaattagtcattaaaataattattatatgataagtaattaaattgataataataaaaagcctattttaacaaatttgatgttttcttctatatttctattagtatatatgttttggtttgaatatatacattaatcgttaaaaataaatacacaaattaggtattgtaaaaaaagagaatcatgaataccaaaaaaaattattgttgataaataaataatttagaaattttaaactgggaagaaaatgaatgattatagacttattaactataataataaaaaatttgaaatttcatttcgatttttaatagagaaaaaaattataataaaaaagagactcaattgtacacgtaaatgaaaattatatatgttaagaaaaaaattaagatggactttaattttattaaaagataccgcatagaaatttattttaaacctcttcgatacaagttaaactaatagcatgtatataacatgtattaacaaagaccaaacactctataattctagtcttatatgttatttatttttcagtaactacgtttcaaattatagagtcaaaatatttatatatatttattttgtatttaataaaattcatataatgtgaaatttttaagtatacatttttttctttttgatgaaaaaggagaataaatttaatataatatgaaacttttaagtaaatatttttttgaagaagaaatggtgaataaaaatgaatatgaacttttaattttagtgttatgaaaaaaaaaatcattggtgtgtcatgtgtgtataaattattacatataatctattattatatgaataaaaactttatatgtctttttaaaaaaatttaaatacaaaaaacaaataagattttttaatttatattaattaatagagttgtgaaaaataactaccttgaataattattatatataatatagttgtgtgtataacttattattatttattgaaaaaaaaagtttatatatgtgccctttaaaataaataacaagaaaaaggaaaaaaaaaacaaaaaataaataaaacattttaatttatattgatagag

SEQ ID NO: 73170 - DNA, 1010 bp, Cannabis sativa
tcatgatattattattcacaaaataaaagaaagatagatttaaattgagcattgacatagtataaaatctccaacacgacataaaacacacacacacacgcacatgtattaacatcagatcccgaaacaaacacttaaaagtatgaagagcaccttctttccctctattgtttcaggaacatcaccgcttgcaattcgttgggcaagtccctcagcaattgcagttttcccgacaccaggctcaccaataaggcagggattgttcttagttcgcctgcccaaaatctgaaccactctttcaatctgcggctgccttcctacaactggatccaacttaccctgaaaagaaaataaatataatgtgagaattttttaacaagagcagcaaaagacagcaattttgcaatacgtcaaaaaatctcaagtttcaaaataacctcttcagccagcttcgtcaaattggttccatattcttccagcgttggcatcttggtaccactgctgcctcctccaacaccagctccaactgcttctgtgctctcacctaccatacgaataacctgcccaccacaaggaaagccttagctaaagaactccagtactaattataatcaatcactttgattcaaagcaaaactgaatccattgcttgcctgtgtgcgaatattactggggtcagcacccaaattttcaagaacacgagcagcaacaccctcaccctcacggagtaggcccagaagcaagtgctcagacccaatgtagttatggcctgaaacatttaataaggttgagcttttcaatcatcataataggaacacacacaagcaacgaacgtatttaaataatgcctacttaattgcaacaagctctaataaaatagattgtaatccaagctgctccacttatagatcagctgttttttgttttaccaaaacttttaatctgaagatgaaaaataaatctactaaagggaagaaatagattccttccatctaagagtaacaagtgac

SEQ ID NO: 73171 - DNA, 791 bp, Cannabis sativa
aaaccgtaaagtaaatttgaaatttgaaaagaaaaagaaaaaaaaaaaaaggttaaaaaaacagtatatggagtaattccccaaaatattaagccaacaaaatctgttaaactaagaattacatgactatattttatatataaagatataacgctaaacataaaaataaataaataattataattttaggtaatttatttaagaatatctttaaaagtttacaaaataaaaaaattattctaacttattcaaaatccaaacgaaacaggcctaaataaatatcatcttcttcttcttcttttttgaaagaaaaggctcatctcttttgaagtacaacaatacatgggcttttacattcaactattttcctttttaagtaataatgatttacttaatcggaaaaaaaaataaacaaatatgtattagaaactttaaaaagattgtcaaaaaaaaaagaaaaaatctgcatcatctcagctaatcgaattttaccttcacattcttcaatggtgtaaacatgaagttttcagaaaacatagcatctttatttgcccattcaaacattttaatactttgtcaaaataaagttcataggtaacaaatataacaaatgttcgattcttttttatagggaacatgtcataatatcatgagtagttcagctcaataatcccaaataaaaatggacattgcaaatttcacaagctagataattaattaaaattgaaaccttattagtattttcttaattttttacacaaaactgaattcttagggtgtgtttggaagta

SEQ ID NO: 73172 - DNA, 1396 bp, Cannabis sativa
cgagttcgaacctcagagttacaagcaggccattcagttcaaaaaatggctccaagctatggacaatgaacttctagcactcatcaccaataaaacttggtccgtggttcctctcccacctaacaagcgcgctataggatgtcgatgggtctacaaaattaagtacaacagcgatggaagtgtcgaaagattaaaagctcgtcttgttgctcaaggctacactcaacaagaaggcttggatttctttgacaccttttcacccgtggccaagatggttactttcaaactcctccttgccatagttacgattcaacaatggtccactttacaacttgatatcaacaacgcattcctcaatggtgatttggatgaagaagtatacatgcaaataccccaaggtctccaacttcccccttctatctcaggtgacaaccttgtgtgtaaacttcataaatccatctatggacttcgacaatcctcaagacaatggtataagaaactcaccgatgctcttcttgaagagggatttactcaatcacaagccgactacaccctcttcactcgaggaatacatgatacatttgtcgtacttcttgtttacgtggatgacattatacttgctggtcccaacttgaacattttacatcagttacaagctgccctccaagtcagattcaagcttaaaactctcggccctcttaagtattttcttggtttcgagattgcaagagccaactctaatctttttctctcccaacgcaagtataccctccaattgcttgctgatacgggctacaccaacagcaaacccgccaaagctcccatggatccgagactacgactaactgatcaagatggggaccctcttgacaatccatctcactatagacaactcattggccgcctcttatacttgactctttcccggcctgacatcacatttgcggtcaatactctcagtcaattcatgtcttgccctcgaacatcacatttgacagctctacaccatcttctccgctacctcaaaggatcccctggtcaaggaattttatactcttccacatcatctctccatctccggggtttttctgattctgattgggcaacttgtccaaccactcgtcgctctactacgggatattgcatttttcttggagattgcctcatttcttggaaaacaaagaaacaaccaactgtctctagaagttctgctgaagcagaatactgcgccttggcctccaccacaagtgaaataacatggatccaatacttactccaagaccttcacatcattcaacctacacctgcattcatctactgtgacaatcaatcggccatccacatcgccaataatccaacctttcacgaacgaaccaaacacatcgaattagactgc

SEQ ID NO: 73173 - DNA, 959 bp, Cannabis sativa
aaacttcttcatcaaaaatcaccaggtaagaaagtattatgaacatccatctgatgcaagacctaattttttactactagaaatgctaagaaggcacgaacagtgaccattttcgtaactggagcaaaggtttcattataatcaaccccttcaatttgatggttgccaaaaattacaagatgagccttaaggcgctcaacctgaccatcaacatgatatctaattttgtatacccattttgagccaagagcctttttatgtgaaagtaagacaaccatttcccaagttgcattagcttctaaagcaataatttctttttgcatagccttacaccaaccttcatctagcatagcttcattaaaagaacgaggctcaatgcctacagtgatagctgtaaggaaagcacactattttggagaaaacttattacaattcaaataatgtgccataggataagaagtatctaaggagatagaggaaggtgatgagcacgtaaatgtactcaaagattgtacagtggtgttaacaaaatcacaaagaagcacagcagaattcttatcttgcaatccacgaccatagtcgtccatgggcacaaaagttgtaggcgcagaaggcagagctaatacaatattagtcccaatttaatagctatttggtcatcaatcaaagcagactccaagtcatctaaaaactcaacatcaacccccactcaagaatcaggaaacaaagaagaagaagcaagcttgtgagaattagacacattctcatacgaaaattcatttttatgaaacttgacgttgagtgatacaaaaatgtcacatgtctgaagatcatacaatttccaacacttcttcccaagtggataaccaataaaaacacacttcctactccgatgagaaaatttataacctttggctttttgattatgagcaaatgctaaacaaccaaaaaccttaagt

SEQ ID NO: 73174 - DNA, 776 bp, Cannabis sativa
taccctaacagggtaaaaggctgactacccaagtaggaatgagtttggctttccgagcaactcaccaagacttggctacttcagaatgatctcgtgaggtataagcacgaagacaatccctacaatcgtgggattgagtcagaggaatatggcaacctgttctaatttcctattttgtgtatcataattatgtaatgaatattatttcctattttatacattgtaattaaaagggaaaccctccctcatgcattaagctcttataaatagtgatctagcttcactgagaaagggattgaaagaattgcttcagagagagatttaagagaactactcagagatttcattgtaagagctttgagagagaaaaacactttgttctttttttttatttaatacaatttaaggggagtaggctattaccacactaacggggctaaacctctttaatacctggtgttctttattacttattgatttttgataaaacttgtaataataaggttcgtcagaaaagtcgttgggaaagtcactactatcaaaaaagtcacttgaaaagtcgttggtgccagaaaagtcgacgaaaaagtcactggaaaagttgtcggaaaagtcaccgtcagcagaaaagtcaccagaaaagtcattgtcgctagaaaaagttactgtaaaagttaccataagtaaatgtcttagatataaacaaaaaatagaaccggttctattacataataaataaaaacaaataattatttgtgttatttgtttttattcat

SEQ ID NO: 73175 - DNA, 984 bp, Cannabis sativa
aaatgaaaattatacccgcctaaagtatccataaacaaaaacatatcttacttccatgattatcgtgcagcacaacaaatcaatcaagtgataatcttgcagcaaaaaaactcaaagcacatctgtgtaaatttttgtgatatttatgaatacagatgaataggaaagtgaaaggttgataagttcatcaataaaactaatggaaagttatagcagccacccttgctatattctgtgatgtttaaataaaaagaaatgggaggattttgaagattcagagaatgtagcagaggttctttgggagaaggacaaattctgggagcaacttgggtctacaagaccaaaggttttgagggactgactttctttccaagacagtagagattgggaatgatttctgcaataagctactattttaggtttatatctaggcttattttgttaattcttgtgttgaggaaaataggttgtattgaaagctgtacctattcttatgttttcacatgttttgttacattggtgcacctccgccatgagtgaggtaccctaataagtttgggaggaggtcaatcttagacatatgaccttttaaataaaaatcatagtgaaaagttataaatggacaccccttgtatatagaattatagacagattttaccatatatctatatactatccccctcaattgtgtctcaatttgtaccttaaaacacataattttttctatttatcctcaaatataacttagctatgaaatttcccatcattcatctatgaacggaacccctatttggcaatatttgtcagtagttaatattgattttacacttattgctagataaagacttatagatatacttgaaaataaacatagatattacagtggtcttgaaagtagatgatatgataatttacaattgtaattttccttaggaagttgtattgcttatactattacatagacaaagacttatactattacat

SEQ ID NO: 73176 - DNA, 593 bp, Cannabis sativa
ttagagaagatttctactactccattatatatgtataaatatattaagaaacattctcttcattcatatatattatttgtatataataataatatatatacaagctagagatgcctctttaacaggagttgattacaagaaattagtgataattttttaatcacaacataatttttttgtaactagctaaatgtgatttttagcttcaacaaaatgttacttttacaaattgttactaatttagtttaaattacaacaagtattgtgattttgtgattaattgtaatacttttagctacagacttattaattacaatatagaaatcgtgatttataattagttacaattttttaacttttaattataaattttattgtgacttaagtaaaaatttttgtagtggtcccgctagctctcaaaggaaatataatgtatagtataatcatttaacttgcgtatattggcaggctacctctaggtttaattaagagatttttaaatctcattatatagtatctcaaataaattatagtaaagttactatatatgtatactttattaaaatatatataaaacacagaaaaatgcatac

SEQ ID NO: 73177 - DNA, 859 bp, Cannabis sativa
acttttccccttgcccaaactctagctagaagtattttcctttttgaccttagtcagggaaaggttatagcattcccgggcaattctttgattccctttgaggcaccctaccccattctttgttgggaacttgacgcacaaatgaaaaactgatgtgacagcttttaggttatatagggctggtcggcagaacatgacgttgaaagttgatggaacatcaattatcaggaattgtgccatcacaattatgctcctcgagcttgcagtgaggggtagccggatttgccccaaaggtgcaacactttggctggagaaaccatacaccagttgggtacaggggattaaatctttaagctggagccccatcttctcatatgttgttttgaacaggatgtttgaggaggctccattgtctatcatggtccttgccactgtcttgtttgctatttttacttccacaatcaagggatcattgtgtgggaagtggacgtggataacatctgctttagtgaaggttatagtgggttcccctacccgtggtatttttggctttctctcctctacggccaaaactgcttccttctgttcgtgctataaggctcgggcatacttttctcgagctttgcttgagtctccagctagatgtgtgcccccaataatgacttgtaaatgcccgtccaccggtgtggccattagtagatcttgattattgtctgtgttaggtggccctctggttctggttggccttgacatatttttgcaagtgcgggttattctttctgatttagaattcaattttttgcttcaggttgttgcactcattcatgtcatggccataattcgtatgaaaacgacagaa

SEQ ID NO: 73178 - DNA, 671 bp, Cannabis sativa
tgttctaattattttttaaatataacttacaatcaaattgaaaatgttatgctaccgaaaattcgacagcataacactttacaattgaccattctcaaattttaccacctacacaaaaatcacaaacacaataccaaaacaatttacatacatattagtttatgccacccatccgaccgcagtatatttttcatagaacctacttcactatggatgaatatataagatattcaaactctactaatatgcattttcaaatgaactatttttttttttcaatattataaataatataacataggcatactaaccttccaatatgccgagaagtgattttcgccaaacaccaaaaaaaggaataccacaaaacctatttaccaaaaaaataaatattaactaaataaaattaaaagtatagaattatacgtaatatatacatttacatatacacatatatatacataaatatacacacaaatatatacttttacatatatatacatatatacacataaatatatacatacctatatatctttatatatacatatatatacaccccaatatattttaacatacaattacatatacacatatagcaatagttttacatatatatatttatatacatttatacaaatacacacatatatacttatacacacatattt

SEQ ID NO: 73179 - DNA, 1702 bp, Cannabis sativa
tttagccagtggctccaggaactctcaggtaaaagattagacaaccaaagactattatattactctactaataactttacatgtcaccaataaccactcacaattcagaattttgactatttgtttttgtttgtggccactttctttctttcttcatgtagtaataataataataggaaaaatgaaaaaggaaaatcaaattctgttcatctgtatttgtactatcatagattattgtgatattcccttagagatcctaaagttttttactttttatttatttctttcaatgaaccacatcttattttattcaatatataatattatcataaatatacattcattcatgaaaatgcatcaagaagagtaactcaattaactttctagtaacaagcagtgctctcaaccagcttatttagctttttggttctcaacctctcagtaaagacctcactcccttcacatgcatacctgtattaaacaataaaatcaaaccatgatttgaaagcccattatggtactgaaacaaaatatgccaaatagagatatttgcggcgaaatttcttttatatttgcaatagttacaaaaaaaagtgacggtaaaagtatcttattttatgattttgttgtagtcgtactcttttttggctgttaagtgtcagtttagaaacgcgtggtgacatattttagcttatataatacatagtctaataatatgttggagcgtgtttttgagttgacatttgatggccaaaaaaaggtacggctgcaacaaaatcgtaaaataaatacttttgccgccactttttttttttactagtcatatgtgtaacaattgtaaatgttaagagagtttgctgcaaacatccctaccaaatgtaaggttttgttatatgttcttcttacctagaaggaatggatattaaggggctcaacttttctgcaagcttaacagcttcttcctcagtattcactatctgattaaagcaaaagtatctcccacatgtagatgaatcttccaaagctctgatatgaacatcaaccaaaaagtccacatctacaaatgctaataccccattttcatacatctgagcagcccctatatataccaaattgaagagtgtttgtttgagaaagaaatcaacagaagttgtagtgaagagaatgtaatgtagttagttagttgtaccattgagataagatgttgttgagagtgggttttgttgagtgacacatgggccaaggactaggccagagtttatggaaaccatgttgaccattctgtccatagctaaagcccaagcagcttgttctgatagtgtttttgctaaagcttgccacaactacatatcatatttttacacaaagatataaaagttagagaaaagagaaaggtctaaacaattactatgactgtttgattaaacctgaaaaactaatgggagctttaaaaatttaatttattttttgatatgatagtgtatattgtagttatttaagatgtcctgtaaaattttaaaaaattcgaaatcatttttaatacagaaaatagtgttcaaaatgtctatttcacgcgaataaaaaataaaaaaagcacacatgtaatagactatttaaattttatctttcagattgtaaaattatagaatttcccaaaactaataaggttacattctttgcatctctctcttttttttttttt

SEQ ID NO: 73180 - DNA, 1371 bp, Cannabis sativa
gggggggggggggggagagtatcaatcatttagtaatttggtggaacaaaatgacatcctttttgttcagtactcctgcccacatacatctgctcaaaatggtagagcagagcgaaagcatagacatattgtcgaaatgggcttaaccctcttagctcaagctagcatgcctctgagatattgggtagatgctttccaaactgttgtcttccttattaatatactaccaacaccggttttgcatggaaaaacccctcttgaagttctttttggaaagaaacctgattatcaatttcttaaagtttttggctcagcttgctatccatgctcaaggccttattagtctcataaattccaataccactctactaaatgtgtcaaccttgggtatagtgaatttcacaaaggctataagtttctaagctcaaatggtaggttatacatatctacgaatgtttttttaatgagcaagagttccctttccaaactggatttctaaataattaccaaaaagaaaaagaaaccatggttcaaacaccaattgcctggtttcaacttcctctcttgcagccaagaccacaagatcgaccaattctctccaacaatgaccctatcaatgaatccagggctggtacaacacaagaatttgaagcttttcaagtagcaccaactcgagtgatgtcaaatcagtcacaaccagatcaggtagatctcacaaacaatctacttgttgatttagattttgctgctactaatcccatttcaccagcaataatggtcagtcctagtgctagctctagtgcatctcagcaacatttttcaccacagattgaacaacctaccttacagccgagccatcttatggtaacaagatcaaaggtaggggtgttcaagcctaaaacgtacttaactcacaccagatggaatacgcaccttgaaaatcccagaaatgtctttgaagcactcgcacataagggatggaaccgagctatgggagaagagaacaaagccttgttcaaatataaaacttgggtcttaattccaagaagagaaggtcagtatatagttggaaacaagtgggtgtacaagattaaatacaacgcagatggctccgttgaaagactaaaagaaaggttggtagccaaggggttccatcaaaggcctaggcttgatttcggagagtcttttagccctgttattaagtcctcaacaatcagagttgtccttataattgctgttgcaaagggatgagaagtgagacagcttgacattaacaatgctttcctaaatgggaagattgaagaagatgtctatatgaatcaaccacaagggttcgaagacaaagagaaaccagatcatgtgtgcaagctc

SEQ ID NO: 73181 - DNA, 1436 bp, Cannabis sativa
acacagtttacagattttcttacaattaatttatattaaacactccacttcaaatacccgttaactatacttatgccacaaacaactttaataataataataatagtagagttttaaggacacaaaggcagcaacagcacatgttgttggaggatcaaatcaaaacctggccatctggaagcacgtgccttccatgcgtggtctggtcaaacacgtgagcgaaataaaactaaaggaaaaagtcaatgtaatgaacggtgtgatgatgatgatgtcgtcatctgtaaaatgtggggtcaagaagacatgatttccaccactctatgtatgccatgtgctatctaaatataatctaaactctgctaacgaataatctctacaaaaatacatgcacacaacaatgtttgataaactcatactgttatccatttgcatatatggtgtgcgctattgggggatatgattatgttgatgagaatagtaagatttgaggggatatttctcacttccaatccaaatgtgattacagaaaaagtaaatggtccaaatggatgtgtatgtctatgcgatatatattagactagtattttgacaagtttatgtttggatgttactttgttctgtcccattcaaacaataattttacactacttttcagaaattaggatgattagtagttaaaaagttgaccaagtatcattttatttactttaagaaaaaaaaaataactttctgctgtatcctctagaatgagtctcatgaggttactccgagatgacaattgacaccctcctcatgttggattttaggggcgcacccccaagtattagcttctatccccataagtagttaatgaccgtgtcacactctcgagaaatcctcatcgttagtggctagttcaaatattcaaatctcacaagaaactcaaagacaattacaaacccacgaaaatagtgggatattatcacagaactcagacttcaagcacctccaaaaaccaaggagacggttgagatagctctgcattggtgtcgactcttgaagcgagaagcaccgaccttttccctaaggggtcatccatgacctgggaaggagatctgcgattttgagtacttagagaaaaaaatactcttttattttttgcagtcaagagcctgttcttgacttttgcaactctgattaagaaaacacaagggaagtagactattaccaaaatttgggaccgaacatctttaagttttggtgtctttcttacatatattgcaaaatcttgtatcattatttacatttattgttacgattttggtttaaatttcatttattacgactctgcgtcagttggctaaaaatccagtcaatattttggtactttcattgagagctttgaccaaaatcttaaagtttttaattttcgctgcggacgatgatatataatc

SEQ ID NO: 73182 - DNA, 831 bp, Cannabis sativa
catttttatgcttttggcctatataatattgtgctgttttttttttcaaaaaaaaaaagaaaataacgtatcagtttgtttaagtattcgaatcgtattgtttaagtgaactcgtccatttgctgttcctcaattttgttatctcatttgcttattgtttggtaccctaatatcgcttcttcaaaaaaaaaaaagaaaaaagagtaaagttaatccgtgaaccctgcacccaattttgttctatagagtgacagaggagtttggtttattattgtacttttttaaaggaatacatctcttttcttgtgaatgcttgtagagaggtacaaaaattttggtcattcagtggatttttcttaaaaattgtcaattttgccaatgtgaactttatcaaatttaaaccaaactgcaagtttttctgctgcaatttttctgaaggattaagctcttttgcagggaaaattatatctgttgcttcttggaacgacagctctcagtctggtaacaacgccactgctcttcaagttgatttctgcctttgttcatcttggggtcttattgcggtggttttctccagatagcccgagtgaggtaacaatcttgtcttgtatacatatacatatattatgcatgcatgaaactgcctccacagcaaattacaaattcgagttatctaatcattgagtaaagtaagagttttgaggtacttaggaagttgtttgtcctaccagattggatatatataaaggggataatctttggtcagacagtgctaagcgtattgctatcttggtccacggctctcatgattcatgatattaaacataaaaa

SEQ ID NO: 73183 - DNA, 1185 bp, Cannabis sativa
tttcaaaaacccagtgtaattgataatgttcaagattttgtctcaagttttctgcaggattaccaggatgctcaaattcaatcccctgtctccaacatgtctcataaccattcctctgctgatgtggatcacattttgcttccatcgaccactgctctttttattgatgctgccctgagtactaatgctccagccacaggtattgggatggtttttatgcagggcctgtctcatattcaagagtctgcaaggattttcaagccaggggcctcttctccaatttttgctgaagctcaagcactttatgaagggctccaatggtgtttgtcttccaatttgacaccaagatttatcttttctgattgtattaaccttgtttctaaggtgaatggtatgtggcatgactactccccactgtctactcttatccaacagatcagaaccttcctctccagtttccctgaagctactttgatgcatgtttcccgtcagcacaacggcaatgcccacgcacttgcgaagttagctctcaggttgagagatgaagtctaggcgatttttttagcctcctttttaggctgtattggttcttttgcgttttcttgtaatcagcctcttgttgctctcaatatatatatatatatatatatttaccttactaagtccgaaaagacaataagatttttttttattttgtgtatattatattttgtttgttaaatatacaacatatttagcaaacccaaaatattaataacttttctttgattatatatagaaaaattttatggtaggaatccttattttgttctaataatataatatgagaacattttcttaatcatagatatagtagatttttgaaattacaaattatttattgtatacgtgtatgtacacaattaaagtcttactaaaaaaaactgaactgtattggtactataaaaagttgataaaaattatatattccttctacttgtgaaactatatggactcatgctattaatttttgacaatatatttattttagttttttttctatacaattaaaatattctatcacatattttttttctttgattttaatagtttccttttttaattaaagaaaacaaataaaaatagtttcttttttataattttatttttcctttatgtatagtttattattttttagtacttttt

SEQ ID NO: 73184 - DNA, 954 bp, Cannabis sativa
tgtcaccattgtccctttcccctttaatcctctatcaacctcatctgggtcagttcttggtttgctaattcctattgcctcaactctggccatgttctctaagcaaaattccacaacctcttcagatatgtagcacttaaccatagatgcttttagccgatagtgattacacatataacttttaagtaccttcatatttcttttaaatggatacatccatctcgcccataccggcccacacaaccttgcttctctcactagatgaaccattaaatgtatcatgaagtcgaaaaaagatggcagaaattttttttccaagttgcacaatgttttcactacatgttcatgtaatgcatctaacttatccaattctaattccttcccacacaacttattaaagaaaatgtaaacatgtgtcaaacactctcgaacatttttttgcaagacttatctaatgtcaattggaagcagatgttgcattaacgcatggcaatcatgtgatttctgacccattagtttcaattcagcctcattcaccaagtttttgatgttagacgagtaagcatcgggtactttcatatttgcaaatgatttacaaactattttttttcctttttggacaaagtgaaacaagcaggagacaattataattgtttacctttctttttaggtgctagagattgtcgtatacccatttcaacaagatctaaacgactatttagaccgtccttagttttgccgggaatatcaagtaaggtacagataacactcccacacacaaacaatgtcgaacaaataaacttttccaatatggaagacgaaaaagggttgactttcttagaaaacaaccatttgtttttttttttgcatctttccatacttaaaatctataagttcaacttgttggagaatttgttaccctgacagtggcaaaggagccatatctccctcttc

SEQ ID NO: 73185 - DNA, 690 bp, Cannabis sativa
gggatcaactcgtacggaagactccagagcgctgagttcgcggtcgagttcgacagaatgaaactcatgacccgtattgaggataacacagaggtttgagctggtttccatggagtgactgaggtgcctcttgacgaaagaacggctttggattaggccgcaccacccctttgagacgcacttgtagcggagcaaatcttcaaccggtagtcggagtaggatgtcgacgatcgtgccccatggtaggttggccattgctgttactgctgtactgagaattagggtaacgcaagggtttcgtctctctctcagctctctcgatactttgtttttgctttttgcatgaatgaagatggtgcctctctatagcctgtagtgtactatattatatattttacacatgctgtttgtgattccaaaattgcccttcttgtaacgacaaaatacttgaaaaggcgagggtattttcgtcacttcagggacacctggattttgattcttgtctgtgccggtatattactcccattggataaacattgttttactggctcgtgtcttagctagaaatatcgcaaagtaattaggtgtgtgctgtgcggaagttctttcaaaaaaaaaaattaggtgtgagtgagcggtgcaactctaaccatatttttcatgttttttaataacttaattaacattttt

SEQ ID NO: 73186 - DNA, 1554 bp, Cannabis sativa
cttgaattctctcttatcagttcttcctcttccaatgtaaagaccatcaccattcgagtcacccctgtcatcagttttcttttggatttcttttgagttgattgcagcctttacttctgacataaaaatacccagaaaaatacaacaccgcaagcaattatttgaaatgcagaaaagaaaataaaggaaagagtgcaccgatttttatagaggttccccaaaaattattgctaggtacatcctcttcgatctcccctcagattgctcgtttccattatagaccttcaaagataaaaagattacaccaaatcaaaggtacgattggtaatctataattatttatagtgtttgaaaactctctctttctctctatttattactaaatcaaaacagactttttctcctctcttttccatgaacaatcaccatccgagtttattttcactaagataagattgagtaaccaccatgctagtttaattttttatgctgtgctcaaaaaagattcatactccaaattattttttttttccttatccacttaaattttattttttataattttaaaaaatacacttaacatttgagggttagtttggtacgcaggattagactggactggacaagattagatgaaattatttaccccaccctgccagatgggataaataatcccagacatattagattagctgtaacagttatccagacttctaacatgcccaaacactggattagacacattaatctgtgttatccaatccagtcacgcgtaccaaacagaccctaatagttatatcttttttatataatatagtagcagcagaatttcaagaaacatgaaattaattttaaacaaaaaaaaagacttaacttcgtattgtaatatttttaatttaacttcttctctctgccttttttttttttgcaaacattttggcaaaatgaaaaagcacttttatggttccaatggagcattttatagcttagtagactactatcttatgaaaagatacttttatggatcatggcagagattagtaaaagaaatttcttttaaaaaaaatatatatcttatcatgtttaagtaactgaagggactcggatgcaaaaacattgaataaaaaaataaaaaaaaaataaatgcatactgcaacttttgtaataaaaaggcatgcgtattggaataaaaaatgtcagcatttatcaaaactaagaaaaacagctaatggaggacctttaatccgaaagctgaacaagttaaaaaaattgtattaaactgtttacattctcttactcacaagtaaaactgtataaatatagcttgtgatttgcttaatctcctacagaaacactttctactaaaaaaattgttatctctcacatccaaaactacccctttttctctgaaaattgaaaccaatgtcccataacttgtcagccatgcaagaggaccttcccccaaaggctgaaggcttgccactgaacatgaatctttctgagatagaagtgcctacagtgggagcagtagatgaaagtgtggtggataagaag

SEQ ID NO: 73187 - DNA, 983 bp, Cannabis sativa
atttaatctacaaatatatcatttttatgtgcttatgtatatcaaacaagaaaaataaagaaaaaaactttaaaaaaaaatggtggttctttgaataaatagatatcttaatatgacgaattgaataaagaaagaaagaaaaaactaaagattggtattctttgattaaaaatatatgtatgctatacaacaaaattcatatacaatccaagttttttttattttattttctaaatggtataccatagtatagaaaatatatataccataatacaaaatgtatataccaccgacagaaaaatttgactgagactatggtcgttgtttggcggtaatcattgtaatttggagatgtgagaaaaccataagaagaagaaaatgagcagagcttcctcgttttcgattgtgaggaataaggagaaaatgattgcatccaacgaatgaatcgaataaatggatgagagaaaaatatttcatcgccttttaggaaaaatcatgataatttaccaaaaaaaatataaagaaatccaaactaaccggaaaaaataatgagaaagaggttttgtcatttagattttgtaacagaacttctgtttctatttgaagaatgaatataatgttaataatactcttatataactaagggtattttaggtactaaaaaataataaagaccatttgctatattatttttaaaaaaaggacattaagcttcagtaaaaagggataaatggtcatcttactactatttctctattttattctagcaacctagtatattagcttcttatatacatctaagcccaaaagcaaatatataggcttaagtcaaattcatttggatgagcgccctatcatgtttataggtaatgtgaaaagagaaaaggcagaatgaaattgtattattaaaatgaatggaaaagaacaatttacaaggctatatatacaagggaaaagctggggtgacacatcaacccaattta

SEQ ID NO: 73188 - DNA, 644 bp, Cannabis sativa
tgcttttttaggcgagtcgaaccagccacccttgacactatggtcaccatggaatgacaattatggcatgagttggcaagagaaatagcatctgacccaatgttatagcaattacatgaggatgtgaaaagtggcagcaaaccacatcacgagttccaagtccacatcgacctcctttattataagaatcatttagtaattcccaagaccaccttgattctacgaatattagaagaatttcatactaccctatttagtgagcattctggtgagcttaaaacatataagtgagtggctgctgagttgttttgggagggtttatgggatgatattcataagtttgtgcaacactgctccgtttgttaacaaaataaattgctcacaacctcactagcgggtctcttgcaacaactagcccttccgtcccaagtatgggatgaggttacaatagattttatagagggtcttccaaaatctgaaggttggaatacaataatggtgcattagatcgtctctcaaaatatgcccattttatcatgctggaacaccatttttttgctccaatagtagctgattcgaacatgagagcgatggttagattacatggacttcccgaatctatagtttttgatagagaccagatc

SEQ ID NO: 73189 - DNA, 1608 bp, Cannabis sativa
  modified_base (745)..(746): a, c, t, g, unknown or other
  modified_base (1402)..(1404): a, c, t, g, unknown or other
ttggtaattaaaattacataaaaggtataaatattgactttaccttatggaggtatttttgtaaataaaatgtcaatttatattttttgtgtaataattccttttttttaatctcttaatttcaaaaattacagtgtaaagtgatgttccttctatttatagtagttaaaatctctttaattaaatcatatttaactatttgaataaataatcatcaataactgaattaggttactgatatttatgaggaaatctctcaactacttaagagaatgtctcaacaacattgaaatatctataattacttttcaaattagatatttacctaattgaattaactaaataattaattaaaccaaaaagacaaactccatagggacagtaacatgctaggcgccttcctcgtctgtttaggacaaggaagatgtcttttgtcctagcaaatcttgtcttgaaaacttttatctttttcttatttaattaatttaaaaaaatatttacttattgcaaaaatatataattactatttcgtcaattcataatagaattttccaaacattattatagtactatttatccctaccattgacagtgtttcaaagtggcgatttgggaactatggacttataattcaaagctccaataaactaggttatttattgagtctcatcaactaaataatctttatttattaattccataattactccactaaaaatttagaattgaactcttagtaattatnnaattatatttactgagtttaattgcagtctccattgatataattaattccagcgattagccctccatatgtttagttcataattagttttagtcaaattaccgttttaaccttctaattacttatttatcatttagtatcattaattcactagtgaaagtataatttagttctcatctaaatttgtgcagaacattccaattctagaattaacacttaaagggaatcagtattcgatccgttaggaaagttaggattccaaaattgtaaatcatattctcagccatccacattatttgattcccaaaatagaagttgtaagaatcatcttctttgaaaatctttaacgactgaatcaaagaagctaataatatgaacaagagttcatgataactcaggatttaggccaatctattattaatcattgttatgatatgaagtctttatagtaaatggcatgttcataaagacacatttattcatatcggtcattatcatatataatatatattacatacaacaccttcactttgatgtcatactacatttgtaatccaaaccaagattacttgcactaaagaacgggcatcaatgaaccatagtagcaaccgctgattaaagattctgtaactttaatatgttgctgactgttttatnnntagctaagtggtcttagttctctatactgctacatgccacaacctcatatatcaataaagaattttcttatatttaatataaattattcaataataatccttataacttaacattcacacatatatcaaatgcttaactgagcttgaagtggagcccttggcaagagtggagactgaaacatatgtagatcacagaagtgatga

SEQ ID NO: 73190 - DNA, 3096 bp, Cannabis sativa
  modified_base (106)..(110): a, c, t, g, unknown or other
tatatgctattataaagtgtgatacaacattaagtgaccaattatattatgggtatcaaaagggtattaattttttacgaaaataatgtgtagataccataagttnnnnnataatttgttgaggggccgaattataaatacccaaaactcattatacaatgagcctataaataggtagtggtccccaagaaacactaggatttctgtattctctccttccccatcagagaaaatactttagaaaatagtgtattcttggaagatctccaacaatagcttcaggttagtgcttccgctcatctttatcatcttcttcttctttaatttagcaaaggttctatagatttgtgatttagggttttctatgttaaagcacttttaggaatatatttagatctatgatatttatagtatcaggtgcgactactcaattttggatgtcattttccatgattggcataaagagctagggatctagtagacagtgtgatatgtatttgacacttaattttgtgataatttgtggtctctctattttaattagaacattttgataatggtaatgagatgttttattttttaaaaaagttaaccatgcaagaattttattaaaccaagggtcctatgatattagttattttcctactgggctttatcagctcatcctctattttttccattctaggaattcagtttgacgctagtggatgagaatggtattgtttaggaaaaaaatcgttattagtttagtcttattctacttattaaactttcaatgaaactcattttgtatttgtataatggatggtctggataacttaaattagctatgtcctagttagaaattagaaatgaaggatactagatattatttttgtattttattaacttatttatggtgactacataacagtaggaatattgttgttcttttatattaatgaatggtcttgattttgtgactaatattttttttgtagatatagaaggtaatccattatttttatataaatattttgtgatataaattaaaggatcttttataagtattatcttcctacaagagtaaaagtgtgacttttgacctctcaagttatagatattacatattttgcgacatcgtaagccttgatttgtgacaatatagttaaatcttaagactcctaatattttggagaaaaaaatagtcattttatattaaagttcgtatgttctaaataatcatatatttggtcccctcaattttatttgatttttaaaatattgttttggcctttttcgattttagcttttgtctgtcctattaatttgtgtttatatatgcagcctacttgatattgacatagtcataccgaaaggaaaaaaaatggtagatatgtgttagattttgtgttaggttatttaaagacggtacattaattcatatatataatattaatttcatcgagtttctcaaatgaatcagtataatatatattgtttttgaaacaaaaaatacatttatgttcgtactcaaatacaaaagctcaatggacttttatacatgataaaaaattctagattgctatagctagctgtacgtaaaagaactggccggcctacggatctttttcttgggcaaaattcctctagttagaaacacaaatgagcataaaataatcctataatatttatgtatatatatgaggaacatatatgtagggatcaataggtacaatcgcaatcattaaactgcaaaaaacgcataagaaaatgaaggttgaagtaaaaataatctctaacgagattatcaaaccctcttctccaacccctgaccatcttcgccattacaagctttcattcctcgatcaattatctccaagttgttatagtccttttctttacttctactcattaaatgatcacatcaacaacgagcccaacctcattgaaaacatatcccatacacttaagcaatctttgtcccaagccctaacactttactaccctttagctggaagattcactagcgatggtgtttcaatcgattgcaacgacgatggaattctcttctgtgaagcacgagtgttgaagtgtcaagtctctgatgttatcaatgaaacaatctcatcatcatgtgaagtcctcaacaacctatgtcctttcaaactcgatgaactcgccgagttaccattcggaatccaactcaacattttcgaaaacggtggaattgctttaggtgtttgtatttctcacagacttgctgacgctttgtcatgccttgtcttcatcaagaattggatggctatggctcgtggtggcgcgaccgccattgcttcacccgaattttcttcggctgagctcttccctccaaagaagatagcatggtatgattcaaatagtttcatgtcaaagcttaacacacttgtaacaaagagatttgtgtttacagcttctgtgattgatgctctaagatcaaaatatgaattattattattagaacataataacactagagggccttcccgtgtggaggccctatcatccttcatatggagtcgtttcaaggctataactagggttgaatcagaagaacacaataccaatatttatacagttcatcacgctgtgaatattcgtccaaagttcgatcctccattgccggagcattatttcggaaactattatcgtgcttcgaagacagttacttccgggacaagtaatctcggtgtacttgctaagatgatgggtgaagacgtaagaaagcttgacaagggttttgttgagagtctacgatttaagggagaggaatacttgggttctattaaaccgagtattgatgaagtgaaacaagtgttggtggttccattagtgttcactagtttgtgtaggttcccactttatgaagctgactttgggtggggcaagcccacttgggttagctcagctgctcgttgttttaagaatgtagtgggttttatggacgacaaaactggccatggaatagaggcttacatttgtttggagcctcaacaaatggctaagcttgaagctgacgaagagtttttgtcattagtgtctagctagacccaaccgaaccaatccaattgtatctga

SEQ ID NO: 73191 - DNA, 619 bp, Cannabis sativa
tgtcttatgtaattattccatttttatatcactccatataattacccatttttaatttatttattttgtgtccaatacctattttcaatagcaaaattccccaaaacatattcttcttacgaatttagtttactcttatcacttttgtatcttacttgccaaacattagatttagctctccaaggatagaatagaaagaagattacctcattacatggattttaattacttccttgggactttttcgcattacttatcttaaaatgatcaacattatacttaaaatgacagtgattagtagtagtttcttatggtgctactatctcttaacattattctttttcaagtaccctttttacaaataaataataaaataaaaactttactaacaaatcaaaacttcatatatatcattaaaaattacaataatacccaatttaataaattgacatatatcatcatcatcatcatcatcctcatcacacaataagaggtccttatatataagacccaaacagggatggagcgcctaataataataataatatcacataccccaataagtgatctcttcagccgatctctctatacaaatacaagtaattataccacacacaca

SEQ ID NO: 73192 - DNA, 1298 bp, Cannabis sativa
aaatcaaaacatttcttggcaatattatgattagatacaaaaggtaacttcttttgtttggcaaaatgacaaatagcacaatggaaatcaggacaactagagtaatgaaaattcagctctttattcaaagaaagattctttacacaagaggcatggccgagtctataatgccatatagtatcactactaatttttgaattggtaatggacaaaacagtaggaaaagtggctaaggcagtaggagaatcattgtgtcaggaggtagagttgtccaacatcacccatcccaatcacttgactcttggaaatatcctgaatcacacatttgttagggaaaaaggaaagaatagttagatgtgttggaaagagaggtgacagaaagcaagttgtagtgaaatttaggaacacaaagaacatttttaaggacaatattagcaagatgcacagttccaacaaaagatacatcaatgtgtctaccatcgggcaacccaacattattgattttgatattgtttttcacactatgaaacaagttaggatcacagcatacatgatgagtggcccctgtatctattatccaagtagatttagggacacaaaaatcattaccagaaacattggaaacaatgggctgatctgtggactggtttagtgtgctattctcttgcactttctgtgtcaacatggcaatgagcttttggcattgagaagagaaatcgtgttcaccagtggccccttcttgactgttaatatgcccagaaaaactggcagtggatcgatcatgttgctgagaagatcgatcacgctgctggttttgttgattgcttggcttattaggaaggtctttaggcactttaccatgtaaacgatgccatgggggatatccatgcaatctatagcattttgcagtagtatgcccaacaatactgcagtgagaacaagtaggtttcccatttgtctggttatttccacctcggtttccctgcatatttcctacaaactgtccagcactttcattagatttaggaatttcaggttgatgattagtgatacctctttgcctttcttcttggatgacagaggcaaaagccttgttaacattgggaagaggatcttggagaaggatttgagatctggtactggagtaagactcatttagaccaattaggaactcaagaaccttgtcttcatcttggtaagcctggatagtcttcatagcaccacaggaacacaacggttgtggtctgtattcttgcaaaagatcccagagactcttgagacgagtgtagtaggaggta

SEQ ID NO: 73193 - DNA, 1562 bp, Cannabis sativa
ttataaattagttatgaatgcttatttgaatatcttaattattcatttgtagtgaagtaggttctgcaatatattgtactgcgctggatcgatgggtggaataatatgcatgttagatgagtttgaatatggagaagagttaagcaatccacaatatttgccctaccatggaggtcgagtatatagctgccgctgaggctactaaggaaatggtatggctaagaaagttcttcacagaacttggggttgttccaaatatggaaaacccactaatgttacatttttataacattagtgtcatcaccaatagtaaaaaaccttgaagccacaagaggagaaaacacattgagaggaagtaccacatcatccaggaatatgtggaaagataagacatgttgattgagaaggttgatacagaagacaaccttgttgatccattcaccaagactttcgcagagactgcgtttgaaaaacacattaggaattcagaatttaggattcaatccaccttgcaagttggagtttatagggatattatgctctaaataaaatctaatttcaatgtaatcttgattttatttatcaataaaagaatataaattatttattacttttggtattttacttggttcacataatgctttcatgatcatatgtttgatatataaattctaataaagccctattatattgttacatgtgattatagggttgtctacaaagtagaaagtaattgtgattatatgatataaactacttaagtcctgtgatttatcagtgcactagatttacactgatatgataatcagcgatgtgatttactacacttgcttaagtagaatgtcttttccaaggcattagcaaagtaaacttgtatcggatgtattgtctatacatcggactggactgatattgacagtggaaaatatatcataaacttactataatatcttttctaagtcaatatcacttttgaagttagattagtgacctcaattctgagatagttaagttctaccctaattgtactattcaggttctttgacttgtttgtcactcgcttacccataggactagcccatacttacatcttgggaacacgatagtacaattgagttagtgcgctaatcataaatatagaatttatagcatatataaatacatagaagtgaaatgatagttttcttagagcttggctaaacgagtttaaatgctagagtgctcatttcagtaattatattcatttcctaaaatatcatttacaaatagctatgtgttttaaggataaaatacactgaagggtaaaatggtaaatttctttctactcgatgtaaaccatacataaaggatcattgattatttagattgaaacaagggatagtcatagcatatttgtatttagtatataaagtgttctatttaatcgaatgtgcaatactaaatctgtagtggagtcaacagaaattaataagttagaaaatttattcataaatttcgaaaactgcttattaggagcttggttacataggcccatgatccccacattatctgggataatattt

SEQ ID NO: 73194 - DNA, 893 bp, Cannabis sativa
taataataataataataagataattcaaacattaaagcaatttaattactcatcaaaattgatcatcgcctaagtaagttaacattcgttaagatttaagataattgttcatactttattataaaaaaatttactttacaaaatctgttgggtttaaagagctttttattgaattagtgaatgaaattacatgatattagaattttatgtatttatgtatttatgatagaattttatggattttatatgtatctattgatgatatttattaagaatttagtaggtttcgcttacttttaggaatttaaagatgaagtagttaggtttagaatttaaaatttttggcttaagtgttaaaatatatattattgggagattcatttatgttcagaagttatttatgatgttatgcattcaatgtagagtccaaattgttattggagcattggtctgtgctttagtagccaatcgatcgaacttcaacaattagtcgaccattgtgtggtagaagttttagctagcattcgtttagtttgaattttgacacttagaattggagatattttcttaaggttcgttgggtattgttaaagatatttaatgtatgttgtttgggcttatagtaacattcattgagaatttatggctagtttttcaactgagtttgaaactaaacttattgttatacatgttatgaactagggtttcgtaaggctacttaaaaggaatcgtaggacattgttgtggattgttgggacctaatataagaaagagttgacatatgcacacaaatcctatacttgacataattctattttgttgatgttgagaaattgccaatatagtatgtctaatgagggacagttgtcaaagaaatgagtgctaagtagaga

SEQ ID NO: 73195 - DNA, 1097 bp, Cannabis sativa
aatatatagtaatgatgttaacagtaaattaaagagtaaaaaataaaatactataaattttagagaatagtgtgtttttccattaaaaattataaaaaatgactcgtatcacctgatatggaacatataagctaaattattgaattaagttatcaacttttgagtttttttatttttatacaacttaactaggaagaaacttagtagtgatataaaaaaattaaaagataatattatatatattttttaaaatatgtaactttcattgaaaatagaggaaacattacaaagttactagatttgagatactagaaccttgtttcttagtgggatgcatgttggaggaaatagagtaccggagttgagcggggttataaattttgaccattttactagtcttgaaaatgcacaagttataagtttaggggtattttggtaatttaccacatgagggttttggtggctgcctagaaacttgacacctgcccattcttttttcaacaaggattaattaatttaatccttaattcatttagagaaaaatcaagaaaaaagccaaaaaaataaaacaacctctcttttccttctctctctcttcgaaccagccaaaagcaaggaggatgagctactaaattctgtattttccgcaaggattcaagttgaaatcaagtgttcttgaagctaaggtaatccctagatcatggttctttgtttttcaagctttgttgttggtttggataggtgattttaagttttaggggttgttagggtttaaaggttgtgtaatttgttgtctaagctgattttgggttgattctaggttctggatattagttttgctgtgttgtgatggtattgagcaagtttgagctttgaaactcaaacttaggtctctaatggcatgtttgaattctgtgagtttttttgggatttatttgttggaatatgttgtttatatcatgtttaggtactctcaaaagtttgatggcaattggacaagttttgagcaagatttggatttttttgggggagactggtataaaccggtttaccggtaactgtaaaatcggttaaccggttttggcaggttccccgaa

SEQ ID NO: 73196 - DNA, 1650 bp, Cannabis sativa
aaagacactctcttagagcaaaccaatttgtgatcttcaagttattgaaacatcgtgaatcgaattcaataattgataaataaaatctttatattttggttttaattcaatagaatgcatgaaggatcaaagattatctcatctcattcctaagaagctttaggctcaaatgtatgcatgtggcacaaaatcgagacaatacaattctttaggtggctcaaatgtatgagtttctcctactatcaattttgtagtgtaaacatgaaaatgttaatcactaatagagttaaagcaacccatattaccaaagtgacaaaaaatacatcaagtcatacaaaaacttcaaaccaaacaagaagcaagggaagaaccaagatttttgtaattttcactatacttttaattattgattgcaatgattttgaatggtgcgttgaaatcccctttcatatatctagggaaaatctgaaatcaggatttcacagatcataaaagaaacacaaacgttaagttcaaacttacaaacacacatattcacattaagaaaatattgttcttacaattctcgcaaagcactgatcttttggttctaaaacaggatatttgtgcattatcatatcaaagtttgatattagaatcaatagtaaaattttcaaagtgaaaaacatttatatcaaattacaaaaaaccctaaaattaaggacattaaaaaagtagtatgcaaagttgaagggagaattgtaccaaaaaagggcttgcgcttaacaattggatcgagctgattgcaccatcaaaggcagcaaaaattgccagattggctagagattcctcgggtgatgaggctccaattcttagccccaaacttactgactagtctagacgaaggcccttttactcaaactggtgtcctctttaggacgaaggcccttttactctatctcttccaacattcccactaccaacatcattatccccagccttcgcaacgtcatcactactctcgtcgagtctatctaatttatctatgtcgatctcggcgatagtggtggttgagttctcaacactgagattgagaacttaaggcttggttgcacttgtattgggttgaatttgttttgattctttcaaatcatatagcgatacctcaagaactcaaggcgtagtcacactgggtcgaatttgttaggttttatggtttggattatctcaacaagattagtaggaaagggaaaatttgattgggatttggtccatttaagaattaattaaggataagggattcaatatttttttaatatattgaaaatgggttgggttagatctgatccttaaaaaaattaggcggggcagagcggatctgatcaaaatctgataagtatctgaaagttttagatcaataatggcctgtcagatcggatctctgactcaatccaaataaatggatcttttcgccatgcttgtcatggagaactgaatttctagtcgtaatatgagagacttggaggattgtggagcaatatgtctaacgccctaaataattaggcacgctatccaaaatgcttatgaaagcctaatcccctaatcaggattagtaattaaaatagcgcagaatttaaacttttatattaaacagactgaaaataaacttgt

SEQ ID NO: 73197 - DNA, 618 bp, Cannabis sativa
aatttcaataatcatgatgttaaggacattggtttattctctttactttttgtaattataattgatttaatccttaatgtatgctcctcatgatcaacagagatttaatacaatatcaagttgaatcaatatgtcaaaagaaaaaaaaaaacctggcaatttgagttgcgatagctttaccacaattaataactgttcttaaacaacaggatatcatgaatattttaaaattttaaagttaataaattatacactgttctgattttactaaatgttataaaagggttgattttgggaaaagatttaaggaaagatttaaaataaattggtgtattacttaagcggattaaatgtaataactgtaatgacttatgttttatttaagaagaattggaatctagcaatttgcaaattaataggtggaagttttcgaaaattttattaatcaatttctaaggatataatttaaaaaattaattaagtaaattgagtggcaataataattagaagggctttaatattagttatggtcagtggcggatccagaatttaagttgaagggggcgagactttttttttttttttataagggagggagggtcttttttttttttttaa

SEQ ID NO: 73198 - DNA, 782 bp, Cannabis sativa
gtaggtaggattgcatccaaaattaaagatatacttacacgaggaaataaaaattaaagcttcatggggcatgcattctctatttctagttcgagggtgtacgtacgtatgtgtttattcaatgtcaccaaaattattatatctaaaaattaaccttcctaagcaatgaatttgaagcccactttattgataaataatcaagataaggaccttccaacattaatttttaattaataaagtgaagtgagataaattgaaggtaccttagaaaactacataaatataaattttaaaaagtaactttgattttgtatatctatattcggctttgttaggagaaaagtgtatttccaaaaaaaaaaatatatatgaaaaaacgttattgataagtacatcatgcatttccttttcaaaaaaaaaaaaaaaaaaagtacattatgcattttgtccctttatttcttgtgtaaaaataaagcaagagcaaaacaaggaatttttagaaaatttgctaaactaactatttgaaatactaaaatttgtaaaataatctcatttaatttactctaagtgaccataatcctcgtgatcgttttacggtcataatagtcgtttatatggtcgcacagtgtaactcataatcgtttttacgaccataaaaaattattttgttaataatttatttttataaaaactatttttataaaacacacaagatttttcaggcacaatatgtagtcttgtaatgaccgctctagtaatgtggattagaaaaggcaattagc

SEQ ID NO: 73199 - DNA, 892 bp, Cannabis sativa
  modified_base (26)..(38): a, c, t, g, unknown or other
ataaaatgatttctgatctttattannnnnnnnnnnnnattatattgaaatgggttttatgtagggcacaaaacccaatacttccagggggcatcgattagggtattcttttgtaggctctaaagataatcaagcagcagagaaagcccatttataagctgtatggaacttctccctttaccatggaagtgcgacaggatcggttgcccaagggattccgattatccaaatcattaaaatataaaggtaccactaatcccatagattatttagagaaatttaacacgattatggaagtagaccatgtaattcagcttacaaaatgtcgcattcttacggaaaccctggaagataatgcacattattggtttatccaattgcccgaagcgtctatagcgacatgagaagcctttgtcgacctcttcctcacacattttaaggctatgatgacgtataggccgccttatactactctggctaacattaatcaagaggtcggtgagtcgtttaaacgttttaatgttgaatcgatttatatcacgttcctctgacaaatgaaagagttttttcaaattttgaaaggaaataaaaagttccaatggaccaaaaaatgcaaagacgcttttcaggccctaaaaacgcatttggggcagcctctaattctttccaagccgatgcctgaggaagtcttatccatctacctcgtagtgtctgaatacgcgattagttcagtactaattcgcgaagaccagggtaggtgtaacaccccgatatttttccttatttcacaaaatactaactttgatgcataaattgaaaagactcaaaactatttagaaatacatagcgggttttactataaatatgcaaaagacgaatgatcattcatatt

SEQ ID NO: 73200 - DNA, 1106 bp, Cannabis sativa
tcccccaacaaagatctagtgatttctcctaacgttaaggccaccatcttcatatcattagtaaactttatcttggcagcattatccattatacgttgaatgtactttttgaggctttctccttgtagttacttgatgttagctagggaactaacctgcaagttgaaatccttagctgctatgaattgctttttgaacatagcctgtagatctctccagttacaaacaaatcttggagataatcttttccacttgtcttctgtggacttggtcggaattagtgaaaagcagaggaactttgcatcatcactggccatagccacttgcatcattctgttgtatttggatagatggtccttgaggtctattcttcctccagtaattgttcattaataattcttttcgctcatggcttcatttactcttcttttgaatcagatacagttccattttgcttctgggagatcttttttgtgagcttcattaactcttcgactatgtgctataaacactgagtttattgtctgaagattctcttctacgaattcgatcattgatatgtttcctaatttcatctccacaaggtctgccttttcttccttggcatttagtcttctctaaagatcatgtgtgcagaggcttccactgttattatctgactaaggatgcaccttttcaacaccatcattttgactaacagaatcatcgtatgtgatttgtatgttaccgggcagtaggctttttgctttggtattacatttgtagtttttgcgcatctttgccactagaatcagtttggtcatcctgtagtgaaacttggtttcgtttcttattctgttgaggatggctaaaagacttagacttcttttgttgttcagcatgaggagccttcttttaagtttcgtatacttttcctttcccttagtccttatgaggttcttaagctccaagaattttaggatcaaccttccttgtggtgttgtcctttggtgtaatgccctacttgcttaggcacgcaacagtgattttctacatattgtgcacgcctttgctaatcaaagggtttctcaaaaattgtgtcaaatttaaacttttaattaaacttt

SEQ ID NO: 73201 - DNA, 639 bp, Cannabis sativa
tcatatgagactccatattggcatcttttcactcttgtttgaattcatgtttgttttgtaagattatctatgatagaatattgaagagaaaaaagtctaatgtacttgaaaccagtgttgcaagtgataatcggggtaccatggacttataatactaaggtccaataaattacattattttttaatctcaccaattaaataatcatatttattaattctataattactccactataaatatgaaattgaaattttattaattatagaattaaatttactgagttcaattgcagtgttcattgatataattagcactccttgtgtcgattcataattaattttagttaaattatcgttaaactcttctaattatataattattttttagtatcattaattcactaatgaaaatataatttagatctaatataaatttgtgcaaataattaatacttaaggggaaccaacatttgatctattgggaaagtcagtattctatgattgtaaatcaaattcctagctgttgcccctgtaagcccaagttcttgtctaacctatctttttcatatttagattgattttatcttgatttaagcttgaatataaaaagaacaaaatcaaagattcaacaccagaatt

SEQ ID NO: 73202 - DNA, 1236 bp, Cannabis sativa
aaaataatattagtgatgataaagagagagactatgcatgatatgatagtcatacgtttggatatcagttatttgaaatgtaaaatggttaagtgaagtggctaccgattgttctatatactctgaaaatgattcttcaggtgatgtgttgtgtgtcaaccgtttcttattccatccttctcaacgggaaacctttgaaaagattcaagccaggacgtggaatgcgacagggggatcccatgtcaccttatctatttctcctttgcaatgaagtgctatctcggcttcttactcttgaacaagacagaggtttactccatggtatcaaggtggcacgaaatgtccctgttatttctcatttcatgtttgcggacgaaaccatcatcttctctagagctaatctcagggatgtggagactttgaatggatgcatccaaaaatttgaagattggtcgggacagttgtgtagtaaacagaaatcggggattctcttttcgggtaattgttttaactcgcttcgggcggccattgaaagtaagttgaatatgagtgtggttcggaactcggagaaacacttgggtaatccatttatttttggtcggagcaagaggaaagactttaactttctcaaaaccaagtttgtggagagacttgaggggttgaaactaaagtcgctttctaaggcgggtagaatggtgtacatcaactcggtcgccttggccttaccgaattatgcgatgtctacttttaaaattcccctctcttcttgtcgagagcttgatgcggtggttcgaaggtattggtggaacggctcgctcgacaaccagaatatgtgggctggcaggtcgtggaattctctctgccaacccaagatgaatgagggcttaggctttcaccgtttcgaagatattaaccatgccttgcttgctaaacttgctttgtttttgatctgcaaagtaaattgaccttggtgcaatattctcaaaggaaagtactttcccagagagtctttttggagtgtacaagaaaagaattatgatagttttttgtggcgatgcatcttgggagctaggaatacgatttgtaagggggcttgtacagtccttgtttcgggtgaagatgttgatgtgtggtggcagccgtggattccatggttggactatgatcaatttcgtgaattgatggagagtatccgttccaaagcccctagtcttagaactgtggccgatttgatgt

SEQ ID NO: 73203 - DNA, 1001 bp, Cannabis sativa
atatccagattgtgtagtccttgtggagtatctattattaatgtattatgtatagtaattttacgtatcaaagcctttagtctttacaaaattggagtaacataattcaaattaagtaatatcgagtattatgtattgttcatgtattgttcatgtattatgtattatgatatcataatacaaaatgatgagtattgagttgaaattaacgattaaaatagagattaattctcgtacgatttggtctgttgatgactttgattttggagggcaagtgataaattatggtgagctctaattttgtaaatggtaataaaattgaagaagagaaattaaaaattcattaatttaaacaatgtgttttctttgcagacttgccaaggttcacatgcatatagtgtttataaaagagatcatgctttggtacacctaaaagttaggttttcagccctttacaagagtggtatgtttgactccattggcttattagattatagaaacattgtttgtctcttttagtccaatgataataataatcagtaatacttctgcacggtaaatatattagactttagcagcctataccttattacactagccattggcattttgtgatgtaccttgcagagatgcaaaggttcgtcaattttactttttttggcatcttagccatgcatctatatgctaatatattaaatttcatttctatgtctatatataattgcattttaggtgaagagatgttgttttaagacattaatatgtcaccacccactccactttataggttgcctatatagagcttcaatgtgataattgtgctactatgaaaatcaataatattactttgttatctatacttattgattctctgctatattaaattaatgtgtacatcaattagtgtttgaaggaattgtatatgttctgagatgtagtctactttgtaataacccttttgatcaatccatttggtaaatgaacattctgcaagagagtta

SEQ ID NO: 73204 - DNA, 793 bp, Cannabis sativa
ataacacatattaacaccatgcaccaaatttatttaaccaatcaaaagttaaaaaaaaaaaatgctctcacacgtaaaagtaaaagtaataatttgaacttttttttatgtatatttttatatttaacatgaataaataatataaagataaagtaactaatttatagtgtaatgaaaaagaataaaatagaaaaaaaatacatatatggtttttgtaatatatgagtgaattgtaaggaacaatgacgtctttgtttttttttaataaatttttgggtgagagtatcaattaggaacttttttgttcttgttatatagagaaatgatgtatattataattatactttaaaaaattctaaattattttaagtttcaaaaataaaattcaaatatttaattatataaatacttattttattttctatgtgtataacaagttatttcgaactcagacaacatacttattatagttacgatataaaaaaattagaatgtaattttttgaagtatgaaaaataagaaaggaaaaagttaaaaaatatttcttctttatacattaattaaacttaccttcaaataaaatttaattcaaatatactttattttatgagtattgtacctaaattatcctcacactctaatttcaaatataatagatttgtatttttttgagatggatgtgtaggtttgtgagaaagtttgagcaaaaatttacttagagaaatgaagactatcgtgaagtggtaggagtaaaattggtaaaacgattaaaaaaaataaatataatagattt

SEQ ID NO: 73205 - DNA, 775 bp, Cannabis sativa
ttttttgaattaagcgtttatatattacagtgcacatgggactcaacccaggacctccaacacacatgcacccttctatggccacttgagctaacctcaagtagttccatgatatttctagttttgttggggggagttcgctcccaaatcacattctttgtagagaacgttttaatcttttgatttatatataaatgtttcttttcaaaaaaataattactaatataatcatatataaaatagatttttaattatagcgtgtttagcatcaaacatgagagtaatttttttttaacgatgaatatattattaaaataatcaagtgtacaaaaataatagaaaaaatccatctaattaagtttctatttatgtgttctaaattcatgttaattaattcttatatcatggattccactcatatttcaaaaaagagcattaagcacgttaatagtgattaaattaaaaagtaaaaaatttgatatttaattacactaataagttcttctcaaaccaatttgaggccttaggcacaaaaaaatctaattaaacttttttttatatatatatatttttgtatatatttgattagttatattttttaataaataataataaaaatataacatatagtatttttttttttaaaaaaaaaatccttgaatttcttttattatatattacagttctctaatttaaggacccaatcgtatttttttttgcatgtaatgtgatttattttatttattttattatatataaataaaaaatgacccat

SEQ ID NO: 73206 - DNA, 1078 bp, Cannabis sativa
ccataggccacatagaacatgaaaacaagtaatgttctaaatgtaaaagaccataggccatacagatcatgaaaatattgtctatattatacaaacatgatgctgaatactaataagtgaaaaatactatctatgtatgtgtaggggcaggtggagccgagtctaaagctggaaaatctggatcgtcggagtctaggtgggccacaacatcaacaggctagccagactggtggttaatatcctagacacccacctcctcagtaagtgggtcggccagccccttatagttccctaatgatgacacctctcgataggcggcagtttggtctacactcagttagctctcaaagaccatctttcttcgagccaatgtgcactccacaaaagctgcattgcccatgtatgacagatcagctctggggttacgcagcttgaacttgttggtgagttcggagaataagttagcatactactcccttatggcatgctagccatcaagagccactcttagtctctcctcatgccctgcaagctcagactccagcctagagataaaggtagcttgtgtggtgttctccttgttcttagcattaagcatgatctccaagccagaaatcatgctctatctctccataaggagagcctccatctcagacatatggcttcgtccttcgccaaaagggaagcctccatggtctttacctgctcttgaagagcttttgaggacccccgggagctatcgcgtacagagttcaaattcatcaaggcttgaaagcaaaataagacaaagttagtatcaaactataacactagtcggctagtccttctttgggactactatggccagctagtccctcacaggtacatccatggctggccagtcacatgcaataagtcccttggccaaccaactaacacaatgccaaaaagatgaacaaagcttaaaatacaacttaccggagaaagatcccaaaggccagtggaatagagcctatctggctcaccatcaccaagctccttgagctcctcatccatgaaaggaaaggctctctctatgtgtctatgtgctgcctttaca

SEQ ID NO: 73207 - DNA, 966 bp, Cannabis sativa
tcgtatagcttccatcaacgtgcaacttccaagttgacttttcttgatcttacttcttctcttgctctcgcttcttctcttgttctcacttcttctctagctcttgcttttctcgtaaatcttcaaagattttaggaggtatgcatgtacgttcaaccacgaactcagtgagagcatggacttttatcgccactcttggttagtaggtgattttatattgaccaagttttattgcccacttgaggtactggctagatgcttcaggcttttgcattacttatcaaaatggttggtcagtgtacactcttattggatgggcttgaaagtaaggtcttagctttctcaaagctaggaggaattagtatgtcagtttttcaataagtgggtattgactttcgaccttctgtaggctgcaagcggtctgggttgctggttatcttgccagggtcttatcaatacttgtgtatctctttattttctcttgacttggaaggttcacggaatgtacctgttcggttgtaattgtttttaccacatgtctgctgtttttggctatgtggaggtgctaagtcaggtggacaaaaattaggagagcatgtatatttatatcttttactaatcatttacctcttcctttaaagctttaaattcaaaagtctcctaatttctctaggattaggagattgaactcatctataaataatagagttttttcgtcaaatttttcatttctccactttgttctccatgcccaagcctaagaaaaagccttggaatttcatcttcatcaactcttcaattgttcttcatcctctaaggtaggaatttttttttcagcgtcaacccttttttttttgagaaattttttcttctcctcctttgtttatcttactacatggattcccaaactcccaaaaacccttgaattattacctcaaaattgcttgaattttttcacaacccaat

SEQ ID NO: 73208 - DNA, 1004 bp, Cannabis sativa
  modified_base (971)..(979): a, c, t, g, unknown or other
gagaacatgccagcaccaattccaactgatgtagaaatagaaatagacttggaggaacacccaaaaaaagatctggaagaagaccctgaagaatatgaagtcgagtcatgcatggaggacgaatagtagtctcttttaacttgtcaaattttacccaaagaaaatgtttttgttcctattccaataatctagtgactatgtaactagagatccagtacgcttttaagtaaataatgatttttttttcttcctcaatcaaaatattttcttatgatgaaagtaactccctacaaaaaaaaatagggaagacagttcgcctctacgtagtaatctgctttttaataaagtaatgttgattcttaaatcgggaataaatacttaaactagacaccaagaacaagaagtacaaaagagtgtgacatctgaagcagcattcaaacaccgtgggcactaggaatttggtcttaaattattcaatgcccagaggatggtgagtgttcaaaaattaggtggaagaattcgttgtcgaattgttgatgatgttttctcaatactccaacatgtggaaggatgttaatgatacctaaatatgaccccaaactaagtttagaagactcaagtgagctggaggattagaagatcaaaactattggttcaaacaactggctttcgaaaaatgcttattttttttatacagaccttgtggttaatcctacaagcatgatagtactcaagagcggttagcacataaagcctaagagagactgaaagattcctaggcctaatgtgtagtagcctacgtcttgacaaacctcaaggagagtatgaaacaaaggatatgaccataatttgtaattagaaaagcaactatgttagtgttgctgctcagaggcaaggagaaaatgtactgtaatggaaacttaagatcaagagaatgacgaaagcacaaccttgttgggttttatgccctnnnnnnnnntccatttcaatgtaatccattttat

SEQ ID NO: 73209 - DNA, 616 bp, Cannabis sativa
aaacctaattaaatggtaactaacgttaaaattaatgttagctataaagtgtcatattactattaatataatttattattgagtattatttattttattttaataataattataaaaaatatcaaaccattccaaagacatcaccttataattgtgtagataccataatacttaatagtagtactagtagtactctatttgttatgtgagaggtactactctcttctaaattttaatttataattataattaattaatttaattttatatttacagaataagctcttaaataaaatttatattataacatttattgaaaaaatcaagggttaattacttttaaaccatctaataatctataaaataaagtataattatttaaattagagaaaaataaatatatttaatagaaattacactgagtttttatagaacgtccgcaaaaatatgactttttttacaagaaaaaaaaagttaaaaaaagatgggaaaaaaaatatagggtatgtatcctaaggtaactaatactgttttttccattttgttttaaaaaaattcccacataacattttttttttaaattcatagtttcacaaacttttgccataaaacaagt

SEQ ID NO: 73210 - DNA, 577 bp, Cannabis sativa
cattataccctttagattaatataaattatatggtagagttaagtgaaaggttaatgtatattgaacaatccactcataaaagtgggtacattttactaaaattaaatatgagaatatttttaattaatagatactaaaaatatgtattactcaacttatctttatatatttatacatcaaagcattagtgacagaagcagaattggccctaaaatttagtggaccattaaaaaaaactatttttaagctcttatttagaataaaatatggtagttttaaaatcaattaaaaaatttatatatttttaaaagagaaattttttttggtctcacctagacacaagcctagtctgcctatgcccaaggccgagcctaggcggaagagagccgacagctcgatagtcgataccgatatggagagtgacactatttagaataacaaaaattagttacattctgttacattcctgtttttaactcttaggctcttgtaatctgactctatattgttttaggcagagacagagctacatagatactaatactatagggtccatggcccccaaatacttatttt

SEQ ID NO: 73211 - DNA, 1328 bp, Cannabis sativa
agtaaataagatcctgataaaacaggctttccaatatattgtacatatcgtgacgctctataaaagacaacctagcggttgggataccaaattgtaacgtcctactacattaggcatgttatcattttttctaagtaatgtgcactcctttactaatcaaaagttttattgtagaatgagaataattaaaatttcataaataaacttaaacttaaataaatataaactaatacatatctcgagatcccgttatatgagttacaaaatacatgtactacaaaagtcatcgcttagtgactatcataataaagttcaactgtcctgaacatctgaacactcctggtctaactgcctcgatatgtacaatcttcatctagctcgaggtcactgctgctcagcctttgctttgcctttacctacacatgtaaacaatatctgtgagtcgatagactcataagaaaagcataaatataaaactagattgtgaccaagcgcccatacacataatcacaaccctatcccacgtccaacgcgtactaggtatggaaagtttgtacggttgaacaattaaccataatatcagcgtatactcggtactctagtcgtaccaatatgatagcatcaattcgtactttgcaaaatgtatatccgtcggtattcagtgcaactatatgttcattaataatgctcttactgatatgttatctactaggaaatcataaagcatgtagctaaacatgtaagcatgcatatcattatactaatcttacctcagttccgaattctggtgtgtcggtcaacctgagtgaaaactattgctcaacaattttaaggtccctaagtcaccacatacataaactgctaagtgatccgctaaattactttttagggacttagagtcaaaactaaaagttttcctatcgataaatagcatggtaatataccctaattatctacgaaacactaaaaaggagactttaggaaaaataccctaaaaaacggtagaccgtttttctgggtcttgtctactaaaaaaggtagaccgtttttataaaaatggcttgctgttttttgctgcaaactttcaaaaaaaacttattttcaactcaaatctaccccaaatcatacataaaactccaaaacacctatttgagacataaagaacataaaccaacagaaaatagcgtcatcaatcattgaatccaaatccaccattaaagagctaagtttgagcttcaaaagctcaaacctagttcaaacttgctacaacccaccaaaaaaccaaataataacatgaataaccttaaaacaagtctataaaataatcc

SEQ ID NO: 73212 - DNA, 1047 bp, Cannabis sativa
  modified_base (200)..(202): a, c, t, g, unknown or other
catgactaaccattcatacaatccctgtttagttttaaaaggagttttccactcatctccttttcttatacgtatttgatgatacccacgcttaagatcaatcttagaaaacacacaagaaccatgcaactcatctaacatatcatcaaaatgaggaatgggatgttaatattttaccattatgttgttgatggctcgannntcaacacacatcctccatgttccattcttcttaggaacgcgattactagaacagcacaagggctcgtgctttctctcacatgccctttggtcatcaatccttcaacttgcctttatatttccttagtttcatcaggattagttctatatgctgagtggtttgggattgaagcaccttgaataaaatcaatttgatgttctattcctcgaataggtggcacaccatgtggtacctcctcgggaaagacatcctcgaattcctacaaaataaaaacaacaacactaggtagcaaagaatcaagttggttagtgtttaaaagagcctccctataaacgaataaaagcattggttgttttctatgccaagctcgcataatcccaatttttttgcatacaaattattttattttctctttatttttttctcagtgatagaactcatctctttcttttttctctcacttgcttcgattgttttctctctttggctctcttttttctcattcttttgctcactcaagttctttttatcactcaatttctttttatcactcaaattcttttggtcactcaaatttttcaatcttacttgatcttcatagacttgttttggtgtcaaagcagctagagttactatttgctgacggaacatgaatgagtacttgttggtgaagtcgtcatgctggactcgctgatcaaattgccaatgtcttcttagaaaaaggtgtccaacttgcattgggatcacatcgcacaatacattatcctcatatttgccaatttaggaagataccaaaacttgttgggtaactctcacttcaccactatcattcaaccattgcaact

SEQ ID NO: 73213 - DNA, 783 bp, Cannabis sativa
tttatcttttttgtcttacttttcaatgagccaaagagcaagagcagccaaatagaacttcccttttcatcaatacaatcaaatatacaaaatttgatattaaattaaaaatattacatatccactcaaatttaccatttagactttttttccccttcatttatttaaaatttagatatatattttgtaaatacttaacatttttttaataataattaataaattaaaatatgtgaaacttaatattgaattaataatactttactgatcacagtacaacatgaatacttttctatttttcttgtctccggtgtcaaaacaacaaatgatagtagacaaatccactaattgattcatttccaataaaactgatgtgatatgttaagaaatatttctaataaaactgaagaagttaacaatacaagataagtttatttactaacaattaatgatttaattatgtctatcattgtattttctttcattagtaaaacattttgacgaatgaaatgctttatgcttataaaatataaattggaccataagattgcatgtaagagggctcttctctatcagtggtattgcgttgtaaacaaggagaaactcttattattaatttgcgctctctaattttttgttcacaatttttcctcgttctatatttactccatctgtcacccaatataagtgactaaagtgaagtagatctcgttaatgattgaaccactctaaaacaaacattactatgggacactaaagtacttaataataccactataagat

SEQ ID NO: 73214 - DNA, 1087 bp, Cannabis sativa
aaagaaatctacattctctctttgcctaaaacccttgacttaccaaacagacatgtatttgtcaacagttctatcgagtttcttttttttctctttaaaattcacttacaacctatgagcttgcaaccaagtggtaagtctactaagtgtcatgttttgcaagaagcaagagagtcaatttcatcatttatggaatattaacaaaggtctgcatttgggatcggccatgagtaataatgggcccaaaaaattttaaatgtgtattatatctgaagtaaattatgagtattattaggcatcttttcacaaaattttaagaaaatactatttttttcaatacaaaaaaaatatactatataaaaattttaggctctaggtttgggtgggctctaggcatgagcctaacccacctttacccaaagtcgagcctgtctacatctaatgaagatagcttcttggaggttagcaaaatccttctctaaaatgtaagcacaaaaattagaaccatagacttgagctactctatctctcttaccctccaaggattagtttctatatcctgcatgttcatcactcctaatgacgagaatagttattagatgatgcgctcccactattccttaaaaatctatgttcaaaaatcaacatcgtttgacttcacaataatattcacatttagatcatagaacatataagttactattaaccatataggctataaatattctatttttcaatatctcatatgaagaaattttactttttaattttagaaccatattaagcacataagaaacaaataataaatttctctctaccaataagaaacagtaccagaattaaataagatagccacaataaatttagtaacagttctaaatcattttagaagaatatcaaagtaacgttacccgattcttgtcaatgtaccatctaattcacaaatatcaaaatgaattaaatttaaagacacattttctctagcagtctagctacatatttatgtgatgattttgtgatcttaactggtacagtagtcacatttttcaaagtagtaatttacgaattacacttatactactcatgt

SEQ ID NO: 73215 - DNA, 1009 bp, Cannabis sativa
  modified_base (42)..(49): a, c, t, g, unknown or other
  modified_base (856)..(857): a, c, t, g, unknown or other
ttttaggacgaacaatgtaaacaattattgacccatagatannnnnnnnaaaaatattttgaaattcaaatgacaagttaactttcgggatttcattacactacttagagccaattttttttttgtaatttttgtgactaaaatttacgaaaaataaactatagcaaaatctcttttgatgatgattatatatatatatattatatatatgcatatatatatatatttatcgatatatatatatatattttactttgttaaatgattaaaactaaaatattgcttttatatgatatatctgtatttttttaaagagacaatatccaaaataaataagtatcgtagcaaaattttctttggtatattttgaatttttgaccaagctagctacgctgatagagaaatgttgctcttgtttgatttttttttttttttgtatatatatagtatgtacacaatataaatttttatactctttttttttttttgtatacatatagtatgtacacaatatatatattttattattttttttatttattttttttttacaagaggcaacatgtgtgataagaaaacataaagataataaatttacaattaggctcaattctaacaaaaagtatccctctagtaattgtcatattttcaaatttcaagaattttgattttaccaattcagaagatcaatatatgttcaaaaagtcattttctcaattctcacttctcacaaaaaatgaaagcttttaacttaagatttttctcaattaaatgtgttaaaaacaatcaaattatatgtttagtttgtgcaattttgactggaattactatctaagtaactaaatatagtataaannagtctaacacaatatttatttattcacataattagcaccagaatttgactcacaattctcaaaaaggtaagaaatttatcaaacttaacgcaagaatatactcagtacccccaactaaaatgagacagtgtcctcaatgtctaaatatgtat

SEQ ID NO: 73216 - DNA, 1075 bp, Cannabis sativa
cagatactgatggagtgtctcacctataaatatagggtctcgatcaccgagcttctcactcattctgattattcaacaaatttcatctaaagagagttgagagagcgaggaagtttgattacccacattaaccagtttcttttgcagatcaatgtttttgggattgaagctcaaagatcaatggctggaggtatttcgatcatttattcattgtgtatatatgtttgattaattccgcattttatacataaacatatatatttcagtttatacatatatatgtctaacaattaaatgaataaacattttaattaaaggcaaaaaaatttcaactatattcatgaatcattatttgtaaatccgtatagattttctatattagataaaataattgcaatacacacaatcactactaaaagttgttacttttacaattttttaatcacaatataatttttttttggactaaaatatagtatttagtcacaataaattataatttttggaactaatatatttaaccacagaccttttagtcagaacacagaataataatttataattagtcataattattttaattttaatcataaattttattatgactaaaaataaatatttaaataaatatttttatagtgagcttttgtatacacattgaactatgcttaactgtcagcttctcgacgcataaatatagagaaacttacaaaaatactggattttgagtaaaggtttacatttatactatcacacgataaatttacatttatactgtctttgccttgttttttttcttttatactgtaaatgccaaaaatcacataccaagcctttatcttccacacccacatacagaactaatccagcaatacgagaacacctaaaaacaaccattaattctagcaagatggaacaaaaatagagaaatccacttcaaatagataatcatgccaaaacaaaggtaaaacaacactaaaataaattaaaaaaaaaggataaaaaataaagctaaccatcttctgttcagcctcaatactagatataatagcagctattgaactttgacttagat

SEQ ID NO: 73217 - DNA, 768 bp, Cannabis sativa
gtatttatgaaattagtataaatacactcaaactcaactgcatatataattatacctcagagataataatatatacgatccaagaagatgatgagttactattggattgttgtactaatattcctaagtcattccttaacaacccattcatcatctctttattcaccttctaataatcatcctcactttcacttgtgtaatactcatgacacctctgctttgctccaattcatcaactcattttccattcaaattctctcttggaagaatggaactgattgttgtttgtgggatggagtgtcgtgtgatcaaatttcaggtcaggtcatcggccttgatttaagtgatacctatcttgaaggccctcttcactccaacagcacccttgtctcacttcaccatctccaaactttaatccttgatgacagtaatgatttctatggatctccaattccatctgagtttggcacgtcctttcccaacttgacacagcttagcctttattatgccaattttagcggttacatccctgtcgaattatctcatctctctaaactcactcatctcactgtttatttatctgatggtgatattattgtggagacttatgtgttgaaaagaatgcttcaaaacttcaccaatctcagggaactttctctactcaatgtcaacatgtctaatgttgaactacttacttctttcaccaatatatcatcttctttggagcttctttgtctctggcactgtggattgcaagggaaatttcca

SEQ ID NO: 73218 - DNA, 1467 bp, Cannabis sativa
taaaattgataaaatattacaaaaattacttaaaattaatctaaaaatactaaaacgaatatttatgcaaaactaagtaaaattaaataaaagcactaaaataaatgaaaaatacttgagaacaaaactaatttaatacaaaaaaatataaataactctattttcatagagttatcaaatatagtagcaacaacaaatgagatacggcgatgaaaatgattttgaaatcatatgatgagttttctataaatttatcaatttttattttatatatacgaggattcttcaatatttgatctttttttgtgtatgttttaattttttaattataacatttgatgtctctttgtttgcattatgaatttttctaagcattttttttttatttaaagaaattatatcaaaaatattaaaatttaaaatttgatattcagttaagacttaatgattactaaataaaatacaaccgcgcgggaagcgcggtttgtttcctagttgtatttatgaaattaaaaatttatttttagagaattctataatccacctttctaaaagtgatgtacaaatatactcttatttgtttcggcatctaatagatttttttagtttattttttttatatagtcgtgtatattatagttatttaagataatttgtaaattttgagaaattaaaaaataataatatacatctatagaagtgatgcactaatatactcttatctgatttggtatgatattaactttttttttttattttattaaaatattaatataataataaaatatatataccaaatcatgtactcggaacttttaaggtcgttaaaaatgctctttaaactattaagattgttgaatttaatgacttttgtctaattttactaaaaaaaagtctaacattgatgaaagttcaagagacgtgatttagtaaatgtcaaagttcgagggacatgattttgtagggtgcggccaacatcctaaatttcactgatcctttgattggcgaggcggcggcgtgtcagcttgctttggaaactgctgcttactggaagcatgactttatccttgttgagagtgattcggacgtggttattaaagcgattaaatgtgtccagtccaattggaacattgttaattatatgtatgtttgtaatcaactctttaagaactttttatcttgtaatttttcttttattcctagatgttgtaactttgcggctcacaatgttgctagatgggcttatgctcagaatattttaggtatagtggatccctccgctatacttaacattatcctttgtaatgaccgtgaggtttaattcaagggacataatttgatatatattaaagttaagcgggcaaaaatgctaactataaccttttgctaatattgtggtttcagtgaaaatacttttccacactaaattttggatgatagtgcagtgttttcttggagttgctctta

SEQ ID NO: 73219 - DNA, 564 bp, Cannabis sativa
tattgtataatgtcttcgttattgcaaattattttattaaaaaaatacataattttgagaaaataataatactatattgtataatataccactcattcagtactaatattttgtaatcacaataataatgaaaataaaaatttataagaccgcacgaagcgcggcttagttgcctaatttatgtataaataagagaacattgaatattgaataaataaacatattatctattggtaaattaatatgtttttttatatctaatatttctaaatatttgtattattatttgagtattccgtattagtcttgggttgttactaacttgagtaatgttaaacatacatttaaattatacataatgtttacatacaatcatgtatatttaattttagctatatataatttcaaaagtgggccacatcactttttctttttaactttggtgaggagagatttaaatttgagaccttttctttgtgaagaaaagtgtagaatcactaagcaatgtttagtaaggctgtacatcggtcggtttggactgtttatcctatatattttctaacc

SEQ ID NO: 73220 - DNA, 713 bp, Cannabis sativa
atatataacaagtatatgctcgatccgaacacaacccgtttaataattgtgtcagaaaataaaacccgaacacgacctgtttataaacaggttgacatggcacggcccgtgtaacccatttataaacatattttgtttaaacatgtcaactaataacacgtttatgaagtatttaacatatttataacccatttatgacttgttaaaatactaaaataactttaaataggtcattcacgagtcagttttgtgttagccgtatcaacttgaacacgacccgtttattaattgggttagacgagtcaacccaaacacgacccgaagccatttaaggcaaacccaaactcactaactctcatgcgagttttgagtcgtgttatcgtgtctggccctttttgtcagacttatccctaatggagcagggattctctatctagatgtggaacaggacagggacgaggattattttttgtccccgaatattaaactgggcagggacgggaatgacactccccgcctcgacgggggtctcattaatatattattatctttttaataaaattttatattttataatgtgtttgtatttttttagtacattagtgaaagtaaaatttaagtcgggtccaagtccgaatctggggccagggccagaatccgggtctcaaggtccaaattggggtcagagtcgaaaatattaattaagaaaaaaa

SEQ ID NO: 73221 - DNA, 572 bp, Cannabis sativa
aatcatcttcccaaacatcgtctaagacaatcaaaaacttctttcccattaacttatttgacaaattaacttgaagtaaattcaaattcatgtcattgctagcatcacgcggcgctaattcttgaaggagagtttttgtcacggccatggaatcaaatttatctgaaacatacacccaagctctagaatcaaactttttcttcactagttcatcattgaaaagagtttgagcaagggtagttttcccaatcccacccatgcccactatgggaatgacgcatatcttctcaccacttctatcttcatcggacaacaacaacttcattaagacatcattgtcagtgtctctaccatatatttcaggttcatctggcagagaagtcttcgcacgtgaacttcctgatagttgcacctcgacaacattcttctcaagattcaagtttccaatttggttggctaagtactccaacctcttaagaatctgttccatgtcttcattccttacacggtcagttgaagtagaaggtttagagaaacaagatagaaacttactaatggcctttcgtttttct

SEQ ID NO: 73222 - DNA, 1737 bp, Cannabis sativa
  modified_base (1382)..(1384): a, c, t, g, unknown or other
agaaaagagtaattaaatacacaaaatcaatgtaataaaaatattttaaatgcttaataaaaatacacattaattaaaaaatattttgacagctaaattgctaaaaggggacctaacaactttaaatcaagcgcttctaaggaataaacccaagctttctaaactttatctttattttgttttagattcaatagacatgcaatgttaaatggctttgacaattgcattgtagttttttctctcactttcttttctttttctctcttataggtgcgagcataagtggaattgaacgcacttatgaaggttgacactagcaagtttgcatatcattgactaagggagttcttctttaactcttctttatttatttttaaacttgctcacaaatatttgagaattttgtgcttaaacatgttttgggaaactaaatttttcttcttattttattttgcttgtatgaaaaaaaaaacattaaggcatatgtgctttggtttggtgattttccacattctaatacataattgatagtgtgcatagcttgttgaaaaatgtaaatattgtttgagcttgtgactaattcttgtgctagtttcatttttattgagatatatccaattttgagcacaaatgccttgatcattaaattgtgtgtgatttggtgaaaatttgtgtaaatatgtgattttgtgatctcacaagtcttagaatttgtttgattctctcttgaggcaattaaaatcccagactacactaaaccaaagatatgatttaggccatttttggaccgtttgagccttttgagccaaccatgatattattttatccctagtcaccctctttgagtataattgatccctttattttatttacaacatgtaagcctagccatatacaaatctttccatcatataccatttgagcaccttattattattataagataattcttcgttgtgtcatgaaggggatgtgaaagtgtaattttagttgaatggaaactgagtgagtgttttcattgtgctactttattattctcaccattgggacaatgttaaattttaagatgggggatagttaacatattttgtgtatattgtcattattaaatttgtattgttagttatcaaaaaaaaaaaaaagagagagagtttaaaattaagtttgtgccaccccttgaaaaaaaaaagtgtgtttaaaattaagtttggggtgtgccacaccttgtaaaaaaaagagcaagattttttttagaagttggaagttccaagtattatagcattgcttcagcattatgtagcagagacgcaaaaaaaaaatactatgctaaggcattactataactcttacgaggacattattttggaaaattttgggacaannnataatggcaatattaatactcaaattttttatgggatatatttttttttttttgaggaagtaagtgtgaggtctcattttggtcttagcaaaattaaggttcttttagggtgatttgagccaaaaatgacttctcttaaccaccttcacctaagccttacattacaagcttagaaaagtcctattgatctttagttttgtgtttgtctacattagtggagagaaatataataaacgtatgagactgtgtcaatttagagattttgtgcttaattcatatttgcataaattgatctaaattgcaagcaataatttgaggaaagacatttgacacacacacacacttggagtaat

SEQ ID NO: 73223 - DNA, 1046 bp, Cannabis sativa
tgtgatggttgtggggtgctttggtcgactacaatcggatgttcatctgaatttggtacctaacaggtgtatggtacctggtgaatattgtcattgggcacaacacaagacatgctgtgaaggactgcattgtgaaggtgagaggggatggggtgagaatcggaaatgtgtccatgtaacaaactgtttacaagctggctattcttgtgctgctttatcacctccctgttgctacccgatgcgttgcacatctatccagcgggggggactttgtgctacccctggtttggagctagatgttcaacaaaacgcctcataagatataattaatataaagtgccattagcgctgagtctcaacgaagcatgtagtagcttggtgtggtgtggtttgttttagtaattatagaaagtgtccttggcccttagtctcacaaagcatgtagtagcttggtgtggtgtggtttgtttcagtaataatgaaaagtgccattgggcattttttgttgtgtgtttggtttagctttgagattaattagcattccctgtgtatgtaaggcattttcttgtgacggtttgttttatttgtttatgagttcttctctggcttttcatgaaagggtttctatgatctgtgcttgggatttgggagtgaccataattttatggaagaaaacaaaaaacgatgcagcaaaaacaaaaacaggaaagcatttatttgcaaattaaacaaataatttatttactgaaatcttattatatatatgtacatacaaatataatacaatagacggggctggctaaagaccagtaaaaaaaaaaaattaggatggacgtgtttatttaataaagaccattagatttaaatcaatggtagatattttttaaaagtaataaaatttgggtattaatgtctcttctgcttagctataccggttacacccggttcatttgtttgtttctttaaaaataatcgatcgacttgccatggaagggtctcttcctctttctccgactccggcgaacaaagggcatctccttgttctt

SEQ ID NO: 73224 - DNA, 670 bp, Cannabis sativa
  modified_base (518)..(537): a, c, t, g, unknown or other
  modified_base (625)..(627): a, c, t, g, unknown or other
aggacctaaaaccaactcaaattattatgctcttagaataattcgaagaaccctaagcataccacctataacaacagcccccaattcacaaaatcacataattaaaccaagcaaaactttaagaactaagggggtagagaagctagggcttaccttggctaagaaatccttcaatccctgctgaaatacccaaaaaccagcagcaaattcccttgccctgagctggtttgaagagagagagaaaggaagagagttctttctaattttttgatcttttcttttaatttcactaaatgaaatgaaggttagggaaaatcaatttcccttgctaaaaaaaatagcttgctaggagtcaaataactaggtagccacctaacctttactttgcaaaaagtctaaattgccctttgacttaaacttagggtatttccaaatctaggggtaaaatggtcaaactccataaccccgcttaatcccggtatataattttctccaaaatatttcccactaagaaatannnnnnnnnnnnnnnnnnnntgatcaaactagccatccatcacattttctgttgccgccgagcaaaaattggaaaaataacatatttcacatataagtcaaataatannnctagagtttaataaaatctctggaattgagaaattataactct

SEQ ID NO: 73225 - DNA, 732 bp, Cannabis sativa
agataaaaatgcatgtcccagatccgaaacgtacaagcttcgtaactaacatgggactttactgctacaaggtcatgccatctgggttgaagaatgctggggcaacatatcgacgattggtgaattaaatgtttgcgaatcagattggatggaacatggaggtttacgtcgatgatatgtttattagttaaatcagtaaagagtggaagtcatatcacggacctcacgaagtgctttaaaatattaaggaagtacaatatgaagcttaacccgaaaaagtgttcctttggagtttcctcaggaaagtttctgggattcatagtcgacgcgaggggcattgaagcaaatcttgagaaaattaaggctttgatagatatgccatcaccaaccaagcttaaggaagtccaagccttaacaggaaggatggttgcacttaacagattcattttgaagtcaactgataagtgtctactatttttcaatgtattacaaggcaataagaaattttaatggacagaggaatgtgaggaggcctttcaaagcattaaaaggaatttagcgtcaccttcagttttggcaaaaccagtaactggagaaacgttactcctctgtttagctgtctcaaaagacgcgattagtgcagcaatagtgcgagaagagggaaagcaccaacaacctgtttattatgtcaataaaaggttactgggggcagaattgaggtatccccctctt

SEQ ID NO: 73226 - DNA, 941 bp, Cannabis sativa
caaaacccctttaatatttgcaattgttacaaatatgaccctaataaaaaaagtggtggcaaaagtaccttatcttacaattttgttgtactagtactattttttggttgttaagtattaattaagcccgttaagtggcagatcagaaaacatgtagtgacatatgtaatagtaatatgtcaccacgtgtttttgagtcgacacttaacagtcaaaaaatggtacaactgtaataaaattgtaagataagatacttttaccgcctctttttttattagggtcacatgtgtaacaattgtaaaaattaagggggtttcgccgcaaatattccgtaaaaaataaaatgataaggtggaaatatgttcaaagaaaaaaaaatcaaggtatagacaaactatttttgttttagtattggtatttaggcatttttagagtacttaaaaataagatataatagacccaacaaaatagttatgggtgattcttacaatacaccctcttaaaagaaatgtactagtgcacctctattcatttcggcatccaaaagaattttacattataattatttgaaacattctgtaaaatttcaaaaatatcaaaataatttataaaataaaaaataatgttcaaacactctatttcatatacgtataaaataaaaatcttattttcggtgtgtttaatttaatttttttaaatcttccaggttgtcttatataattacaacttacattataataaaaaaaaaattaaagtaaaaaattctctcaaataccgaaataaataaaagtgtatcgatgtattcttttaaaaattacattgtagaattttataataattataatagcttataaaaatgtttaactaatatgaggaagaaaggaaaatatatatgtttatatatataggctaattatgattttttttccctcgaactttga

SEQ ID NO: 73227 - DNA, 1011 bp, Cannabis sativa
  modified_base (811)..(829): a, c, t, g, unknown or other
atgagttttatttagggcataaaacccaacacaatgatcctctatagacgatttacattgagtagggaaaattttactattttacccttcaatgtattttattcttaaaacacttagctgcttgtaaatgatatttcagtaaactaatgtaattactaaaatgaacactctatcatttaccatgttaagccaagctataaagaaacgatcatttcacttctaatagttatagattctatatctatgattaacgctcccactcaattgaactaccaagtttttaagatgtaagtattgggatgttcctattagtcagctataacaaacaagtcaaagaactcgtatagtataattaagctagaacttaaccatctcaagattgagatcaattgacctaagatcaactaagtgacattgacttagaaaatatataatggtaagtttatgatatcttttccactgtcaatatcggtcaaatccaatgtatagctgatacattcgatactagtttactttgctaatgacctggaaaggacattctacttatacaggtgtaaataaaccacatcgctgattattacgtcagtgtaaatcaagtgtacttataaatcgtggataactatatgtttaggatttaattaaagttataatcatgattattttctactgtgtagataatactataatcatgaataactatatgtttaggatttaatagaagttatatattaaacatataatcatgaaattaatcatgtgaaccgtgctacataaaataattctgatcttttattaattagtaaatttgatnnnnnnnnnnnnnnnnnnntttagggtataaaatcccaacaacaccctacactagggtaggcgctactcttgtcctaattaaaacaaggaagatgtcttttgtcttaacaactttgttttttttttatttagttaatttgaaaaatagattattttaaaaaataattacaattttgataattcaaaatatatttttttgaa

SEQ ID NO: 73228 - DNA, 891 bp, Cannabis sativa
gctatttattttaggtgtggcaatctgtgttgtctcgtgtcatacacattcgtattatgtaggttgacatgcatattttattgatcaaccttagacccatatatatttcatgtcaagaaatctagccttaacccgacatgtcgtgttctcgtgtcgacctatcatgtctgtgtgttgaatatacttatagttacaatatacattgatcaacatcagggtcggccccaggcataggcgggctaggcccgcgcctaggacccactcattttaggggctcaaataaaaaaatacttttaaaaaaatatatattttttaaataatttttaaaaataccatttatctttattgtaaaggctaattttttttttttttgcttatgactcattttaactgagagccgatccaaattagcataagtagtatcacgtatttaatttatatatatttttttaattatatcaaactcatttaaataatatactaaataaaaatatatcaacaaataaataatatttattaattattttaataatcaatacaatgaataaaatgcaattatctatcttatattcttatacacaattttctttctaattatatatttttttatgaaaataaacaataattttactataaattaataattttaataatatattagatataaatcggttaattcgtgttcatttcgtgtcacatatgttaatcctaacccaactcaaataataattgtcactcgaattcgacccaattttgacccctatcaatttacagtaattcatatcgaattcttatcgtgttgtcgtgttatgacctgaattgccatccttaatttttttttatatacttataaaaataataataatttagatataaaaatttaattatagt

SEQ ID NO: 73229 - DNA, 579 bp, Cannabis sativa
agaggctgaatatataagtgatgctagtgttacagcagagctaacatggctgcaatacttgttctctgaactgaggttacagctgactcaaactccaaccatatggtgtgacaacctaagcaccataatgctaactcagaaccctatgctacatcagaggacaaagcacattgaacttgacttatatttcattagagaaaaagttctcaacaaaactatacagatcaaacatctatcctcttatgaccagttagttgatggtctaaccaaagccatatcaagtcaaaggtttgctgagttcaggcacaaactcaaaatcgaagatcgttcaattatgagtttgaggggaggtgttgaagacagttaagtctattaggttgttagagttagttggagattaattcaagcacgtgtttaatgttgtttgagttagttgtaagaatctgttgaaattctgttattgtttcagttgtatccctagtataaatgctgtaacactttctgttcaatgcaatgaatctttcttcaatctttgctactctttcctttcctttctatctttcctctctctctgttttc

SEQ ID NO: 73230 - DNA, 1344 bp, Cannabis sativa
caagtttttgcatgtcaatacaataatatatataatttggtcgtcatatatataattgtgtgtatatatatgatgatgaggttaattataatttagctgctactagctatatatatatgctatagatatatatatggatatgatgaattaaggtgatgaagcaattgcaagagtaagctcaagagagacatctttggcattggctaaggaaaagatgttggaattagttgtagttgtagtagtgtttagcgaaagagacgttactgcttcgttgtcgataggtgctttattattatcctccaacttatgatgattgctcagcataatattattaagtactgatgaagatgatgatgatgatctgttccctgcttctacatctttttcttttccattaatcatcatggtctcctgagaaaatcaaataagggaatatatggcactgttaattaggccacccttgccttccaattatacatacactacatttcatgtgcacccatcagggtgtcagtactagtactatatatacttcttacgtgtctatatctttgttatataaatataagtgattttttttttttatttaaccatttgtatattataatgtatattttatactcgaactcgatgaccattgagctagtctcagttaaatataagtgaattttatgtatagggttttgattataattaaaaaaaaattatatatatatggtatatgaagtattaatgtttgttggttaaagataagtgaattttatatatagggttttgacacttaaaatattataattaaaaaaattatacatgtggtatatatgaagtattgtgtaattatactatgggtaattaatgtctactttaaaatataatatatgtggatgtgatttttgtaattatatatgaattttgttttcattttttttttatttaggtttacattaatttttattaattttaataaaatataagttgattgaataattctttattatattgttattgattaattaataggcttaacatttatgtgtgtaaaatttagttaaagcagaagtgtagatttttttagttaactaaagtagcaaactcaattcaactaaagttatgtaactaagtcccctctatatataactctatacatacatgtcattttgataattttagataaataaaattatttctgatttaaagatctagagagaaaaacttagttaatcagtattatactatcaaattgatgtaattagtatgaatcgatcaaatacatatacttaattattatatattaatattattgtgttttaaattatatgcaaattttgtatcttagttatttat

SEQ ID NO: 73231 - DNA, 1180 bp, Cannabis sativa
gcccaatgacaatattcaccaggtgtcatacaccgccaattaggtaccaaattcagatgaatatccggttgtagtcgcccaaagcaccccacaaccatcacaccagctaccaaactcattactgtaatcaacctcatcatcttcatcattattcttttcttattatattattttgatctttatatcttcatcatcattcttttcctagtatttatagcagaaattggaactatttcacatatatattaattgaacatgtgttacagttggtagtaaaagttatttaattaatttgtatgagaccaatatttaattatagcaataatgatataatacttaggtaggtttgagataatgaaacaatttttattttattccctttgtgtcattcttattctagctatgttttcattccttctaatcaaactccacttaatgaagtgtttgttatatgaatttgagttggagagaatagagttagaaagagtagacttgaagagaatatcaaacacaagtattggaagggattaacattactatcattttaatttaaaaagtaggatacacttaaaaatacaaaccctttgttttcaaaatttaatttagtttgataatctcagtctcacctcataccaaatgctttttttttttttaaatattaattagttttcctagatgtgtgtgtataatagtgtatataagtattattatttggtatactcatctaacactttataattaattagcgattatttatattagagtaatttgcggcaaaatcttcttatatattaatttttatacacttaaccctcttatctttttttttttggcaaaatctctttatattttaatttttacacacttaacctttttatcttctttgtaaatttaaagtttcagttagatattattgtttaatactaacttgattactattttatcgacttttaggttttattgttacatatacacatgtgtatacggtggttatccagttcatatataatggtaatatctagctagcgtgtaatttgcaaagaaaaataaatataaaggaattttgccacaaaaaaaataaaaaaattaaatgtataaaaattaaaacataaaaaagttcgaccactaaaaaaaaataaaaatgttaagtatatataaattaaaatataaaggagttttg

SEQ ID NO: 73232 - DNA, 584 bp, Cannabis sativa
ttcaatatcatgactgaaattttactgatcatactcctataataacttaggtatacaagcaacaattctcctacactgtattagaacacaatctaatccttgtttagaagtgtcacatcaaatcataatttctccttactaactggtaatattattattggtagaagggttaacctctatttcaattcttccgactaaattccactaaagcatagacaaccctcaacaaatattccatagcatccggttaattctagaaaaacctctaatttgagttgtagacttggattaacatcaactcagaactgccttaatcattgccaaacttatcaggatattatctacatccgtctcacgctctaagaaacttacttagggttggcaaaatttgcatctcctgaacttaacatgaagtttagactcccaaaacattacaatacaattcagaaatacctctcaaataccttctttgaattggaagaaatcaaaatttcattaatgaaatcattcatgaagtcatcaggtatgaaaagctactttggaaatacccctctcgaatatccaactggtaataaccagatcga

SEQ ID NO: 73233 - DNA, 622 bp, Cannabis sativa
gattagaatattattgcgaatagtcattaaacaaaattagaagtcggataaacttttacaaaaaaacatctaaaatggtactattgtattgtctattgagtattcaaaaatccatattgattgtcgtttaatttctttcataattgaaagacgacatgtcgtacatagaataatatggcgccaaaaggaaaaaggcagttatatataataaagatttagataaatgaagagattcttatgttgaataaaacccacacaaacaaacccatctctctctctctcttctctttctttctctctcctcaactcagctatggctcttctctgcagagcttcagctccattcacactgctactaccaccaccaccaactccgattactggattctcaaatctcagctgctttgagaaatgttcgtcggtcgtgatgatcggagcaatcggtcgccggaggaataagctgattcagactcgtcgatttgctttggtggatgaacaagatcaggtttcgtttactcaagaagagaattcgctaattgaagctctagttggaacacaaggacgaggccgctctgcttctcctcaacaactcactgtatataattatatatactcttcttct

SEQ ID NO: 73234 - DNA, 500 bp, Cannabis sativa
aaacaggtatgttgtgaaatatataagagagtttatgtttgtaaaagaactaactgtcattggaactatcaactagtttgcagattttaatttttatttgtaaatctagctttttttttaccaatagatgtttaattggttaaagtgtaggttggcatttgagtttttctttcttaagctagtttggtaagtgctttaacttatgtaaaagattaacttcagttgtattgtgagaaaaatttattgatgcttgcgtgtttgcttaattgtaattgaaaatgttgtgagctggaaatagtgtgataagctctataaccaaaatgttgtgtaaaaataagtttgtttagttaacattttaaaatacttatttaaaaaaaacattttaaaatatccatcaatataagctacaacaataactttttggaaggaaattgaaatatttattttaaaatatacttataatttaaaacaatttttaggttcatagttctttatttaaa

SEQ ID NO: 73235 - DNA, 841 bp, Cannabis sativa
aattccacttatttctcttacctaccacacacatccaatttgctctcaatgaagctaacaaacttactatgaccatccatgaaatgccacacgtccaccttaattaaaattaaataacaaactagataatgttcaattttcaatctacttcatcatactcggtcaataccgattcttaagctagtcgtcatataaatcatagctagaatttaaatttaaatttcaaataattatattctcaatcttaattccattaaaactcttaactacatcaacttatgactcccacactagtagcccacgtgcaagataatcaaaattcaaaaccccttttaaatctcaacaagccatgtgtatatggctggtcaaggcttggactatacacattgggagttgataacttaccctttctagtctcctcatgtaagccttataatgattaagccttaaatttaaattctggaaatacattaaaacatgattccatgcacagtgccacttggtcttataactattatggtacacatccccttaattaaaccatgctttataaatactatatactatatatataatatatatcaacatatatcattcaaatgtacttactctaattaatggcaccattgcaataaaattttattaattaatctaatcactttatactatcacaacctaacttacaagcccaataaaaaaaaatacttgtcactttaaagaattacgccacttctagcatttaaaaaaaaatcaagacaaattctacataattactatttccacatcgagatatttggactaacataatagaagataataatcaaatattttggttattaca

SEQ ID NO: 73236 - DNA, 1017 bp, Cannabis sativa
agagaataagtgaggcagttgataaaattagagcgcaaatgctcgcggctcagagcagacagaagagttatgcagatccaaagcgtcggaatattgatttttcagatcggggatatggtatttctccgagtatcactcatgaagggcattaaacgctttggtaagaaagggaaacttggcccgaggttcattggaccttttgagatccttaagaggatagggcaagtggcatacaggttcgctatgcccctagcgctggcagctgtacatgatgtgttccatgtttggatgcttaggaagtatgttttagacccgtcccatattctgagttatgaagcattggaacttcaaccaaatctatcatacgaggaacaaccagtgcaaatacttgatagcagagaaaatgtcttgagaaacaagaccattgcactgataaaagtattttggaggaacaatatagtagaagaagtaacctgggaacttgagacgaatatgcagcagaaatatatgaagttgttcaggtaaatttcgagacaatttctataaggaggagataaccctaagattgagaaaatagattaccgaaccctaactagttaaatgtgtattaatgtgaaattatattattatataatttaatatgtgttaattatactaataaatgacatgttaagaccccgttggtgagccaggggtatttttgtaattttgaccaaagaagggtaaaacgataattttaaagttatagcgtgcccatggactatattattatatagtatacttattttttccttctgtaggtgttttctgacaggtcggcgcggtatagtcacaatcgcgtatttcaggtcgaaccgagttttgggtcgaaatatattttcgggattttattttggcattttattagtgattgaaaaatctaaaaaattatttaagtgtggattgtgatagaatgacatattttcccttgagttatgcttatgtgatataatggtcctaggggcattttggtctttt

SEQ ID NO: 73237 - DNA, 1274 bp, Cannabis sativa
ttgaggctgtgaagaacatttttttagttttttttaatcatgttttcctttcttttgtttgatttgttttagtgttgttttacagttgttttgctatgataatttctttgacatcgatttcactttttttctcaatctcaccgaaagtaatggttgttttccgattgttatggtgttcctgtggtggttctatctgtgggtatggaagacggaggcctcatttttttttttagtgtttacagtataaaagaaaaaaaattggccaaaacagtataaaagtaatttctaccgtgtggcagtatttttataaaaatttggccaaaagtcagtatttttgtaagtttcctattatttattgtttacaattttattttaataaaaacctaataattttttttatttttttattttgagccccgaaatgggtgggccttaagcacgggcttagctcgcttatgcctaggaccgaccctgtacaccccttaagttaataaaaattatgtgtgagacttaagcggagggtgagagtacattgggcaactcattcacaaaaatgagtatattttaataaaatataatatgaaagtatttttaattaatgaatataaaaaaaaaaaaatagtattcctcaacttatctcattactaagtattcctcaacttatcccattactaaacattataaacattatagttacaaattgttcaattatttctaaaatagttagaaacggttattatacaggtcattcatataattttttttaaaaagaagatataccaaccttcgttaaaaataaattacatgaaatatgtttttttttttttcaataagcttgataaataaaaaaaaattgttttttatggtctattctatttttttgatatttttatgggattttttctcttatattttatagtaactgattaccaccacattaattatttttgaaaattagtaaaattatctaaatttatatttgtaaaaactaagtctaaatttaccacatttttataaaattatctaatttaacatttgttagacaaacatattagaatgtctttgggccacaattagttatattgaggcccaaactaaaacccattccctttctaaaatatggatcttttttatatgagtttgataaaatatagataacactttcaatgttgtgtgatgtgagaaagaaccccaagtttctcttaccatatcaaacaaaattaaaaatataaaatgatcaagtcgaacaaaattttgagacatgaaattaagtg

SEQ ID NO: 73238 - DNA, 1301 bp, Cannabis sativa
tctttgtttttcaaaattatgaccaatgttttgtttgttttgacagccctcttaccgagtcctactcctacgctcgagatggtcagtaggcataggcgtttgataactcttccctacgatctttggtcatgcaatttccttttaagcgaggccaacctgcgatcggcaggccttctcgctgataaggaatatacttgtgattacaagattcgcaagtattttttcttggcagcaaattattgtttcgaccgaggaccaggcctgggatcgcttggctcaagcacaataccttcaaaacactgcccctcgagaatccagtgaaggagcatcctgaggtaatcaatgtggttggtctcctactgtacttagggctgaacgtaatacattagtcacattccaagactcctgccttaatttttatatttggaattcccttctcgtggaccacattgctcataagtttgacagctggtatcctagattccacgtccaggttaactgtcacgagtcatattatggtatagctgagcaatacggtactatggaagatagggcaggtcacatagatgcgaggtgggatttagaaccaatcaagacttttgatatatcaagattacaggctgtagggattttagtggatattatggtccctctaccccttcatttagtgatagctcgccttttagtgattttggtaaattccttaggtcgaaaattatattcctccctttttcatcgtcctttttactaattgtaacacttttccttgttttgcaaacatgggttatgaagatatcatggatccgaaggggaagaataggtcaacccaccttggggtccctacagctgctgaagtggttcctcccaagaggcaaaagaaaaccactgcccttaagaagaaatcactggctgacccatcgatctcgaggtctctgacaatgagatcaaagaacaagttcctcctccagccgctttcgacgccaatgttcctcctctcgaggcaacccctgctactacttcttcgagcaaggccattgagaccttgtccgccgcagtaggagaggtcaggtttgaatttgcccaagcatatggagttgcctgctggcgtaaacttcaaactcttcttccccctgattgggattttctcaatcttagaagcccaaaagagatgctatcaaggagcttggactattacttctgttagaatttattttaccgggatcttagatctactcacaagtatgttggttaacatcctaaatatgaactttctaaaacgataaataagcacatataaagtt

SEQ ID NO: 73239 - DNA, 2024 bp, Cannabis sativa
tttaatcccatctttgaatctggcctccataagccttcgggagactcaccttctcctaggaggctatatgaatcttactcctggtaccattcattccccaaaaaaaacctctacatatcttttcaatctcttttgtgatactatggggaagagcaaaaatgctaatccaataattacgaagtccaagtaaaataaaatggatcagttgcactttacctgcaaaagacaacctactgtagctataatacactatgtcacagagaaactctaattttttagtaacgagaaactctaattttttagaacactcaaaactacgtcacataaacaagactaattacagtagtaaaaattaaatcgcaattgcaaaacacaattccagtcaagctgcacctatgcccgtgaaaggtcagcgaacctgatcggaaaaaaaaaaaaaaaaccacctactactatagctaatgttagaaaaatattcttaaaaaacaaagaggctgtgaaacctcttaggctgaggggccttggaaacggcctagccgccccaccttgatcaagatgactgtataatcaattaatcattattcagttgtagagaacttattattctcaaccactaacaacgatttgatggtgagtcatggaagatccaaagtcacatatattgaatatatttcgaatgaaaatgatatgactagctagaaaattttctaatggacgtgatgataaatataactctttcttttttctctcttccaattaaagtgaatctaacctatgttggttatgattaatttcaggtcatcttttcatgcaatatatcatttttgccaatgagatatatggttgagaaacttgtgaattagtagacctttttggtaattggtagagaataattaagtataatggtagtgtaaatcaaaaggtaggttgacatttaaattgtaccaaagtatattgatgacactttatatatcgaatctcttcaagatacataaattaatgctattagattcttgatatttggtctatacttaaaattaatgaaaaattatagaagcccaatttgactttcttgatctattattcatgactgccatttcagaagcgtacattagtacgagccatatcctccatcaagtgatctcgtggccacccaattaaaacttgaggtcaattattatgagaccgttgtgttatagtcgtagttgagtagatataattatcattatttattttattttttaatgagagaggaaattggtgaatcaaaattcaaaaataaaataaaatgtttgttggaaagtaacatttagttgtttggtaagttatatttatttatataaagaatatcaaggagtgaaaatactttaaaaaaaacaattattagacattaatatttaaatccttttttgatgtctttattgtgctatgggcgatgaatacttcaagactctctagagcattagtttttggatgtagaagtcaaaagcatgtccaaaaccttccgacctttctctagatagccatgtccaataggaggctcgaataaagtaaccattgtgcattgttaaaatttgaaataaggtaaatgaggtaatttcatctcaaaaccaattggtaatgagagaagtagttcattcatcttatatatgataatttatttccacacattagcaatgtgaaactaattttaatatacgtgaaagtcattgcgacgaatctaaaatgtgaatgcattaattttcatacattaatcataaatacatataagaatatgaaaacataccagttaatgcctattaagtgtcattgtaatatttttgtattaataaacgattttccttatcaaaagttttgcaaactcaaaccacgatcttctaaaacgttttctaaacggcaagatgtgacaatctgatttttttgtgttaactcgcaacgaacttctgcaagattcaagcaagtcaacgacctataacagtcatttgtttgaatacatacggatgtggtaacataaatacttacta

SEQ ID NO: 73240 - DNA, 1221 bp, Cannabis sativa
ggccaaaaggtgaactattccaaatcctccatcctcttttcacccaatactccttcgaatatttccacctacttcttcaatactttaggtcttgagccaagacctttcatcagcaagtatctaggagtcccccaatgctttgggcgctcaaagaaatcgaactttgacttcatcctgcagaaagttagttcacagctttccaactggaatagcaagttgttctctaaggctggtaaggaagtgctcttaaaagctgtcattcaggctattccctcttacaccatgtcgtgtttcaaactcccggcctcaatttgccacacaattgaaagactaatggctcaattttggtggggttctatggggaaaggatctaaaattcactggaaaaattggcgttctctttgctcctccaaattctttggtggtttaggctttaggtctcttatttcccataaccaggccatgctagccaagcaggcttggcgtgttctatctaatcctaactcccttctggcctgcatcttaaaagcaaaatactttaaacttaataattttcttgaggctaagctaggccataccccttcttacacttggtctagtcttatctggggaagagaccttcttgctagaggcttgctttggaaggtgggaaatggctgctctatcagaaccctccaggatccctggattccaggtatgaaatatccaagcttgagaagcagtgatcaacctcctgatgataaggtaagttttttcatagacaactctggattttgggatagggaaaaactgcagcaatactttgatgaatactcggtctccactattctcaaaattccaattggtggcccccaaaaaactgactcgcttatttggacccaagacaactctggtatcttctctgtaaagtcagcctaccacatagctaacaatgcatccttgcctccctcctcctctgattcttccctttctaaaacctggtggaaaactctgtggaacctaaatgtgcagccaaagattaaaaactttgcttggagagtttaccaccatatcctccctattggtcttaatctgtttgtgaggaaaaccattccccaacctacctgctccttttgtccaaatcccactgaaacagtcacacatgccctactagattgtcccagagcatcaaaactctggaaggcctcgcctctccggaatttttatttgtcaaacaggcat

SEQ ID NO: 73241 - DNA, 966 bp, Cannabis sativa
gaggctggccctccccgcacaggacagcattttggctttccagccttggactctgttgagcactttatcaactatgggtttataatcttctgttctttttgttgatccgaagaggggaagtccgaggtatatcgtgtcgggagccattttcctcattctccaatactgagatatagcttgtactttttcccgttgcacacctttggagaagtaaatggaagacttctgtatgttaatattttgtcccgaccataggcaatacaagtctagacactctcggaaagcctttgtttctttcatagttacttggccaaaaagcatgtcatcagcgaacataaggtggttcaccgtcactccttgtctgcccattttgaatccctcaatccgccccctttcctcattccgctggagcaatcttgacagagtttcagcgacaatgatgaatagggtcgggatagaggatccctttgtcgaatgcccctctccggcttgaatttcccaaccactgccccgttgagcaggagcctaatctgctttaccgaaatgcaagcttgcacccactctgtgaagggggaagtgaatccaatgtgggtcaaaacgtttaacagaaaatcccattccattctatcgtaagccttttccatatccagcttgatcatcatgaatcctctcttgcctttctttcttgagaaagaatgcactatctcacgagctatcattgtgttttcggctatacatctccctttgactaaagctgcatgatttggagaaatgattttttgaatgacactctgaagccttgtagctattatcttggcaattactttatatgctacattgcaaagagcgatggggcgataatcctttgttagagtcgggtttttccttctttggcaccaagacaattgaggtgtcatttatgtatgagggcagttccttgtgaacgaagaagaaggaaaccatctc

SEQ ID NO: 73242 - DNA, 806 bp, Cannabis sativa
caagaaggaagaaaactagaggaagttgtgtcataagtttgattgtgtcatgctctgttttggctcgaggaaagtaggcggtactcaatctcattgctactaatactaattcaatgccctgattttgttaataattatatacatatattccttacttaaggatctatctccatttttataactgactaaactatatctaacttgtaactagttaccatctctatttaattacatggctcaagaggacacacaagtcttcaataaagaaaaataaattcaaaatggaagcaatattttgcaccatttactcaaatggacatcgagtttccctatattaatgtatgagcatttcattaccaacataaaccaatgcagcagacttgattaatttaatattataaggaagagatttataaaataataataataataataaaaccatcattataaaaacataatcacttttagaaataaattgcccttgtagaaatgacaagcaagcttggtctactcaatttggtttgctagaaatgacaaattgtggaataatcaagtagaaaacattgatgtaattgtacagaaagttaaacatagtgttaaacatagaatagagttgttttggcctaaaaaggtaggacaacaagatagagattggtttcacatgttgtgaatacctttactgtttttgggaaatcttttgattaaaagatgctcagataattgtatttgattgtaaatgattgtggaatatcaataaacttgctgatttatcaaaaaaattattgtcggttgcttatggtatcgtt

SEQ ID NO: 73243 - DNA, 628 bp, Cannabis sativa
gtgcgagctgacctgagtggaaacggagttggacaatcccggtcctatgtcactacaacaacaattcaataaatgccttaaaccaaaacttcaggaacaaaccctaattccaaaactagacaaaacctaacctctaacaaccccaagataggccataaaacacataaataatctaaatcatatacaaggtaccaccacgagccaaaacagaacacaaagaaaaccccagaaatttccctgcagggcaaccggtcgactggttctgttgcaccagaaccaaccggtcgaccgattctggcagactagaaactgttggattttcttccccaaaccttcccaacagctccaaaacagtataatatcacaaatacaacttatctcaagcatcatttaatcacaattcattcatttactcaaaattgcatactcaagtgaaataaaaacttattaaacctcatctagctcatatcaagctaaacaacccctgtctctaaccattacaaactcaaacaaactcttatacaccctaaaaacatactttaacctcgatttaacatcacacccccaaaattcctaaaaggaataatactattttggttccctttgatttatctaaatactactttgg

SEQ ID NO: 73244 - DNA, 1472 bp, Cannabis sativa
aactacacagcaaactcccagcccaaactaagtcattacatttagaacttagtaaatccaaaattgagtcggatgctagggcataggaaatctttgctttttttttataaagagaaagagaccacatgtcttagactggcccctgccccgttatatgttgagggctctcatttgtgacggaggaaaaccgtggttacatacgttttagcgagaaatacactaaaaatgacaaccaaaaacaaagcacacaacccaaaaacagaaacatcacagaaattgttcctttacaacagtgttttccattccctcgtcaggtctaagaaggaaagttcctcaaagtgtttggatttataaacccaagtggctgtccaaaatttaattttatcccaaaggatcaccacatctgaactttcagaatcgtcaaataccctagcatttctttccaaccgaacagcctgaaatgttgccaaaatcgctgttctccaaagctttgtcttacgtctgcagccaaccaacttacttgttatcatttgttggacagaacccgagaggacccaaaccaaaccaaaccaaattcctctagcaatttaaaccataaattgcggataaaaggacagtccataaacagatgcaccacgtcttctccacttcttttacagcagacacaccagccaaaagagatggaacgataagacctctcttttgcactctatcatgaacactaattttgcccaacgccactaaccagccaaacattttcactttcgaaggaacactgtttttccacaaaatcttagtccattccaacccactatggagcagatttgaagtgaaccacctaaaagctgatttacaagaaaagacacctacttgatctggtttcaaattctacaatcatccaccacactggtcactttcacatgctctagctgctgtagcattgatataagactaggaacttccctatccaacaaattccttctgaatttaaagtcccaattctcaacaaaaccgccaaccatcccctcatccactacaaactcttatatgctaccatttttctccacttaaattctagctaaatctggataaacatttttcaaagatgagttccccatctatacatcttcccaaaagcgaatcctatcccctcttcccactttaaaatgtaccaattccaggaatgtttcatatagatcagaaatatctcaccaaggccccttagaagacaagcgtactcctttgtttgaatcccacctattgtctgcctctctgtatcgactcgcaatcaccttgtgccataacgagttgggttctagtggaaaacgccacaaccattacattagcattactctatttcttacttccaatctctcagtacccaaacccccttcctcacgaggtctccatacttcctcccaagccaccaagtgttcacctcctaaatcacctccttcccataagaaatctct

SEQ ID NO: 73245 - DNA, 892 bp, Cannabis sativa
caagagagtgggcggtttctttttgttcatgggctggcggttatttttcaaaaattcaaaattggtttccttttttgcttcatccttcatgtttatttaaactaatttccttgacatttattctcactacctacccgattctatttctttgttttcttgccttcttgttgttcattctcttttttagatcaccatggttagaacaaagaacctagggcaaccaaaaagggcggaagaaaccaatgtaacccgctcgaatgttcctcctgctgcttcaatcttgctccgtgctactgcaactgcttcaaaaccaggagattcatcgcttcctcagcgtgaatctcagccagtgaagcccaagcaaaaacgaattcctaaacaaatggtttgaaaatccgttcgacccaacaaatgttggacctcatcgtcttcatcttccaagggatctcctccacctactgttgtttcacctcctggtgcaacagtgaaggaagttgctgctacaaccccaattggtccttccactcgcacgcgtgcccagcaagcttctatcgagaaggaacttcgcacaacacgaagccatgacaagccagttcatccagccaagaaacttaaggtaaatcccccttcagtttcttcaagctctgaagaaaaagaacccatggaggatcgctctgttgattccttggataaatccgtgtctctccattctgaaaaggagattcctaaagacatcggagtttccttggacagtgaggaaactgaactcgaacgagagcctcctttgaccaaatctgttccaacgacttctcgagcatcttcagcagccaaggcttttgctgctgccaaaggcaagtagcccataaatgaatcatctcctggtaatatccct

SEQ ID NO: 73246 - DNA, 1416 bp, Cannabis sativa
  modified_base (905)..(916): a, c, t, g, unknown or other
atataaatatatttaataaattatattctaattgagaggttataattgaataaagttatactaaaaaaaatttaaaacaccaaaaatatcaatataataacaatgacaataaataatccttaatactacattataatagaattatttttgagtaaatataatatttatacgtgcattataatttaaaataaaattattaataatacataagtaaatttataaaatatattttgttaatataagacttagaaaatgtataactaattataatttagagattattcttatttataatttgcttaaattgaaatttaatttttcgttaataaattagagaatattcttgaataaagtatttttaaataaaggttcttgtgtagggaagatcttgtgtaggacttatgcatttgtcctcatactatagggaagtaaaataaaccaatcaaaatatagaaaaaatgaaatgtaaatagaatcttttcaatgaagtgtatgagatcattccatactattctatttttttttattatttttatttatgaaaattttaatagtttattctaatttatgttagagtatttgatgttgtgtctattttttttatttattggcaataagacataatttaaaattatatgtgatgttatgtttaaaataattttaaaaaaatcctttttaattttttttttaaaaaattaccccgacaaaatattataaattaatataacaacgttcaagccgcccgcatcgcaccacaccgcaaaaaaaatgtggtttgaaattctttacggtgcagtcagagtttgattttttttttaaaactgtgcagtgcagtttgcggtcttgaattgttaatatacggttcaaaccggaccgcactgcatattataaaaataccaattttnnnnnnnnnnnnggtccaatatgtgaatgtccaactcaaagcccattaattattgtattgttgaaacttaaaagttttttcatattttttttcaagccttatggtatttttaacaagtgttgctcaagctttgttgtatttgtgatagtttaattatttagcaataatctaaactgcagaaaccgcaaaaaccgcaccgcactattttttgcagtgcggttcttgcggtgttttagttttgtggtgcgggtgcggtttgagaaattagaaataccgcatgtgcgggttggtttaaaaaaaatggtcaaaaaccgcactacctgcaccgcgaacactccgaagtttaatatatcgagtgagaagaaaaaaatagagcaacaataatattggtgcgaaaactgtgaagatttatatgaaagaactttaaaataataataataataattcaaattaaaaattaataatttttttaattattaatattattttatttttaaaataaatatataatt

SEQ ID NO: 73247 - DNA, 1169 bp, Cannabis sativa
ggattgattggatcggtctgttgggattgattgaattttttgatgactttctgcacacccctagctaaaatgaatttgtgcttgtctaaaagttatataataatagtatgagctcaatttttcgataatttttttaatataaccaacttgaaggtaatttatagcacgaatagatgcaaaaaattgtaacatcataatacttctagattgagttattattaagttttaatttaacaaaaaaacagttcatggtaatttttgtaaaatatagaatttaaaataatatttatgccaaaaaaatacattcttatttttgtatagagaaaaaaaaaattacagtcaaccttctatttcaaactctttctcaatctccattctgccaaaatatttttttctattttttttttgtaatgttcattgtagttgtaatatcaaacaagtaaattttcaaaaaaaatcaaataatttacagtatcgacgacaaagttcctaatattttaatttaccatgtattcaaaaaattcaaatttattttaaacattgtaaattattcaaaaatttacaaagaaatgatgttataagtataaaaaaaaaaccgtcataaaataaattaaaaataatatttcaacatatataagttaaggaatacattttttttgtgtccattaataaaaaatgtcctcgtattatattttattaaaatatacctacttttgtgagtgagttgtccaatatactctcttcatccacttaagtctaatacataatttccattaacctaagagtataataggaacatcatctataaaagtaggtacattttaaagaatacaaaaaataaagataaaaattgaaataactaaaataaaatagatatacaatgtaatttcaagacaaatattgaaaaagaagttgtaataaaaaattgtaattaaaacttctcatatttatggccaacaaatataggtacaattgaatcccacgttaactgtcaacttgaattgtttatgtatccactcttgtacacgtgacacaaccacgtttatattaatacacttaatattattattatttaaaattataaaaaaattataataattttttttaaaatattttatttttgtttaattttaaaataataatgttaaatgtactaatataaatatgta

SEQ ID NO: 73248 - DNA, 682 bp, Cannabis sativa
  modified_base (269)..(275): a, c, t, g, unknown or other
aaaacctgttctcataacaattttcacatgatcttagcacttcaattcgataatcatgttccatataatgtactggttcactcagctatgataatttagtactgtatagtatttagtttttgatattaagaatattcaattttaaaataaaataaataaatgtaatgcatttgtgccctccacgtgtctatatttacggaagttgtagtaacggtgtaagagaattgtaacattaggtattttcgcctccaaaaataaacattaggtannnnnnngtataaaatctgaaacattaagtatttaagccgtaatttactaaaacaaaaaaaattaaactttaaggagatattataaattttaaaaatttgggggaaaatatattttttataattgtaatgattacaatttatttgtacaaatacatattagtcttgtttttttaagaaaataaatatacataaaacccctaatgtaaatattttttaataaacccatgcagggctcctccactaaattaaaataaaaatatatattcaaagttaaatcaaactcagatattataataataataataaaaaaaaaaaaaagatatgaagatatatatgtgtacagatttaaatttgaaatataacttaaaatatgcgcgtatagtagtgtagtatatatatatatgtgatttttt

SEQ ID NO: 73249 - DNA, 836 bp, Cannabis sativa
  modified_base (696)..(706): a, c, t, g, unknown or other
  modified_base (752)..(770): a, c, t, g, unknown or other
cgaatatataattaaataacaaccttattctatatgcaaattaaccatacatcaacatattgttttaacccaaaaaaaaaaaaaaaaaacttaaaaatagcaccaaaacaactcctttataataaagaaaaattaaccacaaatcacctatacaacaactcattatattaacaaaaataaatatataactaaaaatcaattcattacaatataatttctaacaaataactaggaattagaatataatgagtagtgaggtcttagacggacgaggttctggtgagtatggaggcaaagagggtggagctttgatcaaagttgggctctagtggctgtcattgtggcttggtttgagaaggaagaagaagggagatagaagaatataaggttgggctttgctagaaattagggatttttttcttttctttttaggtggggtaatattaaattaggctctaaaattggattttttttcttttctttttaagctggttttacaaaagaaaagcctctaactcacatgctttagcaatttttgggcaattttttttgcaaaaacatagctgattgtccacaaaggcctataaattggcagcccactttttactgcagcaaaattgtaacaaaattccagcaaaaccaccagttttcaaaactcacccaaaccaccaaatttttgttaggttttgtgccctnnnnnnnnnnnatttcaatataatcagatttgctaattaataaagattagaaataannnnnnnnnnnnnnnnnnncacatgatttattttatgattattgtttaatttataaattctgttaagtccagaacatatgtattt

SEQ ID NO: 73250 - DNA, 1179 bp, Cannabis sativa
cttgatttttatattgtacattattaatcgtttcttaggaatgatatatgtaaatattgttgttcgttcttgatttgttgttgatttagtaattttttctcttcgccggattttatggttttctcttggtgtttctatggttccggtgttgatttgtccgtccccaaccacgaaggaggtgtcgtttgtgctttgttactgttcacagtataaaagtaaatattttgggcctggacagtatgaaagaaaaaaaaacgggcctggatagtaaaaaagaaattattgccgtgtggcagtattattgtaaaatttgggggaaaaaacagtatttttgtaagttttcctatttatttatgttcatttataacttaataaaataatatagtattaaagaatataattttagtataactataagttatgtgattggaataaaaaaaaattattgttaaaattttataatttttgtgttgatttagcaaaaaatttaacatttatcattagagttgtctttaaaaaaagtaaatactattttgaaccatgcgctttgtaaaagttactaaatgattatctgtttttttaaatgacaaaataaattttgtattttctaaaatggtaaaaataagaacttgagctcaatttttaaccatttttttaatataactaaattgaagacaattgttaacacgaacagatacagaaaatgtaacaagttttgtcataatatctctagatcagattataattattaagttttattttaacaaaaaattagttcaaaatcttatttatatctttttaaaaaatacaaaatcttatttgtcatttaaaaaaacataaaatgtaattaataacttttacaaaaacaaataacccaaaatattatttacaatagcaaaatgactccaatatgtgtcttaagaggtgatgcaaatttttgcatgccgcgcgagaggtcttagattccagcgaccggagttcatagatgggtcgtgacaacccacgtgagtagcagtgatgttaaagtattatacaatattgaatagcatataagacgaggtagatatagctacatgattttaatatatttggtggaggtgtttagtcatgattggggtttgaaaaaggaggtaccctactttcaaggacataacatataccaaagccaatttaatgacg

SEQ ID NO: 73251 - DNA, 1788 bp, Cannabis sativa
cgacactcttctgtggtatgaccaatatcatcaaggtattcacaccgcttatttggatccctcttgcgcctcacatgtttcataggtcttggttcgctaaaaacggcttcttgcacatgtgtaaggtagattttttcccgagttccattgagctcggtgtattcggtataaagagggatatacttgttgggtttcttttcattagacagccttttggaatcatcttttttctttgatcccgagacctccaaattaagtttccaacaatatcgtgccctagttgtctcatgggtttcgtgatttgatgcactcttgacttattctccaactcgctcattcgcaaatggaatgaatcctttttccttgaaccgagtcgttgacggaggtcaggcttttttaggttcagatgttctcgtagatcactcttgtcatgatcatggtcggaccttgcccttcctttcaaggtttgactcacttttttcttcctacaagggtttgcacgagtttcattctcataagcctgacttgtgggttggcgatttgtgtcgatgctccacgtatctcaggttgtgcctccatgttttcctcagttccctcaagtagcatctcttgatgttatcctctgccgcttgatctgcgagccgtgaggttttccctatgaatctcttttcccaaggtcaggttaattttgggtaccatctcctagcgctgcctttacggcagctatttcacgctgcaactcggcattttgccggtttacttcctccaatcgactcctgagatggcgattttctaattccacgattggtatgtatctggttgggtcgtaagcgccatcttcatcaacctggttagggagtgactgatcgttgctcatccaaggttcgtcaagccaggggccccaatactgggtcttcctgggacttgcagcatgttcatgcgatgacttaatagatccctgaggactcaatggttcttttctgggacgatgattgattccttctcgaggattattatctttggtgtcatccatcacttttatgtcaggaggatttttctgagatttttcacagaggctctcaatgagagcacaaaattgttaacgcgaattttcgttaaccaaatttgagcctcacaatgatgatttgacacagaaaatataacagttatagaaaaataaaatatgaacatcgggttttttacgtggttttgcagttaaaattctacatagtccacaattaaatcttattcaaatttctaagtatttttttcaatgcctcttgcataagagttttttcgccccctttttgatcttgtcagccactatttacaattgcatagtggcagttaattacaaagctgaccaaaatacatttacagccattatccctaaaattgtgggatctgattcaaatcaagccaaataaatgcagtttttacacagctgtgaatatcccgcctttattgggtcgagatgaacgtgtaattaaagatatacggtaagccgtgtctcatagggatgcctcgccgaggagggagccaagataactttgatagtgagcagctgcttgtcattttggcttctcgagactaatattgtcttaactttgatagctatactctctggggtcgagaggatcttccttgtatgcataccatcttctagtgagataaacgcctcgctatctgttatctcggctcatcatactatctatactcagtttatatcgtataatcttcgctaagtatttttagtgttatcgctttctctttcacgcagcgacgttg

SEQ ID NO: 73252 - DNA, 940 bp, Cannabis sativa
tttgtttacataaagaattggtccgaatgacccagcatacttgatgactccataaagactcgcatgtcctatgtaatcaacgctgataaggtgtccatatacgcgactcgattagaacacagataccttaatatgaggtccgttcgacacccttagaatgataaatcacaccccaagcttccaagcttgtgcgattgtttgaacaggcagcttgcatgatggaagtcgcaaacgttgttgtatttagtgaaacagatttaaatttttcttcatttattcttttacatttattataatttaatgttaatatttaatgtgaaacggttctataaccgattaagttctatgtaactaaaagtatacttgctttgtacataaaggagtgatccaacatgaataaacaaagacaaatatcttttgcaatagtggactaaccagaccatgatctgacggaaccactatacatctttgtgttcattattttccttgcttttctattgtctgagtagtctcattccaatactcggtgttctacgttgagtacttactgttttttttttaaatatcaaatgtttattttctatttgttattgtctaaattccttcgacaacaactagaataataactcaatgctcaaaatacatgcaaatataaaattaatacaagagcatatatataatgggggctattacgatagaaattgagtaaaatatctatataataatttataatctttgatttaatctatgtactcaaattgactattgaaaaatacaccataattaatatatttagttatttataattaattttaaatatttttaattatagaattgactagcaaaactccaagcctaactcaaggctataattttttttatttttatttttatgtctattaaaagattaattttaattatatatattttaaggtcttaa

SEQ ID NO: 73253 - DNA, 1144 bp, Cannabis sativa
aactcaaatattaaaaatacacacgataaaattcgaacccaaaacttaacacacacatcaaaataaaaattaaactataaatgaatgaaactcaaactcaaatctgtcttttttttattctttggcttggtctccattcaagacaattaaattgggtaccaataaaattataaaactattaagtttaaaaatttgaggatttatgctactatttttgaattttggtatttatgagcaacaaatttaatattttagatatttatgtcacagattttttaattaaaattttaatataattttactaagtaattattagtaattaaaatacataatttattttatatataatttaaaatattttatacatctaccgcgaatcacaagatgtttactagtttaatataaactacttcacaataaaactagatcatatttgtcactttcaaaaaaataaaaaataaaaaaagaagaagaagaagaaaacaagataattaatgcaaattacaatttacaagagtggtgttagtacatttgaaacctttacctataatgattggaatacaactcaaattacatactttttataaataataatttataattaatctcaatatataactaaaagtgatttgatctacttaaaaatataaataactaatattttattatacattactgtgtgtaatttgagcatgtatttaacattactctattcaattctctatttgtttttttaaaaaaaaaaaaaaaaatcattcaattctctcactaaaatgtgcaataataattactgggaaaaaaaaatacagagaataatgctatcaattattctgagaatatcggtagtgtaatatgacattaataaattattactatatatatattatgggacacgattttgttccgtgttgtactttcacggaatgtattccgtgatgtacgacagtcgttagatgggggagttatttgatctaagggctgggattaatttaggggtaattagggttaaaaaatggtaacgtaccctgagactcatctaacgtaccctgaaaccgatctaatgtaccagagaatatatttcgtgaaagtacatcacagcacaaaatcgtgtccctatatattatatgtatctattctatataaa

SEQ ID NO: 73254 - DNA, 731 bp, Cannabis sativa
atcacaaagtccacaatcaaccaaggcatcattaaaaccatcaattaaccaatttggataaggattacctcctcttttatcctcatgagaagtgacattattaaggtccccaatgacacaccaaggaagtcttgacttatcccgaagcttctttaacaactcccaagttctcttacgcaagcttcgatttggttcaccatacaaacccgtcaatcgccattctccaacatcactatctgtaatacgcacatctatgtagtcactccctaattccataactgtaacctcctcctcaactcgccaaagtaaagccactcccccacttttgcctctagcatcaactgaaattgcaccatcaaaaccaatagtcacacgcaacttttcaataacttccttctttgacaaagtctcacataaaaacaagtaattgggtttcttttggatcacaagatcttttatgaattgttgggtccatgggttcccaagcccatggcaattccaagaaagaatgctcatgatgactggtgggcctgagagacaaggcccaccttcaaatcgttttttgatccaatactgcccatattatcttggcccacctcattctcaactaactcagtagcacgtgaggcttgcaccatgtctctacgcctccttttgctatctaatagaattaacagctcatcatcacaatcaaccaccttcccattattcttgccacctttttctccttc

SEQ ID NO: 73255 - DNA, 670 bp, Cannabis sativa
taatcataacatagatataaaccaagttaaaattaggtgcccatacacccaatcataactatatccctgtgtcgcacgcaatactgggtctagagcattcgtacgatagtactattcaccacaatatcaacctatactcaatacattagtcgtaccgaagtgttagcatcaatgagtacttatgccgaacatacattcatcggtatccaatataactctatgtatactgatactactattctaatgtaatctaataggaaatcataaacatgcatactaaacatgtaaacacatgcatattatactaatcttacctcgatcctaaatttaggtttatcagtcaaactgagtggaactgctgctcgaagatttacatcccttaagtcacaatatatgtaaaactgataagtgtttactctagaacacttctctaatgtctggaatgaacctagggtttttctaccaaactatgtggtgaagacaccccaaaataaaatacataatttggctataatttatataccatagagtagagctcgtcacaagcttaaaaacaatatatagaacgtctaaaatggacatttacgtgaaatgttatggccaaactacaaaaatcaacctttcgcgttgctgtcctactggcatatcggttggaacaaccctgaaccaa

SEQ ID NO: 73256 - DNA, 1448 bp, Cannabis sativa
tgatatcaagggaatcagtccctcaaaagttatgcatcgaattctaatggaggagggagctaaaccaactattaatacacaacaaagactcagtccaccaatgaaagaggttgtgagaaaggaagtggtcaagtggttagatgctggggtggcctacccaattttagacagtagatgggttagcctagtgcaagtagtgccaaagaaaggtgggatgacagtgataaaaaatgaaagaaatgagttgatccctacaacaactgttactggttggtgaatctacattgactacaggaagcttaataaggcaaccagaaagaccattttccttttccattcattgaccagatgctagaccggttggctggacaagaatactactattttctagatggctattctggttaccatcaaataaccatagcaccgaaagaccaagaaaagacaacttttacatgcccatatggcactttcgctttcaggagaatgccatttggactatgtaacgctccagcaacaatttcagaggtgcatgatggcgatcatttcagacttgattgacacttgtatagagatctttatgaatgatttctcaggttttagttcatcatttgacaattgtttgaggaacttggagaaagtataatagtgtgaggaaacttggtacttaattgggagaagtgccattttatggtgacagagggaattgtgttgggacacaagatctcaaaggcaagcatcgaggtggatagggccaaggtgtctacaattgaaaatttatcccctccagtttctgtaaaaggagtaaggagctttctaggccatgcaggagtttaccaaagatttattaaggatttctcaaagatctccaagctattgtccaatttgcttgttaaccgggtaccttttgagtttggaaaggcatccttgaaggccttccaagctcttaaggagaaattaatatcgacacatagtcacttcatcgaattgggagttgccattcgaattgatgtgtgatgtaagtgactacgccattggagctgtcttgggtcaaagagttgacaggtgtttcataccatctactatgttagtagcctaaatgatgctcagctgaactatgccactacggaaaaagaaatgctagtaattgtgtttgcatgtgacaagtttcggccatatctatttaggaataaagtgatagtttgcacggatcattctgcgataaagtaccttatgaccaagaaggatgcaaaggcaagactgattcggtgggtgcttctgctttaagaattcgacattgagataaaagacaagaaggggactgaaaacctaattgatgatcacttgtcaaggcttgaattggaagagaatcaaaatgcaaaagaggtgcagataaatgaagagtttcccgatgagcaactttttagtttgaggggaagcttgatggt

SEQ ID NO: 73257 - DNA, 734 bp, Cannabis sativa
actttagccttgtcttgtttgtacaatatcgcctaaagttcataatatgtgaaatcggccccccaaatttatggatagccttcacgaccttaaaaccttataaaagagatttagatgaaaaatatgcttaaacactaataagattttagcccagtacctaagaaaggaataacgcctgaaacctttaacgtgtttaacaatttttcctaaagcacaactccacgggaataaaaattagggaatgcttggaatgcgtaggctcgactcctctgtaagaaaacaaaccttgactaaaccttcaaaaaacactaaggctctatgaccatataattgtccagaaacagcctagaaggaaaagtggtgtttccacgatgtccgatcaacttaggttggtgagcttcataaaaggctaagattgaggtgaccctacctaaaaacaggaagcaaacaagaagcaagtatttttcaaacatttcctaaatcagcagaggggtttagtgtcgaataaaatcgaaaagtttgaaattgtggctattggaaccacctatttctgaaacaacctaagatgacagcccttaaaatgatctagcaagccaatatgtgaagatcgaagctataaattgaaagtaaatgaagcatgaagagttaacaactattataatgtctcccggaccaaacaaataaaattgtctttgtgaaaggaaaaaaggtgctatagtttttgagaattaaaa

SEQ ID NO: 73258 - DNA, 1421 bp, Cannabis sativa
actactattatttagccttatatggcaatcccagctatactcttattgccttgacatgtaagtatttagatttacttttctttatgccaagctgaagtatgtatgcacttgacttagaggcagattaagtaacttatactaagctttaaaatttctctgcataagttctccgttctagtttgatgcattgtatggtgtgggtgcccccaagtgagcacgcatacttacggtccactggtcacttgtaattcaccaagtttcatagaccttgcctggacattttcttagggatgctaacgggtgtacacatatggaactgaaaaaaataatttaagaagttatctttattagcaagtggtttagacacattcagtcttacgtgtaacaaaagcttacagcttaatgtacgcttttgaaatcacgtttttactacccctgcttaagatgtcaggcagaggccatcactgaagtgcgataggaggccatgctaaaaagtgatgggtactagctcttttgtgaattcctggacggtgaaacgtcagaggaaccactatacgaactggctagtgagagcacttaccgagatgttctctattccaatattttgataaaagagccaactccaagttctcattgtactcaccaggcttgtatgcaccttttcctcagaccttttcagtttggtccaaacgtgcttgctataggatctttattgtcaaagaatattcttcagagcacttagtctcttacgaagaatttactcttcttgacttgtttgttgaagcacctgccaaatttttcctagcaaacatgccactttaagttgacttggtctcttcttctttccctttcgtcaagggagttttctagcaggatgtggtttacttcttagtcattgtataccaaaatatgagagcagactgttggcggattgggccagccagtgtacagaacaggtggtcaaccatgttggagcattgcctagccatttggataaggctatggctggccagccggtgaaagtagtggtcggctaggttactaaggccatggtcggccagccttttggaggccaggtcgatgttgtagtttgatcccttctacacttggttaattttgccccccgacatgattaccgtagaacctttgtgaactcctgtcagttgctattcagcttctttcttggtgacccttcttagaagtggtattgggataccacgtctctgcgttatgttgtccataattggacactcaaaagctatccccttttatccttgctatctagaaaggtttttgtttggaggtatgctgctataggtatatccatgttggatgtttgtcttgcatgtctatttcttttgaaatatagatgcttagttctttagagaattgtgcgggtaccaagtttgccttgattgtca

SEQ ID NO: 73259 - DNA, 1016 bp, Cannabis sativa
gaagtgattgaatgatgagtaaatttattgaaccagttgctcgctgctccaacaagcaaggtggggaacaaaatatagcgtagattgttcgtagccttgcgggctcacattatagtattgaaattattcaaatgtgagaccgaatctgtggtctcatcatatgacgagacgtgagggtttttaaacccctgggggaatggagtattcatgatgtctggatagaatggctcgagttcttcatccgagtcatatccagacttctttccttgttcccatacttgataccccctgaatttatcttccaactcatctattcctaattggataggatcctcttgctttacaccgagttgttggcaaagattatgttttttctggttcaagtgattgcgtagatcaggttggttataacttctagtggacctcgtcctactcattgacctcgtcctgctcccaaaccttgtccttgagtaactttcggttttacttgtgcctgtactctcttgatcattattgcgacgagtactttctcttcctcgcgttgatcgacaatgggtcccgcccttctcccttgggtgtggttcgttgtctgccccctactggggtttgtacgtgccccttccctaatggtttgagaaggacgttggcgatggctcgttggtgacccacgtgtccacgagggatttcctgttccctagtttctggttgccttctgttctcatttcggtgagaaggctctagttgatcatttggttgttcgctctcagggggaccctcagtttcgccaggttgttcttcctgagcgttttgagaattctcctgagcgtctcctgcctcctggttcgtgagccccgaggtgtgcctcatggtcttctcattccaaggtccgattaattttatgcattgttctcatgtgctgccctggccgctgctgtccagttccaactcagcatttcgtcagtttgccttctccaggcggcgcctgagatggtagttctccaactcagtaattggca

SEQ ID NO: 73260 - DNA, 744 bp, Cannabis sativa
atgattgttaatgaaattagtctgtagctttatgtttctaaaaaaaaatgtattattttatatagagtttaaatttaaatttatataaatatatttatttcttaaaaaagtaattcatcaaattaattgacaaatataattccttaattttttttctttgttatatattgaggataatactattataaacaaaatatttgaataaatataattctaataaatagaggagatatatacctgatatatatcacagacactcaatggagaattattcactgcaaatggaatgagatgtgaaacagtgtttttaaaataaaaaaatatctacaaagattagatcatcattttaattctctccataaataacgacagcacacaaataatgaactaaaaaaaatgaactctcttttgtatactttttcttctttgtttccaataacatggctgctagaaactttccaatcataaaattgggaaaataaacagataaatctacgtatctttttctttttcatttgatgatttgattgataattgatatgttgaacaattaaattaactaataaaaagtcatcatctgtcccaacacaaatcattaaaacaaaaattggggcaggaggctttttgtctcaacccatttttttttccttttcatttttattctttcttcccatacaaatttatgttacaacaaacaaagtaaaaaaagttatctcagaagctagtgtgccatatagcatcatc

SEQ ID NO: 73261 - DNA, 844 bp, Cannabis sativa
  modified_base (741)..(752): a, c, t, g, unknown or other
  modified_base (802)..(802): a, c, t, g, unknown or other
aaaccgtgaggacttaagcccaaagcggataaatatcatactatgtgagagttaaggtgaggtcgcagcccaacaactagtatcagagatgttgtattcgccgaaaatgtcaaagatggcgtgttctacaaaatttgagatcgagctttttgataggaagaacaatttgagtttatggcaaagcatggtgaaagatgtattggtacaacaagagctcataaaggcactactaggaaagaagactaaggactgatgaagattgggaggagttgcaagagaaagcgataagcactattcgtttaaatttggctcctgaattaaagtatagtgtattgaatgaaacatgcctccctgagttatggaaaaagtgagaaaagttatatatgtaaaaatccctaacaaatagattatatttgaagaaataattaaatgattcgaagataattgaaggagatgatgttaatgatcatataaatagatttaacaagtgcaaaactcaattgttaagtgtaggatcatattcctattcacgttgaattagattagtaggatcatgttcctactcattataccataattaacctataattatataatataaatcctaattatctatcattaggtttttggaatattacagtcaggcaacgaattctattagtaatagtggcagcacaaggtggtttcgctagaggggaggtcagaagtgttggaaatattttgttggaaatattttaccannnnnnnnnnnnactaccatgtatgtttcattaacaccataatatgaattctaaaacaatgnaataaacacatataaagtttagaacaccttacagtgggtgca

SEQ ID NO: 73262 - DNA, 788 bp, Cannabis sativa
ttgtaattttctgtttagatcattataggtcttcttttctagttgattttaccgaaattaatggtggcatttccttcgttttggtttcattttggttgtgttgttgatttgaacgatcgaggtatatgttcttcttcatcattcgttccgtgcggctgaagatttagagcatgtggtatttttataaatatttgtatgtgagctgtataaatgtttaatgggttggcccataatatatttgtaattattttttccttttttgtattttttcctttttttcctaataattaatattattaatatattaaaattgataatagttactatctatattaaatctaatgtcttttgtaatttcaataataaagtgtaattatattaatagttattgatatatattacattaaattatttgcattgtaatagattcattgtcataatttagttaaaattggaaggttgggttccacttatagctaaatagaaaggttgatctataaattattttttattagttagaatgtactaacatatcattttattaataaaatacatattaattgttattaggttattagataaattatagatccttaattttattattattacataagaaaaattagagaaaccacaaatttagaaaattagaatcctaaaagattagactgctacattattgtacttaataagagatcgaattatatgtatatggaacacttcttaatgggtaatacccattgatgggaactaaaaaaaattaataaggtaataatctaataaccttt

SEQ ID NO: 73263 - DNA, 822 bp, Cannabis sativa
aagtggaaactagacttaccccaaatagtgaggtagtggccatggcgagcgggagaggttggagatcatcggcgagagagaaaaacccacaaatggctccgacgagagagaaaaatagaaaatctttggagtttgggttttgccatggttgcgagcaccgtggtgtggtccgtttcgaccatcgtcgcccagaggatggccatcgtggcctagccgtccatgtgagatagtgaatagagagagagagaggtgagatcgagtgggaggaaaagggaaagggataggtttatgggtttctgaaggtggagatcttcgtggtgacgtccatcggaccctggggtggtcggagcacttccgttaggcgagcagagctgctcacaaaaaaaaaaaaaaaccagagagaagattaagaggcggaaggaagaagatgaagggaaatagggtttgggttcatatttttctttttatacctaggttatatttatttattaaaataattaagtttcttttttttgaaaaaaaaaataattaagttaaatctgattaattatttattctttctcaaaaaaaaaaatctgattattttattaattatatcttatttaattttaaccccaattaattattaaaagaaaattttatttacatttcaaaaatttataaaattatcttattttaataatttttattttatataaatatatatctttaattatacaagattttttaacttttttctttcaattgactatattcttaaaaaatatatattcttaaaaaaatatacatataaaataaaaataaataatattttaattatta

SEQ ID NO: 73264 - DNA, 1073 bp, Cannabis sativa
aattattgtactgttgattaataaaaattattacattttgtgaaataggaaccaatagactctaatactatgcttcaattattaacttaagctcttttattacacaataggagtgtatacatagttcagtttttgtaggaaaattagaatatatatattatgaataaattttttctatttgtaaagttgtcacactattttttaggaaagtaataataaaacttaattcgctatctttgttttctcattttttccttaaaaggaatttttgcaaagcttgtatgtacatggtttgtgtattgtaaatatatccaaaaatataccttttttatttttaatttggtatcaaagccaaccgtttcgtaacctttgactttaattgttttattttccttcttcaccatgtttaatgcctcaaaaggcttaaaaaaaatattccaatgaaatctaccactgtttcagtcaaaattattcatctgaactctcatttcgtccaagtcaccaccattcgatacagatgtacaacgtggttgtggaaaaatgggatacttgacaggtgagaagaagaagccagcgaaggaggatttgacatatgagatgtggatgctgagaattcaatggtaatggcgtggcttgtgaattccatggaggaggagatcaattctaactatatgtgctaccttacaatgaatgatctttgagagaatgttgttttagatgtattttgatttggagaactaatttcaaatgtttgagttgaatcttaaacttggtgacatacaacaaagggaggactttgttacaaaatattttaattctctaaaaataaaaatttgacaggatcttgatctctttgacacatgaatgacaatcaatacaggatggaaaacaccacgaaagaactattgagaagactcaaatttatatgttcttggctagactcaaagtagagtttgataaggtgaggcggagaataattagtcgacaacctttacctccaattggtgaggtgttctcagagatcagaagagaggagtctcgaaggagtgtaatgttgggaaaaaaagttattg

SEQ ID NO: 73265 - DNA, 1495 bp, Cannabis sativa
tgtcgtttttggtgttgaaaacgttgaatctcaaaggatattaaggtataaatctaatctctaataattaattttatttatatacattgttttattttgtaaatattttgaggatttttctatattattaagattttgttcatatgattgtgcatggtggttggattttggtcggcattggtggcggaatgcggtaataaggtaaaaaatataaactttaataatatatatgtatgtattttgtgttgtattgaatatgtattgcgtgtatatgtattgtgaatgagaataagatataggagattaatttatgtattgtatatgtatatattgaatattttaaagtaatagttttgtaaatactatgaatgagaatgagatagagagtatggaaataaaagtttagaaattaatttcgaaaaaattagtttagaaattaattctattttttatcatttttttctattttcaattttatttatgtgtttttattttttttttagctaataaatagttagtaactagttactcattaattatatgacaagtaagtagttaaataaagaaatttttaattttgtattatttttttatattgtaagttgtgaggtcaatttgcaagtatcagacttatttggtggtacgtaatcggtttctagcttgctcgaggtatacatatataacttttaatattagttaattattaatgcttagtagagtttgaatatcttaaatattcatccttagagaagtaagttctgtgatatattgtactacgctcagatgggtagaataatatacatgttagatgagtttgaatatcttaaatattcatacatagtgaaataagttatgcgaatacatgtattgaagtcggatgggtggtaaatttttatattgttaaatgttgttgtaattgttttatattattttggattattttttttgttgttattaatagctttaaattttattaggaatgttcaattatagctattatgttgatgaaatttcggtagaattaagattacttactagtatgtaatttagtatactataattagttagtagttagtaattttgtaagcctcacaaattatagtgaaataatattttggccctatggaatctttgagagaagttttgttgttagaaagtgaaaagtaaagaatgaaaagaagaatgaggcttatacatagtttatggaaattaatacacataatctaccatttcctaaatccaccacacaatacaatgctccattagagttaatacactctgatttatgggggccaacccttataaactcatcaagtggatataggtattatattagctttgttgatgcttacactaaatgcaattggatctatctgttaagaaccaaagatgaggccctacctacattcactaagttcaagacacaactagaattgcaacttggaacaaaaattaaaaccttacaatctggctggggaggtgaattcagatcctt

SEQ ID NO: 73266 - DNA, 877 bp, Cannabis sativa
  modified_base (47)..(49): a, c, t, g, unknown or other
taattttatttacagaaaatacggtcttttgatgtatttttatgttnnnctcttattaatttgttgttattttgatgttgcttaaatattattttcatgttacttttatttatttttcttgttatttttgtattatttttatagagcaccgtaaaaatgtaaaaaaaaaaaaaactttaaacataaaaatataaattttgtttagatgctttgtgtagttatcccaatgaatttggtagcctatatatgtattttattataatgcatatttagtactgatttgcaataatgcttattttatatgactgaaatttgaagttgtacttgttaaatatttctcaaaatcaaagaaatcataactaatatgtactaatatttattattgaaaaaaaaaaaaaggaataactacaccttgaggtttgagctaaaaaaacaaaaaaaaaaaaaacgaataattgcatcacatactgaaatttttaatttttttttacttttatactgtggggcggattttttttctttcaaaactactgtgtttttttttttttttttcaaaaatactgtctaagttttatacagtgtactgtgttaagttttcattattgttctttagttgtttttaattgttacactgttgtttttagttgttctattttgtgctctaccattgttttataaaaatacaatatttttgaaaaaatttctctgtcacaatatttttataaaagttaacctaaatttcaataattttgtaattttcccttaaaaaaatattcaaaaagatcttcatgaaaagaaagggccactttggtaagggctggttactgcccaatattatgtttaatgatcaaattaaataggggtaagttgaaaaata

SEQ ID NO: 73267 - DNA, 772 bp, Cannabis sativa
atacattaacatattaaaagtatattattgcctagttggttttttgttgtttaaattatatattatctattatattatatacttcattttgaaactataaaattttattatttctatcattaatataatcattatttaaaaaaataaattattattttaattatcgataactaaaaaaagagttgaaagtatgaaattgtaacaaataaattttatgaaaaaagaaatagcgtagttgtacaaaaaatttatcaacttatcaaaacttagcaaaaaaaagaacttcgtaataaaaaaacatactttagagctgatattgttttgcatattgcaacgagattgatatcttgttatttttctatcgctttatagttgtcttttaattgttttcatgttatttatgtgttctatagttattttttaattttactgaaatacagtatttttacaattttaaaactttaaaatagcattttcaaaaacttaatacaatattaatgtaaaaataagataaatatttttctagaaaatcccaaacttttaggtgtattttttcaatctgtcataatagaaaattgttatttagaaagaaacaaaaaaaaacacacgtttttgctgaaaacttatgtttcactccttcggacgtagaaaaatgttaatatgaagtaatatgttaaacattcacatagattatgagctatccaaacacacattaaacattattgctcataatcattaaatccaagaccaatactttatttagagcatcaca

SEQ ID NO: 73268 - DNA, 680 bp, Cannabis sativa
gactatcttcagtattgatttgggtagtgacaaacatccaaacacggagtgagttttgcctcttgttcttattttgtcttctacaactttgggcaatctctcttatagttccctaccaaaacgggttggaaaaatgtcttgcaattacactatctggggtgatgtttcttacatcgggggtattctagataagtatagtgacatccaaggccaccccgacctggttttctaccaaacctcttcttctagctcaaacccactgatgtagatggagttttcctcttctgacttttcaaggaactagtaccacctttgacaagattaaaagcaagaggagtaatacccctaccaataacaaaagttccttgggattcttgagcaagctctttagtgctcacgactcaaggggtattcatcatatcttgatatcccaaaatgaccaaaggttcttgtatccaatatttcccatacggtgatcccatttgggtatcaaccataaactattttgttgacaattctgaaactaaagtaactggtacttgaggtaaaggcacaataggagatccatatttccttaatctcttaatctcctcctctaattgttgtatcatagctcccatctccgtgaatcgttgctctaattctagcggagcctatggtagattttcataacaacctcc

SEQ ID NO: 73269 - DNA, 1180 bp, Cannabis sativa
gagatcgattctttgatcgaccacgccaacaccattctagtaagatttgagcgtctgggtcatcttgcattggagagagtttccctgagacccttaattgacttcagcgtgtactattctagaccacatttctattcagattcttagtcatcgtctagttcctcaataggtaagatttcatccttgttattttttgaatcatggttcatgttcaaggtataaggtaggaggcaaaatatctgttgtttaagaattagggttttgagcttgtgactaggatactgttgctgattagcggagaatgttttgattagctccttaagttgccctgaatattgttagatgttgaattcttttattacattattctaggaaattccaatttgtcgctgaaatactgacaagaatctctattcctgtatttaagacccttatggtttcgaacaacctatggacctttttgtttctcactcttgtgttctcgatttttttacttggaacaaatgctccctggggattttgtttgtggataataaatgtaacgcccgtacttgtataaaaatattaattttatttacaagcattaaacgcgaaaaatcataatgtcgtatttttatttaatacttgaaatgttaaaactggccagttttcgtacaaaagacataataaataataactaaaataattgcaacataaatttaatagcataaataaataaacagagtgccctagaccccagttgtatggctttcagcgagttcacacacacaagcatccaaagttccactcgccaccggcattctaaacttttaggtatacctgggtctgcacatagtaatttgataaggttgagctgctaaactcagtaaggaaatgtgtgtcaggtagtcacataaataaataaaatacacacaactaaaatgcacatatttagaaaaatagcaatacataaacataatttgatcactagtagctaataactagtttctaagccaagtcacataataatgatcacgcccgagtctgacattggcaaataaactcaaactattggactaaatgatggagggctgggtacagtaaaatcgtacccactactaaatgcccccctatctaccatatagactcaacagtcaagtatttaaccattatcttctcggtcaaatcatatcacataagc

SEQ ID NO: 73270 - DNA, 1105 bp, Cannabis sativa
cctcaacatttaacctaatctgatgtaacttcaatactacacaacttaattgtcgtgatatttccaaccactctgtcgagtcgccaaggccgccgaattcaataatattttatttcacaaatggtatctactatacccacgcaatccgataaaatctccgtaattaataaactacactttatttaatcatttatcaaattcacactaattaccacacatttagctcaagtaatattattatctcactccaaaattagtttaatcacatatttaataaaatatgcccaattaaatattattatactttccgggatattacataactaatcttactctaaattactaactagtaactgatcctaattctatcaaaatgttgatagtgtaacaattataatcgaacgttctcataaaaattgaagttattaataacaacaaaacttaatccaaaataatataaaacattcacaacaacatttagcaatacaaaaatttatcactcatccgaccgcaatacatgtactcatagatcctacttcactatagataaatatttacgatattcaaaatcatctaacatgcatattatttcacccaaccgaccacaatactgtatatcgcagaacctactttactacggataaatattttagatattcaaactattataagtattgataattaattaataacaaaatttagtaaatttatacctttagtagctaaaaatggatcaactccaaataatttgaatccttaaaaattaacctcacaacctacaatttaaaaaatactataaaattaaaattttaattatttaactacttactaattatatcatttatgaataactaatcactaaataattaatttattactaattagttaagttagtaatttattactaactagttactaatgagtaactagttagtaaaattagtaaccagatagtaataaaaatacaccaataggaataaaaattagtaactagttagtaggtgtaactaactattagttactagctagtaaaaaaagttgaaaacaaatgaatatgaatgaaaaaaaaaattaaatttaatatgcaaataaaaaaataaataaa

SEQ ID NO: 73271 - DNA, 849 bp, Cannabis sativa
aaaaaaaaaaaaaaaaaaaagggccaaaatataagttgtaagaaaagttataaattttttttaagtaaattattattattttttttttgaaaaaaaattaagtaggatcaagggattcaaggcctctctcacagtctcactataggtgtagatttctaagttgggactttatttattaaaaaaaattgggtagcatcataggattaataataattattttattttgggtaaataacgacataagtacttaaagtttgtaagtgacataagtttaatatttatttttagggacataagtatctaatatttgtaaaattgtaatttttttataattttgtcagtctctgttttgaatttattaaaagagcatttaaaagtaattgatattacatatttttgtataaattcaataatctagaatttggatattatatgtgttctgtttaagacaataacagagaatcggtattgacaaaataaaaactaagattatgacacttacaactttaaaattttaagtacttatatcgctatttatctttttatttaacaactataattttaattataattatattttttttgaaaataaaaaattaaagtagatgaagaagtcaaaattgttatgaaatggaattatttttcgaacaaagagtcaaataaggaaattttaccattaaatgaaactaattattgtaaagtttgttgagatatatttggtgtttatatgaaaatttttgtattatatcgaaataataataatgtataacttatattattattgtttatccatttttttggaaatcgaattagtaaaagaataagttaaagaaagaatgattttaaagt

SEQ ID NO: 73272 - DNA, 1708 bp, Cannabis sativa
taaagaaaccttcattatttgttaattaatttctcggaaccattttttaagatgataaaggtatattttttgtctactcaagggtacaaagttaggtgttgtttgctttgaggtatttaattatgatttatttgacactgtaaatatagattgtaatgagataaagtaacttgtatgtatactataatatcgtcactgttattacaattaatatttcaaatttaaataaaaataacaagatagggaaaaatagtgatttcttaagaatgtaatcaacattacaattttttaaaaataaaagcaaccaaacaactaacatattacaaaattgcaactaggcaccattaagtataattcaactctgatgatttcctcccgcgtctcgattttgttcgagtgtctggcacacccgtggtcggtacgtcaaatataagaacgctcatcccacgatggccttgtagaccgcgagaggtggagcctcagttgggtggcagatttaactgtgttagaagtagttccatccagcctagtccacccattcgaagcccctatcaacatttgctgaatttacatatagtacataaattgttttagaaacaaatactaataatataacgctgaaataaatagatataaagagttgagttattacccgaatttgttatgacatgatttattggattgttgaaattcctttgatgcacctacaaaacatggatgtagtgcataccaatccttctttttacacatcttcacttcactgcaacaaaaatgcatattttaattttttatattttatccctatacatacatctatagatagggagtgacttctctaggcaacaaaacaacactaaattgaggtgtgaaggagtaaggagaggtagagggatatatatatatatagtacttgtggatgtgattgtgatgtgtagtcttgtcacaaattaaataattaatatacctggtacggccaaacaagggttgatattaccaaaaaatgaagctgattttttcgatcccttgaaaaacgtaacttgaactaacccaaccaactattaaattttcccttggaagacgtaatttgaacaaaccaaatgagcggtttggttagggtttggttcactttgattagaaaaattcaaaatttaaataagttaaatttttttccctaaaaaaacaacaaatatccacataaacttctcacatgtagcaacaaatatccaaatattatgtccaaataaacatgtctgcccaaatgaataaacacactatacaatttttttctctctaagaagatctcttacatattatgtgtctttatgtttattttttgtaatcgaaaaaatttattattgaaataattattattcatattaatatttatctttcattattttatgtaattttatttaataataaattaaattatgatatttactaataatgaaactaattatttttattaaataagtttttaagattacattcaaatatttttcattcgaataaagattataataattttttgaatattatacaaatatagatatttaataacaaaagtttaatgttctgaatacaatagtattctgagacacaaagtttgtaataaagttaggtctagggtcactactgccattgtgcatcggcaccactcagtagaaccctagttcgactgcatttagtgatttcgttacgaaactag

SEQ ID NO: 73273 - DNA, 1112 bp, Cannabis sativa
gggagcagagatgggtctgagagttagtggaggagagagaaagtggttatggagatgatgatgatgatgatgatgatgagagaaggggaaatgggtggtggtgaggaagtgttgtgagttcaacatttgatttgagtttagagagagaaagtaagagagagagagagagagagagagagagatgaagctctttcttcttcttcttcacttcactctgctcttttcaccattcattcattaccagaaagaaagaaagatatcatttttctttatctaataacggtattaaccgttacttggataatttaattattttattttattttgtaataatatttattttttattgtttaatataattgaaaacatgtgattttatttttgaaaaattattcatttttttaagatacaattttattaactcaaatcagttaaaagtaccttatgtaaattatttagaattgtagaatcgaataagtataactagcatttacctataaaattttagccaaatggtgagtagcacgattagcgaattgcttgataaaaattaaaaagacattattcaaattagaaagaatctctctgcattcagaaatgcagaacacgaaaataaaagtcatatttgacgaattttgaatagcttagatcgtgaccaaattgtccgactctaccactacattatgtcgccttgtttctttcaaccaactcaacacctcattaatcccgatactttagctagaataagattaaccaccctcattcgacatactgtccgaacaaatattgtggaaatattggtacacctggtacaaaatactgaaagagagtgaatttgaaacgacgtatcagaatctgaacacatattgcagatttctcagagccaacttggacgcaaggctaggaactcctctcaagtcgagcgctattactcagaactactcaactctaaaatgttatctttcttgtcatgtatcagacattaatattcacgttaccaaaaaaaaagtttgagttaaactataactctcaattattaacatgatcattttatttagatcaaactttaattagcaatacacttttaaaaaaaaaaattattgtttttctct

SEQ ID NO: 73274 - DNA, 501 bp, Cannabis sativa
cgtcccaccgctaccgaatacaaaaacagaataacgagaaatccacatttagcataactaggacatactaaaattaaataaatattcacaaatatgaaattcataattaataactcaacatcataattcaccctaattatttcatataatccagtatattgaacttaagcggtctttacaccacttgtttcaagtagcaactactaacatctgaggcttgatataaccccacaaaccctcctcttgcgaataaacaatatagacccatttgacccataattaagttatcattttttgtcagtactgtcaaaatgtacttccctatggcagccacatttcgccataataatgaaattaataaacaagattattctattgatgagatcaataataatcaagtgtttattggagtttcgaaatataagttcatggtccccaagtcacctctataaaacactataaaggggaaggttttacttgatgaaaagatttgagatagaa

SEQ ID NO: 73275 - DNA, 754 bp, Cannabis sativa
acaatgagttatttggttttgtcgattgtgatttttttgagttaaggaatattgcattcggtaaattgctgtgggataggacattccactacatgaatttggcattcaacgacggtgacaatatttatacaagattgagaaggccaagtaagagaaggataagttttattcttttaaattccaagggtttccgtttgcgttcctaatttggttgttcgagattctaccaagtctgtctcctaattattgcaagaggattgccaatacgtatcctcgaatgttgaattgggagagttcgtataagaagaaaaccgggggctattcagaacttgtttctgaggtttttaataatcctgaggtaactttcaattattataactagtttcttttttttttaatagtgtatttataactggtttttttttcatttctttccaatatttcaggccactgttaaggatttttatcctgttggctgtgagcttaagaaagctgctttgcaaaacatgagtttgaatcggtttatcttccaaaaaaaccttaaggtttcgatggaaaggtatgcattctttatgccttttgttactttttggttgtgttgctagagtttgttttttatttagtttcttgtctttttttgttatatgtttttttttatgtttgttatgtattattgtttgtttttagttttcaaatttggagaaggctttggtctgcattcaagacgactaaaagaaaattttattaagtatta

SEQ ID NO: 73276 - DNA, 609 bp, Cannabis sativa
aaaattttattaattttcttaaataaataatattaataatagtagatatttgttattttaaccataaaaatacaataaaaatgtatggaatcacaactaatctgtgataataaacattctccttacaaaatctttatcccaaaaagttcaagtatgcttttctctttatttgcactcagccaacctatgtcaaaatgcaactaaggtacctaataaactttttatttcaaatgtcattgtgcccatatctgttttacagaatagtagatatttgttattttaaaagtttggattgaagatctattcccaggaataattttggtaggttattttatttacacaatatcttgcatagtaagtacttagtactaatagttggtaaaaaaattacatgaaaaaaaaaaaagaaaaaactcttttgagcttgttgtattggtcttaagatctactttataaatatagctttcgtaggctatgaaaattgcaaaaatcaagattaccgatccaccacttcaaaaaattgttatttttagtgataacattttagtcacaacataaattttttgtgactaaatgtgacttttaatcacaataaaaaattatttgtga

SEQ ID NO: 73277 - DNA, 737 bp, Cannabis sativa
ttttagagtggtatttttcttatttggtgattgggatttttctcctaaaatatctattatataaccgtatctggtataatcacttttttttttgagaaattttactgttattaaaactggcaatcgtttacaataacagagaaaataggatttgggatttcacccatccaacagacatcttcatccaactcgagagcatacttagctaaaccatgtgcagtttggttagcatttctcttaacatgagaaatagttactcctgagaaaaaggataaaagacagctaatatctacgattaaatcattaaaacttgagaggttgcgagatgtagagtttagggccaaagaaactcgcaatgcatctgtttcgatatgtgaaattgaaagtggcatttgcatcacccaattgagactatgaaatagcgccttggcctccatctcatccgatctaaaacaaccttgaacaggcttggaaagagcagcaacgacattaccaagataatctcttataacaacacctattcccaaaattttcaactcatgattgacagcagcatcaacatttaatttgagtccagtaggtgatggtggcagccatggagaatgtcgtgtattatcttgatgcagcctagctactggtgcaacttctggtgtgtgaatacttgttgaaacagtcactggaggtataatgcttgctgatccatgatagtgctttgctttgctactaataaacctctc

SEQ ID NO: 73278 - DNA, 796 bp, Cannabis sativa
aacaaaacacagggtccaattggtaacttttgtaaaacagagggtccaaaatgatatttacccatttttatatagaaaatgataccaaattccaatcaaattatttactgaacaaacattatacatctcaataatatcattctaaatgctattgatttgatttgccttacaaaattgtgaaattaagcttctttctctgtctcaagctagacattataagatcaataaaggtgtcttctttgcatggaatagtaagagctcccattggatgatcgaaaccaaattcttcttcagcttgatttagcagttcttgaaatgatcgccttttcaagaccgaaatagggataacaaatcgcttcattttgttctcatcaccaacataaacggccaaatagccttttgggacatctcttgtgttagaagagggcctttgaatgagttgcttggcatgaattatgctttcaaaatggaaactcatcatcttaaaactctcaaaaagaagaagagaattaaaagaaagtggagagagagattttaaagaaatacatgagaatatgagaatgtgaagacttggggtgccaagaaacctaatcttgaaagattatataaaaacaaataatgtatcataaagaatggtcaaagaagaaagagctagccaattaattttatggggtctagatactctcatagcaaccacttcatttctactcatcattattgacttgagtgaagattttgccgtcttatttgaaaatcaaagagcccatttcaaaatttctctttgggggaattttct

SEQ ID NO: 73279 - DNA, 1437 bp, Cannabis sativa
  modified_base (1400)..(1406): a, c, t, g, unknown or other
gattagattgaaatgggttttatttagggcataaatcccaacaaaatgaacattggtagagcccaagacaagcaaactggtgagaatggtgcctacgatccagcaagatacgtgtcaatcatcgagtcggaaaactaccaactcagacgccgcctgaaggaggcaaaccgatggaatgctgagttggaacgtgaggcagctgcgaccagagcggcacaggataataatacagctcaagagaaccctcaaaacgcttaggaagaacaacctggggaaactgaggctccccctgaaaatgaacaaccaaataatcagctagagccgtctcacagaaatgagaacaaaaggcgaccagaaactaggaaacgagaaaaccctcgtggaaacaaggagaatcctgggactcaaccttgaggacgtgggtcaccaacgaggcgttgccaacgttcttctcaaacaaaaaagggaaggggcacgtacaaactctagtaggggacacacaatgaaccacacccaagggagtagaatgggacgtgaagaggcaattgttacctcggggcgcacaagaacccacaaccgatcaatgccaggaggagaaattactcatcgcaacaatgatcaagaaagcacaagcacgagtaaaactacaagtcactcaaggacaagttccatgagcaggtcgagatccatgagtaggacaaagtttgtaagtaggatgaggtctgctagcaattataaccaaccggatctttgagaacacttgcaccagagaaaacttgatcttcgccaacaactcggtccaaagctaggggatctaatctaattgggaatatatgagtttgaggataagttcagaaggtatcaagtcggcaagcaaggaaaataatctagatatgactcagatgagtaactcgagccatataatctaaacatcatgaatactccttttccccaaggattcaaaaatccccacgtctcgtcatatgatgggaccaccaatccggtctcgcatttaaacaattttaatactataatgccatctagcaatgttacaaacaatctacgttgtattttgtttcccacttcactagttggagcagcaagcagctggttcaataagtttacacatcattccatcacttcttgggaacagttttctaaggacttcaaaaagtagttctaggccgcaagggataggcgactcgaagcattctcactaacaaacatagagcaacagcctggcgagacgcttaaggcatacttaagtcgttttagcatggctactgtgatagtaagaaatttggatcatagtgcccagcttactacccttcaggcagggatcactactgatctctccactactggaggtgaattgtggtactgttggaatttattttacnnnnnnnttagatctactcataagtatgtttattaaca

SEQ ID NO: 73280 - DNA, 638 bp, Cannabis sativa
aagtaatttgattagtattatataaaagacgtgtaggcataaattaaatttaaattggtataaataatttctgtttggtttcccttatttatttgtagatattttatatatttgtaattaatattgactaattttgcggggggaaaatcattagtttcccttttcattttttttttctagtataataagaatttgattctatttaataaattacttaaattgaactttgaaaagaaaaagaaatattatgaattgaaatatttggataatgaccaaactatgaatttttaatatataaaagataataactgcaaaaaaataaaataaaagataattacatgatttttgaattataaaaaatatttttgctagagatattgtgattttatacgtgaaatataatctttatacagttagagatattttatttttatttatttatttattcaaatttttttgagaaaaaattataaattaatatagattaagcaaattgagaaaaaaaaaatacacgtgattatgataaaaaataaattagttaaaaaatgattaaaattagttaggaatattttaatgaccaaattatgaatttttaatatataaaagataatcattgcaagaaaaaaaatatatataaa

SEQ ID NO: 73281 - DNA, 705 bp, Cannabis sativa
  modified_base (658)..(678): a, c, t, g, unknown or other
aaataaataaataggacccatcaaaagctccaaaactacatactaagacgaaaagtccaaagaaaaggccacgtgaaataaatcagataaaactttttaattattaaagaaaaaattatagaggacacgtgtaaatcatctaagcactccatgacaaatgagtaaatttggtacacataaataaatcaattaaatatttgtcaaaaattattaaaataattattctttacaacacgcggcgaaacgaacgatatcaatttcaacactcacttctttttttctctgcctcctttttcataacacaacaaacctttttattatttttattattattatattttacataaaaagaatcaattaaattgtgaaatatatccaaatttttcagtttgtaatttatgaattcatggttgattatgatttttgcgacgaaaaattttgataggtatgaaattatatttttgtattttaaaaattacatattaaagtttaagagatatgataatttagtagaacataatttaaaatatggacaattaccgacttagtaaaatttgatgaaattatacgtttcaataatttaagagaaatttttaaaaacagaaaaatttaagtgccgtttggcaacacttatgttttttaattttttaatcacaannnnnnnnnnnnnnnnnnnnntttaaaaaatttatttttgaaaaacaa

SEQ ID NO: 73282 - DNA, 682 bp, Cannabis sativa
catcttttatatttacatttaaatatatatttctgcttgattttgtttttacttctggcctgttttacctttgtccgtgtggtatgccttactacccccctgagtggcgtgaaaacattattttttaaggcactcaactttattcataaatttagaggttgcatatacttttcggtacaaattctcttaacaaagcctaagttacattttttgactattggtaatacttccggagatgatcagcgttccaagccctaggcaccatggttccatccaatcttttaaccttataggtcgcggagccgattttatcctcgatttcatatggtccttcccaatttggcctaagtacccccactccgggttcttgagtggctgggaagactcttcttaagaccatatcaccaatagtgaattttctacttttaaccttagagttaaggtatttagtcaccttcttttgataagccgccattcgtatttgagactcatcccagagttcctcaatctgatccaacgcttcttgtaataaagctttgttcgttgttggatcataagttgttctcctgtgggatgggaataacgtttccaccggaaccattgcctcacaaccatatgccatcgaaaatggcgagtggtcggttgatgttcttggggttgtccggtaggcccataacactct

SEQ ID NO: 73283 - DNA, 590 bp, Cannabis sativa
taaaaagtgtataaataaataaatatatttatactgagctcagagagagagagagactgacgggaggtggtggtggtctgacgtatgcgaaggagagtagagggagaccaacgggaggaggggtgggtgaagatcgatagatgagagagacgagaagaaaaggagattgagagagagggaggaagatggcgagagaggagggcgatggtgcagaggcgtgggtggggttttggagagttaagatttttgttttagggtgttggaaatggagaaaagataggtgagaagaaataggtgggcatgtggaaaatagaaaaaaagtaggtgggcacgtgggaaatgtggcgaaaagtaggtgatgattttttaatggacccttatagtcgacggtttactacaattttaaaggcgacagttttaaatcgtcgcggcgtcgcctataagggtccattaaaaaattgcattttattaaaaaaacgttgcctattttgtttactacaattttaaacagtcatgaatactaaatttttcccaacggttttaaaccactgggaatgtaaaaaaagaaagagaaaaaaatacagatcttt

SEQ ID NO: 73284 - DNA, 685 bp, Cannabis sativa
ttaattattaattttttttttaaaaaaaaatagtgtagtctatagtgtcccactaaatttagtgggacactgtagacaaagccatttatgaaaatatgtttagtgtcccattgaagtaaatatagtgtgaaactacactatatttggtgttttaatgtcccattggagatggcctaattcaacaataaaaatttagtatattctttattattatattattttattattttttttttgttaagtcttaagttatattacaacaaaaacatcgtatacccatctatacatgatttctatatacaagtcatctataatctctccaaccaatatttatcacgtgccttcattttcttaggcaaaataaataacattctactttttatgtcttgcttgatacaatgaacaaaaacttttactgtatccactttttctgccataaagctttgtttttatttagccatatatgatacaccattgtagcaataaccatgacaaaaaaattactgcctaaatgaagaaaaaataaaaaccaccctaaccaacctctaatctcatccaaacatcttctactatatagatacattcatggctcatttagaacgccgtattagatcgtattgtattgtattgtattatattgaattgaattatatatcatatttttatataatactatattaaactt

SEQ ID NO: 73285 - DNA, 878 bp, Cannabis sativa
gagaagtaggtaacgattttttattgggcccttatacccgacggtttaaaaccgtcgcctatagtataggcaacgattttatactgtcgagtataagggcccaataaattcacgaattccaataaaaactgtcgcctattattgtaattattgttataaaccgtcaggaatactgattttttccgactgtgttaaatagttacttaatttttttagcaacggtcccccaaaaaaagcatttttagaaccgtcgcgaattctaacttttgtagtagtgacttgtcattgtgttttttttttgtttttgtttttttatatactattttttatttttctatgtattaattttttagttaataattctttgcatttattattagtacttaaagtgttcaatgttatatcgatgtggtacctactaattgattagtaattttttatttaatcttttttatattttttatgaataatctttgtactatttttttaaatgattttttgtattattattgttatgtggcaccttaaagtgctcaatactataccgattttacatacataataattggttagtagttttctaaatcatattaaattaaaatttgtaggaactaatattaaaatatatcaacaacgatgttatcttttgtggtgcttggtaccttaatgtatctttaatattttcattattaatacgtacatatatctattaacttcgattaaaatttaattttttgttattattgtatataagtttgcaaaaatatctctaatgaaatacgtaaaaattgtattgtatttggcaaaaaaatgacttgtgatatatttgcattaatttttagcattatactctaatatataattgtaaaatttgatgt

SEQ ID NO: 73286 - DNA, 1301 bp, Cannabis sativa
gatctcctataaggttcacgtaacaggctatagctaaggcaaagttccttgcaggaaccaagccatgttgagtcttaagttaaacattcgactataatagactcaccattaagcttcatacatagtttccaaggaaaccacgtatgaagctaaggttgtatatgcctatagagccaaactcttgttgaagtcacaagaggacagaaaattggctacccacttggaaccaaggtccatgtcacccaagtttctcaagtcttgaaagggtcggccagggtcccatgactcagccaagaactggccagggtcactaaacccaggcatgaataagcaagatttatagggtaaaaccataaagctggccaactgccatgattaagcctttgggccaaccaggtctcatggcaagacctcctaggctggccaaggtaagttttgaatcctgatgtgtgtttttcttttaaaactcgattatgtgcctcgtattccttatgacttaaagagtcaagaatcatagttaaggccaaaattgaatctttttaatcaaaaagtagcacaatgcacattccaaaactgtcatgaggatctatataccaaagagaatataaactaacatgtgaatcaaaagtttccaaaagcttaaaaagcttgaaacttgttaatggcaggtatgtagaagagatacccaagaagagaagatgagatgcatacagagagaaaagatcaaagatacataagcatgtcagggaaaaagccaacacttggatagataagctgctcaacaaagactatgtagacaagacgatggctagaaagtccctatccgatcaaacgttcgaacatggacttgcgcagaaaatgttatcctaaattttgtccacctaacatggcatgtccacataagccaaatatagagtataggtggagtacatccccaccaatagcagagcacaacctccgtgaaagatttagcaaaaatgtcaagcagcgaccaaagagagtgaagcgagcccataaggagctgtaccaaaatacttgcctggccaagaggagcctataggacggctagggtgagcctataggctggctaggatatgtgcacaagctgtccgtccaaggagactctgttcggccaagggaacatgacctcttcgtggaaacgatgttcaaagctgtcatcaacttgcaaaaggctagcctccacactcaaaggttggcctcctcttggtggagctataaagtcctgccagaccctgcaggccttgtcctgctaggttctagaaggaccatggttggccagg

SEQ ID NO: 73287 - DNA, 1369 bp, Cannabis sativa
aaaataccaccaaaaaaatagcctccctcaaaatccgacaacatggacccactgcatacagtatttttgtactattaactgccaggaacaatgaagtatgttgtaccttttcgtactataactaacacctacagtcacttgattgtaccttttttgtacctttctatttttaaattaaaaaaaaaattcacaaccggttaacacacctacaacaaccggttaccacctaaattaaaaaaattaaaaacatttttaggtaccgtgggacccacctgttgtacaacggattgcaatccgtgttttccacatatgggtacaaaatcggctgcctatattttagatatttatatcatcatatatgtatgatgtgtagttactaatttagttacttttttctaaaaaattaaataaaaaaattacttttatcttggttatcattttttatacaaaaaaaaatatattttccatattccaaaatatagtttaaaattgttaaaaaaaaaaggtaacatcaatatatcttaaaataatataatataacctaaaaattaaaaaataaaattatagtttcaaatttaattaatcaaaataagtaactgcaagtgtatgaaataaaaaattatctcaaaataattttttccttaataaaaaacgtaactaattgatatattttttatatcaaaagtaatcaaaagattaatatatttttctcacatattaaatggttattttattatttatctatgtgtaaaattctgaaataatttttttactagaaaagtaaccaattgatatcttattcagatcaaaagtaactaaatagttactattttcagaactccgcaaaagcgaaaatttctgatcgagatttttttagctttttccattttcggtaattattttgaatttcggtatgtatgctgacgtgatacatcaatatttgtgcaaataattttcttaaaggtatttttataaataaaattaattttaggtataatattaaaaatctcccatttgtaaatgtatatatatttatacacatattaatatttctttaactttctataattatttaatatattgatattaaatgttatttttaaatttatatttgactaattttattttgtcaaaaaagaaaagaaaaaaaactcttcttaattttatatgtatgactgattcttttaaaatatattattttggaaagaaaaataaaataagttacaaggtagatattctatataagaaaattttaattgtaaatgttttatattaggctatgtttgttaggaaggatagagaatagggaggatggagagttggtggaggatgtagaataagcgggagggagaggagagtagcaatcctt

SEQ ID NO: 73288 - DNA, 1701 bp, Cannabis sativa
aacacccaccgttttgaggaacctgaccaatcacaacctacgagtatgtcacgcgtatccgactagcgatatacctcaaaaaacggctgggcgtttcccagtgacccaaggggcatgcgttttggagcatgatcctaaagttactaggaaacacccaccatttcgagcaaatctactagtcgaagaatacgattatttgggaacagagaacactggcctatgttgcaaatggctgggtgaatcacagtacttcaaggaacatgcgatcgcacgcatgaacattagaatacggtgacacacccaccattcgaaagacttaaccagtattcccacaacaaaataaaaccctaagttctaaacaacaggtaaaaatgctaaagtctctaggaaatcctaaaggaagcagatatgcgagtattcaagatgctcatctgaatatccgcgagtattcagggataagcaatcaaaaaggtgcgagtattaaaactattcttcctaaattggcggttatgctaattacaggtctgtttttcctggggattatccaattttaaacaaaggagtaaaactctatgtgtattccctacaactaaacatgcattgtcaaacttctcaaagtgctaaaaaacttagaaacgcagttttttcaaaattagaaaccaaaatacgcaagtagtttcgaaaactaacctttagttttgacaattctccctgtggttggtctcgattacttctgaaacttaagagattcaagaagaaaaggcggaaatatggatgaaggacgtaagtctttgaaactatagagagaaggggaaaagaggagttggaaataagagggaaaataatagatttgcttcatatcatggggcttaaatactgttacccctcataaattgggattgtgacacctggaagcaggaatgcctaaggtcatctcatccaacggtcagccataggcacgccaacatgaacaccgaagggtttcgtgacgtggcaccataaataagataaaatgaaataattacagctttcattttttgaaaccctcgatgggacaaccaaaagtcaccacctcgtgacaacctttcacctgtctctcgcgtatagtttcccttatgatcgcacctgtcaagtcgcgaaactaggggcatgtgttatagtgagatttttctcacccagaaactcgagaccagactcctgtttaaaggacacgtgtactcaatttccccaaggaaagatgagatgtccatgagagactcctcgagattagccctcgcctgaaccagacttagtgaggtgatgtggatatgaccaagtgtagccgcatttgtacgactcgcattatgcaggaccaagaaacggatctgactcgcatataccacgatatatacgagtatcctttcaatcctcctgcgatagagattgcttctctgtaaagcgagctggtctcgatgacccaacaacctcgataaaccaatatagactcgcatgtctaggttctatcaactcgttatacgatgtccgtaagtgcgactatacaagaacgcagacatcctagacttaattaaatgttaggtctatcctgagcccgtgaggttacactagaatgtgaacagtcaactcgcatattatatgacgcatacgttgctgtatttagtgaatagaaactgttattcatttattgatgtttacgtttttagt

SEQ ID NO: 73289 - DNA, 951 bp, Cannabis sativa
  modified_base (250)..(254): a, c, t, g, unknown or other
ttatttaacatttaacatagtgatgttatatgacttacagtgaacacttagaagagataaaacttcagtacccagatggagatcataacattttacacaaaaaatgatcaattgatctcgaaaaatgatcaattgacagtgggttcgtgtagatctgatgcttgccatgtgtgtgcacaaataagaatgaaaagcaatagacaataggatttgttgtagaggtttgacccccttgtgatagcgggtaatnnnnnactccccttttagttgtattatactgagggaattactatctaggtggcctctgctatattactcttaggattacaattaatgattcaacgcctggcaaaactcaagtgttggaagcctattatgttggacaactttaaggtggcgtgtgggggagaatgaggaagagagagagtttatcagacacttgagatcaggtttgtagcttagagacagcttaggcaacttagattttcagtcagaggttaaggcctttatataagaaaccttaaaccataggtttacaattcaaatcctttggaaatcgtatagttagttagatatttacaaaagaacaaaatgcctttaattctagatattattcagctattcttttgggcttttgcggcccaattcatagcccatctttgttgtccatgtgcaccagtgtcctgtggggcctacaaagcatcctttggccggccaggcccttgtgctggtcggccatggtgttgtccttgggctggcacagccaggggtgggtggctgctcttgagagggagctgatctttcatttgttccccatttgagtgtcggggtcttaatttgctcaggtgttaacttggccttccttgtagtgagttgtactgccacgtggctcaggttttgtccaagtaagcataccatgtcatgaggataaaaattgggataacatttgcc

SEQ ID NO: 73290 - DNA, 736 bp, Cannabis sativa
gagagagagagagagagattacagtgtgagaagggaaagataaattgtactgaagaagaaatgggtggagaagaagaaaaatttgggttttattatttgtgcagaaaaaaaaagttcagccttttgcccgagaaaattcctacctctcccaaaattttcttttccaaaactaaaaataaagtatgcactacagtaggcgtgtcaaaagtccctttgtcgcgtgccttaatttctttgatatttacaaaaaaaaaaaaaaaacaaaaaaaaaagttggcacgacaataggtgtatcagccctaaaaatttgtgctgtaggcacatatttttgtcgtgcctaactacggcgtgcctatattttagatttgttgtagtgtatttcaatttctttgtatttaattgaagtttcatggttgttttgttagttttttcaagaaatactatcaaattctattttatcatgcattatttataatatttatgagactttatttatttcttaatattaagttaaatttgtgaaaatatatttaaattaaattatctaatatatgaaaaacaaaatgatgttcttgaatgtggattataatgttttaattattttattgaaaaatccatacgtctataccgaaacgtctttcaattatatatataaatagtttaatcataattttacaaatattagtaatatatacttcactaacaatttttattgtcttgatcaaaaccaacagta

SEQ ID NO: 73291 - DNA, 1016 bp, Cannabis sativa
attaaaattatgactaacatgagagagatgcccccaaaaaattaagcaataaatgtttttcaagaacaaaaacatatatttcattgtgatacacaaaattattaattagagctaagaccgaagacaaaaaatcaaaggaaaaaaccttgacttaaagtccaacaattctaattaatcttaatcttattgcacaatttaacgagactaatataatatttacataaacttgatgataaaatataattaatatacattttttaatatgtttaaatattctacacatttgaataactaatatagatataaaaaaaaattaaaatgcaatttttgaaaaatatcttagtgtagcaagaatataatagagtaaagtaacaaggtgcaccaccttttactttttgcaaactaaatatgcccgaactttatcacactgtgatagaaaaacactaacaaatcttcaaaggaagaacaaatcttcaaaggaagaattaattatttatgttataaacttattcaaaagcaaatttttttgtgaaattaaaaacaaaggcttaaggctatattatatagcctttgaattttaacatatttactacaaaataaatgtaggactaaaacccacttcttttttcattgaaaaaaaatattaactcaactattccaacaatcctcacatgaatgaaaaattgactcaagaataatcagcaaatgcttcttaccttgaatagagttcaacgttgcataggatagccatataggtatgttttaccctttgaatattttcttgtgtgagtacatttacttttattagctgagcggtaggcgtgatatctttgaactgttttgttgtttatgtaaacgatgatataccacacacagaaatctttcatggcatactttagttctcactagtatatttattttggacctgaacattttcttggttctacaagagatattctaggaattaagccttaatcaattcttataaaagtgacccatcttctttctcacatagg

SEQ ID NO: 73292 - DNA, 1195 bp, Cannabis sativa
  modified_base (498)..(503): a, c, t, g, unknown or other
  modified_base (637)..(645): a, c, t, g, unknown or other
tggaggcttgaagcggggacgttacactgttttagctattcttttgtggcctgaaactatacaggaactttagaataagctagattggtctacactagaagtaatgttcaacctgaagtttctgaagtaattgagattcgtgaagctctaagctggatcaaaggtcataagcagtggcacagagttaaaatcgaaactggctgtcttgtagttgtccaagctattaattaaaagtttatttgatctgttgtcttattttgggagaataattgttgattgtaagagtttattaactagttttgagaatagagaagtctctttcaaatttgttaaaccatctgcaatgataaataatttgatagtttaatgaagttttatattcttttgtcaaaaaaggagttttttcagttttaaccaaaaaaataacaatattacaaaaatacttccagctggccaaataaataaatttacagcccaaataaaaaaattacacaaatnnnnnntacacacaccttcaacccaggattcatgcttcctaggcaaccatcgcgcaaccacgcagcaacccaatgcaatcgaaacgaaaattcaaccagaatgagaaccaccattaattccggcgacttcacctgagaannnnnnnnnaatcaatcaaaacatgggctattttgaattcatgaaaaaaaaaagtatagaaaaactactaagaaactaaaattcaaccaaaaatctagtttaatttgcataaactaatgtccttacttcaattttcacatccatgaaatgcatatctcaaaaaattgaactggagttcccaaacaatctaacgtctcaagtataatccaaaaaaatttacatcaatactatagtaaaatgtttatcttagtgtattttcgttgttttccaaaattacaatggtgaatttgttcatattaaatcataaagagacatgtagatagagacatgtacgtgaaaatactgttctgatttttaatgtttcataacggttgcaaaaatattttgctaacagttgttttgtctgattgaaaccttcgtctgatacaatattcgatcaattacccaataaacatcgtctgattgtgtaagtgatagtgtaagaggtattttgataattaaaaatacataaaaagtataaatattgtccacaccttattgaagtatttttgtaaataaa

SEQ ID NO: 73293 - DNA, 856 bp, Cannabis sativa
taaagtacaattcaatacaatacaatacaatacgtcctaatacggcgttccaaacgagctcttaatgttatgttggttgtggtggagggcacttaacaagagtttttgatgagtaaagttctgtttctatgtttgaatttcttccattgtaggaagacatctctgtccaaccaatttgtagtaagacatcatcgagtgcatctaccttagaggagtatgcctctgtgcgggcattgtgttgttcacaaagtccattttctctgaatttgttacggccaattttgaatgagtcagaatctttttgaaaacacagcctcatcgttatttacattgcatatggcaagcgactttgatgttgagtgcatcttttttcttctcgatggccaccactctttgagatgccctcatgcctttagttgaggtcatctttagttggtcaaaacatatatcttaagaattgttaattccaaaattttgctaggtgaaatttctaagttgtctctaatgaaatcatcacttgacagaagtttgccagaatccatggaggcgatgaaagtcctcaagtcacgacaagagatcattgttggagcagtcgcatgttctcaacgaacgttatcttcacaccagcctttatttcacggcagcaggcttctagttaggaatcttctcgcctgacataacagtcaaagccatcttctcgcccaaggatcatgatgctaggccaagtgtgattttctcgccaagcatcatcactccaagccaagcgtgatattctccaccccccatcatgataggctaagcattcttcacgcccaagtgtgatcttcttgccaagcttgtatctcgctagacatgc

SEQ ID NO: 73294 - DNA, 795 bp, Cannabis sativa
  modified_base (284)..(288): a, c, t, g, unknown or other
cctttataaatctttggtttgacaggtctagtagatcttcttaagacttcaccaataggctcttgggggagcagtagctagttcaacagattcagtaagttgttcaacagttgtaggcaactcttgaacatcttgatctactagattatcattaccaacttgtggatcttcaatgattggtaatggttgttcaacatccatttgaactacatgagtgttgaccattatcaatcttgttcttgaagtggaaggttctgaaggatctttctcaggacctaagtccnnnnnttgatcactcccactgatcaaggcattttcaaaattttttgcattatttgattccacaattcttgtgctatgagatggacaataaaacttgtaacctttagaattctcagcataccctataaagaatccgcttatggtccttatgtctaatttcttctcttgtgattatatattctaacttcagatggaaatcttgaatatgtatatatggatgaatatggttctttctaatgagttatgatatatagaaaatagtttgatgataatctatttttaagaattatatttttttaagagataaaatttaaatatacaaaagtataagttcattttaaattaattaattattttttaatctactatttgtgagggatatatattaaaaaaatgagtgataaggttgatatctattatataatataattttagttttgattaagatatttataaagactaggttgatgttattacacgtataattaatttttttttaattagattcaataa

SEQ ID NO: 73295 - DNA, 795 bp, Cannabis sativa
  modified_base (30)..(31): a, c, t, g, unknown or other
  modified_base (466)..(466): a, c, t, g, unknown or other
ttagaaaatataggatctattttgtcattnnacaaaacagagagtccaattagtaacttttacaaaatacatagtccaaaatagtatttaccttaaatgaataaaatttaacaaagtaattaaacctaagattgagaaaggaatgtgatgtgatcaaacagatcacaatatccaaatatcaagaacaacttaattgatcaaagtctataacagacttgcaatactcaacacaaagaagattgcaaataaaaacagtaaaacaaactgaatttaactagagagaatgaaatctagattcagccattaaggtactttccattaatcaagtatgcaaggaatgattgtacatgaattggtaattcgatcaagagtatgaggaagagaattatacacctaaccgagcacaccagaaactggtttcacaacaccagtacacaactctctctctacctctctctctctctcnctctctctctctctcttgtttctgtaaattgaaaaaggaatcacaccttgctaagagttagttgagtctatttatagataaaccaacataactaacttaaccataaaaccggtaaagcagttagaaagtcctaagtacattcactaaggcttagtttctaggccactttacaacaattccaccttggcatagacactcagacttagggcacatgagcatggaaggctgaactttgttggaagatgagaaactcatccaatttctttgatgttgaccaagtttagacagtgtctaaacttggtttgagtgacacattttgtaaaaatgtc

SEQ ID NO: 73296 - DNA, 841 bp, Cannabis sativa
gctacaatcaggtgcttaatcctgggaattactttccaagcagctcaagcagcttgccaccagctgcttgtcccgataaaatactcgggacgtagcataaggctttctttaatttgctaagtttaaattctttgtttgttaattttgattttatttttcttaagcgtgattgtttaatgtatgtggactcattagtttgtcgggctaggcagctaaatactggtttgacctttaacattggagaaaaatatactgctgtggatcctatttgttgtttggcttaaagaaacttttgtttctaaaaaaaaaaagaagtattttattaggggtgacaattcatgatcgtgagtcgtatttgtgtcgtatcgatacccatatataacagttatatgctcgacctgaacacgatccgtttaataatcatgttagaaaataaaacccgaagacgactcgtgtaattcgtttataagtatattttatttaaacatgtcaactaatactaaaataattttaaatagattataacgggtcagtttcgtgtcgtaggttaatccaaacacgacctgtttattaaacaagttagaagagtcaacccgaacacgactcaaacccatttaaggcaaactcaaacctactaactctcgtacaagtttcaattcatgttatcgtgtctgacccgtttaccgaccgtataatacttcatacttatacttttttttttttttcaataataatagtggttcaagctttttactagtaaccaaaaacttgttttcttaaaagttaaatatgttaaaacattttataatgaaataaaaagttttcaattgtcttaaaatgt

SEQ ID NO: 73297 - DNA, 550 bp, Cannabis sativa
gagagagagagagagttgatttttttaaaagtttttttaagttttaaaaaaaaatagtaaaagttttttttgggggggtaaaatgagaagttattaagataatattgtataaaaaaaaattaatgggatattttttgtaataggaatttttattaagtataataaatgaaattccattttgtaaatacaaagggctaataaaaaatgattttagtgatacaagttgtactattagttacaaaatagggtttaggaaatcaaattaatttttgcaatacttaaaacttatttgtctcattagaggtgtcacacacctgtttttgaggtgagggacttcgtaagtcccctttatgaaatatcttaaaagatagattagaaatttttttggagcgcttaaaatcctttttttaatacaaggattgtgaatttactttacaatgattatacaaggattgggacatgttccccagccaattttctatttgggatgattatactttatctccataaactataatagttgtcttttggctttcaaaattttcaaatt

SEQ ID NO: 73298 - DNA, 1374 bp, Cannabis sativa
  modified_base (1190)..(1215): a, c, t, g, unknown or other
  modified_base (1264)..(1271): a, c, t, g, unknown or other
  modified_base (1347)..(1349): a, c, t, g, unknown or other
taataattgatgaagattctaaaacataaaatatataacaatttttatataaaacaatgattgaataatgttcaattataaagtaagaaaaaactacactatttcacaaatattggaaaaaaaataatattttaatataggtatactgtttaaaatataaataaatatgtaactttgtaagactatataaataaatagatatagtatataaatttttttatagcaacataattatataaaaaaaagttaatcgtcattacagtagagttttaaattttggtaaatgacccttgttattgtataggtgcaatagaattttgattccggacaatctaatattataattattattatttgatgaaaataatgaaaaaatatatattacacacacaacataaaaaaataaaaaagaaagttgtaaaaggttatttatttattaaatactttttctttttgtcaaattattttgagaactaatggtgtagttatttttcttaaaatttttagtttaaaactagtaactttaaaataattttcttatttaaaatttatatatattttaacaggctattttattatttatgtgtgaaaaaaatcataaaacgttattatgcacatatttcgagcaacaaatatggtcacgacacgtgaatgagagtttaaaaataaaatgtattttagagaaataaatattgtaacgtctagaggaacaccacgtgccaagattaaaatatgctaatctcgttaaccagggtccataagcctagtgatttaaaataaattttacttaattaaacaaataacttataataaaaacatacattactttaaaataaaatattaaagttacatgtctgggatcccgtaaaattattttagaaatattacaagttatttcatacaagccgacctaagtggcaaaataaattttttatacaatttcttgttggacccaactctcatggtttagcttggccagaacatgtacaattcatctttaaagctctcgaactcatggttgactcgatactgttttacccttgcttacacaatagagcactcgtgagccaaggcccagtaagacaaaataataaaatagtatttgaacaattataatagtcacatttcatacattattcatctacgtatataattgtgccatcgcactatattgttgggttttgtgcccnnnnnnnnnnnnnnnnnnnnnnnnnnagatttactaattaataaagatataaaatcacattttatgttgcatggnnnnnnnnatttatttcatgattttatgtataaattctaagcccagaacatatgtattttttgtgattatagtgttgtcagcannntggaatataatcatgtttatatgtt

SEQ ID NO: 73299 - DNA, 561 bp, Cannabis sativa
gtgcacctatccactcctatttgttttagcatttgagagaattttcttgtcaatttttttcattatcatttatattatagttatttaagacattatgcaatattttgagaaatttgaaaaaatttagctcgccacaaatagggttcaaacaatttatttcacatgcatgcgtataaaataaaaaaagtataacagattatttgaatctaatttttgacatgttaaattttttcgaatttttcaaaattttacaatgtcttcaacaactacaacataaacaattttgaaaaaaaaaaatattaactaaaaatttctctcaaatgcaaacactacaaaaatcttacttgttacaacaaaatttgtgactaaaagtaaaaaaattgtgactaaaatgtctatggctaaaggcactacaagaaatgttacttttgccagcacaattggctaatgtgatgacaaagttacttttaccaacgcatgcactacaaaaaactgttattttagtgacaactttttagtcacaacataatttttatatgactaaatatgacttttagtcac

SEQ ID NO: 73300 - DNA, 623 bp, Cannabis sativa
aaaaggattcgtacatactaatttgatatttatagtgtttaagtctattttctaagtggctacatcatattttattaatctaatgcttggaagtgtgaggaaatggtgttgtagtttatttgtacaaataaatcacattttcgtgtaaacaaataggtcaattgtaagtttcttgagtacatgtataatttgtaagaaattaaacaaatgtaataaatgtctaaaactttataattattatatcattttttttttgggtaatgaaactatatattgttgagtgtttgaaaaaaaaaaaaaagaaaaagtcgggtcaaatactactcggttcggtcgggtcagactcgattaaacttctgaggtaatcgaggcggggtggggcaatgacttgtcaggtcggggaagctccgccccgtttaccatttctagtttcatctcaaaattaattggtaatgagtagtatagctcatgttcttatatggctcaatactgtatcatttatttcatgtggaacaattatgtacacccctactagtgactatgctagaatttggtgcccacttatagaatgccacccctgagcaaaagtcacacaaagatgatgatctatctgtaagggcctt

SEQ ID NO: 73301 - DNA, 893 bp, Cannabis sativa
aacaaagggttttttctataataaactaataaagacagcattttacatttataccatataaaggaaaaataaccataaatagaaaaggaaagtttgtatttacaaaaacaccgacctaacaaaaaaaaatggaggaaactcctccttcttcgtgagccagtcgaaacaccccaattcaccaaatctccacttttttctttcaaaaactaggaaaatcagctcaaatcaagatgtagatctcaaggaaaaaacaataaaatcccgaaaaatctaaacacaaaaaaaaagggaaaaaaagaaaaaaaaaaaaaaaaaaaacagagagatatcgacctcctccattgctgtaaaaaaaaaaatataaaaacaacctataaacaaaaactgaaagcgtacagaggagaggatttgaagggaatgagatcggaaaaactttgaatcttacctataatcgaattacagaaaaaaaaaatcaaggtacaaaaatatgaaaaaacaaacatcatctaagcttaaaaaaaccagaaagcaaccacaaaataacattttaaaaacacccaaacataaacagcctaaaagatgaacaaccgggaaaaaacatactaacaacaatctgcaaaacatgaaattactaaaaaaaattgttaactgtgaaataaaattaaacaacactaaaactactaaaaataaacaataaaacaactgtttagaaaaggctaatagaacactaaaagaacaatcaaacaacgaattcaaaacaagaaaaaaatgttatgaaagcacaaatccttcgtacaaaaaatgagaacaaaaacaacaataaaccctaaaaaaacacatttaaaacttaaaaacaactaataagaaaacccaaactgacaaaaagaaaaata

SEQ ID NO: 73302 - DNA, 970 bp, Cannabis sativa
  modified_base (36)..(39): a, c, t, g, unknown or other
  modified_base (299)..(307): a, c, t, g, unknown or other
  modified_base (457)..(457): a, c, t, g, unknown or other
gtggatgtttctatcttggaaacaatcttgtttcannnnacagtaagaagcaaaactcaatctctctgtccattacagagcctgagtacattgctgcaggtagttgttgtacctaattgttatggatgaaacaaatgatggttgattatgggtttgatttgaaaactttaactattttctgtgataatactagtggttataaacatttcaaaaaatcttgttcaacactcacgcacacccatcaactgcagggcacggtgtgacgactgctgtggatgaaatcgcgcctagtgtgcaannnnnnnnnaataccagttcagcagccaaccacagtgttcatagcacagtcgttccgcccgctaccaatgttcaaacaaccattggagatgacacagagatctagaacctctatgctgctcttggactcatgttgggtcataccaacaccctacatcangatcaggaggaactccgtgctgcggtaaatctcgcatttgaagagcaaaggcacatgttttccgaatggagggacaaagagatggaaacgttaagggctaagcaggctgcgaatgtcatccccttggaaaaaacagacgaagatttagcgatgaatacttcccagactataaatggtcagccgtccaatccccgatcacaagttccacctgtggccaagtggtaggcaggtagaccttgtctagtaattcatcaggagaagtcatacccattaattccaaccaagtcaatggtgccagtgaataaattggcccaaccaactagtcactgagacaaccaggcgtttccgtatttgataggttggggacgactcatgatctcagaaacgatctgaataggaggagaggagtagacaatcagcttgacacgctgatcgtgcggcccagaaccagcgctcaaattcccactcaaaaagatgctgatgtggctaagatcggccaagatgccgaacagg

SEQ ID NO: 73303 - DNA, 603 bp, Cannabis sativa
atgtgattgtgatagtggagaggaattaatgagggaatctctccttctgccatggactgcccaaagcattaacacccaaagctcacactctacttttacaacaactacgtactatatactactccatataatacatatacttacacctatatacatatatatatattagtggtgtgttgtgggaggaatttagacaacatcagtattcaaaagtcatttgaatacccaaagataaatatgtgagtatacatttagaatagtcagtactcaacataatattgtataaaatatatgtgagtatataaataattaaatctcgtagttaatataaatgaaatgaacaatgagatttcatatgtgtacaaatttgtacatatctaaatacttattaggctattaaaagtagagaattgctaaaaatatattattggtatttagtgttatttttcatattatattactattaatataattaagtatcaaatttaaaaaataatttttaaaaaatatcattaactataaaaaatattaagttacactgatatccaataaaaaatagtcttaaaattaggtacatgccattattatttctccatatgtttg

SEQ ID NO: 73304 - DNA, 847 bp, Cannabis sativa
ttgaatatgagtaatttttatttgaatagcttaattattagaggaataagaagccttgtttggaataattatttaatctactttaaattaatcttcaaaatagtatttatttattaaactttaatactttttgtttaattaatcttcaaaatagtgtttaatctatattaatttaactgatttaaagacatacaaaaggattgagtcataactttttaagacaaggaaacgaagcagttaagccaaggtttttgtcacatatacataaatagttactgtagcagtcaattgaaaaaatatatttagcaagatgacgaagatgcaattatatcatgatgatttataacagaaagactttctttgtaattatatatatatatatatatatatatcacatcaattaaataagttgctcattagtttaattaagataccaaaacttcatgggaaatatcatattgttttactgataatgaaaggttcatatatacatacatatatatatatatgtacttaacaactcgtctaattaattgatcaaatcccagttgcttttagacctctatacctaatcaaaacctgatcatacacaaacattttccattttattgacagtatattattattactaattaaaacaagtgagtaattttaagcatttcctcgtttctaattaaaagagaaaaataaataagtattagcatttttctcataattagaaaaataatattactatgacctcccatacaatatatatgtatacatattaatatgacctctttatttatataaatataatatatatattctatatctatatatgcaaaaatattaggacttttgtcct

SEQ ID NO: 73305 - DNA, 1175 bp, Cannabis sativa
  modified_base (56)..(69): a, c, t, g, unknown or other
gcaacagtaaatgttatttctgatctatattaataagttaatctgattatattgannnnnnnnnnnnnnagggcataaaacccaacagtacagccctattcaaaacaagaaataaagttcatgcattcatgggaaaatcaatcagattaagtgaaagagcgagaataagcttacccactacaagatttcgacgaagttgaaggtgggaagcttggatcattgatataacgtagaaatcccaaggaaaatgaagcttgtggtttcgaccacctagagagaaggaggagcttttccaagagcaaatttctagtgagagaaagtaaaagtgaaaaatgaaaatgaaaaaaagggtttccccctaaaactcatttacgtagtacatgtggaccctctttttctcatttacttcaccaacacatcataaaggcacttaaaataattatttttcaactgcaatgacatcagataggtaagacaaagtgcttcaataaatgcatcactttttattcaacaaaggtagcaacaatccagacaacatcaatatagctggtaaagtccctatccgtacagacgtctgcacagggacttgggggcaaatattatctcaatttttttcctcatgacatggcatgcttacgtggatagaacctgtgccacgtggcagtaaaaatcattaaaaggaaggccaagtgagcacccgagcaaacaaagaccctaacactcaaatgggaatcaagtggcaaaccagcttcctctcaagagttggctggccagcctggccaccacaagggcttggccgggctaggagtgctctccaggccttactagacactcctacacgtggccaggagtaatgggctgcgaattgggccctaaaagccgaacataatggctaaataatatctagaatcaagggtattttggttttttgtaaatatctaactaactatacgattgttaagggatttgaattgtaaacttagggtttaaggcttcctatataaaggccttcacctctgactgaaaacctaagttgcctaagttgcctctctcttcctcaatctctcacacacacctaccttaggttgtccaacaccctaggctttccaacacttgagttataccaggcattgattcatacattgtaatcctaagggtactatagcagatcccac

SEQ ID NO: 73306 - DNA, 1771 bp, Cannabis sativa
ttgggcttttgttctcaattcttcttaggctcttgcttttctcctgaacatttggggagatatgcttctatgagcagccatgaagctagtgagagccttaccttcggtagccatgcttggttgttaggtgcttttatgttggtcgagtcttaatggttcacttggtagttggcctaaggctccgagtttttgtagaacctatcgcaaatgttgattggtgtacacctttataaagtgtatctggaagtatggccttagctttttggaagccaagagcaagctgcgggtcaacttctccatgagtggaaaccgacttagtgtcgatcagtctcttgctagtgtagtataaagggtgttgtacattgtcttcttctcttgtaagagcaacactcacagcatgttctgtgactgcttggtgcatgcctaactcttctttgtttagggatttgggcaacacaggtggccaagccaatttttttctttagctcctggaatgcagttttacattcctttttccactcgagttttttttttttttgctttcttgcttcaatgtttgaaagaagggtacatatttgtctgtatacttggacacaagactgcttagtgcagtagtgcgtcctatttggctttgtacttcattggttgttgtgggcgacttcatgttgaaaagggcttagatcttgtgtgggtttaagcttcttcatgttgtagctgcggaggattttgaatttttttgtgaaggtcctccaaatgccccaagcccttttggacttgttgagcataccgtccacgcacaccttcatgttgcggctgatacgaccattgaacatcatgtagcttgtgtactcatgatttgatgaatgcatcttctatttcttggctttggacaaggccaagttgcaatagtgacatgaaaattgctcatctccttttgacatcctaccacatgccttattgggaatttcaagcaaaggtggtagatggatgttattgccttcaggttgtataggtctagtcagcctatcatggcgttaaaaactgagggaacgttgattacgacaaactgtgccatcagagttggatcttctccaacatagaggggtaatctgatataccaaatgagcatgatgcttcggccagagaggccacacatcacttgattgtagggtggcaagtcagcaagttagagcctcttcttttcatgtgttaattttgaaagaatgttgaaagaggctccatttcaaccatatatcttactgtggtcatattctcaatttgtgcagttacgactagggggtcgttgtgcgagaaagtgtcttggacaggatctcctttttgagaaagagatcgtgggctctccaagctttggttgcttagagcctagttctttgcctaccaggaagtcgcttttgggttcgtattggagtgtccgagcatagcgttctctgactttgttggtctgtcctataatatagggtctgccaatgttgacccgtaagtgtcttgccatctaaggtttgggtagagttggtgctacttgcctgtactcatggccaaagatggatgccatcctttggagatggagaccagcctccggatgcagagatcagtcttcagagatgcaggtcagccttctaggatggaggctagccttcagaggcaagggctagcttcagagatggaggctagccttcggaggcagagatcagccttcaaagatggaggccaaccttctgggatggaggccaccctttggagatggatgcta

SEQ ID NO: 73307 - DNA, 1214 bp, Cannabis sativa
  modified_base (410)..(417): a, c, t, g, unknown or other
gctctcattctcatccaacctatccaaaagctagttttcattctctgtcaaacaactagtaaatgagagctccatctaaaatgatttcgaacatctccttgttcttcatcaaatttgaacctttagtgataagagtaccattccagctcatagcatgtcaactactcaatcatagtgcggaagatggtggttactaaactgaaggagagaagattcgggtttagatcttgataatgctctagtacagaaaggaatcaaggggtagagatctgaacgtaaggagacattatatttttctgccatcaatataaggttttctaaacgttatatgtgtttattccatcgtattaggaaatttatatttagggtgttagattatagaatataattaacatacttgttagtaaatnnnnnnnntggtaaaataaattctaacaactagcctcagagatatggtaattatttactttcatgaaatatggatttaaaacgatgactgtgatgatttggatgtgttcatgttggtttatgtgcttaattaatgattttaagttcgttatgaatttttgacaaaaaatatttttagtttagtattggaagtatttttttttctagaaagtatatgaaatattaagcaatttaattttgtatagaactaaattttgatttaaatggaatcagttatgagtttttaaaattttaaaaaatcgggtggggattactccactacgcgcgtgaagacccttgtgcacgcgcggaaaggctacaagcagcctccatgtgcggcaaaacttggtcaaatccccttcaggacgcgcgcggatggcattcatactttttcttggaatttaattttcattttttaggtaaaatttatgtaaatttttatttttcaaattttgaatctaattattagtttaaaattaattattattttattatttaattttagatattggtcgattttgaacttgaataaggatactacttcaaattaagcttttagtgacaattatagtgacacgcataaaagtgtgggtcactaaaaagttaagagtggtttttagtgacccacactaaatgattctaaatatttagtgtttatcatccaaaatgtgggtcactaaaactatgcagtgtcactaaatactaaaatccaaaatgtataattttataaaaaataaaaaaaatcatggcctatagagacgtgccac

SEQ ID NO: 73308 - DNA, 828 bp, Cannabis sativa
  modified_base (224)..(243): a, c, t, g, unknown or other
tggctggaggtatttcgatcctttattcatagtatatatatgtttgatttaattccgcattttatacataaacatatatatttcagttttatacatttaaatatctaacacaaccatcattctgaaaatacggatatcgctatttagttattacctctcaattagaatataatgtattcttagataaaagttccactgtattcactacaaatttttttactttnnnnnnnnnnnnnnnnnnnnactaaaagtaaaaaaattgtgacaaattatagatcataatttttatattatgattaaaatatctgtagtcacaaaaattacaatttgttttgactaaatgtaatttttggtcacaatatttgttcggtctaaaactaatttcatgataaattttatgtaaatattatgttttaatacaagtaacttttttattgtaactaaaaatcacattttttttaatattaatgttaagtaactatttgttattgtgattgataagaaatatatttagtgatttaaattagttaaaaaaaaatagtaatctaattagtatcatcctccccttctatgtggccaattaatttgtaacgaaactgacaattgtaaattattgattttttttttggctttctatttttccttttgtcaaaacattacttcctatttgaaatttgctaataaggtgctcttgttcgtggatattattttggtgatcgccattgttcaattcattgtgttttcattttattttgtccgtttattttggaattttggtggcttttttttttttttttttatttttatttttgctctgataccatgtta

SEQ ID NO: 73309 - DNA, 650 bp, Cannabis sativa
ctgctctaagagactatttatcatatattcattctgttagtttgttattccctatataaaatatataataataataataataataataatgaaaaatgagactttttcaaagactacattaataatggggcccaatatttattatacttttgagaaaagaaaagtgatcctttttaatatatatatttaaattttaaatcaatttttttaaaagaaattattttaaaaattgtataagtgggtcatgtaattttttcgtttgaagttctaaaataatttattttatttttaaaaaacaaaaagaaaataattttttttatttatttgtttttttaaaaaaatcttattattattattattattataaccattcttttcaacaaaaaacaattggtttatccatttttttaacaatgttccttattcattattattttgtaacataataattaatatatatatatatattttataatgaacaataaaaaaactatataatttgagagaactcaaaatcaattgtattgcatgttttattaaagaaaaaaatacaatacaataaaaatgcactttccttttaattatacaaatacttttctgtatatatatatgtatatatttatataaaaaaaaattattatataatttta

SEQ ID NO: 73310 - DNA, 3121 bp, Cannabis sativa
aaggttgcaaaggaagtttcaaccacaggtgtgtgtgtggttgaaacttgaaagtttggtgaatagattatatctgaaacagaccctgtattcattcaagatgatggaagacaaatctgttggagagcagattgatgactttagcaagttgattctcgatcttaaaaacattgatgtcaccattgaagacgacgatcaagccttattgttgctcagttccttactaaagtcctttgctcaatttaaagatacaatgttgtatggaagggagtcaatcacactcaattttcagaagagtgagtcaaagaattctagaagtggtgattgattgtatacaagaggcagaagtgagaaaagagaaagtcacaaaagttcaaaagtaaaatcaagatctaaatcaaagtttgataatcagaagaatcttagatgttggatctataaaatagggcatctcagacagtcatgtctggagaagcataagacgggtgattcaagatctgaaggagattcagtagtgagtagtgacagttatgactcaactggtgctttgctggtaacctctgagaattcaaattctaaatggatcttggattatgggtgttcatttaatatgacaccaaataaatcttggtttgaagaatttacatctggaacttatgggactatgtatcttggcaataccaagtcttgtaaaattgtagaaattggaaccataagattgaaactttatgatggtgttgaaagggtgctaaaggatgttcgactagtacctgatctcaaaagaaatttgatctctattggtatgttagatgatcaaggatttcttgttaaaattgagaaaagagtcttgaaagtttgtaaaggttcaatggtggtaatgagagaaagaaaatcaaatgagatttatcctctggaaggtaccatggtgaaaaatatgaaggcgtgtgtttcaagcaagcacgtaaatgaaactggagtatggcacaagagacttgaccatgttagtgaaataagggtgcatgaactgaataagcagggattacttggaaaagtaaagcttgagcagttggatttctatgagtattgtgtagttggtaaagcatgtagagtaaagtttggaactggtaaaagagataccaagagaacactgaattacgttcacagtgacttatgggaacccttaagaacaccatctcactctgggagtaggtattttctttcaactgttgatgattactcaagaaagttatgggtgtttattttgaaaaacaagacaaaaaaaagttcttgagagattcaagcaagcactgactggaagataatgattgagaatcaaactggaaggaaagtgaaatggctaagaatcgataatggtatggagtactattcggatgagtttaatgtgatctataagaaggaaggaatagaaaagcacaagaccatgaggaagactcctcaacaaaatggacccgtggagaggttcaacagatcatcctagaaatggtcaggtgcatgctattgagtgttagattgcccaaagtgttcttggtagaagttgtgtccactgcagcttatttgatatacaaatttccatcaacatcactggatttcaagacaccagatgaggtgtgatcaaggaagccaacaagttatgaacagttgaaggtatttggatgtgtctgttatgcacacattaggcaagacaaacttgaggcaagggccttaagtgaattttcttaagatattcagaaggattcaaagaatatagactgtggtgtttggagctcagaatgagaaaatgtataattaatagggatgtgacttttaatgaatcttttatgggatttattgacaaacctactggaagtcaagctaatattgaccgagaagaaatcaaagctccgagaactaagcttgaagggtggagactgaggcatctgtagatcacagaagtgatgattcgaaagatgattccagaagttataatctgaaatgctataaactagaaagagacagaacacggagataaggaaaggctccaaacacgtacaaacatgctaatttaattacattcacatttcatatttgctaatcaaattgttcatgaagagcctacaagctatgcacaagtaatggaaatcaaggaccgaaagaaatggaatggagctatgtcagaagagatgcactccttgaaaaagaactagacttgagatgtaataccgatgttgaaagatggtaaagtcatcagatgtaaatgggtatacaaatcgagaaaaggcattcaaggagtacaagaggcacaatataaagcaagattagttgcaaaggatatctcttagactggaggagtcgattataatgagtttttttcttcagttgttaagcagagattgattagaattcaattgacactttttgcgtgtcaagatcttgaactagaaaaattagatgtcaagacaaccttcctgtatggatatctggatgaaaggattctaatgaaatagcctaaagaatttgaagaggctggaaaggaacactgggtgtgcttgttatggaagtctctatatggcttgaagcaatctccgagacagtggaacatgagatttgatgattatatgaccaagataggtctgaagaaaagtaagtttgatccttgtatatattttcaagatagatatagagatactttatgtttgttgttgtacgtatatgatattctgatcgctagcaaaagtgtacaagagatcaagcacttgaagctccagctaaagacggagtttgaaatgaagaatttgggtctggctagtaagatcttaggcatggatttaagaagggaaagacaaaaaatactactgtacttgagtcagacaagctacatcaaaaaggttctagaaacttttaaaatgagtaactctaaggtagtgagtactccgcttgcacaacatttcaaactgagtattactcagatactagaagatgaaattacgaagttagttatatcaagagttccataagccagtacagttggctctgtgatgtcatggtttgtacaagactgaccatagcactaagcacggtgattagattcatgggaaaccctggaaaggagcattgggaagcc

SEQ ID NO: 73311 - DNA, 566 bp, Cannabis sativa
tttttattttcgtttgctgaaaatatttctctccatgatcgaaatcctattttcgttccaaaagaactattttcctccatcatcttgaactttcattttagcaaatgcccacatttttccctttcttttttcttctatgcactgctatatcgatggttgtgacttggtcttcatctttctcttctccattgttgaaaaatctgaaaagaaaaaaaacgggtcttaaatctcaagccaacaaaactacaggaaaatgtcccattaatgaagatgatgattatgattttgctccacctgtaacgaaacatgatcgttgccttcttcagaagaaatcaaagagtaatgttgttgaaaagagttctttccctgagactaagaagctgaagaagcaaccatatgaaattcttagggcttcattttcgttttgtcctaacatagaaatattatatttgttttggattgtgttttttcatttgattttttctaggttttatattttttagttgttgtaatgtttgattagatatattattatcgtttggaatatttgttagatttaggttatt

SEQ ID NO: 73312 - DNA, 746 bp, Cannabis sativa
agtctaacgtgagaatcaatcactgttatttaatttgctacccacacaatgatatcaccaccaccttcgatttttttaaaagcactatgtttacatatacacatacacgtatatatacatgtatcgtttgtttgtgtatacactaggttaaattattttatcgttaaatattaaagcttaaaatattcatctcaacccaatgaatccaactcaatccacccctatattattgtattaagtaggattgagttgtataataaaaaaattaaatgatttataacttcttcaaaccggagtcattaggatggcccattaaaatacttctaatgccgccaaccaaactcatgtgtacccctaattaaaaccttacaatcactaaaaatctatttatagttgttactagggataaaaattggacggttaatgtacggagaatgcaattctcgctctcatctctactacatatttatgtcccccatccctgctcaatccctatctaataactagcggattcgaggtagggaaataaccatcgtttatggaaaacccatcgagtgtctattaaggtaaatagaaaaagaaaatataataatttaaaaataattgaaatttttttaaatttaaataaaagaaaactatatattggggtcgaatatagtgtggatagtattatgggataagttaaggaatacctatgtttttattcattaatcaaaattaccttcatgttatattttattaaaata

SEQ ID NO: 73313 - DNA, 1130 bp, Cannabis sativa
agtcgtatttccttgtgatagagacaaagtttgtagcttgttagaagcatggattagggatggagaagtagtattgccatttgtcacaaaattacccactctagaagaaaagcagcatgacctctattatcatttccatcaaaaacttaatcatccaacaatgaggttttcatgagcgactagagaaatgagagattattttagatcaaaataaggtggaacaaatgtcatttccccaacatcaaaatggaggagctgctatgacatgcacaaaatagttttccctcattttaatagggatatcacgaagcatatgtatcgaggaaattatagaggaacaactaaaagtagacaacatggtagagccgttgttaaaaactaaattgtttcgtaatttcttcgattgcttagaatttggtcaagatgcaagaactgaggctatagaagttttgcttaaaatttcctaacaacatggcccttcttgtcataacttataaaggtagggcacccaatgcataatattgcaaaaaaatctgaatgagcgactttcattaccaatgctgacatataaacatctttgttccttcacaactgaccattatatgccgaggcaaaaatcagtggcctaaaagtgaaacgtgctttagtagataatggagcttcagtaaaactcatgccaattggagtatattctgctatgaaagaggtcaaaggggggttaattccgcaaccaatcacactcactggatttgctgccatgtttgtaaaaactatagggtatgtgactgttgaactagaggttggaccaatcagaggacccgctcagttccatgtgatagtagcagatacttcgtaccatctcttattgggaagacagtggattcatacacatcattgtgtgttatcgacgttgcatcaatgtgtgaaggcacacattcgagaaaaagatgttcatatcacaactaccaaatcactgtttggtagagaggaagctcacatggtggaagcaatgttctttgacgagcttttagaaaataacatgaaaatggtcacaagaccacgtgcggtgcgcttaggggcgaatgtacttgatagggtgggggggccccagccccccccccccccccccc

SEQ ID NO: 73314 - DNA, 711 bp, Cannabis sativa
  modified_base (136)..(140): a, c, t, g, unknown or other
acctataatcatgtaaaaaatatgggaacaaagcatatgataaggttaagatctgatttctgatctttaatgaaagtaaataaggttgcaatgaaattgaattttatttaaggcataaaattccaacaaagtcccnnnnncactaatataaaacaaaagtacattttattttaatctcatatacttaatttctagatcaaatataatatttgacataaactatgtaatatgatctgattcgttgtattcagtatcaaccttctctaccatcacattttctttagtcataaaattcacaattttgcgaattcctaacatatatgttttactcctcttagggtacatgattctttactatttgaaaaattacaattgtgttatcacggagtcacactagcagctattccatgtctagaattatgccaaaaatctgttaaggcaaccttattattcagtcatactagtagatttagtggtttcgaagtggtttagactgttctccaaaatatattactctacccctagagtaatcgccatctctcaattagagtttctagtattaacgcaaatctagaaagctaatttggtgtatcctaaaaagttttaaaacaccatccttacgactaacatatagttcatcttcatctattttaggatatgtttaattatcttccaatgttctttttttctagatttgaactaatacttact

SEQ ID NO: 73315 - DNA, 2434 bp, Cannabis sativa
  modified_base (181)..(181): a, c, t, g, unknown or other
  modified_base (605)..(606): a, c, t, g, unknown or other
  modified_base (764)..(765): a, c, t, g, unknown or other
  modified_base (943)..(966): a, c, t, g, unknown or other
  modified_base (1265)..(1274): a, c, t, g, unknown or other
  modified_base (1513)..(1515): a, c, t, g, unknown or other
  modified_base (1643)..(1656): a, c, t, g, unknown or other
  modified_base (2363)..(2363): a, c, t, g, unknown or other
gtaagagtaagaaaaaaaattgttaaaattttccctgagaagaagaaaatttttaatttttgaattagggggccattttcaccaaatttatgcgaaaacaatcttcatattcacatcttagtagttcgaatttattgttactagtggcaaaaaataatccgagatgggtccgggccacatntcacaaaggggtaccgctatcagagatgtgagattttcactatttcgattataatgattgttaatgcatgaaaactactttttgtctcaacgcgtccaatagaaaagtgatgcacaacggtctaggcttcgtccccatgaaatttcacgatttttagataagtgtagggtgagattttaaaagaacacaaacgagtgtaagagtaaggcaaaaacttgttaaaatttaccctaaacagaataatattttcaattttttaattagggggcattttttaaccaaatttaacgcgaaaccaatcttaatattcacgtcttagtagtataaattcattgttactagtggcaaaaaatatttcgagatgggtccgggccatatttcacaaagggctaccgtatcaaaaatgtgaaattttcactatttnnattaaaatgattgttagtgcatgaaaactaaattttctctcaacgggtccaatagaaaaatgcacaatggtcttcaattcgtccctgtgaaatttgacgatttttggagacgtgtagggtgagattttaacataacactaatgagtgtaagagtaagnnaaaaacttgttaaaatttaccgtgaaaagaataatatttttaatttttgaattaggtggccattttaaccaaatttaacgcgaaaccaatcttcattttcatgtcttactagtacgaattcattgtgactagtggcaaaaaatattttgagatgggtccggaccacatttcacaaagnnnnnnnnnnnnnnnnnnnnnnnnattttcactatttcgattaaaatgttgttagtacatgagaactactttttccctcaacgcatgctatagaaaagtgatgcacaaaggtcttggcttcgtccccgtgaaatttcttgatttttagagatgtgtagggtgagattttaactcaacactaatgagtgtatgagtaaggaaaaactggttaaaatttacgctgaacataagaatattttcaatttttgaattagggggccattttaactaaattttacgcgaaaccaattttcatattcacgtcttagtagtacgaattcatnnnnnnnnnnggcaaaaaatattccaagattggtacgggccacatttcacaaaggggcaccactatcaaaaatgtgagatttttactatttcgattaaaatgattgttagtgaatgaaaattactttttctctaaacgcgtccaatagaaaagttatgcacaaaggtcttggctctgtcctcgtgaaatttcaagatatttggagatgtgtatggtgagattttaacataacactaacgagtgtaagannnaggaaaaaacttgttaaaatttacactgaaaagaagaatattttcaatttttgaattagggggccattttaacaaaatttaatgcgaaacaaatcttcatattcacgtcttagtagtacgaattcatnnnnnnnnnnnnnnaaaaatattccgagataggtccgagcgacattttataaaggggtactactatcagaaatatgagattttcactattttgattaaaaggattgttagtgcatgagaactactttttatctcaacacatccaatagaaaagtgatgcacaacagtattagcttcgtccccataaaatttcacgatttttggagatgtgtagggtgagattttaataggacactaacgagtgtaagattaaagaaaaaacttgttaaaatttaccgtgaatagaagaatatttttaattttttaattagggggccattttaaccagatttagcaaaaaaaaaaaatcatttttaaataggggtaccactatctgaaatgtgagatttgcactatttcgatgaaaatgattgttagtgcatgaaaactattttttctctcaacgcgttcaatagaaaactgattgacaacggtcttggctttgtctccataaaatttaacgatttttggagatgtgtagggtgagattttaacagaacacagtgtaagagtaaggaaaaaacatgttcaaattttttgtgaacagaataatattttaattttttaaatagggagctattatacccaaatttaacgtgaaaccaatcttcatattcacgtcttagtagtacgagttcattgtgaccactggcaaaaaatattccgagatgggtccgggccanatttcacaaaggggtaccaccatcagaaatgtaagattttcactatttcgaataaaatgattgttagtgca

SEQ ID NO: 73316 - DNA, 1101 bp, Cannabis sativa
ccttaccagtttctgatgattaaatctaattaactacaaattaaaaatatgaataccttgtccaccacatctttttgcattctacaccataagtagaatttttaagtcttaacatatcttaatagtaccaaagtataacaactaaggagtggtgtaaactttcattagagtatcatttctgagcttaacactgcttgaaatacacacttgaattttatgacataacattccatgagttaataccaaactatctctgagctagcctactaaggctttctaacgagtttttcctgaatttatatccatcaattgagcacttctgtttttatcaaattaaacgggttgaagtgttaactcattgagtttacttagcgcaaactccatacttaacttcgaccatgacatctactaactgaggggaaaaatcatggtggtactgaaaactcaccggggcacttcctacttaggacttctgccaccgtactagccatcctggggtaataaaaagttatgtagtccttatgttgagctaattctaatcatcgcccctaatttgcattccagtatttctgatactttaaattttctctatagagatagctctgccagttcttaagtacaagacttttgttcactaggtaatgatttgagtaacattacttaaaccccttcaatcggtaaggagattaagcagtaaccctaccaatttacatagaacacacttcagatcctgtttggatgcctctcaaaagagcatgaacttttcttgatttgatgaccaagctaacactaagttgaaatcaactgtgactccagctctcgaaaacaagtttaacatttttctatccatatagatcgttacgtcctcttaatttactatattaaaagcgttgaaatcttggaataacttttccatattataataccataactcagacaaacccataaaaacttaatttccaataacagtttctgatctcagccaaatcttgaccaattcaaccttatcccgtctccgtcatgatctcataatcattgaaaaaccatccatagatgttgtccatacatcgtttttactaaagggtacccaaggatatcatt

SEQ ID NO: 73317 - DNA, 533 bp, Cannabis sativa
ttgactgggatcaggtttgctttttgactagacggatttgtacaggttcaagtggcatagtcaggtttctgaggatgtgccagtggaggagcgcttagagacagagatcaaaaaggagagttgtgcgggagtggatgggttgttgttgtgttgtttggtgcgacggcgaagagggagaccaccgttagttaaagaaagacaattgttaagctatttttagtctaagttttgagtcaatgttaaagttgttttcttctttaatgtttcttttaaaatagttttacacttgatttcttttattttaggttcccaaagtgttaacgttcaaattatattaactagtggaaagatgaggcaaactggaagaaaaaaaatctcgaaactggaaattgacatatagtcatgaccatactatttcatagtcgtgactaaggagcacgacagaaataaaattttttgagattgttctatggtcgcgaccaagtattatgtggtcgcaactatgggctaaacaaaggatttcttggcagttt

SEQ ID NO: 73318 - DNA, 977 bp, Cannabis sativa
tataacattcgttaaatcgaaagaaaaaaaaaacgttaaaacatttcttgaaaagaaaagatttggcaataattctacaaacaattagattttttttctatttttcctttaagatatataaagcatatatagtttaggccataatttggaatttttaccatatcaaaaatccctaatcactataatcacgtgtaagaaaccatgaaagcctagtaagaattgctttttccaaataaagctggctacaaatattgtaacttgtaaggtgatataatataccatttttttttcttttgtaagttgatattatattaccattgagattggaagggctgggacctcctacttttctggaggtaatctaatcacatcaaattcaccatttggtaatcatttaacaacaattaaaacaagagaaagatggcctcaataccactttcttttatgttcttacattcaaaatattttgatgccatcgatgtaaattggaatgaatactgtatcaaaaagcacatcagttaaagaggtaacttgtttgtaaccatctataaacaaagccatgtataatcaagggctcagtcgtcttctgagttcctcgacaacactccctctttggataacatcttcggctttggattcgacgtctttcagtctcactgtcccctccttaacttgacgttcacccaccatcaacatccatgggattttagactcttccgcatgacgaaagtgcttatccggtcttttagccaccaagtattctgcttttatttttgcatcccatagctcgcttgccagttctgcagcttgaattagatcgtctcctagtatgctcaccagcacttctgtctttgttgctctagttgtctgctcaaatatcgggaaaatcccacaagatggataaaataagtaagaaacaatggatcgagatgaacaaaattccatcaaaacatttatctgattatcatttctccagt

SEQ ID NO: 73319 - DNA, 1345 bp, Cannabis sativa
aggtcgccgccgagaggaccctttgcttgggagcaggcacagatcaaatgccttccaggcctaaatctttggtcctggttcccaatattggggctcccgatgccagcacatccggctccggtaagtctcctttaacggtctatcatgttccttcagtccaagagtattcccggtataggcctatagaattcgacgagcgccttcttaagtttaggatgccccccactcggtggggggatcatgccaaggccttttacttttcccattcaggtcatttcttaggtcggtcccggatgggtttcggacctcatgcacccatccatctggatcactcagcttacttgtcttctagctggtttctccccttggacagctttctttgggatgatgaagctagcattgtagttcaagactttgctagggctgagttagatagtcggggtaggactagctttattgttttgttttcaggcgcatgctttcttatagccattctaacactttgtttgtttcttttcgaagcagttaggccaatggaagatctcttagcaacccttactgaaacctacagcccggactcttctcttcctccggcgcctgcccagatggtaaccccggggaggtcatcttccagtgcccccctaggcacaatcgtcttgatcgacgaggatggggaggccgaggaggaggaagagggcaagattgtggctccactcgaccggaagcgcaagggcaagatggtagaggctgagtcttccaagaagcccaaaagaaaggacaccccggctatcagcttagattcagggattcctcctgaagtagaggagtacgttgtaccccccgacatcattcttactctggttcctgccgatgaggagaggcagcaactttgaattgccaaacataattatgccatggatgagtacaacagagggaatgctgaggtggaagccttgataaaggtcttgcgggaggctccacaaaattctttacgcgatgaggccttcaaaaacgcctaggacctgaacatggacctcctgacagactggttcaaccgctttgttggccctgctcttgttccctttgcctccgaactgacgagccaatttgtttcccatctgacccaactcctggccaaaagatacgcagtctgcgcttccacgaatgctatttatcaggttcaggatatcagcgctaccatcaccgcggtgagtcttggttattggtttttttctatttgtctgtgctttaccctatggcatttgatccctcatacttaacttgttttcttttccagatcgctgcagagactggttgcctttcaaagactttgatagatcatggg

SEQ ID NO: 73320 - DNA, 536 bp, Cannabis sativa
ctcattcttgcacagattttgatcgacgatttgaaaaattaaggtttgagttttttattatcttatttatgattcgatattcgtttgattatacaacagaatagtaaaaattcgttacgttttaagaggtatttatttatatttgttgatttgaagtttacatttttgttgaaattttaacttagtgttaagaatagtaaaaattaataagcacatcattacgagattaattacttcaatcaaaaactaacagattgtatggttctaacttctaagtgtgtaattatgatttaaacaattaatgagtgtttttgcatttttgataagaaattaccaaatgtcaattccataaataaacttcttttttgtttaaataagaaattttgttaaataattttgttatgcttacagagttaatgaaaatataaacaaagatgactttctgttaccatctcttagtcaacctttatgcccgaaaacatatgtcagaatattttttttcaattttttttttcacgaggtgttcgttatgctta

SEQ ID NO: 73321 - DNA, 707 bp, Cannabis sativa
gccatttgaagacgattttgtcgtgaaaagaagtatcagtttggaagagttttctctgaataaccaatttgacgttgggatgatcagcagtagtcatactacgaatgacttgggccagctcctcagaaataggcggaggagggtttggtccatgaattacacctcctttacttgtattactcgtatcactatcatccctgatcctctttcttttattattcgacttatttcttcttgtcaccttcgtttcttcaggcactactcgtagtactacatcatcatgatgatcatcactcgtacggcgtcgtttcgggatggcgctttctaagatcatgatgtcgttgctcctttttgtttcttcagatgatgatgatgatgatgatgatgttgagtgagtagaagcagtacggcgtcgtttcgggatgccgcttttgaagatcatgaagtccttgctcctttttgtttcttcagatgatgttgagtgagagtagtactgcccggaagtagaagcggtacggcgtcgtttcggggtgtcttcctctaattctttcattatatcaatatttctcagtttttctttaagcaaatcgtcaagcgaatgatgacgatcattgccagacaatgtctcaacgtgcaaggaacacaccaaagcaagagcttcgatcatccttctctcattccccatcttcttcttcatgatttcccaa

SEQ ID NO: 73322 - DNA, 1029 bp, Cannabis sativa
aagttcccaatggtcgctggtatcagatttttttggagaatcaataaagtttattgatcacaaataacacttctacaagataaggctacttaaaaagctttagacaaagcttccacccactctttatcttttctactcaaattctgagtattcagcgagttcaatcttgaacaaacactataagcaacataattaaaagtgaccttaaaagtgatcccaaaccactttgttcctggcatgccaaatgtaataaatcatggttttaatgacactcaaaagaacctttcttttacctctagaagcttttgacttccgaatccgcttaaggacatcatggtatcagttgtctcccttgtaatcaaggaactgcacacgagtgctataacatatcgttaacacttgccaagaagacctcctctgttgttatggctttagaggagacgaacaagacctcctctgctgccattgcaccaaggggacgagcaacaccactcctacaaaagctggagagacaacgaatacccttggagatcaaactacagagaagatagagacagctcctaaggccacttgaaggtgcacccaagacagggatgacattgacccttattttatggaaatcaactcgagaattggtctaactgaggaactcaaagaacttcccctcaacacaatgcacccgaccaaggttgttaagattggaacaaacttgatggaggtcttgagtgagatgctcatggatagcctcaggagaaatcaagacatttttgcttggtcgcatgaggacatgattatgatcgacccccaagtcatctgtcataccctcaacatagataaatttaactttaagcctgtacaatagaaacgtaggcttcttgaaaaagagtgctccaaagctcttaaggaagaagttgaaagactacgagagaaccacttcattagggaagctttctacctggtttgggtatacaatcctgttcaggtgcctaaactaaatgtaaagtggagtactgttggaatttattttac

SEQ ID NO: 73323 - DNA, 594 bp, Cannabis sativa
atattcccacaattgtttcgatatccaaggttaattcctgccatatccccaggctataggtgagctgatccttatttaagttgtttgtctaaactgccgctagttgatgaccaacttttctttgtagcagctctatacggcagccattgagagccgatatttgattacctcgcaattcttttgtgtaattactttatcagactaactgccccttgtcaaatttttcttgcaacatgttccctcccgagataaccgagttatcctttcctcctacaaaggaaggttatggtccctggtcgcttgggttactgggtggatcgggctgatcatgggcattgtcctgcccctttacaaatttttgaaagtgtcctcgcggtatgaggccttctatctcatcttttaactgacaacattcttccgttgtatgctcaatatctccatggcattcgcatcgtctggtagggtcccttttacgtctcgcgtgtttcataggttttggttcgctaataatgacctcttgtgcatgcgcgaggtagatactttcccgaggtttattaagctcggtatagtcattttaaatgggtacatatttgt

SEQ ID NO: 73324 - DNA, 700 bp, Cannabis sativa
  modified_base (26)..(34): a, c, t, g, unknown or other
acccgacccagacccgaacttgaacnnnnnnnnnagctcgtgacccgacaccagaaatggaacgagattgggacccgagattggaattgagatcttgaccgagggcttggacaaaacgcgtagtcggtgtttggatttgggaccctgccctggacctgaaccctgacaaggaaccgaacccacatccagacctgaacccaatcccaaacccaaaagtagacctgaacccgtaccctttgtcccaaaattggagttggaatcataacaaaaattggacctagatctagaatcgtaaccggaccaggactcggactccaaatctgtcctagacacgaattggaagtcgaactcggatcccaacccaaacctggactcgggacccgaacccgaacctaaactcagatccaacattgaactagactaaagacacagaaccagggtcgggaccttgaaatatcgagctaacttatgttgatgggccatcaaaatcaagtttgcaatggctcatctttcttcgatttcatcaagtgattttgccaggagtacgttattggtatcttgattgtacatcaatcttatgtgggaaggtggctggagttctacagttagcatagcttcatatccgtacgccatagcgaatggtgcttgtccggttgctgttttctcagttgacttcttcaggaagctcttctggccaatt

SEQ ID NO: 73325 - DNA, 1160 bp, Cannabis sativa
tctaagaataattggttttcagatggaacctcatacttgaatgattgtctacaggctatacccgatattattttggagtcacaccaactatccgaaatcaccctagaataccgaaaggaatgtgggagtacagacatagttcaatcactttgtcaacctgatgaagaaggaagaggattgcttaacaatggagtaacaaaccaagatattaatcaaatcaatctactaaacactttagcaactgaattcatcaagaacaatggactcatgggatcttttgagataggatcattaaggtacactcatctcctccaaactaaaggggacactaaaaatgaagagattgttagaggaagaaccaaatggatcaagaaaaagcttcctataattccataacaaaaacaaaaaaaaacctataaggtctttttcccaaaagcttgtctaccatgtcatgacacactaaccctacattggggtggccttgaaataatcaatcaagaaaaaaaagaggaaaatcatgatgttgactcataagggttgaagattctaataatggtgtcaaatgtgtataatgaatagtgttgattgtgatggtgaaacgtttagctctaagcttatagggttggttcatggttaccaacaaaatggggtatctttaagaaaaaagaagaggttgacattggattgtttgagtctttattgtctcatatgaagaattatttggtgtgtgtggagacaaatgtaatgtggaaatcactattcaatgtagtaccttgtataattaaattaatataataggaaaattaagttgttctttttttatgtaacttcatagactcaataattcattcactattcatgagaagaaagaaaaaaaaaatactcaacatttatattacactaataaaaaaagaaaatggaaaatgatattagtaggtctaacactcacacgatgtgttatattattatgtgttatattattattagtgtaattaaatatcgagttttacgtattttaataacatccaccactaccacaatgtgttatattgttattagtataattaaatatcgagttttacatattttaatttaatatttattacaaaaaaccactaactgtctacaattccatcaatgttacttaaatcatgagacaa

SEQ ID NO: 73326 - DNA, 708 bp, Cannabis sativa
agatattcagcaggtatatgcttggaaaaggagccattcaaggctctcttaaattatcatggaatgaaatcaagggatggaagtggaaggagcttgagggttggcttctacagttgacatttgcaaacagaaatgatgccatgaatgagctggctagacgcccatggtttgtttgtggggctcttctggttattatgccgtggccagcttggctaactccggcggaagtccgattgataaaacccctatctaggtcaatgtggagagcattcccccattctattagaatctatctaatgtgaaagaacttgcaacaaaggcctccccagtttttgacctgccgcagggcgtagaagatgttgttggaatgagtaccctgcgatttagggccaccattgatctcaataaacctattttcgcgggtttctttctcaaaaggcagaaactaaaagatctatagatatagtacaagtatgaaaaactaccaaagttatgcttcaagtgtggcctcttcacccactgaggatcaaagtaagcaaacaacgaagggtggtacggcaaaggatagccctctcatgtctcttaatccagcgatattctccactggaagtagccctgaagaaaggcctactaggcgtaggggcagaccgaagaggcagagtataccagaacaggaagagagtcacaccccgaaacggaggggtcgac

SEQ ID NO: 73327 - DNA, 759 bp, Cannabis sativa
ccatgcccccagaccatttgtcttcgcataacttctctcagtccccccaatgaatttgatgcttagctgttgtagatccccaccagaactgagcaataaggacctgaatctcgcgaatcagaccttttgttattctaaaacaactcatgacataaatcgggatcgcttgagtaactgatttgatcaacacctctcgaccggcccgagagaagagtcccatcttcgacccttggagtttgtcctagactttgttgtgaattaaaccaaaagcttccttcttgttcctaccaacaaaggcaggaagacctatatactttgtgtgattttctataaatgtaaccccaagagaagctgctagtctctgaccttccgtacttgaaatcttctgacctacacataaattagatttgttgaagttaatgcattgacccgacaaggaagaatacacctgaagcacctccgcaagagcttccccctccttgattgtagcatccataaaaatcagactatcatcgacaaatagaagatgtgtcaatcctctctcaagatgacccaaacggagcccatgaattttgttagctcggcttgcttcattgattaagcaagacaacccctccgagcaaattagaaacaagaacggagatagagggtccccttgcctcaaccctctctccgggatgatgtggcctcgagcttccccattgagcaaaaccgagaaggttactatcttcacacaacccataatcttggctatccatc

SEQ ID NO: 73328 - DNA, 608 bp, Cannabis sativa
ctaagaactcctacattagtgtcatcgataagggtggttctcctacagttaatggaagttcaatgatgcttgagctggcaacattgtcgcctgtaaatcaacataagctttccatacgaagtttcaactgcacatcctctaatcccatcttttttagtgtaaccttgtagaggatgttgattgaactcatattgtctaccaacactctcttcacccttttgtaggcgagctggactgttacgacgaggggattaacatgcgagtactctacatgatttgtataatcctccgagaagacaatcagaggctcattatattttgattttttcagtggttctggagcaaatgccgattgtctattttttatttcattgacatatctttttttggacattattactgttttcagcgagatgtggccctcccgaaatgactaatatatcctcgccctcaacagggggaggttgcattctctggttatttgggttattagggttgtgctggttaggttggttagactcgtttccttgatgtcttacatactgtttgaaatatcctcgcgagatcaggctttttatctcgtccttcagtttttattggcattctaa

SEQ ID NO: 73329 - DNA, 618 bp, Cannabis sativa
gagccatattctgtcgctaataatattattagaggcagagctatattctgccgtcaataatattattggcgactatttaatagcagtggacaattagcggggattattgccgctaatagcctatagtggtagaattagaatttattagcggcagagtggtccgccgctaaacaagataaatgttgtagtgaaactctactttaagctttctctcttcaatagtttacgatccagctattactggggcttgaatcactaggtttcagattgaaaatcaaagaaaataaatagaagggatgagaattttgttgcaccgaagagcatgagttcgttccatactattttcttaagttttttgataaaaacttaatatatatattataatctgataagtagaagtttttttttttattattattaataacaatatataataatattaataaagaatttattaatacaagttgttttaccattttttagtcactaaaaaatatctactttttgggcattaggttaaatcttaaatatttctaattactcaaatacttatactatcaacttaccataatattcccatcaaagtcactgatttttgagaaaattatacttactatg

SEQ ID NO: 73330 - DNA, 852 bp, Cannabis sativa
tttactcatgatgagcatatcatctagttagagcaataagaacacgactatagattgctccagattcttgaaatataagcggtgatcgtatgtggattgcttaaacctaatttgatgcttgtatgtatcgaatcttgtattccattgtcttagggactgttttaagccatacaaagttttatcaagcttgcacactaattcaactctttccccttccacctgaaacccaggtggttgcttattatagatctcttcatccaagaatccatttagaaaagtagtcataacatcaagttgttcaacttcaaactctagatatgttgttagggacagcatcaaccttatcgtcttgtattttaacactagtgagaagatttccatgtagtctataccttccacctgagtaaaacccttagccactaacttggcttcgaaccttactggttcattctcattaattccctcttttaccttgagaatccctttgcactccataatcttcttgttctttgactttggcacaactatccaagtcttgttcttccatagagaatccatctcctcatccatggcctaaagccatttagacttgtttccacctgaaatggcctcttaatagcctttgggctcttcaattttagtatgttgaactaccaccagtgcaaaagctattatgtttgcttcagcaaaccttgccagaggttgaatctctctctgagttctatcacgagccaactgataaccttccaaaactgtatgtccgaaccctcctggcagctctgtttggtcttcgttatcttgttcttccggctccacaatagcttttggctgtgcattgtcttccggttccac

SEQ ID NO: 73331 - DNA, 875 bp, Cannabis sativa
actaatcagattgtaaagagttttatttaggacataaaacccaacagatcacaacttaaataaccaaagctttgccaatattgctctgagtctttgtctttttcaagagaaactaagagtacatagttagggtttcctgctaaatattgtaaacacatcaaatacatcattaaagtctaatagactaactcgtggactaaggttaattaacacccgaactacgtaaaaaatctccatccctttaattgctgtattttaatatttctttagttctccaatatttagttttcaaaaatctcagagaaattatttaaacttttattttgacactataaattattcaaaattctaaaaatttacaaatgatcctaaaataatataacttctgcgatcataaaaaaaattagactataaaaatctcttaaataccaaaatagataggagttaggagatgcaccaaaatagccttttctttctatcaaaaaggaatgatattcttcattaatcacaatctctttacaaccaacaaaccaaagacccagcagccacaggcggctacttacatatcctctctatatacactttctcataatcttttaatttcctatttttcaagtattataatctgtatattatagctttatgcacttcattaacaatagctctagctgtaaaagagtaagaattgtatatgcatctatttctattgatccaaaggctataaatcacagcagcaagaacaactacatttaccctttgtttcctgttctttgactgtcaagccaaccagcttctccagccttcaaagtcagacggccacactctgctgccaatccaattctgcaccagcaagctcacttctctcgacaaacaac

SEQ ID NO: 73332 - DNA, 673 bp, Cannabis sativa
agacaatgggatagatttcaatcatccatgtccacacacctcaaatcaaaacggtagggctgaaagaaaacaccgtcacatagtcgaaatgggcttgactttactagctcaagcttccatgcctttaagatattggtgggatgcatttcaaagtgcagtgtatctcatcaatcggctgcccactaatgttcttaaaaaccagtcacttgaagcactatactcgaaaaagcctgattataaatttcttagagtgtttggagtcgcgtgctatccctgtcttaggccctaccaatcccataaattccagtatcactctactaaatgcataaatctaggctatagtagtgcacataaggggtacaaatgtctaagtagtacgggtagactctacttttcgagacatgtgatctttaatgaaaatgagtttccatgcaagcatggattctttaacacacacaagagtgagcaacaagtgtctgtaaacgtcccatactggtcagcctcttttccctatcatgatcctacagaaaactcaagaaagagccaaccaaatgacaaaccagctggtatatctcgtggaaatcagtcccttgaagagagcttctctgcacaagaacaggtatctcatcatagtccctatacatctcatcaaagtccctcattgattccaaat

SEQ ID NO: 73333 - DNA, 1385 bp, Cannabis sativa
taacagaattaacagtcaaaggctaactgtcataactgtcatgagtcttaacaatgatcatattcaacacatccaagtgatgagtcttaacaataatcttactaagaagatgttcacccaaattccactcattttcttgctctaaatatctcaacgcttcatccatatctcttcttgcaaactcgtaagtctttcggttatattttgtttagttatgttataatggtataaacattatgttatttttgtaggggtactgagtcacttcgtacattgaagatgccatggaatgatttaccaaatgatgagacaatatttgaaagtgtagctaggaaactgtccaaattaacttacttggatataagtcactgcagtggaattggagttgaaggttatcactgtaagaatcttgaaagattggatatgaactctcttagttagagagagttttgaaggttgttgctaatcttaaagggtggtctaaaaaggtaactatatagctattttctgcgatggaataccaacaatcaaacatagttccattgccaaacccaaatggatgctaattcattaattggtgcatgcattttatctttcttattctttttttttttttcattctaggaaacagagtactaactctgttattagctcttgctttggtttttatgtttcgtataaatataagtgttttatttctttcaggtatctttgtaagtatatttttgggttaaccttttttttttagttgtagttgcataaaattgactcttaaataattgtgctgattagcaaaagcttcaacttacttatgttattatctttaactaaaaacagagtactgcctctctctcctttacctatatttggtgaaatcaccaccacatgttgatcttcagaaattattttgtaattaattggtaaaaatgtatttattaagtaaactaaagggagatagaatatttaatgaagcagcagtaaaagcaatacaataattaggcatgcaagcccagtttaaggattgagtacacaaattaaatcacttcatttcaaaaaactctaaaaccatatccagaagttatagtcaaacacttgtcttcatgttcttttcataattaatgcacctgttataatctctcacacaaataataaaatcaaaatcagatggccataattaaagatcatcaccaacaaaatgtgaagacattttgctagaaacgaccctttgaaacaaaatttatgtactatacaacaaaattattaccagttctccaagatgagatctccaaaaaggaatctgcaaatacataagaagattaaacacattaaggatcaatatttcaataataattgtacttatcttttgtaataaaaaagaagacaaa

SEQ ID NO: 73334 - DNA, 1320 bp, Cannabis sativa
cataactaagttagacctgataaatatcaccaggattaactattttaagagcataatgtatgaattatatatatatatattagtagagttatgtgggtaaggcataaccaggttagactcggtaactataactgagataaacactagtaaggtcttaaatgtaaaagagacgtgtgagcataacacgtatgtctatggtacatagacattaattatagtgacattattgtacaaaataatgtaagttagtgcggtggcacaatatgtatgcagtagcctactgtatgaaatgaaattattattattataataattcatgttgtattattatttctatcttgctgggcctttgctcacggtgctctaatgtgtaggcattagtaaagtggtgttagttcaacaatgagttcgagggttttgaagatgagttgtacatgttccagccaagctacaccacgagagttgggtccaacagaaattgaatagaaattccattttcccctttagggtgacctatacaaaacaacttgttatactttaaaattaaatttgacgagattctagatatgtagctttaaattattttggttaatggtataatattgatgtttattgcaatttatttatttaccaagtttaatatttgttttaaatctcatagcctatataccccgattagcaggattagtggtttgtaatcacgacatgtggcgttcctctaggtaggatgttacattttcaaaaaaaagttctgagtcgcgagaacctgtaagcttgaatgttcctccttatccaacatgagacaatttccaagagaaagtttgaaagcctacatcaaccgtttaaacattgaagctactaaaactcgtcgcgtagatgatagtgcaagactaatggcacaagtggtaggtatcgttaatggttccatattttggaacaacctttagggcaagagcgcgtgcaacattgacgaattcatgaagcgggcacaaaaatgcattaacaatgaaaggatagcaaacaacttctctctccaatccttgcagtccactcaagccacatttgcactgccagaacttactaatacaactatgactgctaactctttaaacaacaacaaaagagatggcatagatggcgaggaccaatgtcctaatatgagtaggagtaacggcccttatcaccctatgtatttaatctacaatgagttgacagaaacataagaggccatctatgtggcgaatgagcattgagttccattctgagtttttaaacgcatgaagcatgattgagcccagagagatgcctcaagatattgtc

SEQ ID NO: 73335 - DNA, 913 bp, Cannabis sativa
attgtgtttgttttatttttttactaaatgctttgtataggtataggtgccccccaagtgaccgagcagacttataactcttggtcactttttatttatttttacaagtgtactttcttgtctgttcagggttttgggttcgaccaaaccttttgtatgcactggatggtaaattaatttcatgctaatggattcgactcaatttgaattttgaaatcaacatctttattcatttattgatcgaaaatatgtatgttaccatagtaacttacaacaaagctattatgctgatttgatatgatctttagcttaatcatgaaataaaacaaattgcagaaatttaaaaattgtactttcaatggtggtcatccgacctgagtacttgaagattttattcaaacctttggtcgtggttcgcccagaaggccattttcttaaaagcaaatgttcttttatttcgtacttgatatggtcatctaacatggtacttatgttggtagtattttcttaaatgttccccattccagtaccttggtaccagaacgagttgcatttttttatcatacttgcccaacttgtacgctcctgactctataactttgaccacctgatatggtccttcccaattaggtccaaacacacctgccatactgtctttagtgtttaaaaatactcttcttaggaccatatctcccacaaaaaatttccaagctttcacttatttgttgaaataccgagctactttttgctgatgggctatcagttttaagtttgttgtggttcacttctcttcaatttcatcaagtgattctgcaaggagtacatgattggcctcttggctatattttaatcttctatgggatggtgttttgagttctacaggcagcatagcttcatatccatatgccatggc

SEQ ID NO: 73336 - DNA, 615 bp, Cannabis sativa
gccaaatcatgtgctgcagaattcgtattccgagccacatgggataaaactgtttccgggagtttagacaataaaactatgacatcctcaaatagcacacccagctcgttgaaaaaaacctttcctttgtttatagctgtgactagagacagcaaaattccttcataactaaccaagctacctcatttaatgaccaataataacaccatagtgaagtatttatttctcacctaactcatttttctcgtttgtttaactaaatatatcaagtaattaaatcactaccaattttttagtaaacaatggctaattaattaggttttgtgtcagcttaattttctatattaatttattaattagttagtaattattaaggaaatggagagatttcattaatttaattatacattttgcttttaaaaaaataataataaaaaaccatcatggaaactaagtacattttttttttttatctaagtatatttttatttgtatagtttacaaatattttgaagataatactgaaaatatatatatatttaattagtgcatgtgttcaagaaatattttgtatagatatatatgaaatatactgaaatatgtggtcaagaaata

SEQ ID NO: 73337 - DNA, 1622 bp, Cannabis sativa
agctctagcgcgcttaagcatgctgcgcatagagtctccaacttgagcattttgacgcatgaatgttggccgaacaacaggggaagtggcagcagtgggagtggggcaagaagcattgataacaagtcctgtgtcccctcgggagcgagggggattggttatgggagaaatcataggggcttttccttttcctttatcaatgtgggtggaaacggatacagagtcagtgataataggggcagtgggtctgatagagaaagatggcatagtgtggcttggagtaatataagtggttggcataaaggaaggggatgaaacaaactgtggagattgggttgaaagacgaggatttgggctggattgaggagaatcaacatggagaaattggtcgacggcttgttgcaaatcttgagcatccgatgtagggtggatacgaggaaaaaactcctcaaaaggggtggagttggacagctgaaaagggttcttcttgtggggggatgaaggggtagcacagagggtatctttgtattccaagagtggggggtgtgggaaattatcacagcgaaggaggtatttagaacatttgttgtaagtatggtcaagcagaccgcagaaatagcagaaattggggagactttcgtatttgaaactgacccatcgtggttcagaaatgcctctgaaccgaatggtcataccacgacggagaggcttagtgatatcaaatagcacacggattcgaaggtaaggaccaaagttttccattaaagagagagggtaaatttccaggagatcaccaatttcatcagcaatgaactgtgcgagttggggacttttacgaccgaaagggattcgatggatttggacccaaaaggggacatatcgaatagaatcaggagtaggggttggtgacacatcaggatgagtgaagaccatcaagaacttatcaaaatgccatggttgttcttcaagaacacggcgcctatctccatcgcattggaatgaagctagaaagagcccagaatgatactcagaaatttgacaaggaaagcggagggtccaagcttcagacatggctttttcaatccaagagggcttagcagatttgggagataaaagcttgaaaaacagacagaaagcatcggtatcagtagaggagtgaattgaaatgtgatcgaactcatgaacaaggctgtcctcgtcatcaagagcagtaatggggtttgggttggtggaggaggaagccattaaggtagggcagaagaaactaacagggttttcagcaggagacgaaaatggtatgcaaagagtaaaggagagaacatataaataagcaaagatagaaagaatcgagagagacgagtacctggagaagaaaagtcgcctcgaagagagaactggcgtctgaaccatcgcttcacagctgggagaggcggtttggaatcgtcgctgaaatgcaatgatggcttttggttgtgagagggggagaagcagaatgacggttggtttagtcgtataagaacgattcgaaaatcgaagatagtatgaagattgtgcaggaaaattaaatgctgataagaaggagccgccataattaaatgcaagtgtgagagagagatagcatt

SEQ ID NO: 73338 - DNA, 804 bp, Cannabis sativa
  modified_base (146)..(149): a, c, t, g, unknown or other
caccagatttcctcttcttccctgtcacggacttagaagtaaaatccttcggatagagcccgtacctcacaaagttatcctcagaggtcaacttgataatatttcgatcttcccccacaagccgggcaagtttttgagctctatcnnnnagagcaagagtgaggggagggcggtgatatctctgaatctgctgaaactgagtgcgagtgatgcccgtgacatccaccatgaagtactcatcagcaaagcgcccaatcttgttgatggccttatcatccgtgcccttcaaccacttcaagcctagttgagagaagtagaagtaccccgacctgccttgcttaggggtggacttcaaatcgaagtaccaagcaacttcgtgaggagagggcataccccatttctggaaggcatagaggagaaagagggcagacaaatacttgatgccctaaggagtgaactgggccgggcagaggccgaagaagtcccccacatccttgaagtattgatgcaagggcatcaacgctccttgctgaccatgggcacccaacaaggcccacatccccctttcatggtttttggcacgattgttgtgggcgggaatgtagcaataattaaaagatcattaatttaatttaatttaaattattttaaccaataaataattaaactaaattaatcacatacctttatacatcaccctacacgtgtagaatgagtctacacatgtgggccatattttaagatccaaaattgatttttcaattttatcacaaataacatgactctatgatctgaacctaaatc

SEQ ID NO: 73339 - DNA, 2053 bp, Cannabis sativa
tatagttaaatttgtttagtaaccgttcatgggtaatacccattaaaaagtgttctatatatatatattaaataaatacatacaatatgtaaatatctgaccttctaattaaaattaataaataattaaagtttgaaaataaccataatgtcaaattttttgaaaaattaattttcaaatttaaaatctcctaacatttaaaattaattttaattaataataaaattaataaaaattaattttaatctgataattagatttaaaattttaaaataagaatctacataaaaatctaccaaaattcaaattttatttcattgaaaatgattattaaaacttgaaaaaaaaaatttaaaaaaggcgaaatcggacagtatgcattgcatagtgtccgcgtgcacaaggatggggggtgtttcttgaacatgccttgtctggatggcgtgtaatccgtgcatcagccccatgaaatacagatccgcacgcacgcatgtaggatttaaaccctagccaaattttaaatcttcaaaaaatcatatctttttcaattttaatccaaattcaattctgtaaaaggctaatttgcttattttttagctagctttgcaaataaaataatttcagatcaaaaatcaaattatttttcataaaaaaatttgtaataacataatcaatcatcaaactcacataaactatcatgaacacatccaaatcaatcaaaaattattttaaatccaaattccatgaaaataaatcattaccgtggctttgataccagttgttggaaatattttaccaagacctagatttactaacatgtatgttggattataattctacaatctaacatcctaaatatgaatgtcctaaaacaatgaattaaacacataaaggtatagaaaaccttacattgacgacaatagaataacatgactccttccattcagatctctaacccttgatcctttttctgagtatgatcaagatctaaacttggatctccttttagtgacaattagactatatattcttcctcactatgttgggtattgctttgaaatgtgtgagaaatttctcaacaccaaggagcacaaattttgatgaagaaatccaagaaaaagtagcctcaaaatttttgaaaaattaaagagaagaaggaataagctttttagggttttttagcttagaaaatcatcatcagacaaagctctcatctctttctatttttaggcttcacttagggttaagtttagatgagatgggattaaaataaagacttgggctgaatcaactcttagagccaaattgcatatggactttagagttagatttatgccactttattttatttaaatgaaacaatgtgtcttttcttattttaccacttatctctttttttttttaatttaaatatgaattttatttatataattttaaataattatcaaataaaatattatttaaatatatttattaaatagacccacatagtgtcttaattaacaaataaactcttatttctcttttcttctcaattatgcccttccttaataaaattcataaataagacaatcattatttagaatcctaattgattaaataaatcaattaattaagactacaaaataatattatccgacttagtgtgggggccatgggcctatgtaaccaatctcccaataagtagttgtagaatttatcaagtaaattttctatcttattaattcctcatgactccactataggtttggaattgcactcctaactacatagaacactctattcaccaagaatagatacggtatatattatccattgtttcaatctaaataattaaagatcctctatagataatttatatcgagtaaggacaaatttaccgttttatcctccaatatattttattcttaaaacacttagcttcttataaatgatatttcaataaactaatataattactgaataagagctcttccatttttgtttgttaaccaagctctaaggaaaccatcatttcatttctgaataattgtagaagctatagattctatat

SEQ ID NO: 73340 - DNA, 709 bp, Cannabis sativa
  modified_base (30)..(38): a, c, t, g, unknown or other
aaaaatattttttttaaaaacaaaaatttnnnnnnnnntttgtgattaaaaaaaaaagtgttaccaaatggcacattaattatatataggtcttttatgggataaaaaaaactaaatatttgtaactacttttgtaattaataagattgtgtattttttttaatggaagagtgttaattataattttgtattacaatatttttttaatttttatattcaaaaacatatactggaatatttttatatttttttatggtggggttcgttatagttgcaacatcttatcggtaaatttttaagaaaatctgaatagtttatagtatcaataagagagttcttgacattttagtttactacacgtgtttaaaaatttcaaacttgttttcaaaactgtaaactattcaaacaatttcaaaaatttacaagaataatattgtaactataataaacactgtcatgcaaaaagtgtgaaaaagaaaatatttcaaaatgtattttcaaatgcgaaggtagagaaagaatgttggaattaccaattttctttttaaatagagaaatggaatggtgtagcggtagaaattaacagtaagggagaccaaaagatagaaaagaaattaaggggagccaatacataatttttttgaaaaataaaatttttaacataaaattactttataaatttttctttgtccaaaattttggaagggcc

SEQ ID NO: 73341 - DNA, 1489 bp, Cannabis sativa
  modified_base (43)..(62): a, c, t, g, unknown or other
tcttgaatagaggttctactgtagtaataataataataataannnnnnnnnnnnnnnnnnnnataataataataataatagttaattaaacaatatcctatgccggtatgatatacaatttcccacttttattaaactttactctacaaaattattaataatcaatatatcctatgccagtatgatatacaatttcccacttttattaaattttactctacaaaattattaataataaaaaataataattaatttaaatactaaaaaaatctaaaatccctatatcttctcacaatttgtttaatataacttttttttttcattctttattattgtattttctttaaaattttgagatttgaagattttctttttcatgatttaatctaatttattttcttcatgcatattattttggagtaaaaaatattgtatgatatagagccgaatggcaacaactagtaaatatgttattcatattattaaaaaaaatataaaaatatcataatttgtaccctatcactcttgcttggctcttcatattgttaaggagaaggtttgggggagagattaaaagcggtgcaataaatgattcaaacatgaaatttagtacaattttgtgacttaattatcattaattagacgagttacaaccgcaacaaattgcggtttgttttctagtttaatgtataagaatagtgagggagtgggaccaaaaaaatttgtaccttaggacgaaagttaaatttttttttttttttttttgaaggaaagttaaaaaattattaggagtattgaaaatgtaaaactttatattaaaacatggtaataaatagaaaattttacataagatagactaaaatttaaaggttagtaatatatctaaatacatgttttatgtcttaggggtgtttacgaattagtttggtccagattttcaaattttttaaactaaactagtattgtggttttttaaaaatttaaaaataaatcagactacttaaatgatcaaatcaaaccaaaccaatccactcaaaaatggattagtttggttcaaaaccataatttttattttgtagttattctaaatttttttacaataattatttattttttcgataattttatttacttttaagaagtttataatacataaataataataaaaaattattatcataacaatataaagtcaatattaatattttacctgaaattattcctaaatattaatatttcgttcaaaaaatatatattaaatatataaaataattatatagattggtttggtttgaactgctaccgaaatttttaaaactgtgaccgaatcagagaatttaacatagttaggattgatcaaatcattcacaccagattcatttggtacggtctcaaatggtttggtccggattagttgaggtttagaatcacggattacggattttatgaacacccctacctcatgttaaattattaaaatgaataatta

SEQ ID NO: 73342 - DNA, 915 bp, Cannabis sativa
  modified_base (40)..(56): a, c, t, g, unknown or other
atgatagactttaaaaaagagggtaaaaataaaagaggannnnnnnnnnnnnnnnnagagtgtaatttcctcttaaaaaatttcctcaattaagatcgttgaatttaaggatttttattaaattttactaacaaacacttaatatagatgaaagtttaagagatatgattggtatatatcaaagtttgagagacacgatttgatacatattaaagttcgaatgacacgatttgatacatgaactgccatcttacctaaatttaatgaaattagatagaaatccttaaatctgataatcttaatagtgtgggaagaattttaacggtctgaaatattcaagggaatatgatttgatacatgtccaagttcaaataacaaaattcttaattagccacaattaaaatgaagggaattttcttttttaacatttttgtttatatagaaattgtgtgctacatgttaaatttgattaagtactaaatgaacaaatgagaaagaagctggaaataagaaattaaacataaatgttacgagattcgaacaagagttaatatattttcaccttgtctacatctcgagcaaaatattcacaaaggctagaggtcgttattgagtcgacaaataatagagattacaagtactcaaaagttgcacacactctcaagaagctatgcttcaattacaatttgatctcacttgaaacaataatgatcaaatgcacaccgtgtctttaaaaccctcctcaaggttttccaaattccaattaaatataaaaaatgtattcaaattttgatctgttcaatgagaaaatttgtttatttaatatatattaaataataatataaaatttcttcattaaaaaaaataaaactaatcaacttatgcagaaaattgataaactttgtatgtagtttt

SEQ ID NO: 73343 - DNA, 1032 bp, Cannabis sativa
atactttagccttacattgtatatgagagttttatatttaggttgtatttatttatatattgtatacttaataataatatatatatgatctgagataaacaaatcataaaaatataattacctcaacctaaatgccaaaaaaaataatatcagttttttttttttcaatgaattaatgttattttttgaaaatattaatagtttaacataaaaaaaaaaagtaaccgatcaaaaataactaatccaatccgcactattgcggattggattggatttgaattgttatgtggattggatcggatccaaaatatgaaattcgcacctagtgcggattggatgttatttgaccaaaatagtgcagattggatcggataaacagccctaatctattatatattaaaaaaatagtcatatttgaattttatttttcagtactgtttaaacacttagacgtatttcacctcatagtaattgttgtgtatgtggttgtgggaatgatactattgcacatgcattttgtttactgcactttttccacaatatatttgaaacaacttcattttgcatttctattaagcgaggaatttaaagaggtaatctttatggatggaaattctgaagaaggaagctgacaaataaatgttaattttttattttttatttcgcagtgacaaataaatgttaattataactaatagaaggtcttcaattgaagaagcggatactcatattttcaaccctatgtggatgcatccattttaactcaatatatggtcgaatttggagttgttattttctacaaactgtaatttttatgtttatggataaatataataatgacatttttatcaataaaaattaagttggtaaaagaacactttatgaaaaaagaaaaaaaacctttaagtaacaattaaattataaaattaatagaaatagtttaagattaagtaaataattttatttgtttattttaaaaaaataattttaaaaaacgtaatagtgtgacttttttcggttaggtatttgttt

SEQ ID NO: 73344 - DNA, 815 bp, Cannabis sativa
acttgaacctaggcttggatttgaccttagacctgaaccttcaactcggatacgggacctgaacccatgtctaggtctaggaccagggttcgggtcgagtttatggtaaagatagtataattttaaacaatctattcataggagtcaataccaaatatagtcttgtatcaaataatattaatgcaatagaatataattcaacacaatattatacaatacggtgtaccaaataaaccataaaaatacataacacactatatgtatgataataaaaatgcctcctaattatgaataatattatattttaaggaagcaaatcattaagaaactaacgtaataataatgataactgtgaaccacataaactagatacacacttatacaagtaattttaacaattatctatttgctaaaaatgacttgtcatataagtaggtgtaaagttaatttgtgtgcatatttcattaccctaatgacaaatagagagaaggattcaaacgagggactgcatgtgcacacaatggcttagccttaaacattgagttcccttcttcagtactcaaatctatcttctccatcccatgaggaatcttccatgtaaaaccttgtaataatcttcccaaaagcataaccgtcatgtttgtacccaactccactccaatgcaccctctcctcccagtggtgaagctaataaaccttaaatctgtctcccccaagtcacaatgcttctcgtcaagatggcgatctggattgaagcgcaacggttgatcccatacggtatggttgcgaccgagcccgactcgactcaaaagaac

SEQ ID NO: 73345 - DNA, 1399 bp, Cannabis sativa
tcttagtacaatttttaactagattttaaaagtttactctaataacaagctcaattatataaaatttaattattttacattcagtctaattcatgattggatatccattttttttttaataaattagttccatgtagttgaagtgattttgatgttgtctgcatctagatacaattataaaaagcaaacttggataataaaattcataaaaaaaaaaaaatatgttcagactgctacaacatgtgatgctcaaaaagcaaacttaactacataataaacaacaatattagcatttctagcacaaaaaaaaaatgtataaaaactcattacaagatatagatatatccttaagtctaaataacacttatcaatcttccaagacagtttatataatatgttatatgatttgtttttgtgaaaaatcaaatttttacaaataccaatagttatactaaatttaagtaaaaatattgttgcaacagtctgcagcagtagaatgtaattttgtcactatagaatacaattttgcagaaacaaaccaaaaataaatagtgcagaatttaaaaacttgatacaagagaattgtacgagatatcagtgctctttcaaacactactagtctacgggaccacgccagagaatgaaatcaattagtaaagtaccaaaatttacaaaagcaattgacttagacaaatttagactccctctagtgatttgtcgcaaccctttataatccaccttgttaatctgatctctgaaacacatcaagtggtgaactctcttcagctattgatgtgtgcttacttcctcccaaagtaaggcttaaacaaatcttctcccgaagacttcctcccgaaatgagacttggaaaagtcttctcccaaagacccacacgtgttcaaagcttttctttaacctattctatgaatagtatgagatcataataagaaaaccaaaacttagttgaacactctaggtttttacaaatgaaacactctcctcacaaagagagatatgaaaatgtgagaatagaagagataaaatcgtttgactgctctctagatcctatttatagaacatagcaaccctagagacagccacaaaaatgattttccagctatacacaactttttaaatttttttcctgatttgtagcattgtaatcggtctctgcagcagcagattaggaccagaaaggaaacattccaaaatagaccaagatcatgaatttggacttcaaacctgccaaataaagtgtatttgatatgctccaatcaaggaaaaattgaaatcattaattagaaaaagggaaagtcaagtttcccaaagttagacaactttccataagagaattctttctcttacaagaagttttctaaaccaaaagagactagctgag

SEQ ID NO: 73346 - DNA, 1105 bp, Cannabis sativa
tagcttattttcccaagcgggaagggaagttcttctcaaagcagtaattcaagcaattccaacttatgtcatgagttgcttccgtcttccaaaagaactaatcaaggacatacatgcgatgatggctagattttggtggggatcctcggagtcaaaaaacaaaattcattggggaagatgggaaaagctttgcaagccaaaggataaaggtggaatggggttcaaagatctagagaagttcaatcaatctttattagctaagcaagggtggaagatcatcaataatcctagttcattgctggctcaggttcttaaggcttgctatttcaccaactctactttcatggatgctaaacttggaggattttgctccttcatgtggagaagcattttatggggaaggaaaatagtggaaaggggagctagatggagggtccaatcgggtagagaagtgcgcataaacgaagacaaatggctgccccacccatccaccttcactcttcccacccctgcaaaagttaacaatgggacaactatggatcacttaaaggatgaagaaggagagtggaatcaagacatgataactcaaacttttcacccggatgatgtgccaattgtgctaggtatggctccttgttataataatgctattgatgatttagtttggcactacacaccgaatggtatgtatacggtgagtagtggctataaagtggccaccaccaatgagttaagcgcagggccttcatcagaggagcatactaagaaatggtggactgaaatttggaagttggaagtccctcctaaggttcgaaattttgcttggcgtctctataatggttggatcccggtaaacatggtgcttaggaaccggggtatgaagatagatccttagtgttggggctgcagaaatgaggaagaaaccatagaacatgggatttggttctgtccagcaataaaggaaatatggcaacattttttattatggaagaccattaagagatggaaaggagaaacataacacatgcccatggctattaaacaacaaacaactaaagcagaatttttgatgttcattattctctcttggctcatttggaatagg

SEQ ID NO: 73347 - DNA, 931 bp, Cannabis sativa
  modified_base (360)..(362): a, c, t, g, unknown or other
acatccgtggcttcccttaatgcttcaatgattttgtctttctccttcggtactaggctctttcccagtcggaggatcttggtagggtcgaggtcgcatacttgcactttctcgacgtcttccatggattctacaatattttcggattccacgcggggatccaactcctcttcttctaccaactttggctcaagattctcacggaccatcagcaccagtaaatgggctgcgacattataacactgcctggcctctccctgattacccctcacggtccccaccctgacttcgtgggtagggaatttcagacacaagtgacggatggacgtaactgtgccaaaatcaaccaaggccggtcgnnnaaggattgtgttgtatgcagttggcctgtctaccaccacaaaggtgcagtacttgaaagtactctggggtgtatccgggcacaaggtgactggcaacctcacttttccgcttgggataagccctattcgttagttgggaagcgcttggtgataaatccctattcgtgaggcctattgttgtgaaggcttctttgaataacaagttcacggaactcccattgtcgatcaatattctagccacaattttgttggcaatgggagtctctatgaccaaggggtcatgatgagggaaacgcaccagttttgcgtcttccttcgtgaaagtaataggttaatccatgagtcggggcctttgagctggaagctgggtgacttcccacacttcgtcatgtttgatggcccgagcgtagtgttttaattcttttcgggtgttccccccaatatggggcccaccagagatcatggccactctttcgttgggtcttggtggcaggccagggatctgttgagggatcgctcccctagagggtgcagctggtgccaatgctccgggtgtaccccctggtgtc

SEQ ID NO: 73348 - DNA, 828 bp, Cannabis sativa
ttaaaaaaaaaaagatttagatttaattttttaatatcatatttaattataacataactaataaattataatttttatataaaaattattaaacagtccaaataaaatttaacaaccttaaattactcatatgctcattaaaaatacttttcaagaaaggtgattcttgattgggaaaaatttagagaattagcaaataccttcaacaatgtgttaacaaaggtggtcacgaaaacaaaatgagatcatatataggcctgttcataacgattgtaaagctgcgatttcattttcaatttctgttggttccaattcactctcgtgtatcacccattccatttttacaattgagattactcttgcgaatttgattatttgagattgacaatgagtccacatcccaaaatgacacaaaggctagatcaggctgattagtaagtgttgttaaagaaaaacaacaccatgaatgtagtaaagtaaaaggtgggacacatcaagcgtggtgtacgtcattgttttgggatgggacatcaaacaaatattttaaatgatcattgactgtttgatgaggatacattcaatcgaggcatccgactttatttcataacagagttagttttttgttgcaaagtgatggtcttggctgtggagctggtgtggcaattaccatttagtggctcgatagaaagtgattcctggttttggttaaacgaaagagctgggtttgttttcagtaaagtgtgcctacaatattcttcaacaactcaaaggtaaatagtttgtaagtccaaactctggcttttagagaaagttgtggcagataaaagt

SEQ ID NO: 73349 - DNA, 933 bp, Cannabis sativa
  modified_base (43)..(44): a, c, t, g, unknown or other
tctcgtcaatgattacacaattttcattaagtattctcatttnntttttgagataaaagcttttgatgattgtgtatatatcacatgttcaatgggagtaagaatatgctcctggtattttattggtaaaaaaaattacttgccaccgatgatatgcctattttgtattaggaattcaagatatgttcttgaattataacaaaagaggtatataaataaaatattcaaaatttttggcttgaaggatactataccaagggaaaggcttgtagctaaagaaaataagtcgtctaagtcattgtcttaaaagcaaccttagaattcaaaaaatattaaagattcttaatttatattggaattaatatatgctcaaccatgtatgtatttgtacttaatatacatattaagaatgttggatagatatttaagtaaccatataaggaactttcggtatgcagccaaataagctataaggaatttaaggagaacaaaatactatatgttcactttaccagaaatcagaaaatagaaaattttggagattattaagatttctgattctgatcttagaaagtttttcgttctgagatttttttttgtcacatatggctacaaaattaggaatggtattaaaagctattaaagatatatgttgtgacaataaattaatcaggttgcatttaagtaacaacatgaactctagaagctcaaaaggcacattgactttgagctaattgttgttaaaatgaagttcaaagtaataaggtgtcgatagaacatactaagaacaaaattcatactttgtgtgatccagatcattaagaatataccccttaagactttttaggagcttattgctcatatatggatgtggtattatttaagattgtgctagtttagtgggagtttgtatttgggatgttctatcaagct

SEQ ID NO: 73350 - DNA, 848 bp, Cannabis sativa
aatttttttattttatcatttttatcattttttttttttttgtattttaaattttattccattcctattcccattctcattcttattcttatgttttcattccttctaaccaaacactatctaaattttgccaatataatatagaaaaaaaattccaaaaaaaatctattaatgtattctctatctgttttggtatttaaaataatattttagtctattttttttttagttgtttacgttgtagtaatttaaaacattatgcaaaattttaaaaaattttaaaaaaattaacatgctaaaaatagggtttaaatattttattttacacatatataaattaaaagagtctcgtgtgcaacagactgtttgaaccctattttgggtgtgttaaatttgtttaaatctctcaaaattttgcaagttgtcttacataacaacaacgtagacgaccataaaaaccgaattaaaaaattctcttaaatgccgaaacagataggggtgcatcgatagacccattttaaaggtgcattgtagaagtatcatataatataataacatcaagaaaatgagtttttttggctaattatgattattttttctctcgaacatgtaccaaatcgtgttttttgaatttttttagactcttaaaaattcttttaaattatttaaattgttggatttaacgactttcaagtcgtaagaacatctaacgtgacgagtgtctatatactaacgtgttctcaaatttcaacatgtaccaaatcatacattcttaattttgacataaactaaatcatgtctcctaaaatttcgtctataatacacacttattagtaaaattgaacaaa

SEQ ID NO: 73351 - DNA, 840 bp, Cannabis sativa
cattgtcttctccaatctcattaattattacctaaatcataatacaatatcgatcaggtacgtttttcaatttaatgttttcttttgtattttgatatagggatgtaattttctgttaatattcctcagcttttatctttctcgttttcaattaaccttgtaactttgttattatttaatgatcatcactgtttcttggccgtggaattttcttgtaatggaattaaaatctatgatgcatctatgtaagtgagcatatatggaaatatatatgcatcatacatgaatgaacagaaaaatcccacttcttttattctacagtagtcatgacatgtttaactaattgatatatattcgataatacgacctaattatattaaagtctttctatatttttcaattggagaattttggaaggaatttttaatatcatttctctttaaactgtttccctttattatattatattactttttaagctgtctcttttcgactcttatagtctattatatataaaacatgccattatagtttaaaatatgtagctagctacatattatcaaagggaattattatctagtataatgtttttttaacttttttttaaaaaatttacggtttgagtttctaaactggtttctccggtagtttctgtatgggttgctttacgattttttgttacaatttaggttgcagctctatgtaaaattccgtaaaaaaaaaaaaaaaaaaatactgttttaaagtataaaaattaaaagctcctattatcaattcgggatgccaatgaaaacctacaaaagaaagaaattgatccataaatgaatattttatttttta

SEQ ID NO: 73352 - DNA, 1112 bp, Cannabis sativa
gtaaaaaataaaaataaaattaaagtattcaaataaaaaaaaacatttttttcttttaaaaaaaataaaataaaaaatctgaaaaaaaaaataattggaatacctaattggaaaatgataaaaaccctaattgaaaattctctttctttttcttcctcactcgacagccaccccccctctctctctctctctcttctctctgcatttgtgcggtggccactggaacgacgagaccgtcgtgctccgatcacccattgaaaatccttcacgaattcaacagcctaagcagaagcgacaacgaggtcctccccaggggtctcctagcctctccccagccgaacccagctcgcccaacattatacatcgcgcgtgcctcgacccttatagccgatgcgattctgaaccagagggtccaattaaaagaagccaccgtcagaagtacttgggggaagctggtgtcagacgaaacgacactgccgaaggagacatcgaggacgttggtggcgatgccgtggagagattcgaacaaccattcgtagggaaggataccaagcctggggatagagtcagcagtattggtgagttgaccaatcttttcttcaagagaaacgagggagtgagctcgtgtggagatggaaagtgaggtgttgcagaaggggtacgagctatggtgaggtgggttacatgggaaattggagatggtggcagagtggattttgaagagaaagaagaagaagaagagaagtgtggagagagtggatgtcgagtgaggaagaaagagaaagagaattttcaattagggtttgtaattgtttttttttcaaatattttatttttttttaaaagaattttttttattttaatttttttattttattttaatattttaattttttacgtggactaataaaattgtaccatgtgtacaccatgtccacgtagatgcacacgtagacattctaacatgatacttaacacccaaaatagatagaaatattaaactggtaacagaacacgagtattcgaggttttaccactaaaattttaaaattgaaggttagttgcaataaactaagcacttatagagattatgccgcaaattactcttaatt

SEQ ID NO: 73353 - DNA, 721 bp, Cannabis sativa
tgttagtatcttttttaattttaacttaatttgaataacatcatatgttttttgtaatataccgtggtgtaggaaatcaagatatttttaattagtatgtttttgatgtagttcttatcgtgtcggcctgtggtcactggtcggattaatacacgcactgtagatgatgtttttgcccttgacagtgccacatataaataacagtgtgaaaaaacgggttgtggtaaataaactccaacataatctaacgtttagccttgcgatttttttattgtcaatagcaaaacttaatcttatagggaattgtgttcatttacttggggttttttggtacaaaaattgtcaattgttgtaggattaaagaagccaaaacaagcagttaccaacttaccaatacaaagtgaccatttcattatacttacacacacagtccaggttctatataatagctccagatcgatcatctgccagcttaggtggtattaccattcccaaaataatttcagcagccactgatttattgaagagaagtgctaaaggctaaacgttagattataaagtggaatgagtaatgatatgttgacacaaacactacacagctagctagtaaaccaacacccaagaaaacctcactaaatagggacatcccaaaattcccaaacgaacgaatggaaagatagctctgaatttaattatttcttttcctttttatatataatta

SEQ ID NO: 73354 - DNA, 1055 bp, Cannabis sativa
ataaccaataagaatgactatagaatatatgatatgaaatgtaatacatatgtaaataacaaacatattttataatcatagaataaaatataaataaactgaaggaaaacttacatcacaaaaatattattgtgttgatatcgtgttgaataatattataactattaatatactaacagaatatgagaataagagaagaatttcattagttgtgaatgtatatctttacaacatgatagtctctttatttataggacaatgattattaagtataagaattaaataatttaggattacaaaaattacagaaaaattactatgatcttaagtgtaactagaattacataaaataaatataataataaagttggtgatgcataaataatgacattcactatcattattctttcataacaaatttaaagagaaattatatgtaagctcttaatttacatatgtgtactaaatttaatcatgtggagacatatttagttatatgattaaaattcattaatataaatgataatcactattcttaaaagaggattgttataggataatcactattcttaaaagagggttgttataggatactaagatatgagatggtgccttacaattaattaatagttctttataatttttattaaattaaaataagtggaactaaatattaaattatattaatagtgatttatatattataagagtgttagagatgccctttagtatttctcttcttaaaataatgagaaatattaaaagcattaatggtgtctagcatcttatgatgtgttaatattgttattggttcaattaaataacgtgtctcgtataatataataacttctaaagaatatctactaattgcaaagtgatacgtttagatggtgctagtcactactaatcttcaataacaatactttaaaataaatcataaatattctatatttttttaattgtatggttaaaattaattaatgtaattttaagtatgcaaattaaaacttatccatatcattatggaatgcaatatcatattcacatgatcacat

SEQ ID NO: 73355 - DNA, 902 bp, Cannabis sativa
tacagagaatgttcttggtgacttttctatttagttcttatgaaacccagaattctcgacccgtgccttaatgtatttggggggtatttatagtcttttccctaggataatccctagagttgtcccatatatatttgtgtgtaacttcagtaagggcatgtattcctagcccatgcaaaataggaaatgcatggtctgttccttaggtatttcagggattagatagatatactcctttatcccttcttgactgatgtgatccctcataaagtagccgtcagtaggcttattaatcatagcgtaatagctgcagaagggaggttacaccgtcagactttaatatttatggcagtaccaatacacattttcccatgcggcattaaatgcgagatgactgttcagattgggtctgatatctctcgaaagtgctttgctatagctttgccctctgggagtgcgtggtttcctcacaccttctctgggaggtgtctctttagccgaccctcaaggtttacaaggacttagtcatattatgtcaaagccatattcttcagatctacgtgtcattatcgcattggtccacgtattttgggcaaattcaggggcaacatttaccccccaagcctcgtttggtgtgaagtgaatgaggcttgcttagataccttcgatttttgtattaactaacaggcacatgcctcaggcgcgtggggtgcatttatgactgtcattattgcagtttttactttttgcaggcaacgattcgtttcctgtccgttaatgatccggcgcattcaatgggtgtcagtcgagtactataacgtttccgaccgccttaaagggcgcttatcccaaccgttagatctgtagaatgcgaatcgattgctattctcaccgtacgatga

SEQ ID NO: 73356 - DNA, 1461 bp, Cannabis sativa
ttttttttttaaaaaaaactattctagttttctgatgtaaaaaataatagtgtaagtttacaatatacttttaaatggagtttgtcctgtttgtttcggtatgtaagaaagttttttaatttaatttttatataatttcatatgttcgtaattatttaattttatcaataaatttttaaatttttttaaataatttaaaatatgcaaataagatttacatattttttgacactcagcaattattttttctatatacattaaagttgagttagagcagtttttagttttagttgtagcttctctaaaaaaatttcaaaaaattatattttttaactgcttactaaatatatttttatgacaacttttttaaaaagcagtttttaactttttgaaaaattgtgccaaacgaactcatagtaaataattttttaaattttattttcaacacaataaattatttagaattttttaaaaatttatgtataattttaaatagctaaatctttatgatcatgaaaaagaaatcaaactaaaaaattcttacacatacaggtagagctctaacaaaataaccctttatgtggtacacaaatttcccaaagtataaacgtattaagttgttttcactttctcaaatttgaccacactctctttcttagcaccacttcaatgtcatcaaattatatgaattataatctaacaaatataattcattttttgtaaaatttatatatttatataattcattttaattaataatattggacatactccaaataataataataaaagaaatttgcaacaaaagttttcgaaaaattcgtgctgatgcattagtctccaacctttaaaaatagcgtaatcatctccaagatcaatttttgtgtacgtctattaatcctaaacttaaccgatccgttaatttatttaaaattgtcacgagttaaaatattattggtccaaataatattttaattaaaaataattttaaataaaaaaatatatattttaaaatcattttttttctttttcatttttttctttttttttctccattaacttataccttcagctacaccacactcatttcatcttctacctccagccacaccgcccccacccccacttcatcttcttcctccagccgcaccatataataatattagatttgaggagaatttctatggtatacccaaaaaggtttcatcgatgtattcgcctcgtattttatatgcgtgtaaaataatttttttaaaccctattttttatcagatttacactgacgtgataatcaccgataagatttacttacacctagttgagtggaatgtcttttcaaagtattagtaaagtaaaccagattggatgttgttatccatatttttggcaagagatacatggaatctaaatagaagcttaaagcccattagtggcccaaaataaaataaattgggccaagcc

SEQ ID NO: 73357 - DNA, 1980 bp, Cannabis sativa
  modified_base (1615)..(1617): a, c, t, g, unknown or other
atcctttataaggatacactgaagaaaatgggactggaaagagcaaagttaaaaccttgcatggtaaacatatgcggatttataggcgacagtgtcgccagtcaaggaataattgaactcccattaactgtgggtgagatgcctttatccactaccataatgcaagactttctagttgtcgatctatcatcggcctacaacatactgctgggtcgaccagcgctaattgggctaggggtagttagttcaattaagcacctatccctgaaatttcagacaccgataggtgtaggagtggcgcgaggtgaccaacttctggctcgtgaatgctaccgcatagagctacagaatagaaaagctggtcatcaactaatggctgttatgactgaagaaggcgagaagcaggatgacgatcttgattctcggattcaagaagaacggaaccaattgaaatcaatcgaggaattggaagaagttattttagatccaggaaaacccacaaagtgtgtatttattgggaaaagcctggatgaaaaactaaaatagcagctaataagttttttgagcgcaaaccaggatcaattcgcctggagacactcagatatgataagaattggccctaagattatctgtcaccacttgaatatcaaccaaagttacccagccaagagacaaaagagacgacccttggattctgagagacaaggggcactcaagtaggaagtggataactggttaattaacggctttatacgcgagtcattctatccctcatggatatccaatcatatccttgtccgaaaaccaaatggaacctggagaacttgtatcgacttctcagatttaaacaaggcatgtccaaaggattgctctccactagcaaggatataaccagattaaaatgctcttcatggaatatgaaccagcaaatataatggcaattatattaataaatattaaatggaataactctttaaatgcagaagtcaatagggtatctttataacttgcagatcgcacagtctttagcgaggcaaggatgtacgaagtattgatttatgtattaatgagaaaccatttagcgtcacaagacataattgcaaggataacatcgataatacatagcgaggcatgtaccttgcaatatgtagagatgtgttgacaaggtgagttggctgataaaatacttagcgtataatatacattatactagctaagtgttctagcttgaaggacatagataacggatagtgagccatccatctcgctataggaaggcatgctcttggtaaactctagctcgctaccagggttattgttgttattgagaaccccaaagacatgattgtccattctgcaaggctttatggttaaagagcagcccttaagtttgctcagtacactagtgctcatgccattgctggaagacttatgaataaaccaagttattcatgtaccaagcgagatacgttttgcagcgtgttttaatccacgtcagtgttgaccttttaaaaagtagtttgaatcacagctgtgtgattttcgatttaattaatttattaaaatagaaataaataattaagtattttttaataaaatcaacttaattattaannntaatttaatatttaagaaaaatattctaatttaagtttttctaatattaattaataaattaatttcaacttaaatatatgttataattaattatattcttggaataaaaataaataattaagtatcttgaataaaatagacttaattattaatttattaagttctaagaaatatattctaaattaagttggtccaaaattaattaaaattaattttcaacattaatatattttcctacataattaaataatagaatatataaattagttactagaaattaatttcatttattttaaaatcaattatgttgctaattcaattttaattaggttaaactagtatatttagcctaatacaattatt

SEQ ID NO: 73358 - DNA, 1201 bp, Cannabis sativa
cgaacaaaatagagatcaatctctatgtgttttgttcgagcgtgaagaacagggttggcagccaacatgatggtgctgagattatcacacaagatgagaggaggagatttgagtggaatatgcatctcactgagtaaggatttaagccaggttatctcagacacaacagaagcaagactttgaaactcagattctgttgaggatcgaaagatggtggtctgtttcttggactaccagccaatgagattattaccccagaaaatgtagtagccggttgtaaaacgtctgtcatcagggttagcagcccaatctgcatcacagtagacttcaagatttatattaggtgctttctttatgtgcagaccatagtcaagagtgccagcaagataccttataatccttttgacagcaaccaagtgagattgtaaaggattttgcctaaattaatacactttgttgacactaaaggctatgtctggccttgttattgtagcatattgaagggccccaacaagtgatctataggcagatgggtcttcaacaggatcactcccataatttgacaatcaaagaccactgttcatgggagtactatgtggctttgtaccctgtagctcagctttgcaaataagatcttggagatatttctgttgagacagtatgataccttcagtagtagagagcacctgaatgcctaagaaaaaagatagaaggccaagatccttcagagcaaaagtggagctaagagctgcaatgagggatgtgacttgatcattgttggaaccagtgatcaagatgtcatcgacatagccaagaatataggtgccgcttgaggcagtgagttgaacaaacaatgaatggtctgatttggcagattggaagcctaattaacttggtgagagtagaggaaaatttttcgaaccatgccctgggatcttgcttcaatccgtagagagctttgttaagtttacagaccttgtttggatgttctttgtcaatgaagcctggtgattgaaccatataaatctcctcttgtaggtaaccatttaagaatgcattgttaatgtctaattgtcgaattggccaacccttggaaacaacaagagttaacatgactctaatagtagtgggctcgacaactggactgaaagtttcattgaagtcgaagctatgctgttgatggaatcctttggcgactaat

SEQ ID NO: 73359 - DNA, 1630 bp, Cannabis sativa
tttattgattccaaggatagcaaagagtatactggtaagtagctgggtcaaattgacatggtccatttggatgaacaagccattcattaagatagagaatttttctctttttcatcttgaagatatcgaaccaatgaagctcatctttccattgaaagctacaaaagaagagtgtagttccccatacattgggtgtgaaagagaattgaaaagagtcattgtagtgaagaagttgggctccgatatcatcatttttcgatttgcagtgaagagttaggtctgtgtctactaaaccgttagttgtcttgactgtaagttcttcacccgcacataatgatgatttgtgagatagtaaagaaaagaaaatgactacaacaaataatggaatggtcttttggcaaaagtgatgatgagggttgttgaagatcatcatgttagggttttttaattttagaagaatagtttttggtacaaaataatgaattcttgttacccttttataaagtgtgtcaaattataagaatctaatctcaatttgagtttattatataattaatagagagtgccaaatgttttgataatgaatttggtgaaactacataattgtattttctttttcagaaattttaaattatttggaaagaactttctttatttattttttatatgacatgaaacaagaaaggttctttttcggacattttttaataggcttttacaatttccagaaaataattgaaacatttcattaaaattaattatggattaaatggtatgtaaaattggtggcattttttggaagtaaataaattaataaatttattaggaaagtatagggaaaagtaattccagtcaaacatttcttatatattggaagagtaattaattaggtcaacattgcttgtgaattcacactatatatttttgttgttattttatagaatcaaaattattgttattttctataaatatgtatcatcatttatatattttatattttcacattctatgtataatatatatgatatagttgcaattggcaatcttatcttccaatgtatccttaattattccagatagagtttgtgaaaccctagtatattcttagtacatataatccttatttgctagagactatttatagtcaattagtaaaatattaattgtatgatagtgattatctgtcaactgtaattgtaacttctttaccaccttccatatgttcaaaaatatacatgatgtttttagtgaaataaaactacatatgtttggtgaatttttaatcgtttttgtcttgtattgtgaaaattattaaattggtactcctcaaaatttaattattataaaattataatttagagaaagaaaataaagaaaaaatgagaattttcttaatatcttatttcaatgagtaatttcatatttaaacacatatgagagtcaaaaattaggaattaagaaaaaaatgaatattaataacaattaatagtaataaataaaaaatttagacatccatatatttattaatatttataacactctcatttggatatccataataacaacctcattaaaaacctcaccaagaaaactcagtgggacaaaactcggtcaagaaaaaaagagtgca

SEQ ID NO: 73360 - DNA, 614 bp, Cannabis sativa
agaaactactaatatagctacttagtagaaccaaaattcagggatcctaattagccttaaacaaaaaaccagttagtagtttgtaaacacaaaaaggtgtgacattggattttcaagttacacaaaaaggtatttgattatgactttccattatcagaaatcaaaaaaatcaaaagtagtaatcatttaagtatgaactttctttgaaaactcaatacaaacaaaccaactaaccctcatcatagaatagatgaactatgtgtggttactttcaactttctccaactcttccatccaaaggatcaaacagaataaagaaaagtattactgaatctgtagctaatccacaaaccctttctcaaaatttaacataaataaattcatatgaataaatcacaaagaagacacaaattttctcaatacgaagttttataaaaacccaaaaaagggttaatgattttgaaaggaacgattacagaaagttattaaattttttcaagaactacaattaaacgcttatgccaattggatttagactaattattaaaaaatacagaaaaaaaagagttattaagattaaagcagttagaaatagaatcaaacctcgtaatctt

SEQ ID NO: 73361 - DNA, 1238 bp, Cannabis sativa
ggagctgttccactcaagttgaccgtcacacctgatcctaaaaatgaggtaagaatagtataatgatatgcatatgtgttccagacttgcccaagtgcttcctagtcttgtcgatcaaaatcaaggagcatttgttaaggggagatctattgctcataacaacatgattcttcaagatatcttgaagaattacaataggaagaatgtgtcccctaggtgcactatcaaagtagatatcaataaagcgtatgatacaatgaaatgggagtttttaaaggagcttcttaattcatttaatatgccagccaggtttattgcatggattatgacttgtgtgagagccacttcctattctattctaatgaatggtagagtgcaaggtagtttcaagggaaagaaaggtttgaggcaagggaaccccctatcccctctcctttttgttttgataatggagtatctaacaaggagattgcaaataacagccaacaagtcaaatttgtatttgttgatgacctgatattattttgtaaagggaatattctgtctatccaggtgcttaagaattgtttggaggagttcaaagacaccacagggcttgctatcaatacaagtaaatctcagatttactttggagggattgaagaagagacaaaataggctattttgagagagttgactcttacagagggcaagtttcccctaaagtaccggggagtccctttgagactaactaaatggagagctgaagattgtggtgtgattatcaagaagattaagcaaagacttctttgctaggcaagtagacatttctcttttgcaggaagagtccagcttatccattcagtgttacttggccttcgtaactactagatgagcatattcatcctgcctcaaagcatcaccaaggaaattgaaaagttatgtagagtgttcctatagggttggaacgggaatagaagcaagcttcatgtggtcaattgggagaaggtatgcctgccgaaaccttatggagggctgggtttcaaagagggaactaaatggaatcaagcaatcatagctaaatatcgtttggccatttcaaccaaaattgacatactttggatgaaatgggtcaatggtatttatcttaaaaataattcaatttggtcttatgaactcaagattgatacgagttggtattggaaaaaagaaattcatgtgagagacaaattttctagatctgaaattcataaaacggg

SEQ ID NO: 73362 - DNA, 1816 bp, Cannabis sativa
gataaataatatgacatcaaacgcactgtaacatccaaatcaaccagagatcaattataaataaactatataatagcaataaaaaaatattgaaaaacaactaaaaaataagatattaaatctaatgcaatatacaaataaactaatcaactcagaataaactacaaaacaacattaggaagtttatatacaactaaatatcaactaaatgaaagctcaaaaacaatcaaatgtgtatgtttgctataatatagtttgacaacacaactacaaattacttatttaactcaatgtataatatatatagtcgattagaaataatataaacatcaactaaaaaatatacatataattatttctcttttatttgaacaactaaataacaacaagtaaataattaaacaacaaccttattataatatgcaaattaatcaacccaaaagaaacttaaaaacaatatcaaactaacctcttaattacaaacgaaacttaaaaacaactacaaatcacctatacaataattcatgtactaacaaaaataaatactcaaccaaaaaaatcagctcattgtaatacaatatctaaccaaataactagattttagaaataaattagatgcaatttatattacgttacgttattagaaaatgattgaataaatattattaaaaaagttactttaaatataataatctattttactagtaaaagacttttagattattctttcttaacaactaaataacagaaaaaagttactagacaacaacattactttaatacatacgaaaattaagcatcaatacattttttttttttgctgataatcttaaatactaaataaaataaataaataaagaagacaatacaacaacaattttaatgtatgtacccataaaaaattaaatatatatatattcgtattctgtcaattaaacaactaaataacaacgaagaaacaacaacaaaactatattggacaacactactataatacgtacgaacatcaactaggaatcaatttttttaacaatgtgaaatacaaaaaaaaaaatacaacaataatattcttaatatgtattcccatgaaaaactaaaaatatatacatatatacttgttttctcttagttgaacaactaaacaacaacaaataaacaactgtataataactcaattgtgatatgcaaattaaataggtattataaaacaatcccactaattgcaacccaagaagaaaaaaaaataccaataattcataaaatagatttaaaagcaactactaaatacttttacatcaacttaaaaaaatatattttttttgttaaacaacttaataacaataaataaacaactcgataacaaccacactctaatataaaaattaattaggcaactacacattgcagcaacttaaaaaaataacacacaaataatcataaaaaatttaaacaacttaaaaataacacacattacttgtacatcaactcaaaaatatattttaattaaacataaattcatttagtacactttaatttgatattttatattagtaatttttttttattcacttgaatttttagagattagcaataggtcatttaggagttgtgttaagtgcataaaaatgcatatttatttatgtaagaaatcaaaataaagctatttctacttaaaatttaattatattaatgtgatataattttatttaaaatatttttgtaagaaaattatttttgtggcacatttgaaaaaatatgaaaaagagaaaattccatttttaaaaataaaataaaaagatatatttattttttattt

SEQ ID NO: 73363 - DNA, 645 bp, Cannabis sativa
acacataatagcttaaagatgcgtcactgacatctttagagtaggtgctctatcttattccctttctagattaacttcttttgttatatcatcacttgacattgtttgttttgtcttcaggcttgtgttagttatgcctacaccatggataacaaacacaagaaggtggtggagctggaccagaatcttagagttgctgaagaccaagttgttgttgctgaaggctaagtgactgctttgaaggaaagagttgcttctcttgaggatgaggtgaccaaactcgaagatgtagctaaaactgcctagtctcgtgagagcactttgacaaagaacttagaaattgcttagaagaaagcttatgatctcgaagagtcttctcgtgatgctttgaagaagcaaactttcgtggctgatgacctgagggacaaggtcaaggtctttgggaagaaagtaactacccttgagaaataggctacacttgatgttactttctataatgacttatgctttgatgccatttatacagcctacgttgccaacggtaggtgtcattcatttaaattgacctgtttccttagtaacgaggtgccaagcttcattgagcagtgttggaagtgctttgctatagaatctaatgaagaagct

SEQ ID NO: 73364 - DNA, 733 bp, Cannabis sativa
aattttaaatatttttattatttttatgattttatttataaaaatttaatttttaaatatatttttatatatattgtatttttgttaatttattgttaaagttttattatttatatgttatccatgtccacaatcttgaagagggaacatctaaatacaaaatttaaagagcattaaatcaagttctatccccttgttgtattatcttgatttttgtttttttttaaggactaagaaagataagataaggtatagaggtttaaatcaataaatagaacaattaatatttcaggcattaatatgtgaacctcttatccttatgacctgggtcacaataatattactctctcaagtctcaataaatttattaatgtaaaagttaatttagttgtacaaaatatcttaattgttgtcaaaatcagttaaaattatgtcattctttgttatcatcatatattatatatcaaaatgataaatatatatatatatatatatatttcaaaatgttaattaattaaaaacctacctacatacttatcattatcatgttcttaattttcccccaatctctttcacattctcttatctcttagagtagctccaatgctaattgttcatgaagcctttgtcagtctaagaaaagtaatattgattgcttgaccactaaaaaaattaaattgtgtgggctactacaattactacatgtcaagcaatggtagttgaattatttttt

SEQ ID NO: 73365 - DNA, 846 bp, Cannabis sativa
aaaatattggagaaaagtaaataagacaaaataataattaaaatttagagaaataacaaaaattattatgatccccaactatcttttattttactttctaatatgtaattaaccaatttcttttcttcctatttaattgacaaattgaattaagtagctcataatttgggtagtaagattaacaaacccagtctatatgacaaattgaactattctgagtgttttaaattgatcattctgtcaagttttgtcacacgtaacaaaaatgatgatgacatgactatttaacgagttgccacgtcaacataaaatttaaaattttaaaaaaataaaaattatatatttttaaaaaatcattaagctaaaaatcaattaatgattaaaaaaattacatgtaatactaaattaatttttttaaaaaattagttacacatgtggcattgaagtggtagctggctaagcagtaactgaccaattcacaatattgtaaatagttcatggatcattttcaaaaacaaaaaaaaaaaatagttggtgaaccatttttaaggaagtaaaaaaacaacacaataatatataagttatagtaatttaaaaataaaaatcctaaatagtcttaatattttattgaaatattaatttcttttcttcctaattttaagatcgactcttggtaaggctataatcgatggtgtggacttgaattatttaatagtatttctttcatgaatatttttaatttgtaacgagtttgttaatttatcttttaatcattgtcctagactcatttattggcaaaactagttttatccagtaatgaacttcatcctctttctattgatactc

SEQ ID NO: 73366 - DNA, 997 bp, Cannabis sativa
ggtaacttggtgacaatccaagtgttgttcttctcaagagcatccgtttctttatccatggctagtaaccaatgtcgaaactgagaagcttcagcataactttgtggttcaatttcagagtaggctgctaggacagcagctctgaattgaggatgtaatttgatgtatgagagaaagggctcaattggatgagctgtagatgaggcatgacagatgtaatctgtcaatttttttggttttgtgacagttcggccaactcttgtgatggagggaggaactgaattgtgtggtggagatactgaaggcgaaggtgtaggaaaaccggatgcgctttcagatatatgaggtgttgttgtgggattgttgattgtcatggttgcatgttttgtggtatttttaataccaggaactggtgagttgagactcgtacgacctggagcagcaggttgtgtaatgtgatttaagttgcttgatgcaacatgtttatttgcaccagattgtggtgctggtgcaacaagcggatgtgcaccaggaggttgttgtgcatcaggtggggtttcgggtgtggatgttgggacggagggcaccattttgtgggaaaaagcaccagtatgtgtctccaaatcgactggtttatttgtgccagcatgctgattggcagcagtggatttaagtgcatcaactggtttgttggcaccagatgatggtgcggttatgggcacaggttgagatatgttaacagcctgttgtattgatttatttgtaggaagtatagtgtcagggaagagtgtgttgatttcacaagaagaggttgtagaggagagaggaaaaattgtttcataaaaaacaacatcccgtgatatgtaaatttgttttgtttcaatgtcaagaagtatataggctttcatgccttggggatatccaaggaatacagaagctcgacttcttgatgtgaatttatgccgtttagagataagggtggagccataggcgagac

SEQ ID NO: 73367 - DNA, 855 bp, Cannabis sativa
  modified_base (769)..(782): a, c, t, g, unknown or other
  modified_base (828)..(829): a, c, t, g, unknown or other
tcttcatttgactgggggtggtttgtgttaaggtcaagggttggtgcgtcagggaaatggcatgttcaaacttgtaagaggcaatttataagaaggttaaagctctcattcattcacaggtgagaatatgggataaaagcttgggatcttttagtctggattctaagaaaaaatctttggttcaagtttttgaaaacaaaggaagttttaagactacaaaatggtgaaaaatgaagacgagtggctttgcatctatttatagccaaggccaaattaagtaaattgaaattgatggcctagatcatctcctcaaaaagcacaaggcgatctaatggctagggagtgaaaaagatggcatttaatgtcccacagctaaaatcaaaacatttaattttcatcattacatacctcgagctagatgtgcattaaagagttttcacgtcataactctactgccagttgaatttccccataaaaagtgcacttcttgcaagtgtgtgttatccacgggatcatttaacacacgaaaagtgtgccttgccagttgttcccaacagaagaatttttaaccttacgattattgcaggccaggtaggaaagatgctctcgcgttctcaaaactcacctacgtgtcacaggtatactttaactatctagaaggagactgtaagcttttgtcactcaagagtcgtagaatcttggggcctaaatgttatccatatatcaagataagggaaacatggcagagattttggggtttatttgttannnnnnnnnnnnnnttaagtctaattaataaataaaataaatgaaaattttatttgatanntaattataattattaaataaatagtt

SEQ ID NO: 73368 - DNA, 672 bp, Cannabis sativa
tgaaaattaaaatttaggaattgaattacactaagccatataaagtggattcaattgaaattaatcaccataagctttaatgatcattaaattgcactttagtttatttattttctttgtcaatagttttcgaacatcttttcttattattgtcgcaaaatagaatttagaaatttaattgtttagtaattaactacagttcttgtgagatcgacctcactcgtgtgagtttattacttaaaacgattacatatatttgcgtactagaaaatctataacagtaataatggtattaataatttaaattattttattggtgagatcaatagtaatctcaagtgtattggagcttaaaaatataggttcatggtccccaaatcacctctacaccacactagatatggtaaggttaatatgatgattgattatttggagaaagaattaattttgttcgaaaattattcttaagtataaaataataattttgcataaattattactttaaatataattttttagttttgaattaaataattaattgatttgactatttagtttatttattaaaactatgcattatagttaaatagtaattttacataaattattatgtatgaatgaatattattaaaaaaatatgagtattcatacttaatttatatttaactaaaa

SEQ ID NO: 73369 - DNA, 1274 bp, Cannabis sativa
gtcaatgggacaaatgagttttttccacttttaccacttatcacatataattatttaaataccaatttttattttaataattatcaaataaaaataaaatttaaatatatttattaatgagtcccacagagtgtcttaattaacatataaacccttatttctctattcttctcaaaatggcccaaatttggtgaaaattctcaaataatacatattctatttttgaattctaattgacttgataaatcaattaattgagtctacaagatgacattatcctaaaaaatgtggggaccataggcctatgtaaccaagctcccaataagtatacctttgaaatatactaagtaaattttctaacttattagtttctcttgacaccactatagattcagaactcctcttagttacatagaacactctatatgtccaatatagatatgctatgaattattcattatttcaatcacaataatcaaagatcctctatgtatggttaatattgaatagggacaaaattatcgttttactcttcaatgcattttatccttaatacacgtagctccttgtaaatgatatttcggtaaacaatgagattttcaaaaaccaattcattatatgtgaaagctaaagaaattaatcaaagataaagaaaataacaacaaggatttttacgtggttagggcgttagcgagccttagtccacgagtcaatattattactttaaagctagaaaagcctaaaggtttataataatgtggaaactctatatttttcctgagcaattggagaatgagtttctaacccctttgcatgaagggttctttatgcatatatagtgatacctttgactattatatagtgtagtcatggtactcacccgaacaaaatttggccttcactaccaggacacgctgatagatgaagttgatcccaatgttcaaatagaaacatggaataatggagatcctactgaggcaacttgtaacgccctgtcccatatgtgtgctatttgtgtgattttataaactagtttagtactaatagattaattaattattaaaattcgtgataatattaaaaactttttcaaaataaaatactaaaaataaacatcataacgacactaaaatggtattccgcggatccctaatgtaaatgttttacaaaaaagactatatacaatgacaatttaaaatataaaatcaaaatacacagcagatacagaccaaacaactcttggcaactcaacacacaggccggtagggtcaata

SEQ ID NO: 73370 - DNA, 866 bp, Cannabis sativa
ggatcctttcacatggattaaaggtcgccgtacattggatacgataaaggaacgattggactggagctttgttaatgatcattgggcatctgtctttgaaccgattgtcacacagcatctggactgctataattctgatcacagagctatagcagtctcggttaatctcaaaaaccagcagcagcaagttgtccaaaggcgaagcaggtttcgtttcgagcaaatatggttgcagcatgatgaagctaaagtcattattgagaatcaatggaagtattgtcaacaatcgggtactgccatggacatttttctgcataatattgcagcatgtgcttcatctttacaacaatggcatggttcaaagtttggtaatttcaagaaaaaaatctctaaggcacagaaggaagttgcacgactcaacaaccagcaagatcgaactcaggttttactgcatgatttacaaaaatctgagagtattttggatgaacttttagagcaagaagagcaatattggcaacaaagatctcgtgttgattggctacaaagtggggatcaaaacaccaaattttttcatgctcatgcctcatctcgacatgccaagaataaaattacctctctcttggacagtaatggtaacaaaacaactactaaagacggaattgcacacattatcaccacctattttgctgatttattttctgcaactactgttaatcaagaagcaattactcacgtggtagatacaattccagctagtattacatctgaaatgaatgtgttcctgactgccccttttactgtagcagaagttgagattgctttgagaacaatgagcccggacaaaagccccggtagtgatggtatgt

SEQ ID NO: 73371 - DNA, 849 bp, Cannabis sativa
  modified_base (175)..(178): a, c, t, g, unknown or other
ttcaacaataatcaagttattagattcattattttttaattacaaaattcaaaaaatataccaaaaatctcaatcaaaatctactatataggtatacatactataaaaaatatagctacttttagtgacaatcttttagtcacaacaaagaatttttgtgactaaatgtgacttnnnntcacaacaaaatattacttgtaactaaaatatagtctttagttacaagttgtcactaatttagttttaatcaaaataagtattgtaactaaaaaaacatttaatcacatttacaaattgtaatttttgtgactaatacctttaaccacgaaccttttagccacaacataagaatgatgttttataattaattacaatttttttatttttagtcataaattttgttgtgaatataattaaattttgtagtgacagtatactcaaaaatacagtagagatggagattaatacctcatatacggagtctccaatcccaagagagaaactttcaaatacgacgccatattaaactttaacaatgaaaccttttcgaattgtatttctaaaaatttattacgatcaaaagtgttattatatatatatatatataaaaaaaaaaacttaattatttaacgtgttttacatttctcaccttttgataacctcaatttcataattatgtaaaaattcttttgaaaaataaacacaaaaatcatgcaaaactttttttaagaaattcatacatatatatgatagttgataaaattatatattccaaagtctcaatcaaaagcacatcaaataatacatttatctaattatctatttcaaatttaagatcattttaaaaac

SEQ ID NO: 73372 - DNA, 637 bp, Cannabis sativa
ggcgcataatgtcgcaaaatgggcgaaggagacacggacaataggcttaactaagtcttcgaaagtggatcctactgtgctgaccgattacttggagtggaggaagcatgctggctaatctgctgctagctttctgctatgtgctaatttaagtttatagttttttaggttgttttccttggttgtatttctgttttcttgtagtactctattttccttagtttgtatttctctgaactttgattatttggttaattgttttgctctggggtgtttgcacccgtttctttatcaaaaaaaaaaaaaaaatatggtaccctaagacattcatctccttggtaaaagagtagactaagtagtcaccacatgatttgtgatgcattattattaaaatctctctcataaattgattaaggttgcaataaaaaatataactaaatgaaattaaatttaaaatagtgtatatataaatatatatggttgtaaatatactttttttttttgaaaataaatatactttaggtgataatttttgaaagagaaaaattactcagcaaaatatttattgaaaaaaaatttataaatgaaaatactgctaaattaataatctaaatattaaggattacatatatatata

SEQ ID NO: 73373 - DNA, 1093 bp, Cannabis sativa
aggtaaaagaaaaatttaaccataatagttacaataaaaatgtaaccattaaaataatggttacatttatatatatatataaaatatcacatttttgtattggatccccaagtaaaagtatgcaacaaacacatagaataaatttgttaaaagagtaccatttaacgtgacatatcgctataaatttattatgatacaaattttgcataatactatattgtgatctactttttgttatatgactgtgagatatgtgcatcacaatttagcacaccattagagtagatttttggtaaagtgaactatattttatatttgcatcacttatttacatctctattgaagatgctctaatatgtatatttgtacgagtatctctaatttaaatttcttatagctcaaaaataatagacttacgtctaagactaccataccatccacatacaaaaaaaaaacaaataaataaataacaaaaaatctctaattttatttttaaaaaataccataatatatatttttactattattttctaaaaaaatacttaattgatttttttaagatattacatttaatatttgatgaagagacgatttgtttccttgtaataattttttaaattattgcttcagtggtatatgggatttttgtgaaaaatatctcatatttttttttattattattatttttagctttaataatatataaaatgtaataattaataaagacaacttgaaagaataggtccgtgaattccaacagggcaatttgtattttattagaacataattggaagaacaattaatctttccattcccaatgaaaataatcacaattaatattatttcacatgattcattattggaaagttatacaaattattatagaaatattgcttttcacaagataacatatttatatattacatataattatttatcaaattattaatttaaacttttcatttcattgaaagggttgggatgcatgtctcaaccttaaatatattagtatattagttatggtttcaatatgtattagtatagtaattattgaacatttacatttttcaatattattttggtaaaaacaatt

SEQ ID NO: 73374 - DNA, 746 bp, Cannabis sativa
taaaaatcacgtaatacgcctaaactagttagggtgttacagttcccatgtaactagcagcatcgcgaaccaccttcatcgtgaaaaactcagattgcagctcgtggatttgaacccacagatcaatggattttaaactgagggtcctgggattatcaccgtctttcagtcgagaaaaaatgatttgttttcgatcatgtgtccaagggctaccagttataacccgttgaatgtccacttcatggtagaactgaaatagaaatcggttttgatcaagttgtttgatgtacatacctctcccgggcttccacatatcaaccataacattttgaaacacccgaaaatctgatatctttcccgtgagcaaccggccaacgagacaccaccttgtatcaatggcttcttcttcatcgtcatcctccccggtattgtcaccatagaaaacttcatcttcctcttcttcctcaatttggatattctgccaacgatcctcaatctctttcatgtgactgcttgacgccatggaataccaacgatgaaccaggaaaatggttgggacgaaaacagagcaaaaacaaaccaggaaaacagagcaagacaaaacagagtgaaaagatctaattcagatgatcaatccaaaacagcaagtagacaaagcaaaacttttgcatacattcgaaccactcaaaagagagagacgaatgatagtgatgatgttatttaattcatcaatatgtaatttttta

SEQ ID NO: 73375 - DNA, 1201 bp, Cannabis sativa
tctaaagtctaaacacttcaattagtcacaaaaattacaatttgttgtgattaaatttatttttagtcacaatatttatcatgactaaaactaaaaatcagtaataacttgtatctaaacactatgttttagtcacaaataattttttttgttgtaattaaaagtcacatttaatctaaaaaaaattatgttttgactaaaagattgtcactaacgatagccttttttttgtagtgattagagttaattaactttagttcaaacaatctaagattattaaaataatatcttaattataatctctctatttaaagaaaataccttttgattctaattacgataatattgaatactttagggaaaaaaacttaagaaaatttggggagaatatgggcgatttggaattgcggctgaactcggtaaatttggttaaccgaactgttatataattatgtattaataaaaaattatattattatataatttattatgtgaaagtattatgatataatgcattttaagatcccgttggtgtgttaggggcattttcataattttgacccgagaagggtaaaattgtaatttggtaatataatgtgcttttggactatatattatatagtatgtttattctgtctatctgtaggtattttttgacaagtcatcgcggtatagtcacaacagggtattttgggtcaaatcaggtttgaggcttacaatacatttttgggatttatttatggcatttatatgatatatgagaaaatttaaattattgtgatatatgtgtgttgaatgaaaattttacccatatatgtgtggatatatttcactttaggggtattttggtcttttgaccgaataagtcttttgttagcagtcatttttttggaaacttagaaaaccatttttgtgttagttcctttcttaaccgacccctctctttctctcttaccctcttcattgtgatttcaaaattgtggaagaaaaaggccttgaattggtgtggattttgtgctagttcttatgcttggagcttggagaaatttgtggaaaaagctaattaatcttttggtacttataattctgatatttgaagctctagtaagttgttcttggtgttcgtatgtgattggatgcatgttgatgtgattttgagaaatattggtgacttttttgtgtttgagctattgggagtatg

SEQ ID NO: 73376 - DNA, 990 bp, Cannabis sativa
  modified_base (468)..(469): a, c, t, g, unknown or other
taaatttgttattgagatagattaggttatagttaataataaaagacaaaaagcgtgtctatatgtaaatatctcttaagtttttatgtcatatatattaaaacttatcttcattttctcctatttttgtaaatagcccatttattatcgttaccactgtttcgctacgagtctacaaatgaaatcaaagtaggccattcgttgtatgaaggcccgacagtgtgtagggcctaattatcggcccactgtcagagtttatttatttagggaaatttacatggtatactaacttctgccatttttttacaaaaatactgtctgacggtattttttacttttttactatattttttataagtttcatactgcagtatactatgttaagtttttattggttttctaccagtgttttgtagttgttccactgttatttttagttgttctgttttgtgttctactggtgttttnnaaaaacacagtatttttgaaaatatttctgcgtgagtatttttgtaaaagttatcccatattctaatatttttgtaagattccctttatttatttatttaagcaatccacaaattcatatatataattctagcagcatccaaaaaagattgtgctacgtgtttttaatattaaaatttttatatggtagtattttataagattttgaataatttataatacaaaaaatagaatttaaaaagtctatttttataaaacaaaaaagatatatgtacaaaaaattattttaaccttattttcgtacactaaattttcaaaattttacgaaaaattccaagatgtcttaaatagttatgttgtacattttaaaattaaaactatcaggatatcaaaaaatataaaaagaataaatgggtgcaatctttttaggattagaattttcttataatatatattaatataaattaacaaactgatatgaatcaaaataagacatttttaaaagggctatttacaaaaata

SEQ ID NO: 73377 - DNA, 716 bp, Cannabis sativa
ttcctgcttctccatatcaggtataccaaagccgtgatgcatactgcttttactcctttcctgaaacgattttgccttgccttgtgtatgatctttaccaaactacccaatgtctctgccttagtgtgccatttgagccaatccttcagcaattgcaaacattgctgggaaaactggcacttaaaaaacagatgttcaacgttttcttctgcattgttgcagcaggggcaggtattagaatctgtcaccttgaacctgtacaatctatctttagtttttaacctgttcaacatggctaaccaggttaaaactatgttttgggatgtttaatcgtgaccaacttcattactccatgtcactctgtcatgatcagttaccaagactcgataaccagctgctactttgaattctgttcttgtaaactctgcaatctgtagcttttcctttactatatcccttacatccaccatttttttccagtaccagctactggtttgtgggactttatattcccaccaattatgatgcttgatgtagacacaatgtacccatttcacccagagattgtccttcttgtttgccactgcccaaacatgcttaaacattgctgcagtgttccattgagccacattcagcaagcctaaacctccttcttttttcgctttacacaaactttcccatgcaactgaaccagcccctatcattacactctttcc

SEQ ID NO: 73378 - DNA, 597 bp, Cannabis sativa
tttgagttagagtattgggccacactgaaggtaagacataacctggatgtcatgtacgttgaaaagaatttctgtgacagtattattggaacattattaaacatggagggaatgacaaaggacacaaacagagatcgcaaggacttgtctgatttggatataagggaagaactgcactttaagcttcacaagaaccgtttgttgaaaccacctgcatgctatactttatcaaagacaaggtctcattgttcagatccaaagacttcgttttgtaaatttttcaagtctgttaaacttccagatgcttatgcaatagacatctcaaaaaaagttagtataaaaaataaggtaatatcaggattggaggcttatgattgccatgtgattttgcaacgtcttcttcctcctgcagttgaccttcattacatacacgaggatattactattacactgaccgagctttccaatttctttcaaaagctatgtgccaaaactttattggataaagatttggacaaactacaagagaggatagcactaattttatgcaagtttgagaaaatctatcctccatccttctttgacatcatcgttcac

SEQ ID NO: 73379 - DNA, 614 bp, Cannabis sativa
attccgtgaaagtacatcacggaacaaaatcgtgtccctatatatttatgaccacttaaacttctttcattcactcttttttagtgtcatttttttttttttggtcatttcttcaatatttctagtcgtgtcaaccatagcaattttgtctcaagattattaattgctttccagaagagagaaaaagagaagaagagaaattgaaagtagtgaattttgatgtgttattcatatatcccttgctaaacgaaataaatattcattcaaaataagtcaactttttctgaacattatatattaatagatatatatatatacggctactaagataatataaaccgacccgccccgacccgacaaggcattgtcccgcctcgccccgccccgattgcctcacatgcttaatctgatctgacccgacccgacccaatcaggttgaatttgaccagatttttttttttcaaaacactcaattattaattcttatgaattgtctgaatcataagaaaggccatcaattcatatttcatttgccataattgaaaacccatagggtccgtttggtatgcaggactggattggattagacaggctaatttgtccaatccagtgtt

SEQ ID NO: 73380 - DNA, 948 bp, Cannabis sativa
tagctactcatagtcattgtaaacaattgataacaactaattaagaacatgaaaaataaagtagaagaaagaactcgtcgaaaaaataaagttgaaagtctctagagccgccttctgcctctaattttgtttctcaaaagtcccaatcaaaagctcccttataattttcgaaatcagggtttaaaaaaccctattgggcctctaaaagcaggtgggtcgcgccatggcccttcaatgtcgtggcccctaggtgcattttttgggtaacaagcttcctagtgcgacgaataataagattttagccataactctttcaatattgctcggaactagacaattcaagatgttttggaaagttaaaagagagatctaaaaattttattcacaatatttttcctcaaagtgaactcatcatagtcaaaaattggcttgaagcttcagacttgattttcggtcaaaaaacaaagcgtgttgagcaactttaaaatctttcacaccattatatcttaaaacttcaaattccatgataaattcatcatattcatcacatttaacatgttttttttctcattttcaattcatattatgaattttaccatttaaacatgaaacaagtataaaataagtgtaatttgcacaaaatgaatataattaactaaacacacctctaaaacacttcataaaatacacttaaaactagcctatcaaacatgtactgttgtcaagtgttaggtggtcctgaggacaagagtaaaggctgcaacgtgctcgttgtcaggacatcagagcttgcaagtgagaaacctccacaacccgtcctctccctgtgctaaggtgtcgcaggcgaagcgtggccttactcgcttgcgatgtccttttgattcttctcctcaaaacatgttgagttttggttgcctcgttgagggacgtgatgattcagtacaatac

SEQ ID NO: 73381 - DNA, 864 bp, Cannabis sativa
caaaacaaacattagtgagtttaatttttttacataagggatgatacctgaaactcttatctctagccgccttttggattattcgagacaaatactccatgacaagaaaaagagaagtgaggatatgggatccccttgtcttagcccctgcttacccttaaaagtcccttggaatctaccattcaagagcagagagtaagaagtgtttctcacatagttcatgatccacttgacaaacttggcaggaaaacaataggccactagaagcttctcaagaaaatcccaattgaccgtctcgtaagctttactaatatcaatttttatggtgcatcttggggagcagctcttccttttataattcttcaagatatcctgaagaattagaatattgtaggcaatagaacgacccttgacaaaagcaccctggtttcgactcactaaattcgggagatcattagccagccgagaacacatcagcttcgaaacacatttgtataatgttgtgcagcaggcaataggacgatagtcaacaactttagaaggacaatcattctttggaataagagagagtgccatacttatgaagctcttcagggaatcgattggcattaaagaaatgggcaatagaaatatggatatccttccccacctcaggccaaaccgacttaaaatacccccaaactaaatccatcacggcctggagatttagtattaggaatactaaacatcgcagttctgacttctttgagagagaaaggttttaagagatgaacctactgattaaggttgagcttaggtcccatagctatgcaatcttgctgaatctccaaggaagtggttctagttgttggaattattttacca

SEQ ID NO: 73382 - DNA, 628 bp, Cannabis sativa
agattgcctcctcaaaactatggttgacctccttcaaccaataggcctctgtgtcagctatgcctgaaatatgggcacactgcaccaatctaccattacatatttgacaagaattgggtgaccccaaaagaggcctcacctcaaccacaagtcaatctcacagaacaaggtggtggccatgatcatcaagcacatgtcactcaaactcttccagactttggtgatgatgttagctggtatgtggacactggagtaactaatcatgttgcctttgctatggaaactttggattctgctactccctacactggccaagaatctgttgctgtaggagatggtaaaaatttcttatctctcacattggtaaaactactctttcctctttaagttcaaatcctttaaaacttcaatttttgtcttacatgtcccttcaattaccaaaaacatggttagtgtttccaaattaactagagataatgatattttatttgaatttcacaaatcttgttgttttgtcaaggacaaacaatcaggtgttgtcctactcaaatggattctcaagaatgatttgtacctgttaggggatgatcactccaaattgttcagtcactctcttgagtgtgatctt

SEQ ID NO: 73383 - DNA, 1215 bp, Cannabis sativa
aggagaacggaggatttcaaatttttgaagcaaaaaattctcaagcgtatcgagggttggaaagcaaaatctatgtcacaagcggctagaactactctggtaagatctgttctccaaagtattccaacttacttcatgtcgactattatggttccaaagacaacgtgcgaggaattggataagatagtggctcggttctggtgggtaggttcgaattcagataaggaacggtattgtgctttgaagtcttggggggacttatgtcaaccgaagaactgtgggggtctaggattcaggagattccatgatatgaatactgctttagttgccaaactttgttggatgatcctaaatcaggaaaacaaattgtgggtgaagattcttttgggtaagtattgcaatacattagatgcttggatggtggaaccaaatgatcatgactcgatggtttggaaaagcattctctctactcgaccaatttgtctaaaaggggctgggataatcgtagcaagtggcgattctgacctctggaacaaaccttgggtgccatggaagactaatcaagaagttaaggatagtttcagctacaacagagttcatgcctttcataaggtttctaacctgttcatggaaggcacaaggcaatggaatgatgaacttataagaacatgttttgatcacgatatggcggagactatactcaacattaaaccacttggggaaggaaatgacattttgttttggaaagcggctaagtctgggaagttttctgtcaaaagcgcctattggttacatcaacatgataggttcttggggaccaatccgatttggatgcagctgtggaaatcgaagattcatccgcgtctcttactactcatatggaaagtgatggcagactgcgttccaacctttggcagactcagatttctcaagaaccataacagagcctatgttttctgccaggaagaaacggaagatatgatgcatctaattgctaaatgtaacattactcgcggaatttggttcaagagtaaatgggggattcgtatagaccagatgggctggatcagtatcatggactttgtgaaatggtggttggagcttgaggaccatgatttaaaggtgtttgctgtgtgcatcgtggaagtgctgtggttttggcgcaacaagattgtacatgaatacactccctgggatattcctctgctggcaaag

SEQ ID NO: 73384 - DNA, 1100 bp, Cannabis sativa
tttttttttttttttaaaaagagtgattgacacttgatagttagcaaaagaaaatgttagtagtctcggtatacgtgcacaccaatttaaataaaaaaatcgacatttacagtgtattaaaatattaaggcacattttgataaatattttaaaaaaagtatgtatattgaggtaattgtctcaaatcttaaagctttatctaagttaaataaattgcatgtttcgtggattttctgcttaggtaaaagagttaattgctaagcgcttcaccttcattacatgtaatagggagattgagataatttgactgcttgagctttatccgcgagattaatagtttgattggaaaattaaaattgcattcattaataaaagttaagaatgattgttgagggtggacctttaactatttatcttatattgtagtatcacatttttataattcgtttttatttttttatttatattattttattctcataatcaaaacctcctttttctaattcttgtcactaattctcataatcattctcttactgatctgctcaacactttggtggcttctactactcgaacgcaacaaaataatgcacaatttcaacaacctactcatgttgcaccatatagtgaaaagccaactactactgagctaattgacatgatagaagctaatacattgtagtttcagaaaagctttcatgttgcaccatatcttgaggagtcaatggaaacatctatgactgggtatgaaattcaaagttcaaatactttacatgtacaaatagaaagcaacccaatggagaatgtcaaggccataacactttaaagtggtacagaacttgaatcaccaccacactaagaagtacataagttgatttcaactaaaggagtcaacaatttatcccttgaaggatcatctccaccaaatgtttaatctcctactttagttggtccaccatcactgaaaaagccatacaaaccaattgtaccaacttatgtcactccacctttccaagtagattgaaaaatccaagaaagaggagcccatcaaggagatcccaaaaactcttcctaaagttgaggtaaaaattccatgtctt

SEQ ID NO: 73385 - DNA, 693 bp, Cannabis sativa
attaataatttttgcaaaaataattctaaaataatatttaccttttttaatttggaaagatatatattgatgagaaaataatattgatctattaaacttatctaaaataattgaattaaattatttaatgattttctaaaacaaaattgttcaattttttttttaattctttttgatgaaaaactatttaatgttttgttacttagaaaatattaatgatcaaatcaggtatataaaaagaaaaggtaagtatgtaataatctagattcacttaaatttattccaagattttttaagtgtctgattttattgcaaaatttggtaaaaaaaaaataatcctgtctaaatttttttttaaacaaaagaaatctaatttgaagggaaaaaagaaagtattttcttgaaaaggaaatattgagcagattcgttctgtaatttaattataaaatattcattaaatacatagtattttctttatgtcaaaataaatatataaaaagacagtatttgttggttgacaaacatgcccttacctgtcctaataaattttacaataaatgcacaaaattcttccttaagtttccacgtgtatttacttaattatttatttatatttcattttcaccgtctaaaaaaaaaaaaataataaataaaaaaggtttgattgacaaataaaaaataaataatttaaaa

SEQ ID NO: 73386 - DNA, 1060 bp, Cannabis sativa
aaattaaatatgcaatactaattatattgttcacatgtattgtaatatgagtatagtcgatgctgagaattatggggttccatctcaaaaccaattagcaatgagtggagtagtctatattctttatatatggctcaatacttttacatttaatccatgtggaacaatattctctaatagtcaatacttaaatataacaagtcggattaaagttgagatttttttacacgagaaaatatatagttgatctaataggaattaatataatattacaatcacaattaattaccaccctacgtatatattagggttagcattaatatcttgtgccgtacgttttgtccccatgcattcatgcattaaggacaataatgtattcataaattagtggggcaactcatcacatcaccaataaatagaaaataattaaatacctcttaaaataaattgtgtccacctatatttcacaataaattatatgaattatttttattttttacttcatagtaaaaattattcacaacaattttagagtcacaaatattaattaatatattgatgagtcttctcacaaattttataatttattgttggccgtaaaaatttattaactaatcttgtggttggaaaattaaaatctaagcgttaaactcataaataaaataaaagtgaaataaaatgcaaatttaaatggttaagagaatttttgagtaggagagtaattttcttctattggattcagtatgtgagttacattcttaattttctaaccccctctcacacttgaaaataagatatttataagctctaataacttgaactatatagtggtcccaaagagacaagttgtcgctttcgagctggaaactacaagtgcaggaggtggtcgttgcgtctcgtacccttatttggtgtcaggtggtcctaggtcgcagaggtggtggctgcaacgtacctctatggatcctcagaccttgcaggtgtagtgcctccactactcgtacctccttactttcagagtttccaaaaggcgtgatcgtaaacttttttcttgcacacc

SEQ ID NO: 73387 - DNA, 754 bp, Cannabis sativa
aagaagggggacaaacttaaagatagattatggactccgggcccaccccttaaatgagggcccgttcctttttaatcaccagaagcacgtgaaggagtaccgccaccatttcttcttttcctccggcttccaggccatggactacccggaacttcttacggagtgggttaggatccctccttacatgcggaccgtaactactcaagtattcctccaacgggtcaagaatttctccacttatgacaagaaggccctcaacgttggggacttggtcacgatggagaactgtcggaaggccaagctgatatacgagaatcagtcggtggatgacttcaatctttctaaggtcatctgtccgaaagtaaggactcctactgcgaaaagggcgctccgggtggacataatcgcctcggcggaggaccggtaccaaaagtacctcttaggagggaacaggagctagcttacatcaagggccaggatggccgggaggacccttcgtctggaagctgctccagagcggaggccctccaggccaaagcctttggtcccggttcctaacactggtgccccagatgccagtacttcaggttctggtaagtctcctttagttattcgccatgtcccctctgtccgagagtatacccagtgtagacacataggattcgatgagcgcctttgtaagtttagaatgcgttccacctggtgggggaatcacgccaaggaatactacttttcccatttgggccatttcttg

SEQ ID NO: 73388 - DNA, 767 bp, Cannabis sativa
gtgtgcagaggtgaggtaacattgattcttctttaggtatgagcacccgaccaggcacacatccccttctttcgaggctcggtgatttgaagcagggacgtaacattgtagttcacccagatagccagattggtccatatcccttaggcgtgcctcagtgatgttggacgaagggttcacccatcaggcacctaaggtcacttacctcctgtaaggaactgcagcaataagctcctcagtgacgtagtccattcctgcgactaggaatttgccgtctgtatctactggctccccgacctcattgtatcctccaaaatttggaggttcagcctcctcctcttccttagggccagaagagctgccaggagggacatcgtcctgttcttcaatttcctggacttcagcgtccccctcatgatccccctcctcctggatgggtagatcttgttcggcgctgggtagtgtggcaagctgggccacatgaggatcggatgcattgatcttacgtatcgttttctttgttcgagccatcatcctatggttggacagaaagcttgaattggaatgtctgtcacttggagaggatggactggcacgaagacgaggatgatacccgtacaaaagttgaagtaggtcctggtcaattcactgttcgcctcccaaaaactcaccaaggttcacctgcaaaagacaacacacaagatgagtgtttggttaggatatcgaacaataaacaggcaaatatgccgaccaggagaactcaacag

SEQ ID NO: 73389 - DNA, 1183 bp, Cannabis sativa
gacatgtataaataaagtaaataaatatagcacactgtacattttttgggggcatacacagctaggcatagtacccccaattgagctgggaagtttggacgtctccaacttcttggccacttatttaaaacatagcttgtgatctaaaaacaaaaagcataaattttaagtgtaaacttcttctattttcatttcattgtacccgtagctttacataaagaagagaattgttcaaaaatttacaaaaaatttaatagatacatcaaggcttggtcacctaagcctacttttagttacaatgcaagtggtctgcattccagtcatgagggaccctcgatccatccatcctcttaagttgaaaagttccttgacccactttctgaagtatctcatatgggccttcccagtttgggctgagtacccccactcccagttcttacgaagttaggaatactcttttcaagacgaggtctccaacatcaaatgtaggattcttgactttggagttaaagtgtcgggtaatcttgcatttgtacattttgagttgaacttgtgactgttcctagagttcctcgattaggtccaacgattcctagtgcaaggagtgattctaggaagggtcatagatatttcgttgattagaggggatcgtggcctctactgggattactgcttcacacccgtaagccatcacatatggcgtgtgtcccattgaagttctctttatagtcctataggcctaaagaactcgcaaaagctcttctggccaatgagctttgtgatcctggagtttctttttcaatgttattttcacaattttgtttatggtttccacttgtccattggcatgcatccgtgctacagctcagaaacttttcactattccatgctaggcacagaagtcggtgaagtgttcattgtcaaactattttttcgttatcggagacaatcttgtatagaagtccgtaacaacacacgatgttcttatatttatgcgcccatacacctatccagaaggcttaacaaatgattaaaaatgttcttaactaaggcacgacctctgtaccacatgcactacgtacaactactgtactagtattggtaggatttgaatcgtaccccgagtaccactaaatgttgtaccacatgaactacatatttaaccgtactagtgttggtaata

SEQ ID NO: 73390 - DNA, 991 bp, Cannabis sativa
tctgttattccaaatggcccaaattaaacccaaaaaagagcaaagttgatctttatcaaaactttcaaaacctcttaacataaattctttaatatcacaagtgaaggttgttctgccgttttgcaacaaccacaaggcaatctctttcattcaattcttcgctgactcacttccataaatgacattcctgcatccaatgaattattcattgattaataaggttgtaaaatccaatataagcaacacaagatagaaaaaccttctaacaataaactttgtaagatcacacaaccttgtaacaatataaagatattcattaattgtctaaaagatctctataattacctaccaatattaatagccaagtcaccgcgaatggttcgggggcacaatctgtaaggtttgttgctccaatgatctttctacctgtgattataacattcttaccctcccaaaccaaactaccaaaaagggcttggtaaagagatcaacatagtgcttcttgaaaaatgcaccatcagcatgaagaacttcaaacctaaaacaaaacaaaataaattaatcaagccctcaacttagaaaacagcaattacagttctcaaatgtatgtatgaattacaaacttggacagaaaaatgttttttttagaaaaaaaaaaaaaaaaaagcatttttgatgatatggaaagcttacctctgaaagtgaatcccttcttctcaaatctgttaatgagttcaccaatctaagtaataataatttgcaaagattaatcaaatctcggtgaatttaatttcaaaatctctctagcaaattattaatttattttatcaaatccttaatttttgtcgtactatcaaaaattcaattcaaatacattgcgcgagtagtagaatttacgtggggtatgggttttttaaactttttatgataaatatggcataattgattatggacactttatatggcttttttttatagtttaaccatagtt

SEQ ID NO: 73391 - DNA, 617 bp, Cannabis sativa
ctcgatattttaacaagcaagtgaaagcaaggaaatttttcgtcggagacatggtactcagaaggttattctttaatactaaggatagtgtgtcaagcctaattcagaaggaccatactaagtaactgaagttacaaaaataaagcatacaagcttggtcggtatgatgaaaacatgaagtaagttctagtactaaggtatttgaatgttgaacatttaagaaaatattatcaataagtgcaaaaggtctgaggaccacataaattgcacaatgtttaaacatcactcttatgtgatggtcttctcagcgaacttcattaaaaggttcagagaataactggtactaaggtcaaatgaccactttcgaggtatagtttttaaaaagtcttttctctttagtaatgtctttttatcagaataactgttcaaaagttttatgttataattaattaatgatcagttagatcatgtaatagttttttatgattcaataaatatacgttaccatggtaactatatataccgactaataaatgaataaatacatcaattatcattcatattattttaattttatactttttgcaaattacagcaagttatttgactacctaaga

SEQ ID NO: 73392 - DNA, 546 bp, Cannabis sativa
gtatggcctacttttattttcaatttttgtggttttttcctgttttagtgctaccgttattaaaaagacacaataccatcttcatggaaatgtgaattgtatccatcaaaataggctttcacatcttaaatttcaataaaattaatttcatattttttcaatcattacacatctacatgcaaaagattacaaaaaataagaccacaatgcatgaattcatctctttatatccataattcaatgaaagcatagatgtgtttttgtattgctacaatcatggttatgtttctagctttattgttggaatgatgatttaaatgtctcactcaaaataaggataaaacaaaattagtgtagttccttttagccagctatatgatggagaaatcatatatataatgaacaggcattcatactcatgtttatgttgattgcttttgctgttaatcttggagggttggttttagtatcagttatattgatatatgtttggcttgtgatgtttattttgttcttaaagtcaaattctatatgttttattggata

SEQ ID NO: 73393 - DNA, 801 bp, Cannabis sativa
tttagtgtcaaattgattttcaactaaggttttaaattgagtgaaagcattaagagcatcagctttggatttcagtggataaatccaagtgtatctgctgaaatcatcaataaaatgaatgtagaatctcagatttgtatttgacataataggggcaggaccccatatgtcagtatgaatcaattcaagtggagatttagctctagaatcagataatttaaagggtaaggaatgagatttgccaaactggcatgcttcacaaaaattctgatgttcattcattgaaatttttacatgtgcattgttcaacacttgatttaaaaccttagaagaaggatggcctagtctcctatgccatagatccttttcagaaatacatagatcagaagagataggttcaacagtagtagtattgacactagacactaaattaacactcttagaactagactgagatgaagtggctgagacactgtaggctctaggaatgacagaagtgtttggtaattgaagttgatacagtccatctttaagtttcccctgcagcaccacctgttttgtttccatatccttcacaaaacaagagtcagagaagaattcaacaaagactttattatcagaggtaagtttcgaaacactaatcaagttttttgtaatctcagggacatgcaacagatctttgagaattaaagtactcccattatgagatttcaagcttcctgtaccaatatgtgaaataacaagctgtgttccatcaccaacaacaagtttttccttacctccatagctggatttgttgct

SEQ ID NO: 73394 - DNA, 671 bp, Cannabis sativa
aaataataaaataaaaaattaaatgtagatatttaaagtaaaatagttaatgatttttttaaaaaaaaaataattaatttaatggtattaatttaaattgttaactttaacgaaatttaataattatgtgtgtgagtaacacacatgctttatataatttatttataaacatatgctattggagtttgaattcgacttgtctaatgtacgtattaattcgttaaatttgaaattaaattaaataactaattatatttttaatattaatataggatttttggtggggacggcagtgattgttaggtcgccacttttgactcactgagtcgaggttcgtggaaattactgttttagtgtggtggaaactggaaagtgaggaatggataacgcatatttggaataagtctaatttcttgtgctagtaatgtataatgagagtagtgtggttcattggtaatcttttgacaactaattatttattaattcctttccaagtaattttttaaaataaataatagaattttattaatgactatcaactaaaataataatttgtaatttgatcgggacatttccatatctccatgcatggtagagacactgccaagattagaattaaaaaaaacgaatcaaataatcacctcttaatttccacattatttgacaaaaaa

SEQ ID NO: 73395 - DNA, 945 bp, Cannabis sativa
tttaacttttgaaatttattagatcttgatcccgaatatgtaaaatcgttaaaatttttatttaaattattgacattcatatatttaaggacttccgtttaattttactaatggacgcgtgatgtggatgaaagtttaggagcacaatttagtatgtgtcagaatttggaatacgatttggtagatgttaaaattcaggtgacacgatcaatttaatacatatcaaagttcgaaggtacaagttagtatatagacaatttaataaattgaatgaaattaaacagaaatcattaaatctaacaattacaataaagttcaaaaaaaaaaaaaattaatagcctaaaaagtttaaacgcggtacatgtcaaagttttgtgatcaaaaatcttaattattattttttttttcaaccatcttaatgtaatactgaatggaaaccaataaaatttacaaacttttttctttctttcttgaccatttatatagttatagtttttataatcaatgctatatatcacgattttatataataagtaatatatttgacacaaaaatttactttatattatatttgcattaattttagtacaatgctctaatatgcaattgtcaaagatgttgggcattacaaatggaagaatgcaaagccagcatgtatagtgaaaatggccttgacgaaagcttatgagacaggaatttcattgatcaagtgatgttcttaaagtacctcaaaaggtttattcatctagtcatgacttgtatcaaaactctcagacttcttttaatggtcaaaatgattccttgcatggaatttttcctttcataggtaaggtgattcaaaatgacacctcttatgcttttctaattttaacgtcatattgttttgtaatggggattacaaatcagtatacttaatgctgcttggtgggttcacaaggttcttgg

SEQ ID NO: 73396 - DNA, 1565 bp, Cannabis sativa
tctccatctccattgctaaaaaaaagtttaaaaattagtcataaatcagttgctaacaaggctaaagggaaacgcccaatcatcgacgatgataactccaattttgctcccccgtggctaaaggtggccgtcgtccagtgaagaagaagtcgaaggtgtctttgcctgaaaaaaaaaattaacttcgacggccagaagggaaagaagaagtcaacttcaagacaactgtgatgaaactgtaatgcaacagttatatctattgcgagccaactaacataaaactaaaaaataactaataattccacatatttaatacaaacgaatattacaacaatcgtgttttatctgttcaggtcacgtatttgacaattgcaagccctatttttataatacgatgatattataatagcaaaccattattcaactaacgtgcaacttaactgcaactagaaaagtcaaatatgaatgtgtatctataagaaactatttatcactgatcgataattaattgtaccttaatagtaatatgtaaaacaataattgttaaacctctgtaaaccaactttagatcagctaatttagtatcttaataaaaataaatatgttgtaaaaatttcttttaaagagctttgtattgtattgacgatatgaaacacttgtaagtatgataaaattcattgtatcattatcaatttgtaataattgatacgtcaagtttcaaaaagttagcaaaatgtttatgcaactgttatgaaacattaaaaatcaaaaccgtattttcacgtacatatctctatctacatgtctattcatgatttaatgtgaacaaatttaccgttaaaaatctagaaaataacaaaaatgcattacaaatttaaccatagtatggatgtatttttttttcttagattatacctgagttggattgtttagaaactctagttctaactttttgagatctgcatttcatagatctgaaaattgaagtcaggacattagttttgtgcgaattagattgaattttttgttgaattttagttttgtagtagtttttatgcactttcttttataaattcaaaatagcccatgttttgattgattttggtcgtcttctcaggtgaagttaccagaattaatggtggttctctgcctagttgggtttcgtgtcggttagtttgctgggttgatcgatcgaagcttgcgtaggtgattttttttacttcgatccatgcacctgaaagtttagaagaagatgtattattgaaatatttagtttgtgggctgtataaatatttaaagggccgaccataagtattttagtaatatagttacctttttgtatatatctgaaaaaagccctagaattaatgagaatagaaatatgaatagaatgaaataaaatttaaaaagcataagaaaattattaatttttttctcgtcatgtattagaataatttttctttacacactacaacaattttggtcattagcagcggaccacaatgtccaccgctaatagtggccgtttattttttttttatgaaaatattattagcggcgggctg

SEQ ID NO: 73397 - DNA, 974 bp, Cannabis sativa
tgaagtttgcatgtttgttgtttgttggaataataataataataatatattattatattatattatatattgaaaacataacagtatacgtatatattataagtttataaactaaacttacgaacgaaatgaaaccctcgtcttccgtcaaaatcctctctcctcctatatttattttctttgatttttaacccaaaacctagcgatctaggttccattagtagcaggacagagaatctttaaagaggatgagcttaaggtaagaattggtttcgttttaagtcgaacacaattggtttatttagtggttttgtgatttagaatagttatgaaggttctgaacttataggattgttctcaggtaatcatggggctagtttcgatgctttcttgttgaaattgaggtgattttgggttagaatttgagtttgaaactttttataacttaagtccgaacactagtggcgttttccaattaagggctcaattttagattctattacgtaagtatggtagtatgtatggtatatatgtgccctatgaagtttggggtgatttggacaggttccggtagcgcatttcggtgagtgcgtaaagttagaaaatcaattttcttacctctgaaactccggtcaaccggctttgaaatcggtcaacaggtcttgaccaatcagtttactgtttcgagcagccttgggaactcgagaatcgtactttttgccatcattttttactcgggtatctatttcagacgttctatataccgttttgaagcttgaaaaaagctctaccatatggtttatgcttttaagccaaaatattagtcttattttagtgtatttgaactacgagatttggtgggaaaccctaggtagtcctttgcaactgttaaccagtattttgggataaacacttattagtttattattgttatgacttagggcccaagatcatcgatcgtactccaagtaggt

SEQ ID NO: 73398 - DNA, 1071 bp, Cannabis sativa
aaggtaaaggaaaacctctacccacaaaaagaagtcactgtctgagcctattgacctcgaggtctctactaccgagactcaagaacaagttcctcctccagtcattccacacaccaacgctcctcctcttgagacagctcatgcttctacctcctagagccaggccattgagaccttgtcggccgtagtgggggaggctagatatgaatttgcccaggtgtacaggattgcttgctggcacaaacttaaggctctcctttccctgattgggatctaatcaatcttgggagtccaaaagagatgcttttgaggaacttatactacaacctcatggtaagttggtcatattattataattattattactttttctctttattcttatattcatttttttgtaattctccaggcttctttcctctcatttccttccaatcgatgattctcggagcgactcaaatacgtagagggcgaggtccaagaattactatcctaatgcagggttgtgattaagcaacaggacgacgcccagtaggaaatcacccgcctcaaacaagaagccgagaagtcaaagagagatcttgaagaagttcagcagaccatcaaggcccaagctgatgaatttgagaagaaactcgctgagaaggaggtcgaaaccatagaaagatgcaacaaggttggcctttgtactgtatatcgagcctggatggcaaatcccaacatggacacaagcttcttggaggagaaagaagaggaagctatggctttctgcgagaagtcttgtaaggaggaggaagaggctgaggcagaggaagatgaagaaaaatccatccaagtctcccaccatgtacactttgtttttatttatcttcctttttttttttaaaatggccatttgaccgagacaatggtttgcccctaatggcactttttttttgtaaagacaaatttgcaaagttggatggccaactttgctttctgatgcctcatacttcaacatgtgggtgtttgcttgcgctttattcacaatttaaataatcacatgcataaattttattagaggtttccatt

SEQ ID NO: 73399 - DNA, 808 bp, Cannabis sativa
tttaaattttatttcattccattcttattcctattcccattcccattcctattcctatattttcattcctcacaaccaaacgcctctaagtgtaaaaaatcaaaatatagcggagttttgctgcaaataaccttttttttcagtatcaattttttttttattattttattttcaaaaaaaaaattattatttttattttttaaatctggagtttttcttttttttttttaaatctcatttttttctccctctcttttgtttttttttttcagaaatctgaactttcctttttcttaatatcatttatttttataaatgtcatttttttttttataaatatgaactttttcttttttataaatctcaattttttcaatctcatctctttttgtttttgtttttatatttccttttttagtgtctttttgtttttttttttataaatctcaatcttttcacaattgtatttttttttctataactctgaacttttctttttataaatctcaatttttttaatctcattttttttgttttttataaatctttttttaatctcaattatttatatattttaaaaaaaaatgtcgccttttcttgagttttcttactacatttttttgtacaaaaaatttcattttttttgttttttttttacatttttttacctatctttcttctcatgtgttcctttctccaattatgtttgacccagtttttagtgtgtttttttaaaaaaaacatatatatatattttttaatatttgtaatatttgaagtatcgcaattaccctatatactatttttt

SEQ ID NO: 73400 - DNA, 1300 bp, Cannabis sativa
ctgcctctaaatgtcaatgcagatattttcaccccctttagcttccctttttataaattgggttgaaaaaagggaagctaaaggcttacattgtagtagtgattcaccattagattgttattgaaaattttgatgacttctcatgctcaaaagtcaaccaattaatatatttccacaagttgacaacattaaaaacttatgctaatgttccgttatttctaaatatatccctctcattacaacataccctatatatttttttctctttgtcacattctctcatctttttctttcctttctcgcttccttctctcttattttatctacaaaaaacaaaaaagtggtgttgtggtggaattttcagaccaaaaattttagatcaaattagttgcattaatttgagcatatctacatttataagaaaatcaaaatttttggaagaaaaactcttactttcaagcttgtttagaataatatttttatgttttgtttttcattttaaaataatttagttttacttccactatttaataatcttgattattctttcatatttgtgaataagaaagtaaaaattatattttactccaaagttgttgtcaattataatgttcattctgataattagttcatgacttctaattttctaatttaatattcactacaataaatagggcggcaaaagttgttcctaaaaccatacaaattcgtctcttatcattataagagatgataattcgcccttaaaagtcgcctctaatagtttacgcctaaaaatactattaggaactacaaaaaaagtcacctctagttagtggcgacaaaatacgcctaaaagaaatgcatgaattttttacatttacttttaggggcgacaatattgtccctgatacccctaaaaaggcctgtcaaaaatcaatttttgacttttcaaggtgactatgttgcccttaaaggcccccttgaaagttttcacattaaaaaaaaaaagaaagattttttataatattagaaatatttatatttaatttataaaaaaataattataataataaataaaataaatattaatataaaatatataacaaagtagcacaaataattatcataaaatgttattaaatattacaataacataataaaagtaaatagtttaccaatataatattaaatactaagatactttaaataaaacaaaaataatactaatgacgtggttgtagttcttgattctataactgagacataaagtcatatgatctctcattctcatcgaactctagagggtttggtggctgac

SEQ ID NO: 73401 - DNA, 973 bp, Cannabis sativa
ctaatttaatttttggtctgtgttgattttgttttgccagcatgattcatttttcagttttgtatggccaagttagtcaatttttatttttaatttttattttgtacgaccaatgtgactagtttttatattgttagaccaatatggctagttttgtaaggccaatatatgtagtccgttttggtttgtaaggtcaatgtggctagttttattttgtattactaatatgacgagttttggttttgtaaagtcagtatggctagatttagttttgtaagattagtatgactagattttggttctgtaaggtcagtatgactagttttggttttgtaaagcctgactagttttggttctgtgagaacagtatggctagttttaattttgtaaggccagtatgattaattttgattttgtaaggtccaaatggtctaataaaaacacatcagacaactataaacacttttatcaatggagataggcacatataaatcctaatctttacattagagaattacgtgggacaatatttatataaaagatttcttatttgattaaatatttgattaaattacatgggatgaaagttatagctctcaagtttgagattttcttttttgatattaagattttattacctactctcttgggctatctcggcatgcccttagaatatagacaatgaacttttatagaagaaaattctcaactttttgtgtaacattattaccttttttattttaaccttcatcaatttttccttaaaaaaatcaaaagtttataaaatattttaaataattataatttacactacaatataaaaaataaaacaaaatcaaaactattcaaatatcaaaaacttaaaactttaaaagaacactaaaagcacttttttttaggggaattaccccaaatactattttttttaattttttttttcaaatttacgatttgggtttctaaagtggttgca

SEQ ID NO: 73402 - DNA, 1353 bp, Cannabis sativa
  modified_base (484)..(501): a, c, t, g, unknown or other
tttgtactattttaaaaaacacagggtccattttattgtcatttaacaaaacataaggtccaattagtaacttttgtaaaacagagagtctaaatcaatcttatctaataacaagtaaccgttaaatattgaatatctaataattaaattagattaaatattattttttaatgggtaaataccattttagaccttgtattttgtaaaagttattaattggaccctctattttgtttaatgacaaaatggactctgtattttctaaaatgatacaaataggaccctgaactgattttttataaaaataaaacttaataataatccaatctaaatgtgttatgataaaactgtttacattttctgtattagttcgtgttagaaattgcctttaagttggttatactaaaaaaaaagttgtcaaaaattaagctcggggtcttatttataccattttgaaaaatacaagatttattttgtcatttannnnnnnnnnnnnnnnnnttgataacttttgcaaaatacagatttaaaatagtatttacttttttttaatatttaattaaatcggatatattaaataaagtgtgtgggaaaattgattaaaagagcattcgtatatgtatatatataaaatatatttgcagtggaatcttaaattaatatcatttaaacactctacaaggaaactgaaaagaatgagattcaataaataaagaaaagtaaaatattctgttatgcatatgcagtagtgaatgtgcatattcatagtacaacaaagcaattatataatttcatgatgatgagcaaactttatgttctaaaaaagccaaaggaaaatgaagttcaatacttactcatatttccactccaacttcctttctctatagactctaaatattgtacgaaaaagtatttgaaagaagaacaatacccctatctcatatatatcatcccttccaaacattattacaaagctagtacaaagataaaattaattttctaaccaataattacatactctatttttattcaacatctaaaaccagagagaaatccttgcaaagttttaagccaatcatttggaactaaatctattcattccaagcatattataatacatttttcaattttcaggtcttattagaatatcatacaacttttaaaccacattatgtaatagttagaagatattgatgcacctcaaattcttataaattttcaattaaagtattttttcctttcctcattgtaatgattataacatccatatcctttcttttctttttacagctaacgaatcgactgaacataaaaaggaaaaaaatagacaaagattaaaactcaaaaaaatac

SEQ ID NO: 73403 - DNA, 937 bp, Cannabis sativa
ttgtcatttctattttcctcaaagtctttaggttgagacatatagacttgctcactcaattctccattcagaacaacagttttaacaaccatttgatacaactctgaatgaaagtgcgcaactaaacccataataattctaaatgaatctttagtgaaaacaagtgagaaagtttcaatgtaattaatactctttgagtaaagccttttgtcactaaacgtgatttatacctttcaatctatcctttaatctttttagttcttaaaattcacttacaacctatttgttgaaaaccatcaaataatagaactaactcttatccatcatttttttttctccatagactcaatctcatcatccataacttctatctattttgaagaatgtgaactattaagtatttcactaaaagtgagaggatcctcaaaatgaccaagatcatattcaccttcttcaaggtaaacaaaattatcatcacaccttattgacatcttttgtctttgagatcgccatagaggagatacttctggaataacctttatttgttgatcatcattttgaatgacatattccacaattggatttctccgataacaggaccctcatcaacaataaaaccttcttcaataataagttcctcaacaataataggactctcgtcatcttcgatatcaagagcaacatattcatcaataatgggagcgttatctactaaagtaagaataagaatgctattattatcatctcttgaaaagatatagaaataaaaattcctttagataattcactcatttcaagagatgttgaaggaatatttcaagcaacaacaaattctagaagtttagcagtctgcaatttaacaatttgtataccacgagtatgacaataaaagcgatagccttttgagcgcattagataactaatgaaataacaacga

SEQ ID NO: 73404 - DNA, 683 bp, Cannabis sativa
aaacatctctcttactcacaatcccaatatcaccatggagtgcatccaccggagagagaaatccagagggaacaccgagagaaaccagagtctgggaaatcttcttggcgacgaagccagacttgcctacgccggagaagaagacggtgccggtggaatcgaggagggttttggtgaatgctagggtttgggagatgttgagattgttgaagaagaaattgaggtggttttgttgagatttgaagaggttgaggagtgtggtttcgttaatggaggattgtttagatgatgagtccggaaaattgagctccggcaacgtcattggtagagaacccattaatggagttctccgatcttctctgtaatgaaatctggaaattttttaatattaataattttaattttttgaataaaattaatatctgtatttatatttatagggcgtttttttttggagggtgtgacgttttttaatttagtttccttaaaaaacgtttctaatttggcgggttttttttggccatatccgaagatttatcgcattgtcggtgcctattaacaaccttttattattttatttctcaattaaaaaaaaacttttatttgaatagagtattactattgggacccgtggtgtcaagtggcgtcttatgattggatagcaatattctttaatttttttt

SEQ ID NO: 73405 - DNA, 758 bp, Cannabis sativa
cttttattggtcgctagacaacaagttttgaagtataaatagtttgtaaatttatgtaactttcaaaacaggatcccaaattatgtaaattattatgttctattattaaagtgaagttatttaataaagttttaatcattcatgttttttaataaacccatttgagtagaaaaggcgtgcacaatatttagaaaacacagtaacatgcctaatctagtagggtgttacaatttcggtattagagccgccatattattctccgaagatcttcaagatatgtacaatcatcatctaagataagcttgactcatagttcagtaagtttttacgtcttttattagttttatttgttatgcatggttagacacatatgatagaaagcatgttagtagaatgatagttgaataggagcatactaagtttccatgtaagtggtagttaggttttattattgattgctgcctgaccgagcagactcatgaattcgcatgtttgtcttatagaatggacgcctggcaggaatcatgtagttgggctaataaggacaatactggtggcggatggagagattgggatctctcttatactcaagactgtgaaaagactaatgggggtggttatgaaaatccaccgcaggctccgtcagatttggagcaaaggttcgttgaaatggaagctagaattcaacgacatgataaggagattaagagattaagacaacaaaggtcttctattgtaccttcatctcaatttccaat

SEQ ID NO: 73406 - DNA, 984 bp, Cannabis sativa
tcaaggtgcaatctatttacttttaataattcttttagtgtatctctatcaacataattagattcatatgctgtgataaaacaatagcattatgtccatatatacaatatctgcatcacatgatgacccaatccatatatacataacttcattcagttcatattaaaaaaaaaacaatgatttaaaagacttggtacaattactcctttaaaattccatctgatatgaagttaggagcaaagagcctaggacctacaggtcccagaagactaaaagatagcttgaatggtccaggtcacacacatcccttaaagcattaatttggaattgcttagcctaaacacccaccttcaatttaatctcgttaaacagtccaagcggcaaacatctccgaacctaaaaaggttaaagagtgacatatatcttatctaatcttgtagacttgtagtagcttctaaatctttgggttttgtttgtctaatggatagcgttccatccacaatgaaagactatccaaaaagaaatcaaagatgtgaatctcaaaaatctcataattccaacgagcagagtaactaagtctttctcttgctcaatttcgtatgaatatggaatatttgggttcgtcaacaatggtgattgaaatggtcttcctcttggctcgatttcgcgtgagtaggaattatttgggtttatcaacaatggtacttgaaatgtggaatgtgtttctttcagatttaaaaggaaaatgtcgaataattttattaatatttattgttaaaactatttgaaatttatttttaattttaaaaagtaaacaaaaaagatttattccaaaaactgttgccacgtgaacatttgacagagataatattgaaagacaaacggctgcacttaatcattaacggcgagtagtttcaccgccaaaatatttacatgaggagttaagtgcaacaaacaaactacatgagtagttttgccgctatt

SEQ ID NO: 73407 - DNA, 963 bp, Cannabis sativa
gttgacactttgtgttttacgccatttatgttgataccaaaaataataaaaatacctcgaaatggtgatagcttcattgatgtagtaagataaaggcattaattcttaacttgaatctaaatttggatcataaagtgtaagtacagtacaatattgagaaatatgaattaattattttaccaattatgttgacacattttgttttataacaattatattgatacctctaatatattaaaaataataaacaatggtacaaatatattaaacattaaactctatttctaaatcatgtaatttaaatctatgaaaaagaacttaatgtatttataaaatggaatatattgataattttgttttataacaattatatcgatacctctaatatattaaaaataataaacaatggtaccaatctattaaacattaaactccatatctaaatcatgtaatttaaatctataaaaaaaaacttaatgtatttttaaaatgcaatatattgacaacaaaacactattcacttacttactggaactgtttgtgtactatattcttaaaattactgatatttatctttaaatcttattaattgaaactagtttatttagttgttaaacaattctacgtggatcaatatgtaataatgaaatcactattaaagacaattactgtacaccaacaaagtaacagtaaaaatcaattaccaaagattacttaagaaatttatttttagaacgaagttaaatcctagctttgctttgacaacatagaaaaaaaaacataaaataaatatcataccacatatctctaacgaaataaaagttggcaaatgatgaaaaggcaaataaatataatgaataataattttcttataatattttcatggcgcatcttctctttctccaaaattcttatttggttacgcaatccgggagtagcgtctgtaggttttttaggatgaga

SEQ ID NO: 73408 - DNA, 1213 bp, Cannabis sativa
tagcttaaccgtatctggagtgttaggcgaaaaagacatgacggacttatctgtgtttaagagttggccagacgctcggtggtaaacatcaagagcacgcttaattgaaccacatgatctatcattagctcgacagaagagaaaactatcatcagcaaacaaaaggtgtgtaattgatggtgaatgtcgagaaacagccagtccttgaagtctaccaatcttctcctcatattgcaacaaacgtgaaaggccttctgaacagattaaaaagagataaggagagaggggatctccttgccgcaatccacactgaggtttaaccgaacctaagacttctccattaattaggaaagaaaatgagtttgtatgtaaacatgtcatgatgagtgaaatccatttaacattaaaacccatctttcccataaccgctgcaataaatgaccattccaccctatcgaaagctttgctcatatctagtttgaatgcagcgaaccccttagagccacgagttctatgcttcaaactatgaaccatctcaaaagcaacaaggatattgtccgtaattaagcgatttgaaagaaaggcactctgagtctcggaaataacagaatggagaacttccttaaatcgcaagaccagcatcttggaaatgattttgtatgtaacattgcataggctaatgggacgaaaatccttcattgtctttggttttttgatcttaggaatcaaagtgatgagtgtcttattgaaagcttcaggattagcaccatgattcaagacatccaacaccactttagtcaccaaattccccactatatccaattgtgatgatagaacatagcggacatcccatccaaacccggacttttatccgaaccaatagtcttcaaagcggcagtgacatccgagacagtaaattccttagacaaaaattcattttgctcatctgatatggttgttggtatggtagagagaacatgagttaaagcccaatggtcttcatttgaagccgtgaatagttgctgaaaataatctgttacaagttgcgagatgccatcttttgttgtgactgtatgtccatgatcatccataagagctttaattcggttgttggaatgtctagctgaagctttagagtgaaagaatttcgtgttgcgatctcccgattggagccaatcaaccctcgaacgttgttgccaatattgctcctcat

SEQ ID NO: 73409 - DNA, 959 bp, Cannabis sativa
aaaaattcaactaatacttataattataaatatctttacaggtttttcatatccctcttaatttgtgcaaaatacagctttgtagacacttgtgtatctagacgagtaggaggaaaaagagaatcttaattttggaattaaagattgaatatgaagtaaggtaatttaaatgtgtattttaattttctagcagattcaatctcatgaacactattacattttagttatggttactgaaatataatttttcttcacgaaaaatacatcaaagtttgttttacataaattatgcagtttgctatcttccttactatactttcattgcaatactattaattaaaaactgtatgtgcgcttctctctcttaatctcttccgatcacaaaggatcatattgagcctcctcctatttaccaccaagtctgtttggttagaggtaatgaaataaaacaaaaaaaaaaaattatcctattcttttatttaggtgtatattaggtgatattttgctttgatataatgtaatagaaatgataattgtaatataataaaataagaattctcatcagaataatatttttgtgtttggtttaataaatattgtaaacaaataatataggtgatatattgacaaaaatatacttagttttattatttttaatgtttaaaatttaaataactataaaaaaaaaagagcaaaagagtattttctaacaatgtaattattattacattgtttactgtaattaggaatcaagaataggaataaaatagaaatggaatgaaataaaatttaaaatgcatcaaagaattaataattttttttttctcatgttacattagaattgtctttcttttttttttgaaatgaaatagtcattttaccaaaataatagaaaagacattcatgtggaatgcgtttcaatactttaaaatgtgatcaaacaaagaaattgaatgaaa

SEQ ID NO: 73410 - DNA, 1140 bp, Cannabis sativa
  modified_base (1010)..(1012): a, c, t, g, unknown or other
gttaaaccaagaaatgccgttagatagacacttttaatatataaagatatttctactggaaataaggaacaaattatttgtgttgattttttttttatttaattgaagctttgctccattaatttattagatttaagttttattgtattataaaagaaatatatacgtgttattgtttagcattaattatatacgtgtcattgtttagcattaattagttccctaaaagctactatcttttagatgtggatatagacttttcatatcataagatgaaagatcaaagtttttaacttgtggttctctcccgtctctccagtactattatcacactactttcctattgtgttacatcatgtcaccttctttgatcttattcatatagataatattgtggttcttgaaaaaaaaaacttgtagttggatgttctatcagctaacttttgttgtttttggattgcttttcttataaaaaaaaaatagaaaattaattcattttaagtatcaatttagaccatctctaatagatgatgtatattttaagttaaatttaatctaaaatatatcataaagttatatttggcctaatttttatatttgtgctataatatacaaagtgcaaattagctataaaaattaatactaccactaatactcattaaaactatacaaaacaattaattatacttatattattttaataccttataaatacaaaaatatatttttattaatgaatagtattaatgagtatcaaagaaataattaaaaaatagaggaaattacactacatactgcttttaacttgatgtctttaatttttaccttctttttcaaaatttattatgtttacctttttttcaaaatttattatgtttacctttttttcaatcatcctaccaattttatccatatcactccacgatagttttcattcttctctaatcaaaatgttatcctaactttttcacaaacctatacatcagggccggcccaagcattgggcagcnnnggccattgcacaaggcccccatttttctaaggcccaattatttttttaaaaaaaaaggcctattttttttttcttcttttgctattatttatacataaataaaaaaaaaattaattgaaaatttatga

SEQ ID NO: 73411 - DNA, 821 bp, Cannabis sativa
ggagagtttgatatatagaagagaacaaatctaataaggctgcgctggggcaataattacaagaatgaatgaaggggtgggcctatgatatgagcattgttaaattgggcacatgtgagatgtgacacgagtggtgagagtttctcatacttagggtgttcgcggtacgggtagtatgggttgtagcttttttattttttaaatcaaactgcatatatagtttttgtaatttctcaaaccgcaacagtaccgcatgatcttaaaactgcaaaaaccacactgcgaaaatacagtgtggtacggtacaatttgagcaatttacactatcatcattatcaaatattataatgaaaatttaaaaatcaatctaataaaattttatcaatacaaacaaaaatcttatatactaatcataacatcataacatatatactaatcatcaagttattatattaaattgtttctaaaaaataatgtaatatacacatattacatatgtttgttcttatatagaacaaaagaataaaaatcatattgtgaaaagtgataactttgtaatatataatgcggtgcggtttgaaccgcgattattcaatttaaaaatacaaatcgcactgcaccacacggtttgacaaaaatacaaattacgaccgcatcgcaaaagatttcaaactacattttttatgcggtgtggtgagggcagtttgtgcggtgtgtgcggtttgatgaacatccctcatactagttattaagagcatcttcgatgtccaacggtgcactattttactaaattgatgtggaatcttcacattattttactc

SEQ ID NO: 73412 - DNA, 730 bp, Cannabis sativa
tattaatatcttttataatacttacaaattgttacaacttcttgtatagaagaaacgaaattgatatttttctaaaaagttaggcttaatttacattaattgaatacgtaaaagtaatttcaaataataattaataatatttttttcaattatttattgtattatttttaaataaagtagaaaatatctagcataaaactaagtaccgtgtcggcgactatactctaacaatggcagaagcgatcgttcaagagcaacacaaagtgaagcttttcaatcgttggagcttcgaggatgttcaagtttaggaaggctcggtgccctatcattgagaagatgccattcgtattggatctgctggtgtggtcaggcatcaagctattgatatttctcctcttcaaagggttaaccaagctatctatcttcttacagtgattcttcactttgttggaaaaactcatcgtcaaagttcccgtctaacataaggaatgaaaagttcttatttagaataaaaaatgtgtaatcattgtatatttgattttcagaaattcttcgaaaaattatcacctgatgagtcaaacttaatatttttttgagatccagaagttttccaaccccagtttggttgggagcatttagtgtcgcaacaggtattcaatcctcttcggtagtgcaagaactagatcattatgaccttctatatcttctcttgacaaccctttaacctgta

SEQ ID NO: 73413 - DNA, 1114 bp, Cannabis sativa
cttttccggtgacttttctaattttggtgacttttccggcggaacttattattacaagttttattaaatttatttattatttttttttcatattttaaactttaattattttttaatctcatattttttgcattatttatttatgtcataaaaaaaaagtaaactatatctttaattctcatatttataaaaattctcctatagagaatgagagatccctgaaaaatatatctcttgtacctgtctacttcttagcgagtgtgggaattagtaacttcattttttgaaacataattggtaattaatttagggactttatttagagtaatttatagttaaaatagttaaagttcaataatttataacatttaaatgtcaaatttttatttatttatttatttttggctcaaataccttttgttacactttattggcagttggaggtaccttgatttttttttttttaaattgaagcgatgaaaaataatgagaaaaggaccaacaggtcattacagattaaagattctggtagggaggaaacatccaccagcccagaacttcagtagataaagctcatttgacaaagttgtgagaacataattaaaattcttagaaacatacaaaaaatcatagccatcaaaagaactagacaaagttttcagatcagacacagtattactaatcagtcaacaattgcaagcatcattaacaaagttgactaggatttcagaatcacactcaacaagaacaaaattgtgtagaaagtctctagtcgaaaccagagctagacgacagactttcgcttaacctaacagagggttacaaaagttcaatacttgagagttgatccaaaagactgtcccaaaatgatttcaccaccatggaatcactaccagccgccacattgcaattgattttaatgcaatccacaaaaggagtggagcaaccaacaataacacacgccagtgaagttgccatgagagagggagcaaactctgaaaagtaaaaaaaaatagaattaataagatgagtaaaggggtgcaacacattatgatgaactttgtcatttctagctttccaaattgaatccaccataatggaggcaaacaagaaa

SEQ ID NO: 73414 - DNA, 1122 bp, Cannabis sativa
  modified_base (1093)..(1097): a, c, t, g, unknown or other
ggtgggatatggtggctttgactctgcatgttactgccattaccttggaagagttctatgaattgtttaatgcaaagtattacaatgaggcagtcacaagtgcaacgataaaagaatttacccagctgacacagaaggagaatatgaccgttaccgagtacacaactcagtttgataaattggctaggttggccttgagaattgtgccaaccaacttcatcaagaaagaaaagtgactggatggattgaatccaaaaattaaacacgaccttatgattaccactgatgataacaccacctatgatgatatggtgggaaaggcactgcgagctgaaggcgcagttgaatgcattcaggagtcccgagggattcaagttgtgggtggagccactactcctcctacctctgattctggtaggggtggtagtgactcaaccgctaagcagaagagaaaagcaccatctacacatggtggctcatatcacaacaagaggttctgagggaaccaaggttgaggcaaccgtcaaggtggttccaaaactcgatatacttaccaagaatgtcccaattgtaagaagcatcatctgggtgagtgtaaagggcgaggatatttccagtgtggtttgtctggacactataagaatgattgtttgcagctcaagaaaaaagaatataaggcagcagcaaagcccgctctagtaagggtgtttgttcttactcaggctaacccagaagccagtctctcagttgttataggtaagctctcgatcaacaattcttacttctctatattgtttgattatggggccactcattcttatgtggcggccaaattttttgataaattgggtagactttatgatagctatgttaaggggttgggaaccctattacctggtggagaattagttatctccaaaaggtgggttaggtctatgctaatcagaatttaagataaagagttgagtgctgatttagtactaaggaaatgggtttagcggattttgacattatacttggaatagatctcttatccaagtacccagtgttaggttttatgccctaaataaaactctttacaatctgattagtnnnnnatataagaaatttgaagtgatttat

SEQ ID NO: 73415 - DNA, 643 bp, Cannabis sativa
  modified_base (50)..(73): a, c, t, g, unknown or other
taactgagtctgcaagcaatattagttgaggggaccatgggcctatatannnnnnnnnnnnnnnnnnnnnnnnagaattcaccaagtaaattctctatctcataattcaccaagtatattttctttccctttccatttctctttgttgtcttttggccaataggacgcttttcacaaactttgtgatcattgatgtttgcattagatgatgaagtatatgctcctgatcttgacacctttgctctcttaaaccttcagattggtacattgcattacatttcagcttatcttttaacagtctccaacagtctacaagttgaaaatttgaattgttatttttcagacttgttatttctcatcagactaaccactgtgatgtgcttgttgtactctcttgtaacacccatgaaacgtgccacctgatgattcttcttgctccaatggttttatcattgcttttcagttctttgttgatcatctttgtagtgggcgttgaagtaatttgagtaatttgcaaaagtttggccagttcccacaacaacatccttaaatgtattaagccatgtacttatcagaagtatatttgcttccttgctccatttaattttatttttttttagcttggttcctcttcactatgtag

SEQ ID NO: 73416 - DNA, 1236 bp, Cannabis sativa
  modified_base (1075)..(1082): a, c, t, g, unknown or other
ttatacaatcttatcatataattgtggcgcagtgtagtcatcaagttgtttaaggagcttgaaagcaaaatccttaacatgaattggatcaggattatgaagagcaatcttctcatactcacaactcattttaagcaaacttccttgatcattaccatcatcatcatcatcctttggaaccacttggatactcatcttgaaacttttgtagtcctttaacaaatccccaccaataatactaaacccaaatatcttcttttcctcatcaacaacttcaatcttttctttgaacatcgtaataggagaaccttaatttaccaaaacaaacacacaaataataaaatatatacgaaacccatttggtataaattgaaaaaatagaagaaaaaaaataataataaccataaaagaaaattactatatataccttctttatatgtacggactctaatagaaccagggtgaacaccatcaccatgaagaacatcaatacttttgtatgtcccaggaggaaaggcttttgggtaaacatagtagagatccctaagtgatgcccaaatcttatttgcattagatttgcaatcaagctcatcttcaatcttttttctttccatattttcagtattattatttgacccaaaagaaaaagagagagaagtgctataacttttgggcttgatcataatatacaacattagttgctatatataaataaaaatattggttgaatattatttatgtgatttaattaataattataataaatataaaagtacttatcaaaatagcttgatcgactattttttttttttgtttttgtgtgtggattgaagattggtatctaatgtatataccctacaagataaaaataaatgtgatatgtctgagagatatgttattaaattctttggaattattttcatataaatatattaagtggcggactagaatttaattggaggatgggcgtaaatttttttcatatataaaaatatttcaaaaaaacaagtaaatatatattaaaaaaaaaacaattcaatatttcaattctcaactaaaaagatattaaatatcnnnnnnnnaaaatcttctaataggaaaaaaaataaataaataaataaaaaagcaatctaaaactatattcaaaatatataacatactcaatattttaaaattttagaaaatatatcaatttttgagctcatatctttagagttgtcatcgacgagtttttat

SEQ ID NO: 73417 - DNA, 754 bp, Cannabis sativa
gtaaaattcatgcaaacgtaaatcacttcaaatttcttgtattgataactaatcagattgtgatgggttttatttagggcacaaaacccaacaatatatattttaatatttataggtttattttaaattaaaaataatgacagacactgatgaggagattgagttacaatcgatgtttgtagcaacataccttgttatgaggggcggagtcacatatggcctaacagtggccgtgggcccccttaaattttaaatctcatgtaataaatatggataattatatataaaaaatatgatatacatgatgttttatgaaaaaaaaaaaggttaagagttgatatttatttatcattatatacagttttacttatatgtattaagtaggtcccataaatataacaaaatataataatagtatattgtattatagttgtacttatttgtatttagactaattttaatttaaaagtatattaagtgaattctttaattaatattagtagaattaataaattataacaattttcttttcttttttacttgaaattacaataaatattaatttttgataatgttaaattgaactccaaatattttaagcattggttacattttaattttagtttaataaattattcaattttttaaagtattatataaaaatttataaaaaaataaaaaattataatatattttctcaattgacacacatcctaaaaaaattggttataaaaatttatacttgttatatgtt

SEQ ID NO: 73418 - DNA, 1221 bp, Cannabis sativa
  modified_base (808)..(809): a, c, t, g, unknown or other
aaaccaaccaaggaacttgccattttcgcagcaaattatatgcagaactttcgatctgctcaagccaagtaccgtctagaaaatagagcacccacacagtcatcttcttcagttgttgaaccagttctgtaggcacctccaatggtgggaaacctcaagttaaacgttgatgcaatagttgatatcgacaagaaaattactggtcttggggcttttgttcaagactcctccagcaatgttattgctgctctttccaaaccaatcattggtaatttcgattctcataaaatggaggcgctagcaatgtttcatagcttatatttgggcacttcaacttcaattgcctataactcaagttgaaatagatgttctacgggtctcaaatgttttgtgcaaagcttcatctgtaattttttttttttcaagatttaattatagatatttctagtcttttattccttttttctaatgtgaatgtatctcatgtcaaacgtataattaatatagctgctcacaaattgataaaatctgctttaaaattggatgaagtttatttttggtcgaattatattccttcacttataaattctcttattgtaaataacttatcatcttaatttataataactaaagaaaggggtgcaaactaaagtaaacttagccttattcaaaaacagaaaaagtaaacaaccaaactatagtaacaatattgacttctttggtgacatggtgtcaggtaatgttagagcagctccaatgctagttgctcatcaagcttttatcagtctaagaaaagcaatcttgattnnttgaccactaaagaaaattgtgtgagctactgtaattgctactgtcaagcaatggtagttaaattattttttttataatttttctatcaaaaaggtgtattaatataatatttaaaatattgaaagtaatttaataatatattaaataatagagtgtgggtacattttcttgacttttaaaattatttagcattggagtaattttaagagtaaagtagccaaaaataatgtgaatgaaagaaaaaataaaatataatattttaagatgatgtggaaattattagctattttttaaaatgcttgcattggagttgctctttaaagcattaaaaaatgtttgatgaggtagatatattaggaataattacataaggcactattttttgtaaaataattatatttttacgttcaa

SEQ ID NO: 73419 - DNA, 1171 bp, Cannabis sativa
  modified_base (26)..(36): a, c, t, g, unknown or other
  modified_base (443)..(461): a, c, t, g, unknown or other
tatttttttttttgttaaaactgaannnnnnnnnnnaaaaaaaaaaagaaaaaaacctattttatattaaactctatatataaagattatattagaaaatattttgacaaaatttgagtttgattagaaaattaattacttttaaaatatattttatatattatgtgcagatatatattttaaaaaaataatgatagtgatagatacattcttataatttgtaattaggagagtatagttataataaagagtacaaatattaaaagcatatatcgttaattatttttttgacaatatcattaatcatatttaaataaaagatttatcgtgaaattaagatttaaatatatattttatatatagatgtgattatatataaatataatttttataattaaatatataataaaattaattatttttatataaaatatctatataannnnnnnnnnnnnnnnnnnataataatattataaaataataaagaatattttgtcaagtaattggaatattctgttaaagttaacgtagaaaacttaaaaatactgttataccaagaattctgttacatggccacattttatatagaatagatatatataatataggttatttgtggtaaaactatttatgttttgattttttacatttaattatcttttttcttagcaaacttcagaggaattcacacaataccataaaacgtgtaaacaataaataaaatgaacaagaaactatgaacactcacttagagtagtgagtattcaacatgaagctaccaaaataacagaacaaccagaatatacaaagaacacaaggaaatatagtagttcagtcagatcacagtctgcttagtttactattacaaataatttctgcttagtttattcaacttggatcacttctttatatagaaagcaagtgtctttttagttttacataattgatcggttatataactgttttacaataaataacaatattaaattagaataaacgtaaaaggataaataaaaaatagtttaatttgttctaataataaatgtaacaacgtatgcgacttatcgggtgtgagttgcctgtttcatattctcgcacaagctcacaggctttaggtgcattatatattcataaaagggctgatgagcctaccactaggatgtctgtgttc

SEQ ID NO: 73420 - DNA, 1603 bp, Cannabis sativa
  modified_base (1026)..(1030): a, c, t, g, unknown or other
taaacaacatgtatgctaaatatgtaattacatatgcataacattatactaatcttactttgtttccgaattcaggtgtgccggccaacctgagtggaaaacttgctcgacgaactacaggcccctaaatcacatcgttcataacatggttaagtgacacgctaaatcacaaccggggacttaggttttaaaccaaaactctttatattgaaagttaacatggaaataccctaaactaatagggaattaaccaaccaaagctctgaaactaacacgaatcgacaacacgaaaagttcggggaacccagcagtaaatccggttaaccagtaaaatcggttaaccagtttacaccagaaaaccccaaaaattcgaaaactaccaaaccttccagacctgcatattataccccaataaacatatttcaagtaacagaacaacaaatacatgctcaatataaaaaaatcatcattaaagagccaagcttgagttcaaaaactcaaagcttgctcaatcaacactacagccaccaaaaccaactcaaaacaacatttctaaccatagttaatcctcaaaaacacaattcaaacatcaacagcaactacagtagcaaaactcacaacccatgcataaatctctaacttaaaacccaagaaactaaagagagaggtgctaggagcttatcttgaacttgaatctacttagaacttgctggaaatcacaagatttgatgaagaaaacaagaaccctagctggttctaatgggttcgaaaaagagagagtttggagagagaaagttctttctttatttctaaatttgatttttttgtaaaatgaggtaaataaaatgagttttattagattaataccagcttaaatatcagcatattaatcccactaaagtccactaaaggacaaaacattaacttagaaaaaatgaccattttgccctttccacactaaaagtcataaaaatcacttaggggtattttttgtcaattctaaaatctcgactattcccgacattnnnnntgtctaactatattgccccgctatgctaaaaatactaagatgtgattctaatagccaaacaccgcgttccaacgttgctgggcacaaaacatgcaaaaatataaaattccatatatgacatataaaatgcattctgaattcaaataaatctccgtaaaataataattcataactaacatgcaagtttcataactaaaccctaattatttgcctatttccaaattaaagttaagcagtctttacaattatcccttaaaaggatttcgtctccaaaatctaacctgaacaactctggatattgagccctcatgtcggactctaactcccaagtggcctcctccaccttgttatttctgaccaaagctatggtcttgttccgaaggaccttatcctttttgtccaggatctgaactgactgttcttcatatgataagtctggttgcagctaaagatttttataacttagtaaatgggacatctacactttttgccatacaacaattcataggagtcatccctattgtactctaataagtgttattgtatgagaactctatcagcggtagatactta

SEQ ID NO: 73421 - DNA, 916 bp, Cannabis sativa
gtcttttcaaagatcgatctttgctcaggctatcatcagctacgaatttgagaggaagatatcccaaaaggggtgtagtgttcttgtttatgcatgtttatagttttgatgtttgatcatggtaaatagagtatgtaaagcataatttagttgtgatatatgcttattgagcatggaatgtgagtttaggtcagaatttatgagttattgattgagtttgcagctctgattttagtggttatcttgagtttgtgtttttggatttgatgattcaatgtgtgaggttgaattttcttgattttgctcaagctttggagcttttgttggatgttgttgattaatgttggaattgatgttgttagctctctgttgtgatgatttttatctgtcagaagttaattttgggtgtggcttgattaagattcaaatatatggaaaagtgagcatttttagaccttaaaatctggttgtttaggtttttcgaacccagtggcggcggccagatttatggtcgccgcggccgaaaacccagcagagagctatctcttttctcaattttgttttggccataacttttgactcgagactccattttagatgttctttatatcgttggaaagcgcgttccaagctctatatgattatctgtattttgaatgccaaatttatactatgtgaaagtggaatcagggattaaccctatttgtgaaatcccaaattgtgtgactacgattatcggcacctgatcaggagcaccaagggggttggaatctctgttattgtggcacaacaggtaagacattagtttgcacgtattgtatgcactgtggcgcttatgttaaatatgatatttgtgagtaattgtaacagggattagggttattaccctaagatgagcggttaatagcctagggtt

SEQ ID NO: 73422 - DNA, 730 bp, Cannabis sativa
tccctatcgatgaataacatggcaataccctaaataacacaaaaatgggaaaactagggtttcgcaaaatttcccccaaccggaattccggttttgggaacattcctaagagccaaccgaaattccggtttttacaggcccctctgaaccggaattcctgttcagtacaagaatgaccaaaaattctataactaaaccaaaacaaccccaatccacatgaaaccttctaaacctattctaagcaacctaaagatcaatttcaaagcaacaaaacacaatttcaggcacaaatacaaaaaccaccattgatgagccaagcttgagttcaaaaactcaaagcttgctcatcccactaactagctatcaaaacctactcaaataaccttaaataaacataccttaactactgaaaacataattaaactccagcagtaagaacagtaaccaaaaacccaaaaacatggattaatgtttttcttcaaaaataagaaactaaagagggaactacaagagacttacctagagttgaaaatccctttaaatctgctggaaccaacaagaaaaatggagaaaaacatagcaaccccagctggttttgaagttttcgaaagagagagagaacttgagagtgaatgtaatcatttagaaatttcttattttcttgtaaaatgaatagattatgttgtagtgagatttctctcacctagaaactcgagaccagactcctctt

SEQ ID NO: 73423 - DNA, 684 bp, Cannabis sativa
  modified_base (529)..(546): a, c, t, g, unknown or other
cattcttgcacagtaaatagcgaacttgctattatttggccatagacctgaagatcttgaaaagagttttaagccttgaagcatcaatctaatgctttgcggatctcctttgcaaaaaaggaggacatcatcagcgaagcaaaggtggttgagcttcaattctttgcatctttcatggaagccaaaatatgctttattccccactttcttcataatcctactcagatattccatgccaagaacaaagagaaggggacacataggatctccttgcctcactcctcttttagcaccaaaaaaaccatgtaggacaccattgaagtacaatgagaatctggctgtagagacacattgcatgatcaaagagatgaccttagaaggaaacttaaaggcaaaaagaatttcctctaagaaatcccagtctaaggtatcataagctttttgaagatcaagcttgatcatgcaatttggctttacagatttccttccatagtgcctaataagatcctgacagatcataatgttgtgnnnnnnnnnnnnnnnnnnaacaaatcccccttgattttgagcaaccagatccggtagtataatcttcaatctattacagaaaagtttggtaacgactttataaagaacattacaacaagcaatgtgcctgaagtcacttacagtgtttggacattt

SEQ ID NO: 73424 - DNA, 1402 bp, Cannabis sativa
tcattgaacaagtcattgataatctcataatcccaattcttaccatccatagtcaataaacacttaacatctttatcacaaaaggaaggatggaaagaagtgatgaaaggattctccatatctggcaaccacgggtctctagtaatagagatagtctcacctgaacctaccagtattctcccacctttgataattaaatccttagcttccagaatactcctccaaaaaaagctaggattattacccaaagtcgcattcacaaaggagccccatgggaaatatttagctttgaagagcttgccaacaagagagtttgttcgagtatgaagcctccaagcttgctttccaagaagagcaatattaaagtcatgcaaatgccgaaaccccatacctccccgatccttagatgcgcacattcggtcccaattcatccaatgaataccagatttctgtttagaagaagctttccaccagaatttacacatcatttgttccaaatcctcacaaatacctttaggaattaagaacacactcatagcatagttagggagagattgagcaacagatttgatgaggacctctttccctgcacgagacagaaattttctatcccaactctcaactctcttccgcattttgtccttgagaaagcccaacacaacatttttattatgtttcataatattaggcagtcccaaataaaagccatcatcaccagcttcagacattcccattaaagaacaaatgctcacccgaatgtcaggggaagtgtttttgctgaaaaaaatggatgacttctgacgattcaccttctgacccgatgctagttcaaatctctcaagaagagacatgatcctttctgcttcattcacaagggccctacaataaaggtagctgtcgtcggcaaaaaacatatgagtaacttgaggagcaccccgagccacttgacaacccttaatccaccctctactctcatagctccgaataagagatgaaagtccctcagcacaaataatgaatagatacggggataaaggatcaccttgtcgaattccacgagatggtgatataggtcccaacgaatgacctcccgatctgatccagtaacggaccgagacaactaaggccataatcaattgtacccatctagtatgaaagcccatcttcaaaaggagcgtctccaaaaaaggccattcaacgcggtcatacgctttgctcatgtcgagctttaatgccatttgcccaacctttcctttacttttccttttgagataatgcattatttcaaaagacaccaaaatattgtctgttattagtctaccagggacaaaagcactttgggtctcagagacaatgtcttccagaaataacttgagtctgttggccataactttcgaaatga

SEQ ID NO: 73425 - DNA, 802 bp, Cannabis sativa
attctcgttatcaataaagattggtgacaatgctttcaaactgaagtatgaccaagtttacattgaatttaagatcggaaccagtataaatatcttgtgttattgctcctgagattaatttgtgttatatttttctggtttaatgtgtttgttggttttttgttcttgatttgtttgttttgatttaacttttatttgtttaagtgtgattttcaagttagaataggttaattttcatatatcagagcttcctacgcttatcttattgtatattaacttggttagaaacatttatcttagtttagttttcacttgggcttttcttaattgtaactaattctatttaacaaaattgttttttttttttagtgaaaatctaacatataaataaagagttccctagtaaatgatttttttaaggtttgtaagcattgttatgaggttttgattcttctctctaatctcttttatggtattagagcaccattgactgacgtccatggcttttttcggcgacaactcatctcttttgggagtcaacgatccatcgcctcgggctaccacacacacaataccttcgaaacaatcttggaattctttttccaattctctttcctattctttgaccatcaaactcgatcgaataaattttctagcaaagaaatctcaagtagttcctactgtgattgctatatgagattttattcagtaatgaagctccaactccacgacttattaatggcgatattaactctgtcttcactcaatggaagtgccgagatcaacttcttctttcttggct

SEQ ID NO: 73426 - DNA, 825 bp, Cannabis sativa
ctctacagcccttttagaggaaggtttttctcattcagccattgatcattccatgtttataaggcactcttctactagtttcatcatcctacttgtttatgttgatgatgtcattctagctagcaacaacatgagcgagttagaggccttaaaactaaggctgaatgagaggttcaaacttaaagatttgggggatttaaagtacttccttgggctagaaattgcaagatcaagcaagggcatatttgtgtctcaaagaccatatgctcttcaacttttagaggaacttggttacttgggaagtaaaccagtaagcacaccaatggagcccaatctaaaattgtcacaagatgagaaggacaagttggccgaccctacactttatagaaagatcattgggaagttgcaatatcttgtcattacaagacctgatatagcttattcagtcaataagcttagtcagttcttaactattccaagagctaaacaccttattgctgcacaaaggattctccaatacataaagtcaagtccaggacaaggtattttgcttgctgcaacttcagaaattcagctaagagcttttacggatgctgattgggctgcttgcattgacactaggagatctacaacaggtttttgcatttttcttggagattatatcatctcttggaaaagcaaaaagcaacacactgtgtcaagatcctcagctgaagttgaatatcgagcattggcaaacacaactagtgaagtgatttggttattgtcattgctgaaagagttgaagatagagcacaaagggcctgccttgatgtattgtgacaa

SEQ ID NO: 73427 - DNA, 502 bp, Cannabis sativa
ctgaccaagcgggtatggctacccgtcttggatataaattataattcaatatacttgacaacacgtccaccttaagtttttggattctaaaaaatgacttttcacattggcataaactgtttgaaatcaatcactttgggtaaaaaacaaaatacacctatatccatcatttccccattcaaaatccaaactgtgatatccacactcagtcatgcaatctataacaagaatagcaaaatcgatttggattgtgaagctaaaattcaatgtaccaatataacacgttttacaccatgataataatagatcaacttgaaacaaaccaaaaagaaaacatgattatcagctagcttcttcctaaatcccccatacattggtcttgcaactaaagctcaaattaaataacaatagtcaaaacagaacacaaaagttggaaatgaaatagagaagaaagagtaattacccatcagtgaaattaaaagacggatgagaatcagaagaa

SEQ ID NO: 73428 - DNA, 662 bp, Cannabis sativa
taatacaatccctaatacaattcagtaaaaattagagatttttgtaattagattgaaaaataaagtataaaaactttttctgttttaataatacttatttataagtaatgttcattaaaaagtatatctcttgaagaaaaatgaaaatgttgcatttatgattaggcacttaaattaattcactataattatggggcatttagtttaattaatatatattgattattattattggacactagtagtgtctagtattttttagatgtgtcactttgcgattggttagagatattacatacaaattattatattaaattatataaaatctgatacttaattacgcgataatattaatatataggaatgtgctaacttttaacatttctcatatatatatatatattatataatgaaataataattaattgagcagtactgtaaataattattaagattaattaagcatgcgaaataattaattaatcaaactataatatataattataactcgatcaccaccagcaacaaaacgaaatcattatgtctagacagctggaaatattttgtgataatatatatatatatgtatattttttttaaaataaaaggattttgtgatgaattgatatatagatagtgttaatttcaattattaaaaaaaa

SEQ ID NO: 73429 - DNA, 1426 bp, Cannabis sativa
  modified_base (1171)..(1179): a, c, t, g, unknown or other
gcctgttagattacattagaataaaagtatcagtatatttagaattatattggatttcaatgaatgtatgtttggcttaagcactatttgtcagtatcacatcggtacgactagattatgactagcgtaccgagtatagattgatattatgctcaatagtattatcgttcgaacgttcttgacttagtactgcctagggtgcggggagtaccttcgagggtgcaaggtagggttataactaggggtatgggcacctaatcgtaatcctgtttatatctatgttatgattatgcttttcttactgagtctgttgactcacaattattccttgcatgtgtaggttagggcaaagctagggttgaacagtggtgagtgcgagcagatgaagattgtacatgtcgaggcaattagacctagagcgtacgatctatgggacagcaggctgttgttaggctatttttatcctatgtttcgggtcacaaatagagttgtttttcgatgttataggacaaaattacgcttgtttctatgttttcaggtttcccatagttgtgggcgttcagggcttcaaaagtataataaaagagaagttgagccaagaaaaattgaaaaatcagggtttggttcacttctggctgcggtgaatttatttacgggcgtagccaagatttgccaaagaggtgcttccgagacgggctcagtagccgcggtgagccactccaccgccgcggcgagggaatccatggccgcggcgaggttccgtacggagtgaggctaattttgtcttttgaaacctcggataaaaataaaaagaaaattgcgagaaagagaagggaagaagcgaattttagacctaaaagcagtcaagaacggcaggaggagtagagtggcggcccagattcattccaccaacactttctttcttccttcctttaattttcttttatgttaaattttgttttaggaatggttatggatttgaacatgaactaaattcccaattagggaagatgatgaatgttgtttaaagttttccctagttaatgttaattgccattcctttcatcttgatttgtgaaattatccttatttgtgtttaattccatgtttaagcttgatcaccttttgcatgttctacgatctcaattcaaaatctaaaaagtgagaattnnnnnnnnnaaaattggataatctaggttttatgtgaaacgagagtatttgcgtgacctaagtgactattagattattgcttaatgctgatcatatatgtgattcttaattaagaaattaattagagaacatgtgattgagaacctaaaagatcctaaaagagttaggtgaaattgtataatctgtcattcacatcaaggaaaaggatagcaattaggcattaacaattgggtaaacaaatcaacaggattctctt

SEQ ID NO: 73430 - DNA, 650 bp, Cannabis sativa
tagagagtgcaataactcaaaggccacaagtatattgtctgtgatgagcctctgagaaatgaaagcactctgatattcagaaatcacttgtggaagaaaaggcttgagacgcattacaacggcttttgagacaagcttgtataggacattgcagagactgattggccgatattgcgtaatgtgagttggcttcttgaccttaggaattagtgtaatcagtgttgtattgaagatacttggatcagcaccattatttagcacatctaatacagccgcagtaacttgttggccaacaatatgccaataatttgtatagaacatcaccgataaaccatcaagaccaggactcttgtcatcactcatggttttgagtgcattgtgaacatcagtagctgtgaacgggctagatagtgaaatccttgaagcattatcaataacagatggaattttatctatgataatatccacagattccgaaaattaaatttgaatgttttgatagtttaactagatgaccattttcattaacgaaaataaatttaggacgaataatatttttttttaattactacaaaatataatagtaatttttgtttttattatgctttcaatttcaaatttcaatgattatcactacattgaatattatt

SEQ ID NO: 73431 - DNA, 572 bp, Cannabis sativa
aaattcttggaaaattgttattaatttaaattttacaaaacacataacctaaattgacctcaaacaaaatagataattaataatttttgtaaaatttaacatttactttttttctctaaaaaaggaaagccttcgtttattactaacatgttaaagtagtagttgttggaaactccacctaccaggtggtttagatggtaaactataatctaatcttaaactactgaagtgggttacctaaacttaaaactaaatatagaaaattagctgtagtataactttgatttaagtcccaaaaaaatatttaaagtagtttcaatatatatatatatatatttctatgaatagagagattttttcactttgagttattgtggtccttgactttctttgcggtgcaaatgcaataatgcatgtatggatgaagaattatacataaaataataacaatctaaaaacaacagtctaagaaaaaaatatccactaaataaataaataaataaaatcgaatgcatatgaaatttgaaattttatgctaacattagccagaaattttttcttaaactctaaat

SEQ ID NO: 73432 - DNA, 1262 bp, Cannabis sativa
tctttgtgagtaatacttgttcaaacgatacgtatacttgcatgttacaaaatatcacaacaaatatctctcattataaacataaaaattgaactatatttcacataaaatataactttgtaacctatttacatcaaattttaataatgtggtctaatgtacaattgcaaaacttaatacaaaatttagtatttaattaataattttattcaaaatataaaaaataataatttatcattaattttattatgtaaaataataaaaaaaaaagtataactatactaataaaatctttatatatataaaatgtagttatctaacggtttttgttgatttaacaaaatattttaaaaatataagaatattccgttaaatttaaaagtattaatagaattagttttataaatattaattaatttatattaattgaaatatatataaatattaatattatttattttaggttaattgaacttattacaattttagattactttaaatatatataaatattaatattatttgtaatatcaatatttttaatatagggagtatgttcaattttaatattttatattttatatttatttttctcaaaattttaaaactttaaatattacttttcaagaaaaataaaaaaattaataagtgattccctttaatttataaaattttaaaaatacacataacaaaatcaaaactaacaatataattaagtatacaacctagtactgtacttactaaaatatactagtaaaataataaaaatgacgtaaaattaagcaaaaaaaagaatatatttatggtgaactttggcataatccaaatttgtatcactttcgtcttttctttttttttttttttggctaactcagctacatttaagctattagcatctccattggaaattctttaaggatagaggtgtaaattgatgatttattgttaaaatataggtatcttctaaattacttgctccagtggtgtgccaacatctaaaagttaatttaaatttggctaatttgaatttttacctcctgaactttgatacgtaccaaatcatgtccctgaacttttaaggtcgttaaaaatgccccctgaactattgggattgttaaatttaaagacttttttccaattttagtaaaaagtgtaatatggataaaagtttaggagcataatttagtacatgtcaaagttcgagggacatgatttgttaaatatcaaagtctggggagcatggtttagttcataaacaatca

SEQ ID NO: 73433 - DNA, 1219 bp, Cannabis sativa
aatagttcaggggacatttttaacgaccttaaaagttcacggggcatgatttggtacatgtcaaagttcagggggcaaaagtcctaatagcctatatttttattaatattttataatttataatttatatttgtatttttttagtatattaatatctttttttttatgaattttaagttgtgttttagataataattaatttattgaataataattaatgtgtaatatttttacatagtttaatattgttgtatattaaaaaatttatcataaattttattttttttattaggaaatttcccgccccgttcctgcccccattaggggattctctgccccacacccgataggaaataagcaaggatgaaaattaaaattcttaacggggatgggaacgggaggagcactccccgtcaattcctcgccttgtgtgtatccctagttgcatctaaaaaaaatatcaaccacagaaaaattgaattttatgtatttatttatgaaaaaaaattattaaaattaatagtacttaacataatttaatataataattttgataaaatatttttgtagtctccaaaataaaattgagtagtttaatgcaatttgataataagtgagatacgtgtggcatgagtgttgctgctgagtattttgttagtgtgtgaagtgggctgatattattattggaaaagaaaatgtgatatcactgaatccctcccactatggacctggtcttcttgaatttcccacttcaaacaacttgaccaaagtactattaattaaaataaataaacaaataaagcagtccccaccaaataacaggtccactttgtatactagatctggttccaaaaatataaaataaaaaaaaaatttagaaagaacaaaatatgtatatattgtaagagtttgtttcgtacactctataagaattgtaacgtattaaataataaataatattatgtttagataaaacaatatgttgtattaattattacgagcaaaatttttaatacaatgtatggggttcgtttggtatatcgtattgtatcgtgttggattgtgttctgttgtattgtattagtattatttaatacaatacaatatttagtattgacttgtatgaattgaccgtgtaaaattataatatattttcaatacactcaacccaacaccaactacgtgtcggggttgcgggtcctaggtttgggttcgggtt

SEQ ID NO: 73434 - DNA, 923 bp, Cannabis sativa
ttatgttaaattacgtaagaggtggcaattaagaaaaataaatttgggaatatgaaactgtgagctcaactgaggaatgtagtggcataattcagaaaaagttgcctcaaaaggttaaagatccaggcagcttttcaattcattgtcagattggtggtttgaaatttcaaaagtctttatgtgatcttagggctagtataaatttaatgccactttcggtatttaaaaagttgggtattagtgaagtaaatcccacaagaattttgttacaattggtggatcagtcattcacttatccaacggaaataacagaagatgtgctaattaaagtggataagttagtattttaaacagattttatagtactagacatggaagaagacaagaatatgctattgatccttaggcgccctttcttagcaactgtgcgcttatagatgttcaaagaggtcacctaaccttaagtgctaataatgaagaagttaagttcgactacatttatatatcttctaatcaagccaatactaagaatacatgcaatatggttgagtcttgtaacttcaatgaagtcaattgagagactaatcataaagaaatgactaagaagcctcgagataaaatgaaaccacataagaagttttcaataggacaacaagtggtggtgattcattcaaaattcaaatccttgacaagtaacgttattttgaggtgaaaaaattcttttaaagttaatgaattacctccttgtggccttgtaagtattaaaagtgataaaggtgaaattctaaaggttcacaaacgtaaactaaaggtgtacatcgatgatagtggagcattgattaaacagctccgtaacgaagaatcttgaagcaacaataaagtctagctaaagacgataacaaagcgctttatgggaggcaatc

SEQ ID NO: 73435 - DNA, 7219 bp, Cannabis sativa
taaaaataaaagaaaaaaagtatagagtgtaattttctctaattgcgcccaggccactcccacagctcgagaagatgggccaatatcttagacaataggagaagcagctcttgcctctcggtatatttggtatatagataatagacccgatttaatccaacaattttcttagtaattagattttcgagagctgttttattctatgtgtttcgaaattcaatagtctataatttggtaaattatactctttgttcagatgatgagttatcatagttcgatgagattcttacgctgattgcggatatatgtaaattcatgagtgattctaattactatgtaaaaaaaaaaattgtaattagatttagaaaaatataaaagctttaaaaaatttaaagaacagtgaaacatgcaacaacatatgttctaaattcattattcattttaaagtttctttaaaatacactatttatattttatatttataaattactattgatcgctctaaatatattttattaattgtttagggttttaataattatttttgtatgtggatatgtgtatatatattaatattatgagcattgttattgggcaccactggtgcataacaccttttagacgtgtcctcttacgattggttagcgatactctttaaaaattattaaattaaactatataagactcaatacttaatttgaccaatatcgatataaatataagagagtattaggcaccactgatgtcttttatcatttctctaatattatatatttaaaatgaataaaatataatatatttttttaaaaaaaagtaagattttagtgatatatcttaaaaaaaagtgatgtatggtgtaatgtaaaaatgtgttctaaaatagaaaaaagtagagtttttgtaatgtattttaaatgatagagtagaaaaatttataggtattcctagattgtattaggcatgacaattacacccgcgggtacctgctcctaatggggcgggagcaggggtcgacttttaggggcgggtgggtatagatttaaatgttcatattcgagtcagaaacggggtggggcgagaaatagatacctgttccgatatgatatatgtatatatttaagttttaaaatcatagccactacaattaaaatgatttcatgatttagactttttgttgattagagagacatttcaattttcatgaaaatatttatggtgatgcatattaataatcacacttaattacttaaaaaatgacgcttaaccatttattttcaattactaattttgtatttactaactctatttactatatagtctatttcacttatgtttattgttttaatgagtttttatgattatttttttttttaattctcatttagacattattttttttttcaaaaatatatatgtaatgggcatcttatgagaattcttcctccatcgagtaatctccgctccgcctctgctttaatttaaaaaagtattgaggcaggtgtgggagtgaatttaggaagcgaatacgggggtagggaagcaatccccgctcctgccccaccccgtttacatcttagggcaactccaatgacaaatgttaaatttggtgttaaattaactcaaaattttaacactattttttttttttaatttcaatcacaatactaaaaattacactaaaaaatatgttttttattattatattattttattaaatataaataaacacaaataatatatataaaaaattacttatatattatttaaatattaaaaactaataaaaatctacttagtgtagtctatagtgtcacatagacactataatattatatgaggagtgttaccgtcaacctcttgttacaacctcttagttaaccttcacgcccgaaaatacctatcggaatatttatttttcaattttttttttttcacggaggtgttcgttatgcttacaacatcattcctgtaaaattttgaaaaatttcgaatagtttacagtgccgaaaatatgtttgaagttttttgaactcgcgtggtaaattggaatatcaagaactctgttttgagtactgtaaactattagggatgatactgtaactataatgaataccgctatgaaaacaatatttcggcatgtgatttcagatgtgaacgttgactaagaggttgtaataggagattgtaattatcactacctcaatcttatattgaagatagattttagagtaaaatcttaacaaatttaacattttaatgtgcaaccatactactgtatgcctctttctgtaataggattactgcacttggaattatattttttatttttaaagccatttattaatggcatggtaaaaaagcgcataaaattaagaacgctcagttgagttcgatttcttcatgcggcgaccacttcaccctctccgattctgcatcactgacttcccttcttccataacttccgtctccatgtcttctgtaatagtctacatgttcatgtataatttattatattatattatattgatttataaactcttgctgtgaaatcaattttatctttttttctcttatgtagttccgtggtggtcggaactacccgcggaggaatttttccgaccgtccgattgttgatggaagaagaggccattacatttctgatgactcccatttccggccaggccgagaggccaatctagggtcccaccacggtgagggcggaagcttcaggaatgactcggagtttccaatgccggatcgaccatctcatcccaatcaaaaccaccagtttcggccgcgcctctatcagaaccagcagcagtttcggccgcgtttctatcagaaccaccagcagtttcgacctccacccacgcattacaattatcaaaaccaagaatttcgtcggtctccggctccgccgtttcaacataatcaaccgcgcagggtagctaatcaataccagcctcggcctcggcctccagattttcgaaattgggagtttgcaaagacttcaccgccatcaactagtggtaactgagctctgttctgttattttgtgcttgttatggtagtggtgtttattttgtaatatatatttgatattatatgctaagcagagcggtttacaattctttcgtataatatactggctgactatctggctacggaccaccgaagcagactttactatcacattcctccatacatattggactggcaatggagaaagaaaaatatacttttcgagctgggtttgtggtctgctgatataatatgttttcaggttcccaaactgactatttctttacatattctcattcatcacttctttattatgctcttgcaccctcttttacgtttgtttcctttgacaaaatgaatcggtgtcttaaattcatgtaagtttgtggcttagtggctgataattctctcacattgccaaattttatcaagttgcacgtttttttttctttctatgtggttactgtcataacttctaagttccgacctgcaatggtttaattttgtttttaggaggtcgatagatttcaggaactagaagaggggttaaggcttcgaggatacactggcgtttggaaggtatgtcataaatatcattgctcttttgaagctatgtgataaggatcgagaacatctaaagtttcttcttcttcttgtaatgataataatgacaaagaaacaaaatttattttgttttctattctattttcaatggtgaagaacaattaaactatcactgtctttcctttttctatttccatcaaatgtagaataacctctgatgtgtattgagggttattcattacaagtttgtttatggccttgtagttgggtatgtgggtgtgggtgtgggtgtgggagaggggaggagggggttctattcatcattatgcaaaaaaaaaaaaaaaaaaatctcttagttataagatttattttaacactatcattttgatattgccctgcttataggtttgtgtcatagtaatggtttgctactttttaaggaagaatataataaatgctttggttataatatagaggcggactggtgttcctattgatgggtgcgcaatattttggcgttcatcaaggtaaattttatatttttaattgcatgtttttacatgtttgatgctaaatattcattctgtaatctatggctttcttacgaatagggagatgttgatttacctgattagtgggtggaatgttcatatttatgcgttttcttgatctagccatcaaagaatttccagtcctttatcgcagtgataaattttcacattctctgtgtggtttcaccaatttaattttgtagattatggtggtactagtagtgataaaccctattttccacaatatatctaaatgaacctctcgtatgtagaacaacgcagttaaggtagacattggtgttgctgaaccactaaacaaactttactgcaatgacatgtttttgatcatctatgcactaaaatagtgcaagagttacagtgtccattcattgtctgtgtactgctctcttaaaactgaataaggatgaagttaaggaatccttcgtgtattgctgtctagtttatgattgtttgtacctccattttagattcaagttgctgcatgaagaatctatagagttcaataagcttggacttcgagataatgttgctcagatttgtgtattggaggtaatttagaagttttctttgaaccaccacatgtttgttgctttaatttgaaaattttaagctaatcgtatagatgttacttttcttttgaacagttgctaagtcgaaattgtgatgaaaatgctgcaactctaccaacaaggtagttcttgatttcagtgatttgcttctggttcgtatattttatttgtaacttttattgatcgtagtttacattcatagtgaactttgtactctacgtacaaggtgatatatttttgggttggtggttacttataattgtgtttagcaattggcttggctaatttcttagggtgcttagagattgattaagctctgactgttcgattctgttgtttaactgtgttactaagtgttgatgtctatggattaagtgttgtcagaatctttatatttcaactttaaagttgtttgaacctttatatttaaatttccattacgatttattcgcttgagttactcgatggattagcataagccatattttgagcattttttattgggctattgatgactttttatttggagaaaccatgaagaagaatgattaattgttgtgaaatatataagtactaatatattaaaaatttatttaggagattttctctctgttttgtattcttacttatttgtgtgttcattccaaatcattttagtacttatcctcatctattcttgaactgcagctcaaccaattcaaataaagttgttgtttgtaacattcatgtgcttttcaaccctaaaagaggagatattaagcttggccaggtaattacttaattaattgtaacatatgcttttaagtcatagactggcagccttatctaattttaagctgattaatgctgctatttatgtagtttcttaatttgtaataaacatgattgtaattttcccttgaaactatacaagttcaacctatttatgtagttttctttaggtaacattttactgaatagtatatgtgtgaatgacaatgacaatgacaatgtatttagttttattttttatagcattggtgatttcactaagtctacatttgatttatttaataagatatgcctatgtatctttcaacaggtcaggacactccttgatagggctcatgcagtttcaaagatctggaatgatgctccagttgttctttgtggtgattttaattgtgtaccaaaggtttcctctcccactcaaattttggcctaggatgtgttttttatttatatttgcatatttcaatctaatctactattctgcccctattgacttttttttttaatggttgatgtcagagtccattatacaattatatctcagaacaaaaggtaaacttttgtcaacttatagattttatgtaagcaagtagtgaattatgaatgtaatcgacatcatacttctaatgataaatggatttatctggacatgaaatacaaataagattattattattttgcagatagatttgtcagtggttgataggaataagttgtctggacaagcttctgctgaaattcgtgaacaaagaacttataatcctaattatgggtaggttttgaacaggttaacttcttgatgtttaactttttgcatttggatgttggaaatagcccttataatgctgaactgaaagcttgccaaaaacaatttcagtgttatatctggtgatcattcgtttagagctccatcaatggtacaaggtaacaaagttgtgaagatgaacgaatcatcattagatatggagaaaccctttgatctagatagcagtccagagaatgtgccgttggtggagaactctcctcattctcataatgccttgagtgtgaatgataggtcaagcaccagcctaattcatgaaagaaacgatgccaaagtaggtgatgaagtgaaagaagaaactcaggagattcttgtgcatgatcctagtgatagcttacggaaagatatatgtacgccttactgtgaaggtggctcctcaactggtaatttgaatcatgagaaaacggataacatggtcaatgttttatttggtggaagttctgaatcgaccaattattcagaagaggaaagcaaaagctgtgataatgttttgcagtccttaccagatgtaacttgttcttccatggttgagactgcttcagaggcttactgccagactatctcttcttgtgatgataacagaacttctccacagaactctgaagatttattctctctgcaagtctctagtgacaggcagggtgactcctcaggcacaagtcaaacacacttggcattttcacctactaacattgaggtgcaagaaaaagttgacactttaactttggatgaaaccatgactggagaaggaaatatagctgaagatagtactacttttttatctgcattacacaactatgaagaagacttttcttgtgatcctgatcaattgctaagatcagacaccacaaactctaatcctttattaaacattggagtggaaggtgacttgtccacag

SEQ ID NO: 73436 - DNA, 1300 bp, Cannabis sativa
  modified_base (984)..(1001): a, c, t, g, unknown or other
  modified_base (1131)..(1143): a, c, t, g, unknown or other
tgtgaaattctttaccatcccgggaagaccaatgtggtggcagatgccctaagcaggaaggatctcaggaaagtatctagcatgattttgatttcaccctagctagcaactgatatggccggatcaggtattgagtttgttgtaggcaaatttaataatttgacattacaattcgatctgttagacagaattaaagcagcacaattaactgatttagaattggtgatgatccgagaagaggttttagatggtcaagctaaagattttatagtgtcaggcaatgagatgctactgttcaaaaccagagtgtgtgtaccgaacagtctagagcttagaaaggagattctcgaggtagctcataccactccttattcattgcatctagcactaccaaaatgtattagaatttaaaacccttctactggtggtgcgggatgaagaaagatgtggtagaatttgtatcctggtgcttgacttgtcagaagattaaggttgaacactagagacccccagggttattgcagcctcttactcttcttgagtggaaatgggagaatgtcaccatggactttgtggttgggtaaactagaacaacggggatgttgttaaatgccaaaatattacatattttatagtgtaaaaatacaaaataaaattaattatttaaaatattttcaagaaattaatgcaatatattattatgctgaaaatattttatgttgatttaatttcatctttgtcataatggagaaaaagaaataaaaagttagaagtaaatgcattgtttttatcaaaagaaatacaaattaattagattttaaataaatattttcattaaaattattgtgatatattttatgttgaaaatattttgtttggattaattttgtttgtgtttgaagaaaaaaatagcatttatggaaaggaaaagaaaagaaataaaaaaaaatggattctttatcacaaaatccttgataatgtgannnnnnnnnnnnnnnnnntactcctctagggatactagattctttacttttttgtaactacttcaatgttagtcaagaagtaacactagtagctaataaactattaatactattgccaaaaatatatagaactttccatagactgaannnnnnnnnnnnntgcaactttaacattcaatctcactggtagagttagagactccaaatcagtttttacactactccaaaatcactgctccacccccattgtaatcgccatctcataagtagactttctagcatcaaggcaagtctagaaacctgatttggtgtagtct

SEQ ID NO: 73437 - DNA, 825 bp, Cannabis sativa
aaaaaaaaatcgaaaaaaaatatatgtattttgattaattataacatatatatgtaattaataatgataaatacaaacataataataactttgacatgttggttaaattatcttaacacatttataaaagtgttcaaatcctagtaacaacatctttatttttaatatttagtttactttttgcaccctcccttttcacaaaataaaaaaaaagtatgcccccccacaattttagtgttggatccatcactcgttgccaaaaaaagaattcactccatagataataagtgtggtaagaaaggcaacacgatgatcaagctaaatatgaaaaaaatcttatgattaaatagatttcgatttacttcggtagttttgtaagtcttggcaattggcatccaaccttctttcttagattggattaaaaaaaaaaatttacgcaatgcacttaaaattagattttcttttaccttgttacggattctgttttttttttttctttttttgcaggtttttcatttattttttcttttttagaaaacattgttttcatattgatttttcgtagcagcaacgtgaaaacaacggaaaaacaacacttattttttgtaaaaaaaaaaaaaataataaaaataaaatccgtcaaatatatatataaaaaaattgtacattcataaaaatgtaaatttttttctttttgggtatttatgaaataatcccattaaaaatataaggtatttatgaattttttgatctatctattattgtgccttatgaatttttcaacccattaaaaatagtttcctaattattcactattcaatagtg

SEQ ID NO: 73438 - DNA, 586 bp, Cannabis sativa
ttttttttttcttttttcgagctagttttttatttttcagttgcaatttaaataaatttagatgatttattaataggtatttttttttttgagaaaaatgcttttattaaacagccacaagaggcttttctaccagcaaaagggtagcagcacagtcgggcaaatcaattgtccacagcttacaagactgagtcttacgactccaaataactaaggcattagccacaacattacaatctcgaggaacaaaggaaaactgaacgaaagtaaaatgtttccgcaacacaagaatttcccgaatcatcattccccagtccgaaagagaattaggagaagcttgcaatgccgaaacaactcccaagcagtccgctgcaacatgaacctttgttagagaccatttttgagccaataacagccccattcgaatggcataagcctcaaccaattgaatagaaaccatccctggtatgaaacgagactcagcaacaattaattgaccgttatggtctcttattattgcacttaaaccacacccaggattgtcttgaatcacagaggcatttgtgttaattaacacatggtcagg

SEQ ID NO: 73439 - DNA, 1123 bp, Cannabis sativa
tagtatagcggggcaatatagatacattgggaatatcgggaatagtcgagtcattttgctttatggtatttttgtcctttagtggacattagttgaaatgaataatctgattttatctgttaattatttagataaaaccaaaattttatctcattttattaaaaataagaaacttgagaaaaatacttttctctctgtctctctccaaacactccctctttcgaaccccatagaaccagctagggttctgattgttcttcatcaaatctagtgatttttagcaagttttaagtgtatccaagtcaaggtaagatcctagccatattacaatcattctactcttaccaacggtccaccaaccaatgtccaataagcttgcatgacctacctctctccactaatgtcaacaacccctgctcggaatcaaaaggtcttttttagttgaaatgtcatggcttaggtgaaaggtcgataaaaggtcatttaggctacattataccatacacacattttaatccaactaagcacccccataaatctacatttttacccaaagaaacttgtaagagattgagaacttccactttatgtgtgcctaccatcatctatttttacaaattgatacttttattttttttttattctttttcttttctttttggtatattcctattttttttcttttttttcgaagaataattaacaaaaatatatattttttttttctaatgatgagcaagacactttcacattacataacttcctcaatctccacttcaaaaatagtacccactcataacacttaatacccccaaacttatttaaaagcttatggaataataaggtacattgggaattaaagtaaataacggaaacaaattaggctcaatgaagtggttaaaattttgaaacaggctaaagctaaaccttgggtatactaaggatagaattttataggtatgcttgaaagcctcaatcagtccaaagaaaattgcctaaatcattttttaaacgacaatcatcaaggattttgttgcaatagagtaagtcacgcaagttttattccatgtcaagcaaacattccacaaacccaagtagaacaaaagtgatactatccaaaaat

SEQ ID NO: 73440 - DNA, 1228 bp, Cannabis sativa
  modified_base (692)..(692): a, c, t, g, unknown or other
acatattaattaagaaaataaaaatcactacaaaaaatattatttttgtcagtatatttttgcgttgacaaaagtttgatattgtactggtaaaatgaaatttacttttaatgtgttggcaaatcatcaacattgatattagaatttgacctttctcagcacgtaaatgtgctggtaaaaattagacttttgtcactgtaaatgtacactggtaaaactttgaccttttggccaacgcagtttgtaaaatctgctggtaaaagttacttttaccagcgcagtagcaaactacattggcaaaagggacatttcttgtagtgaacgtatcacccaattaataatattattaattgtttctcatgttatatttttaattattttcaaattattacaaggtttcatgtgaggaggaacttgttgaagcaatgaagatggcaacagaagaaaaaagagagtgtttgtgcttcattgaagtgttagtacacaaggatgacacaagcaaagagttggttgagttctgcttaagaacatcccttttcacttctcgagcacctacttatattttataatcttataaattaattacaataatatctattattataatttagtctcaataaattgaacttgtgctaaaaacttatcaatcataatttatataatatgcatggttatttatttatttatttttnttttttttgagataaaatgctattatattaaaccaagagtttaaatacaatagacataattggcgggggaatttcctccaaccatgaacatttagtttccgccgaaagagcatgtcttgccagcaagtgagcggcattattagcagatctataaaaatgagagatctgagctccagggaaattggaaactaaaagagaaatgtcgctaagcaaactatgaaaatcagaaactagcccatgcgaagaaagtaggcctttaactactgccagagaatccgtttcaatgaagtgcactggtagttgaaggtctttaatccactgtagactatacataagagctagaacttccataatgtcaggtttaaaatagcctttgaatggccaagacattgcagcaataatgtcaccagagctgttcctaagaacagcaccaaacccggacatttgtttccttgcgttgatagcagcgtctgtgttcaatttcagtcgacccgaaggagggtttagccaagaaagagccgagttacctgctgtag

SEQ ID NO: 73441 - DNA, 686 bp, Cannabis sativa
  modified_base (647)..(659): a, c, t, g, unknown or other
ttcaaatcgtgtgccttcccaaccacacgattggtaggtgattgcgcctgttccacatgcactttggcctataaaagccaccactttcccttcatttggttactttaagactttcaccaaatttcttcgaattttccagagagaaagaaaccctcgaaccagaaaaaccttcaaacaccataggtttcttattgaccctccttcgctattgtcagtcaacgttccatcgtcgatcaacaacaactcccagttctaaagctttatgtaagtttttcgcatcccgtactttattgttcgtgttcattgcatgcttcactattcatctgctttttctgggtttgatgtttgaagtttctgggaattttttgccttgagtttctgcgtaatacgttaggttcctcttttctggtgtttgagtttcttttattttgtgtactgtattttttccaagggcccatcttttcttcacgtaatgactttcaagggttcagagaagactttgtctttctcggcttttaccctctctttttttcttttctttgtttatttgtgatgtcaccatctgtgggattcttgcacccgacttttgtcaatgaaaacctttctaaggctttcttattgacaaccgtccggagggggcctctttnnnnnnnnnnnnngacccccattcccctttttgacttagg

SEQ ID NO: 73442 - DNA, 575 bp, Cannabis sativa
aaaaaaaaaaaaaataataagttaagtataaaaattaaaataaaaaagaatttcgccgctaattactcattttaaaaaggaacaaaaatcaaatgttagatttaattttattatttctataatttccattttatgattttagcaatgggatataataaatcatgttatatgataaaataagtatataaatatatcaataaagctataagttaaataggtgtataaacattatggcatccttatttattgttatttttcttttaaaaaaatgatatttattaggatacaaatacagctaatattgtcaagaaaatacaagccaaatggcacacaaagagaaaaaactatattcatttaaaaaaaactatcctaaaattaaaatatatataagtttaataaattattaaaaaaaatatctgagtgttccattttaattaattaaaagtgtaactatctatataagaataccggcctaaacactatagcaagactatgcgatcactatttgttatataaagtcataatttgcagcataaatacttaaatttaatttttaattgtaaataaatacttaa

SEQ ID NO: 73443 - DNA, 987 bp, Cannabis sativa
  modified_base (142)..(161): a, c, t, g, unknown or other
acacatttaattccaaacaaattttaaattatcaaatatcaaataaaatgccaacatttaatccaaaattgcatttcggggccgaaccccgttccgcccgaaatacccaattgtgacaacacatgcatactatataataatnnnnnnnnnnnnnnnnnnnnattaaattaatttcattattttactcttcccgagtcacaattactaaaatgcccatagctcaccaacggggtcttaacatataattaatcaaataaaatctcatatattgaactatataataatataattcctcaagtattcataattatctaattagggttttgctaatccatttcttaattctagcgaattagaattacccctaccttatagaaatttcgtcccgaaatttacctaaataactccggatatttctgttccatatacatctcaagttcccaggttgcctcttccactttactgttcctccacaatactttcaccagtgccactgtctgtcttgcttctcaagactttctctcttctatcgagtatctgcaccgattgttcctcatatgacaagtttggctggagttgcaatgcttcaaagctcaggatatgggacgagtctaaaacatactttcgaagcatagaaacgtggaacacatcatgtacagttgccagcgctgggggcatagccaacctgtacggcacttgtcctatcctcttagggatttcaaaaggtccaaagaacctcaggctaagcttccctttcttcccaaggcgtttaatgccttttatcggagataatcggagaaatacctgtccccgacctggaaatcaatatcccgacgcttttgatcagcataacttttctgtctactctaaacagtgagcagtcgcgctctaatcttctcaactgcgtcacttgttctctgaacagcttcgggacgcaagaactttctttcacccacttcatcctagtgaatgggcgatctacacttt

SEQ ID NO: 73444 - DNA, 713 bp, Cannabis sativa
tatatagcaataaatcaatgggatcaattataaggtcaagagcgatgatgatcagtggaagactcctgcacaacaactacatgtttgttgataaatcgagtaagacttctattcaattgccggagttttaaagctatatgtggatatacagcatatttctacacgtgcagtagtataaaagacaaatggtctctctgtcttaacccattcggtcctcaaagacattcctctaaacctttctgctacatatattagtgaacaatcagataaacaaccataactacttgcttctatgtttattgccaattcccctttaaaaagaaaaaaaaaaaaaagaaagttccacgttaaagtgagtcttctcaaaattgatattgataccaatgcaaatcaccaaactctctaaggcacatttcttaattatggtaaatcatgaacactatctgacattgttgtatatattcttatttgtttctttggtctgtagcaactattagaatgattcaagtaaactcttcttcaacattacattttttatgtttgcgtttttttcttttcttttcttgaggataccttatcagttatcctcttctttctcttgttcttttatttattttttgtggtcattgataaaagtgttgattcttattgaaaatgatgggacataaataggcatcatatcatattggctaatttctgtgccttatttttta

SEQ ID NO: 73445 - DNA, 979 bp, Cannabis sativa
  modified_base (189)..(189): a, c, t, g, unknown or other
ttatttggttgcatttaaaactattggaataccattccgatggaatgacatttccatcattttggtggaataactattcaattttgaaatagatcaggaaagaccattacaatgtaaaatttgaaaaaagttaataattttttttatgcattttaaattttagtatattcctattcttatattttcatncctcccaaccaaacgccacctaagagtttagataatttttagagtaatttactatataaatacgtaacttcaattattatttgtaaataaatatttaagtttaattttttatggtaataatacttaagttatattttaaaaacttatcttaccgttaaatatcaagttattatctacgagttatttatttattggtataattaaattaatttttaaataaaaaataaaaatttaataatatgaatcaatcataaattgtgacgtgactattgaattaaaattcaatagtcaagtacttacaaaaatttagaaatataatttaaatgaaatataatttaaaaatattattacgtaaatttaaatatttatttaaaattaaaaattaaatttatatatttatactacaaaaattactcgtataaatttttttatgagataatgtcattttggcggttaagaacttgaactctccaacacttgacattgcctttaatttcgaaaaatttacacccattactgcctttatcattttttttttcatttgtactgtcgcacggtcattttaacttttatactgttttttatttttaaatatttttggcagtatattacctttggtaagttttattaataatggttttatgactttaaagtgtcatgctggggttattccacgttttttttctctactgtatcatttttttccaaaacattttataataataataaaataggaaataatgagtagttgtgtctcccacatcaaaatttaaatttttttgttttatta

SEQ ID NO: 73446 - DNA, 786 bp, Cannabis sativa
aagtttcgagataacattacatagccttatggggcggtagtcttgcatacgttgaggcttctttatttttgggatgagcgtaataagcgttttgttcaaccttgaaggatcagccccttcattaagaacttgcagaaccacttttgtgaccaaatccccaactgtagaccaattttgctggtagaacatggcagacatgccatccatgcccaggacttttatccgaacccatagaatgcagagctgtctcaacttcttcaggttgaaagggtcgagtaagatctgagttcatgtctgtagttactgaggtaggaatagcattcaaagttgacagcagagcaggttcatcaatctcagaggccgagaatatgttagtgaaataagtattgatttctgcagccaagtcagatttagattgcaacttaaccccagaatcattaaagaggaatttgatcttgttgttggagttcctagccgaggcttttgcgtgaaagaattttgtgtttttatcgccaagatttagccaatcaacccgggatctttgttgccaatacacttcctcttgttccaataactcatctaggatagcctcagatcttcgaagttcggccatggaatcatcagaacggtcagcagagttattgagatcattgacaacagcttgtgtggaagcaattctttttttcatatgaccatattttgtttggtgccatgattgtagattagccgcacatatctctaaattgtgtaggatcatatcgattggttcaacaccattatgacagg

SEQ ID NO: 73447 - DNA, 512 bp, Cannabis sativa
tattattattattattttggtgagatagtcgttagaggtttttatttatttctttttgatatgataccatgttagaatttaggattaggtgaatgagattttatctcaaaacttatggctatgggaggagtagcccattcgtcttatatattctattatctttccacacattagtaatgtgggactctagcaatttaaaaaaaaaagtactttctatgagtttgggagaataggtaagtgttgtatcatttgtaatgtcaatatttatcaaagttggcgagtcggtgaatctatgccaaagatatccactagcttcgggttatgtatctcaatagtgttgtttgaacaatttattatcttcgtgtatccagaaggtccaagtggacatagagctaggctttgtgccctaaataaaagtctttttttcaattaatcttttatattcattaatcaattaagaagtagatttattttcaatatttatttgttgtgttatttggttcatatgatca

SEQ ID NO: 73448 - DNA, 1022 bp, Cannabis sativa
ttattttttttagtagctagtatatagttatttacaactacttaacaaattactaattttcattcatattcatgtatttttattactaactagtcacttatattagtaactagttagtattaaattaactagttactcataaattatataactagtaagtagctaaataaagaaatttgtaattttatagtatttctttatgttgtaggttgtgaaatcaatttgcaaggatccgacttatttggtgttgatcggtttctagctagctcgaggtatacatttactagcttttatgattaattaattatgaatgcttagtagagtttgaatatcctaaatattcatccgtagtgaagtaggttctacagtatattgtactgcgactggatcgatgggtggaataatgtgcatgttagatgagtttgaatattttaaatattcatctgtagtgaatgagaatgagaatattttaagagagatgagatttagggttattggtctgaaatttttagccaatattcgaaccagcttgtaccaaatttttcagccaatattattttttttaataaatttagccaataatattaaataggtataaaatacatcttttcccaacagttattaattgttgggtatattaagtattccccacagttataaactgttgggtatacttaatattcccacagttaaaaaccgttggaataaactattttttttaaaaaaaatatatatatttagtattgccaacggttatgcactgttggcaatagctatcccaacagtttttttgcttcagtgttaaaccgatgggaaaaacttccactaactttttccaacggttttcataattgaccctcttttaaaccgttgggaatagtccattttgtagtagtggtgaatacatgtatagcacttggatggatggtaaatttttatattgctaaatgttattgtgattattttatattgttttgaattgtgttttgttgttattaataggtttgaattttttggaaacg

SEQ ID NO: 73449 - DNA, 1048 bp, Cannabis sativa
  modified_base (485)..(486): a, c, t, g, unknown or other
  modified_base (843)..(843): a, c, t, g, unknown or other
aaattataaataaaaaattaaataatgtttttttctttctttttttcctttttttccttttctttttttttctttttctttcgtctaaaacgaaccctctctctctctatatcactctctctcgatctcctctctctttctcgttttcaatctagggttttcaaaacccccttgggcggccaccgcagttctccaccctcacgagccccgcctgacaccaaggaggagatcgacagatctccgatctcacgagccccacatcgacagaaccccacacctcacgagcctcgtgtttagtaagctctccctgtctctctgacccttgcaattttctttctccgttagttgcgattttatttctctttaatctgaagtctctttgatgtgtttagatctctggatgtggggttttgtttggatttgaaaaagaagtttcggtgatggttgtggtgtgtagatgtggttttggtggtgtgggcagttcnnttgtggtgggcagatgtggtggtctgggcggaggaaagggtggttgtggtgttggcgctggtctgggcagagtgatagagcgagagtgatggttgagagagagagagagagagagagaggtggggatcaagtgctgagagagagagggggatcgagtgttgagagggagaggagggttcgttttagatgaaagaaaaagaaaaaaaaaaagaaaaagaaacagaaagaaaggaaaaaaagaaagaaaaaaatatttaattttttatttataattttttttaatttaaattaatttttttattttttttaaataattgtttaggtggaccaataaaattgtgccacgtgtatattgtntccacgtggacaatccaacctgacagttaacagctaaatttggacggaagtgttaaattactaacagaacccgagtattgtaagtttacccgcagaaatttgggttgtgggggtttagtgaaaccaaaacgaaaatattggaagttttgccaccatttacccttaaattaaaattcacacattcagaaaaaaaaaaaaaaaaaaa

SEQ ID NO: 73450 - DNA, 1102 bp, Cannabis sativa
  modified_base (1057)..(1065): a, c, t, g, unknown or other
ggtgtttggatcctaccaagttgtttccaactcactatctttcagtattatgtaccatgaagacatgaagcatccaagtccaggcctcgggagctgaaatacatgaatcagcacctcagaatcaactcgggtgcttagggtttcacctagcacccaagttgacaacctaactagggtttcagttttcgagaccatgttagtgcaaatgggtcaaactttacattgagacatgaaatagaagtaccacagatatatttgaggcatcagaatcatattcagagaattttcatttttgagcacccagtgcccggggacctagtgctcaggttgacaatttgtcaatttgggccacttccaagcatcaaattgaaaatttgactcgtgcatcttctttttcttcatcaaaaatgggaaacaagagtttttggaaaagaaatagaccaacttggaggccaaaataagggagcagcgctcagattgacattatgtcaacctgggccaattctaaggagttttttcgaaaagtcttctgaccatattatcagttttcgtcaaagattaagattcaactactttcaggaagcaaatagaacttctaagaggcctaaaactagacccatcgcacaggttgatacctggtactgggcccaacatctaggttgacatattgtcaaccttggctgtttccaataatgtttccaaaaaagtgttcttggcattttttttgttttcggaaataacaaagttataagtgaactcaaggataaaatgtcagctacaagagtatgaaaactgagcccaatgccgaggttgaattggtgctaggcccaacgccgaagttgacaatcaacctggtgcgctagtttttatcactcaaatgcaaattctgctccgacaattctttcaaaaatggtaaaaaaaaaaaaataggataagagaccttgtcttcaagttcaataaccttggaagtgtcaaaacatcatcccagaagcttgaaaagaagcccctagcgcccaggttgacatatggcctagtgcgtgttggaaattattttacnnnnnnnnnagatctactcacaagtatgttgtagatcggaagagcg

SEQ ID NO: 73451 - DNA, 768 bp, Cannabis sativa
  modified_base (351)..(364): a, c, t, g, unknown or other
ttttataaatttactcttttataatttttgcatcatgattcctaattttttgaaactgttaaaatttattgttagctaaaaaaaatattaaactttagagaagttgtactgttaacctctaattataatctcttactacaatttttttttttttttatttttagtcacaataaatttacacaaatattgtatattaaaatatcttgttgtgtcttctaattgtttagaatctcgtaaaaaacggttagtaaacaattattattattattttttattattattagtaattttatttttattattatattattttattattttatttttattttattatttttattattattnnnnnnnnnnnnnntattattattattattttgaaatagtaaacaaatagttattatgatgacagttatttgacacattttattgaaaattaattcccacatcttggaattttttatttattttttcgaaattaatatttaatttatatcatcaatttttctattgaaattataatgtatacataattttattatatatgtcacgcctttttttttttaatatatagtgaattactgtatatgtcatttgcagtcaaaatcacagttattattacttatatttgttcaattaattagtctttaaaaaatattattttaatctttttttaatatataacatgatatttattttgaattacttaatcaaagtatattttgtatattgttacatgacttagttattattttattactttta

SEQ ID NO: 73452 - DNA, 906 bp, Cannabis sativa
caccaatatttcattaattaaagttagacatcatacgtatacctaaataatctgaattatagaacataaaaataattctcgataaataatgaggcttttcattttttattatggccctcaaaaaatgtgtgctctaaatacttgttatacccaaaattcggctagtacatcagaggaaaacacgtgtcaaaccgagaagaatacgaatcaacaaatataatgataattatatttgaaattgaataactcattaaatgcaaaatagacagagtatatttacaacttgattaactgaatagtcttaggcgagataaagatatacaaattgttgtctcgtgcgttaacgagaaaccatgcagcttcaagatgtgtaaaacgaggcattaatctcgctacgtattacgaaatgaagacgatgcatattgactggtaagacacttagtgtataattcacattatacaaactaagtataacagtcgagtaaatctgaatagctaatagcaaggtacccgtctcgctataggaagacgcactcatggaatcttcgttaatcagctccagatatctttcaatagagttcacagctctgtcgagtcagctctttcagatagaagctgacatacaaatgatgttgactgttgatattcaccctgtcaccaagaactgcgattttagatggagtagtatgtcttcagtgcagaaacgacgagacctatattatgaaccttggaaagacatgtgaaaagcttcagcttgctaccaaggctattgttgctacgttcccagctagatgtcccagaacgatacggttacaacatatttagtgcacatttacattgacctgataaaagcagacatatcacaactgtgtgatttttaaatattaaccgtatttattttacgtg

SEQ ID NO: 73453 - DNA, 1313 bp, Cannabis sativa
aagtttggcaaccttagagactcgatcggaagctaaaaatgtcataatggttttagttagtaatcttagtgagattattaagataaattgattttagacttactggggtattttagggtattcagggttgactaaaatgccttagggttagaattttccaaagggctaaaaaaggtaaaataattaatttttcttaattaaataatttattttatttctttttctctttttttccttcttttgattttagaaggtgttagatgttttaaattagatgataaggtaagaaaagtcaaacaaacaaaaagcaaaaccctttctttctcacgacccaaaagaaaaaccaacaagaatatgagcttcctttgatcatctctccacaataagccttaaaaattctttttaatccaatcttgaaggggaaaaggcttaaggtaaaatctctagcttttcttctttgttttccatgaaaattataggttttagtggttggactttcattctatagctactgtgatataagaagggttttggttttctttctaggatagaatagaagtattttggatgttcttttgatagttttgcaattgttgttgaggagagagtcaagcttgagttttcaaactcaatgtttaagctctcatggcatctttcatgttagggcatgattttgatttttatcacgtgaagattgttataattgttggaagttattttaccaggatctagatttactaacatctattgtagcaccctactagtttaggcatgttatcgtaattttatattagttgtgcagttcgtttcaattgtgttgttggagtcagacgtggagtgttgtttttggctgctcctattgctaggaaatatcaattagagtcacttgggctcttatcattgtaatgatatgaggtctatttaaattcaaaatggcccatgtgtacaagacctgatcaaagggcaaaacaaagggttattataagggctatttacaaaaatatgggaaaaataaagatatgttttgatatatatatggcataaaaacttaattatattaaatataacatttttttaaaaaaacttacaaatatgggaaaaaatcatgaggaatgccataaaaaactttaaatttgtgtttcctttttattatttttttctttttttaaaaaataaaatactaaattaaataaaaaatgatcttgactgtagaggtttttttttacaaaaattaaacttgtttttttatttaaactactacttgttttttttctttatttttttgttaaaaactaattatttcaataaaagca

SEQ ID NO: 73454 - DNA, 1196 bp, Cannabis sativa
acactgcaaaaatgttgtgcggtgcgatttaggcgatttacactattatcattatcaaacattaaaataaaaattaaaaaattagtctaataaattttcaacaattaaacaagaaaaaaattatcttatcaaacttttagcgtcataaaatatatgctaatgaagttattgtatcgtttctaaaaaattatataatatacatatattacatattatatatatatatatgagtatgcttttaatgagtattacttatgtatgggtattttattattgaccattggatctaatctaatagttgatatttataatcattaattaaatattaaaaaattaatatttcttatttttccatttctttttttgattttttttattccttctatattcctaaaataaataaaactattaatagaaaaaaaaatttatatatggaattgttatttaattaaaaagtaaaaaaaaactaagaaactatttttaattaaaaaaaaaatcattttaaagattaaaaagataaaaatatatatatatttatctttttataaaatttgctcagaattctaagttgtgttactgagaacaaaaaaaataattttaagctttaagctgtaatgcatatggaatgtacaagatttttgtaaacctataatctttaatttcataataattaacaatcatttatatgttattatttttttcaaaatacttgggcttatcaaaacttataagaacaaaaccaatgaagaaaattttaaccagaaaaaaaaaaacgaagaaaaaaagtgtcataaatattactgaataatggcaattgctaacacaagaatttcaacacaaaaaattatatcagacccctagattatcatcttccaatcctaagtatatataaataatgaacaacacctcattagttatactatgagaatgatggatggtaatgtcaaaaaaatcattagttgataataataattatctaacaatgatacccaagtaagaactaagaagtattgtagcgtttcatttttaagagtatgaataatattaagataattggattcttattttcctaataaaaaaaataaattaatatacatgtaagtgatccttagttttacaataataaatattaataacctcacaatttcataaaataataaagtagtaatttcaattagtttctaaaaataatttat

SEQ ID NO: 73455 - DNA, 629 bp, Cannabis sativa
aagattgtaaaagtttaaacacgagatcccgacttatgtaaacatatttatatatatgttcataaattttaatagtttaaatcaaaaattcaatttggtacgattttttaggaaaatcctttgattagcaaaggtggcacattaattagaaaatcactatagcgcgcttaagtatcaggcgttaaatctctccttcccaaaaatgttcgatcctccttctccctaggttctatccctaattataggagttctaaaaatgacagttattctctttttatcttatctaagtaatcattcatgaaacgtgaacaatcctcacgtttcatattcataacatgtggataaaaccaaataactgctacttaccatttttttccttattcaggagtaataactgctggtcgccttcttcaagattctagttaagatgtttttccttgctgttgcctttcatggtaacttttgaactttgtctttcaacatactcacgagtgtatatgtaggtcaatgagctatgagttcttaaagaactcattatctactctttattagagatacaaatttaaactattacatcttagaagactcctatcttttatcattaggtcatacactgttattctcatggt

SEQ ID NO: 73456 - DNA, 724 bp, Cannabis sativa
aaaaaagatcgtattttatgtattttatgtaaataaaatttaaaatactataaaaatattataaattcactgtatttttgtaaatttttttttttttaatatttttgtgttttttttttttttgaaattatcttgcttctttttaagaaaaaaatttgaccttaattatatttgatatatattttcaaatatactccaattttaatcaaaatatcatggcaatgaccaatatatatattgataaaatttaaaagcttaattaagaattattattatgtatagtatatatagctctagaatatgggcagcaagtaattaactattaattataaaaacctaagcttatatttgtcgagtttattagtcaacttataatttcgtcattgtgtgggttgttgaggggacatgatgatcatagtgttcaataaattttataataattatattaattccattactataaaaatagtttttctcggtgtttttaaacagttgtttaaagtattttcatcggtttctataactactgtcgcctatataaccgtcgctaatgtggacttcctgatggttttaaactgtcgcctataacatggtataggcgacggttttaaaccgtgccttacatatatggattagttgtaaaagtagccgtctctactgatggaatccaaaaaatattattttattgttgacgtggcacggtcatcaacttgccatagcaagt

SEQ ID NO: 73457 - DNA, 801 bp, Cannabis sativa
tggtaaagtacaagacaataaggttgatgctatccttagaggcacatctggagtttgaagttgaacagcttgatgtcaagattacttttctaaatgggttcctggatgaagagatttacatgaagcaaccatggtttcaagtggaagggaaaggagttaaattagtgttcaagcttaatagatcattgtatggtttgaaacagttcccttgacaatagaataagagaattgatacgtacatgcatcaaattggatttaaacgatcgacatacaatcactgcttatattttaagaatatggagcaatctatagccgtgttcttattgctctatgtggatgatatgctcatcatgagcaaagataaatttgtgatcaaaagtatcaaagtcaaactcaaaagagaatttaaaatgaaaagaacttgaatcagtatatattttggtatttttaatactttatttgctcttatttttcatagttctcgatttgataattttgtcattgctaattatttgattgtttaaaattttattgatttgattctacaccttcaatcgtaattttctcacaccaatattaattggtttctcatatgctaattggatgtgttgtattagagtatatgggtactagcactactatcaatacaagaaccccaatctattgattgttctttggagaaacactaatattggtagccagcaattcattgggttcttgtattagtagtagtgaatacgtaccaacatactctaatttatatatatatatagaacacttcttaatgggtattacccatga

SEQ ID NO: 73458 - DNA, 716 bp, Cannabis sativa
attttaatttattcaaaatattagacataaaccaatacaaaaatttaaatttaattgcttgaaccaaaatatataataatatagtactatgtataaaatactacatataatctattttaaaaattatatatcatatatataaaatcatgacaatacaaaacatatacacaataatcaaaagagcatatctaatagtatatatatatatatatataaaagttgatatatgccattgaatctaaagccccaacaaaaactgcagtagcagaattattaaaaataaatataaaccataatttttaaaatccttaaatttcataaataaaatcatcagttcttcaattaattcaacaaaagtgactttcatatcacttgttaggatttataaaacactcaagaaatatatatcacagatctagacatattttctgaaagtgttttaatatagaaaaccctaaatcataaatctatatagcctttgctaaattaaaaaagaagaagatgataaaagatgagcggaagcactaacctgaagccattgttggagattgtagagaaagttttttgatcttccaagaatacactaattttctaaagtattttctttgatggggaaggagagaatacataaatcttagtgtttcttagggaccactacctatttataggctcattatataatgagttttgggtatttataatttggcccctcaaca

SEQ ID NO: 73459 - DNA, 1786 bp, Cannabis sativa
tatatatttttttttttgcaaaatttaatttatttttaatgatattgtagtgtgtatagctaaaaagtattataaaatatccttattacattttgaattaaaattttaattaaaaaatattcataaatatttttatagttttttaattttaatgtttgttgacctcgtcgcttttggccagccaacgacagtggagtcttgattgtaagcaacaagtagtaaaaggtatatgtaatataataaagtaaataaggacacaagaattttatagaggttcagccccaagcagttcgataatagcctaactctcttggtttgtattgacttaagaacgaggaatataataatccctttccttagagctcttacaacgataactctgaatatgaattcttagataagttttttcaaccctttgcccagtgagaatgaatcactatttatagggctataagctttgagggaagagttttcctccggattacaattgatataattggaaagcttgccatatctctgtgatctgattccaaaattatagggatttcttctgtgacttatgatgtgaaagttgaaactgctaagtgttggcgtgctgttcagattgctcactgcccagttaagaaggctttatccgagggaatatatgtgttgctctgttcggcatatctgctgcgagcaggtatataaagttgattccacgtgtcaccatcgtgtgatgccacctcagagtgcaaaaattgggataacatttgcccccaagcctttacgggactttcgaagttggtgtagacttcatccaagttgcccttgcatttgaatgggtgacatgtgtaaggcgcgtctgttcacgattcgatgtgtgactgatcaggcgtctctttagttttcggctaattaatgttctgactcaattaataccttgaaacccagttttctctcaccacgtttgacagttacacatgattatatttgatttcccaatatttgctttttgagggaatcgatgcgtctaaggcatttgaaatgattgcatttttcatctttccacctataaatagggctaaacatcattcacaaatttacttttaccaatttctccattaaacaaactcagagaaaaaaaaaggtttttacttcaagtctgtcgtgagatctttaccaaaagcatccgagaagcttcatttggactgaactcagacgtcaaacagtgagtaagttttcgatttcttcctcattttactttgcatgtttaatttctgggtttcatacatgtgttcttgactttgctgtagaagatagatagaaaatctaggtttaaaacttcgcgattttctttgtaataatctgtaaaacttcacggttcatgacgttggcctttgattgcacattgtctgtctttcaccttgcttattcaaagcttcgtgaaatttagccctaaacccaaaaatttcaaacttctaggttttgacttatttttaaatgttttcattcttttaatctgttgagtactcctggtcggcatatttacccatttattgttcgatatcctggccaaaaactcatctcgtgtgttgtcttttgtaggtgaaccctggtgagttttggggaagcgaacacctaattgaccaggacctgcttcaacttctgtacgaggatcaccctcgtctccgtgctagtccgtcctctcaagtgacggactttccgattcgagctttgaagattgggaagtgagtagtgaacgctcttctactttagaacccgaagtgcaacaccactattactc

SEQ ID NO: 73460 - DNA, 977 bp, Cannabis sativa
cgattcattcagttcctgattcaattcccacaccaaataaaactcaggaaaattgatttattaaaaaaaaaaacctaaagaagggttagacaaaaacctcgatctttttcgcagcgggaataatgttctccttcttctgtagaaaattgaaacgaaaagaaaagaaaaccccatcaaattgaatatagagaacgcagaaattataagcttgaaaataagagaggaattaaaatggagcagaggttacgggggagagtggagcggagaccggaggaggaatgggggaatcagagttggccattggttcggatcggttggaatgaaagatgagattttaaattcttgtttttaggttgagagagttttgaaaagagttaaagaggaaataattaatgaacagttgagggagcttgttgaaagagcaataatttccacaaatgtgttttgaatttttgaggtgtaaactcaaactcttgttttgtttgtttgtgtttgggcgggattaatactaataggcctataattgtatttttgtagtgtagttgttgttgggttcggatctcatttttgtatgagggtatttttgtaattttcttttgttgtttttgtatatttataagattatcttatttttaaaccacacactaaatttactcaaaatattacatttataatgataggatgtattgcatattttacatttataccggctaatcttagttcttgaatggttaagaaagttgagcctctaacataacaatgtcaatgtcgacactaggaatgatcttgaatgtcttaaaaaagcttagtaccctcagtttcatattgtgagtgcgtttagacatgtctcacttaatgttgcatatgtcagtttactccaagaaaccacttggggctagctcaagtagccatagatgggtgtgtgagtgttggaggtcctgggttcgagtcccagataaaacatgatgtaatatata

SEQ ID NO: 73461 - DNA, 664 bp, Cannabis sativa
cgatattaccaaatgtaaatatgaccataataaataaatataagcatcctactaaagcataatgctccaccggtcttcttcaaatttatgtcaaaccatatcaatcaggcaatcgaaccataataaacaatcaattaaaaccatttagccaactccaacttacatcacttaatgaaaatataaggcacaatcatacttttcctattttatttaaggtcttctcgtatgatcaagctttgttagataaataaatcaattaattcaataccaacaacaacaaattaggttgaacacaaaatcacaattcacagcatggcattcaaagaggatcgtaaaacaaatatagctatgttcccaaaagcaagtaaaatgtctcaagttcagctaattgaatcctacccaaatcccaaaaaaaagataaatagaaaacagtaacaaaaaaataaataaaaaataataagaaacaaaatttatacagctcatcgagtatataattaaactacaaaatagttaaaaaaaaaaaaaaatcgtaatttttttctttttattttacactataaaatatattttttttatttttacaaagattcacataacaacatatatttattggcggtcaacttaaatagcaactaaaatctaaataataacctacataaaaact

SEQ ID NO: 73462 - DNA, 1409 bp, Cannabis sativa
tactattatattattttttttcttcatggaatttgttattataagttattctttcaatttttttttttttcttttttgagttagtgatagttaaaaaaataaccatatactgaaaaataactaacaactataaaaataacaaaacaaatgcacatatatagaacaaaaacattgtctggaataaactgaaatatagtcgataaaaaatatacataaaccaaacaacaaatgtacaaaaaaaaaataaaaaaaaaatacacaaaaaacagaaaaataattaaaaaaaacaactataaaacacctaaacaataataatataaaaataattgtataataattataaaataacaaaaagtaactataaattagagaaataacaatatatcatcttaataaaatatgcaaatcattcataattaactctgaataaattacaacacatctaaaaaaatatactatttttattaattatgtaaaagatagaaaaatatacgaggagtgctcttaatttttttgtaagagaaagaaaaagtgttaaaaaaaactagatataaaaatatacattacggatgcactcttaatgagtattacccataaatgaaaaaaaattagaaaaaattgagttttatgcttaatttttgtatctaattagaaaaatctctcacttttacatcatatgagttggcattattccatcagttaaaaaaataattaaaaaaattagcgaaaaaaaagataagtaaattaaattttgtttgacttaaatatttttatatgaacatattttttatatggagtaaaaagagatattttttgatatttttttaattaagttgttaaacaaagtatagagattcacatttttcttttattatttattattagaacaaaatttgatgatttaataattttagaattaatatttataattaaatttgtttagtaacaattcataagtaatacctattaagaagaaaaaatttagtttgagaaaaaaaaataataaaagatagataatacgaaaaacaaaaaaaaaacattaaaaagagaaataaagagagaagagaaagaaataaaaaaaaatcactaagtgacttaaaattaaagttagccaaagctaactaaaaataatacaaagaagagaaaaatattttttcttgaagcgtgaaaaataataaaaaaaaaattaaaaataggaaaaatataaatgtaaaaattttctttaaaagtttaaatataaagttttataaaaaaaaaaaaattagtatttagtataaatttacttattgtataatataatattagattaaataaaggaaaatttacactccagtactttaattgcattctttttacaaaaatatggtgctgtcatttatatatgataatgtaccgttttttataccgtt

SEQ ID NO: 73463 - DNA, 727 bp, Cannabis sativa
tccctgtgggatcgacctcacctgtgtgagttttactacttgattgcgtatacttgcatagtgtttataaatttatagcaacaccaaatccggcatacacaaacctaaagcctacaatgctacttcctaccccttacccgagtctcttttaccaaaagaacccacttccctcaaacaagcactagcagatcccaagtggtatgcatccatgcaaacagagaacacagccctcatcaagaataacacatggaaacttgtcctctacgacccttccatgacacttatagggaataaatgggttcataggatcaagctcaaggctgatggttcattagacaaatacaagtcgaggttggttgccaaaggctattctcaaactcccggcattgacttcaaagagacattcagtcccgttgttaaaccagccacagtgcgaattttactcacccttgctgtatcattcagttggccgattactcaactcgatgtatctaatgcattcttaaatggtactcttgaagagactgtctacatgcctcaacccccaggttttgttgatcccaaatatcctcaccatgtctgccaacttaccaaggccttgtatggccttaaacaagctccacgagcttggaatcaaaatcttaaaagcactctgtacagcaaaggttttcaactctcaaaagctgacaattccttatttattaaaggttctggtgtgaatctcatc

SEQ ID NO: 73464 - DNA, 503 bp, Cannabis sativa
ccttagttcatacccagaataatacaaacaagattcaaatgagctttccaagtttagaagaggggcagctctggactaagacgggccaggcctatgcctagaacccacttgcctatgcctagaacccactttgcctagggcccccaaaaaaatatttttaaaatatgtatatttttttactaatttttgaaaatattatatatttcttcaatgagggcccaatgatttttttttattcctaaagtctatagttacttatggtcactcctggtgtaagaaaaattgtatagagattttagtggtgtgtgtgctatgtgaattttttttgtatcctcactttgtgtgatggacctatatttacaaatttttcatatcaattataataaatgacaataaattattagttaaagatcataacaaataatgtggagggaatgaaggatccttagggattaggagctaatttaccgaatttggaccgtatatgctctcgtcagtcatcg

SEQ ID NO: 73465 - DNA, 1147 bp, Cannabis sativa
attatggtatcagaggggaaagatatactttccctgatcgatcctgcttactccggtctccttctccggcttccttctccggtgcagacgtcgcgtttctttgttccctccgacgttctaatcactgcgttcatccctctgttttctgtgtttcattcatgtcgaatgaaactccttccgtaattcaaatggaaagtgaagatcccaattcaaagtctgctgatagtccttctgcttctacaggacatggaaatcaagatcttcaattcattaataacaaaaacccactggaagatccatcaaacccgtattacctgcaccatggcgacaacccaggtaacgttcttgtctctcaacttctcactggacaagataactatgcttcttggagtagagctatgcaactttctatatctgtcaaaaataaaattgggttcttggatggaagtattcctaaaccaatgacctcagattatactttgtataatgcttgggtgaggaacaataatattgtcatttcttggatattaaactcggtttcaaaagaaatttcttccagtattctatatgatgaatctgctgccaacatatggaatgatctaaaaactcggtttcaacaaagaaatggtcctcacatctataatcttagaaagaatctaatgaatttaaggcaggaagcacaaacaatcagcatatacttcaccaagttaaagaccatttgggaagaattagccaactataagccaaattgcacctgcaatgggtgctcctgtggtggagtaaagaaaatgcaagaatacaatcacatggagtatataatgtccttcctcatgggactctcggacaacttctctcaagttcgtgggagcatccttttaatggatcctcttcctgatgtaaatcgggtttttcaccttgtcactcaggaagaaaatcagagatcaaccatcactgtaggaaacgatcccacaaccagtcatgcctttgcttttcaaggagataaagggaacaagaatgataatccaaaccagaaaaatcaaaatcccaagaagggaagacccttctgcacacattgtaacatccatggacataccattgaaagatgttacaaaatccatggctatcctcctggtttcaagacaaacaa

SEQ ID NO: 73466 - DNA, 801 bp, Cannabis sativa
attattaattataatattgcatattggtgaagatttatttaatttcaatatagagttaattatgctatatgtgaatttctcgtttactggtgattgtgttcggaagcggtgaaaagcaacgttgggcctttagagagtcgtattttgtatgttatagaattttattaatagtggggcattgttgttgggtattgaaaatactggtatttgatggggtttgggaattgactatgggcagcaaaaattgtgagttttgctgatttttattcaagggttttatcaaggatttagagcttcaactcaaggtataattctctagtattcttttcattattttctttgggttcaagttaaattttggttgaatattgtgaattaggttgatgtgattatttggggatgtgagattttatattttggagttaggattgatttacttatgttattttgagccgagatagtggcttatggtgagaattgttcaagatagagtttagagaacctaagttgggtcactaatggtgtttttaattgttgagttgttggctgagttttattgcttgatttgagtttattggagtgtatataggtattttggagagtattataaagtttgggtgaaatttgtggtcctggggacatttttcgagttctaagtacagaaccggtcgaccagttctaagggacctataccaaccggtcgactggttggtacccaggaattggactttcggttgggaaccggtctgccggttgggtcattttctagaaccctacctttctctatttttgtgttatttg

SEQ ID NO: 73467 - DNA, 760 bp, Cannabis sativa
caaaagcttacctgaatgaagaaatgataagacaactatcacatcattcttaatgagatcccagttgtcttgaaagaaatagctactaaaaccatctggtccgggagcttttcatctaggtatgctaaataaggcttctttgacatcttcaactgtgtatggcttaattaaaaaatcttgccattgttgtgttattttcggcccctgcagcattattttcaatcttactggttttctgctagtcatttttgttcccaatagattagtgtagaactttaagaaagcttcactaatctgactaggttcctccacccgattcccttccatagaacaaatagaaaagactttgttctttatccttctagctcgtaagctagcatgaaaaatggttgtattgtcatccccttctttcatccattgaactttagatttctgatgaaggaaagaaaggtaagctttgtgtgtttccccatctttcttcctagctacctcttcttgtgagcataatctctcatttagtggctgttgttggaaagcaatctagcttgtaatcatgtcattatatgcctgtaaatctgcagcaccaatatctcctactctttctttgttccacactttaaggcccttctttagaatcttgagcttgctcactagttgatacatcggtgtcccccctatttgctactcccaacttctttctactagctccagaaatcctcccatattttgccacatccgaaaatatttgaacggttgtctc

SEQ ID NO: 73468 - DNA, 850 bp, Cannabis sativa
  modified_base (255)..(270): a, c, t, g, unknown or other
  modified_base (560)..(576): a, c, t, g, unknown or other
aattttcgactttaatctaattttcaaaattgaaaatttttaaaatatctacatttaaaataaatgtatttcgaattttatgtggaaaatgattattaaaataaaatagaatacattctgaaaattattctaatataagttgatgtgaaattgaaaaaatttccaatttaaatataatgttctatttaattaaatttattaaaatagaaaaaataattaattatcttgaataaaattaacttaattattaattcnnnnnnnnnnnnnnnnaaaatattttaatttaagttggtctagaattattaaaaaattaatttttaacttaaatttattttactatctaattaaatttttgaaatggaaataaataattaagtatcttgaataaaatcaacttaattattacttctaatttaagatctaagaaaaataaactaatttaagttggtccaaaattaattaacatttcaacttaaatataattttctactaaattaaatattagaaaatgtaaattagttactagaaatcactatttagaatcttttctttaaactaannnnnnnnnnnnnnnnnaattttaaaataatccaatgaaaacgtaatttcatttattttaaaaataattatgttgctaattcaattttatttaggttaaactagtataattagcctaatacaattatttaaataaggcaaaaggcaaataagctttcagctttcacaattgggattgttcatgtgagggagggctgggtccagtatgtcgtacccaataccaatggtcccctaactctcacacaaggcccaaagtaaggctaagttcattaaataactgttattcattgaa

SEQ ID NO: 73469 - DNA, 613 bp, Cannabis sativa
cttacccaatattaattaatgagatatagttatatatggatggtttcgtatataactagccaaacctcttagttgttaaggaatttgcttatgatattattattcccacataatctcttttcctaccctagctttttaattctcctcttcaccaagtaaagaatccaagtaaaagtaatccttcttgcatatttttattatatagttgctttttaaagaacaccaattcacatgtataaaataaattatgatctcgattttattatactaagagcaaaattcgatcagatatgatcgatattttctagatcagtcgattttgattaatattttaagcacatagtaaccgaccattagttattaagaaacttgtttataataataataattattattattatttcacttttttgatggtcagttcgaaaccaaaatatcgattatatttataatgtttattcatatagttttaaatgttttaagatgataaaaagacaatttatagagaacatggtgcatttacactagaagtttgaaacttacattttaaattattttaaatttctcaaaaaatttgcaaaaacagtactaaaaattatttattttataaagt

SEQ ID NO: 73470 - DNA, 853 bp, Cannabis sativa
tgctactagattgaggggtgtgattgataagttagttactccctttcaatcggcttttgtccccgggagatggatagcggagtcttcaatcttgactcaagaattggtccacacaatcaaaagaaaaaaaggaaagggtgggctaatggctataaaattggatatgctaaaggcctacgatagaattgaatggcatttcctccatgaggtactcaaggggaatggttttgatagtggcgtttgctctctaattatggaatgtgttagctcggtgtcatactcggttttaatcaatggaatcccgcagaaaaaattcgaacctagaagggggccccgccaaggagacccgctgtccccttttctttttctgctttgtcatgatgtgttttctaagctaattatgaagcagtaagcaaaggggatggtgcaagggatttctctatctagatcgggaccggcggttagtcatttgatgtttgcggacgataccattctctttgctcgtgctaatgagaggatggctagttcgttactggattgtatccatagatacgaatcttggtcgggccaaagatgtagtttggtgaaatcttgtattcttttctctggaaacatggggaactcaacaaaaaacaacattctgaacattctgcaagtcaaacagtgtgacggccaagaaaaacaccttggcaatccctttgtgttcaagcgcaagaagcgagaggaatatttgtacttgaaggaaaaggttttaaaatgcctcgaaggctggaaaacaaaattgttatccttcgggggaagaactaccttagtgaaatcagtggcgtcatcgattcccttatatacaatgtct

SEQ ID NO: 73471 - DNA, 1132 bp, Cannabis sativa
tcaatagacactgcagtgaaactctataaatataattctctaattaccaagagttctatatttatagtggagtaatcatggaattaataaataaagattatttggttgatgagactcaataaataatctaatttattagagcttaaaattataggtccacggtcctcgaatcacaaccatgaaacacatcaaagaaagggataaagagttatataatgttgtttggaaaaatctattttgcattagaaaaatagtaattatttatttttataataaataaataatttttttaaaattaattaaatagggaaaaaataaaaattgttaggacacaatttgtaaagacaatatttgtgagacaaaagttaggaggataaaagataccttctttgtcttaattgagacaatgtaggcacataccctatagtagggtgttctgttagttttttcttttgggttaattaattaatggaattaataaatatttgaatttaaaaagtggttaaaaatatttgaaagtagttgagatattctatcaagtagtattccctcattagaaatatctgtaaccaaatttagttatagatatttatttaaataattaaatataatttaattaattagaaattaactactaagcttgatttgagaaatcagatgatacttctacactataattttcaaaattaatagggagaaaaaaaaaattatttttctctctcaaactgttcttgctcatgtgttgagaattcaacaagaataaattatacactttattctaatagctcacactattccttgtgtgtggtggaatgatttggaagacaacggtataagtttctaatcaacctaaaaggatacaacttacaagaagttttgaggatacccttatagtcatcaagaggtatatatatttcttttatgtaattattttgaattaatgtattgttgggattttataccctaaataaaaaccatttcaatataatcttatttgctatcaatagaagattataaatcatttaaatttacatgtagttttcatgattataattttaatataaaatttatggtaaatccaaaacatatagttactcataattacagtgatgtcatcacagtggaaagtaat

SEQ ID NO: 73472 - DNA, 817 bp, Cannabis sativa
atgaaatgaatgaattctcattaagcttcattgatgagcaaactatagtttatatacacgagaaaaacagaaagaaagtaaagagataggaggttgttacataactaacttctaactgaatttggacagctcactccagctcactaactaactctaactaacactacaccttatcaatctttaatattgaaacacaattttttgtatgcaaatctttaaatgacccttcaaaacaaaaaaaatctgaataacccagaaaacgattcaaatccgagagggagagagaaagtctgtgatggagagagagagtacgagaaaaagatgggaacggggtggtagtgttgggtgatggtgggctctccatagtttagagaagaaatatatacacacataattttttgtttttgtagttttattattttttatattttaaaatagagtaatttaagtatacctccacataagttatatttttagaactctgtagtttatccccaggtcattttttattggtatatttaaactaatttttttaaaataataaaaaatttaatgactttggccaattagagattgtcacgtgacaatttacctaacacttaacaaccaagtacctacaaaagttccagaattataagttaagtattattatcgccaaaaattaaacttagtatttatttgaaaccgggagttaaacttgagaatttatacctcaaattactctttaaaataattttaaaataatgtgaatgacttaaatttaatcacttgtattcagaaggttttaccataaaaaaatcagtttatatttcaaaaa

SEQ ID NO: 73473 - DNA, 1763 bp, Cannabis sativa
aaaaaaaaaaaaactcaaaaatttaatttttttaaagtttttttttaaaaaacaaatttttaatttttaatatttaaaatttaataaatagattttttcttttaaaaaatttgctaaatagattttttattttaaaataattttgtaattaaatcatgacacataacttgtctattagccacataggattgaaactaaagggtgtaactcaacaatggaaaaattgggtagaatcttcacaaactaaaaaagtttagaaggcttccagcaaaaaaaaaaaaaagaaaagaaaaagaaaaagaaaaaagtttagaaggcacaaattgaaagttgtaataatttaaagtaaaaattctatttattttaaaatttatagcatttatgggcaattctaatggtaaatgttaaatttagtgttaaatcaacacaaaaatgatagaattttaacattaattttttttttctattccaatcgcaatactgaaattatattttttttattattattataatattttataaaattataaataaacacaaagaatatgtatacaaaaaaatttatttataaatatattatttaaatattaaaaactaataaaaatatatttggtgtagtctatagtgtcacactaaatattagtgggacattaatgttatatatatgatgggagctaatacaataggtattgtgatttttacttatcaatagggatagtaatttgtagcctttgatttaatcaaatggctcaaattaatctacaccataattaatatatattttttatttataattaatctttaatattattaattacaagttcaactaacaaactccaaacctataatttttttttacttatttatcttatgactatttataattttcaaaattattttttaatttgaaatttatatatttatttttaattaatttaattttctacttaacacgataattgtagctagaaaagtacaaaatattaaagttatttaatcctacaataatcaatacaaccaataatataataatggtgtaagtggtaaagttattgtatcaagtacaatgacattagtttaatcctttcaaaagatataattttttttaatttaagatgttaaattaatttaataatttgaatttctttactttttttttttctaaacaatagtagtttatttttttatatatatatttactaatatggaacattttttatcctataaaaattttaaagtttgtaattattgtggtggaaagtcttaaacttttatttgttaatatatattgatggttgtattacataaagtataacagtgaacaataaaataacacatgcaataataataatagtcaaataaaaagtttgtcaaataaaaattgaataataaatcttatcaaataaaaaaatacattataaatagataaaaaaaatttgtactaaaaaaatatctgaacgatttcgatttaccgttgatctcatccaaattttatagtttatgacaactttaattataaggtgcttcaaacgtactataaacgatcgaaatgctactcttgtacaggcatgatttttttattatttagtattaatttaacttttaaattaatttaataatttaaaatttttgttttaaaccaataatatgtggaatatagtataaaaattttaaggttgtaattataatagtgaacaataaaataatacatgcattaataaataatattcaaataaaaagttatggctctttgtcaaagaaaa

SEQ ID NO: 73474 - DNA, 807 bp, Cannabis sativa
atattcatttatcagaatcaataatattattttatttccttaattataaatattctaataacccgtacctcaaacacccctagtacaaattcacttgaaataatattattgtatttgtgaaagactgtcttagttttatcattaaaaaaacttattaggattcgcctccttcaataggtgccacatcaacacctttaatcctagttggctaagtggctagttaagttagttggttcttactctacttaacctaactaacaacttatgcctacaaaaagaattcaacacaccaagacttagattaagactgcaactagatgaatctaaacttagtcgagatacatctctccttacaataattttgtccaagaaattaagtgattgagggttgtaaatacgacacttgtgtgtttgatcaagcattcctcagtgtgaggtttgtttgttattagtgttaatcaccacagtcttcatgtgcgtgctgtaatctcagattgtattggtgttggtcatattaaataaaattcatcattttgagaaaagtttttcaaacattataatttttctggttctatagtttgtaattggttaaatgtggtgctctttgttgatgttattgttcgggacataagtgaatcaatttcactacaaataatatcagaccgcagggactagagttcaagaaatgcattcaacaaatgatttgaggtggacaggttcactagatcaaatcatttcagtctaaggagaattaaaataaaagcattttaagttcaccaagggatctatgtggcacttgatgcagaa

SEQ ID NO: 73475 - DNA, 785 bp, Cannabis sativa
aaaaatggatgagtttttttattagctaaaaatagttagatattacacaagaaaatatacttaatatttaaaatgaaaagttttaagtaattacacccaattcttacggtggcatgagaattggggctccaattaagcaattacagtagtgtaattatgtggtcagacaaattcatataattgtgcaattatcttcaattcaaccaattctaatttcttcttggctttccaaatacgttctaaaagttttatttgcaaaataaccatgtttggtcacagaagtaataaaaaattatactatgcgactataaaatgactattcaaatagtgtaaagttaatgttgttagtttgctaattgaatattttcatgttgttagtttgggaaatttgttaagtgtttaagtggtgaggtgagtgaagtatttggtgatcatttttgttctggatgattattgatttcttagtttccacacaagaatttgacaagctacaatgaatgatgatcaataattgcttgtacatgcactaagtttctattctatttgatgttgaacatgtccataagttagaatgatgttttgtttgttatgcttatgtgatacattattgttcccattcagctctcaaaacgaattagaaaataagcattttatcaatatcaaagaaagagttacaaagttcccaacttttcgagacagtttggtattctctgtagaaagtatttcactttctttaacacaaattctaactgatacctctaggaatataggactagcctttatat

SEQ ID NO: 73476 - DNA, 1024 bp, Cannabis sativa
  modified_base (349)..(353): a, c, t, g, unknown or other
gggaaccccgtaacccgccatgggagatcctcacaagtgatccttgagggcatagatcttgtgagcgatcttaaaggtcctcctcaggctgataaagaattctagagtgaagttaacgtggtttcacctgaatccaggaagaaagttggcgttgtttctatcaggtaatcctgccaacccaagacccaaacctgtgccagaagacctttgcgccaacctctttatgggatcgaggaattccctgaggctgggaatagagtctcggctacaggaaatgggatcttctgatgatgaggagaatgaggtttgtgcagatattaaggctctctacatgtagccggtctttctnnnnntatgtgtagtcggtctttctccgagctacgtgcagacggtctttctcatgctatatgaagacggtctttctcgagtttatcgactcctttcgcatcctttgtttaggaagatgactttatggtttgcccctagtggcatttttgtaaagataagtttataacccgttttaggttttttcttatcttaaatgccttgtactattttcattcgaacttaatacaattgtgtttgcttgcatttttattcacaatgtaaacaactatattttgatgaaatgtacagtacttttgggttttcccattgctcatactcttcctgtttaagtagttggtgatctaccaaacttttgatttccgaatagttgttaattccgcctcgctaaagcagttacaatctgccttaagcaaacttaaatatactttaatgattttatcactttgtatatttttaatttgctcgtatggatagttatattatctatccattttctaggttcaagtacttttatcaaggcgtcatgatgcctcgttttgtacttttctagctcgcgagaaccgttcgtattcaactttatatgcaagttataacttttgattttcctttcacgtcggataggttttaaataaaaaattatagttgtttgatcccttcttcgttaaaaaggtttgat

SEQ ID NO: 73477 - DNA, 892 bp, Cannabis sativa
ataaaaattattaaaatgaggtgcattaataaattttgaggtgcaataaaaatttttacataaactaattttttggtaaatatttatacttttacggttaatttttttttatatatatttttacggcattcataaaattaaaaataaaaaaaactacatgaaaataattaaaaaaaaaagcaacatccaaacaaaatagaaacaatatataaaaaaaaataatatacaaataacaaaaaatgaacaacaaaataacataagtaaaatataaaaatacataaaatgaccgtagtttttataaataaaattttaaaaatatttaaaatttcgtacaacgtattttattttttttaataatttgtgtgtgtattttttttttaaaataatctccaaataaaactcctcttttaaattttgttagatatattaacatccaaattactttccattttaagtttttaaataatacagtacaaggaggaggagtgaaattgaaatttcaaaaaaagtattatttatgaagtaatatagagttatgggaaggatgtttttgtaattaaagtacaaaagtgtaaaagtgtcctgtcctttgtagcaaagaaaaagtaaaaggagacgggtcttcagggtaaaaaagtaaacacaagtcaatatactcactccactatccactactagtactatacatactagtagagtcaatgactcaatttgctaaaatgtccttcattttcattttatttattttattgagattagaatgaaactcaccgttggattattatatcgaacggtgatgaaacgtggaggttcccatgttaaactcgtgtcccctcagctgacacacggcatcaatggcacgtgattcatttcacaaacggacggttctgat

SEQ ID NO: 73478 - DNA, 1090 bp, Cannabis sativa
  modified_base (1044)..(1055): a, c, t, g, unknown or other
taacactagaacaagctctgaacctagaataataccacaaccccgaaatcacaaaaaccctattccaagactcaacctaaaccttaaaaatcatagagagagaagtaaagagcttacctcaaaacatgaacaactaatacccttggttgattcagctaacactgactaaattgggagagaaacttgtgattttttagctaggttcttaggtcttcgaaagggagagagagagataagcttcagtgtgattcttttcctatttttgagtattaacatcaattaactaaaataacattttatttaataatatcaactagtattacaccctatttcagcctagagaatctataaaagacaaaataataattttttcttgtgaaatgactattttgtcccttcactaaaacacttgagttaaataaagactaaggatattttggtcactttctagctaccccaactaaactgacaacttcaccttctaaactaatctgatataattccaatataattcttcatttgtcatcgtgacactttctgaccaatccgtcgagttttcacggtcgctaaacccgaaaacattttactccaaagatggtatatacaatacccacataattcgataaaatcttcgtaattaataaattacgcttaattattcatttaatcacatatttaataaaatatgtccaaattaacatcatcataatttttggaatattacaactttgtttctatgggttcggtttacagtgaaaagggggaatttttttaactttttgggttatgtgtttaggcttcgaaaatagaagaaaaaaaaaggctcaaatggtgtaaaaatggggggatatgttgattttagatggtggttggcgagggtttctatggtggttgttggctgctgtgtttatttcatgttgaggaagaagaagacaaagtgaaggagaaggctgaacagggttaatttatataaccctatggcatcgattattaaaaattaatcgatgtcatatgataagaaaaaggctaattagtaatttttcnnnnnnnnnnnngacatgtactaaattatgccccttgaacttttaag

SEQ ID NO: 73479 - DNA, 1923 bp, Cannabis sativa
  modified_base (65)..(69): a, c, t, g, unknown or other
ttagacactcttcgggaagaagattgcatgtgagacactcttcgggatgaagtgtgcaagtgctnnnnnttgaagggagttcaaggtctcggcacttttgaaattcgattagaagaatagatttcaatagttgcgataaattcaaagagggattccttatttgtataagccaatttagttttgtaaacacttgagatttatctaataaatttatttctctgtacgtggctccgtggactaggagcaattcgaaagaattactgataccacatataaaatgttatgtgtcattttaattttctgcattttactttctgcagtatatttttattctgttagattttgtgtctgatagaacagagataaattctattcaaacgattttactacagttccccattatttaaattgcttgatatttttacttggtaattattaaaaacagaatttcaattgttatcagagcggttcattaaactcttagtgagatcttgtgtttaatttccgtttaatttgtttcttgtgtaaaatgtctttctttgtagacgaaagtttggtatcttgtcctccgctactcaatgacacaaactatccatactggaaagtgaggatgagagctttcattaaaggtcaagatgaaaaagtacgaaaagcaattttgtttggatggtctcctcccacaaagaacagcgatgatggtagcacaaaggtaaaatctgaacttttatggactacgaaagaagagaagttatctagttataacaataaagctcttcatgctatctttaatggtgttggtgaaagtttcaataaacttgtttctacttgtatatctgctaaagatgcttggactattctttacacttagtttgaaagaactgaagatggtaaaaaaactagatttatcatgttacaaactaggtttgacgatctaagaatgactaagtctgaaacactatctgaattctatgaaagataatctgacatttctaatgaatattttgccttggtgagaaacttgataattatattttggtgagaaagatagtacgagtacttcctgataggttcaatgtaaagctcacgactatggaagaggctaaggattttagtactatgaaagtagattaattgatggggtctctttgtaccgttgaattaaatcaaaagatatatttaaaggagaaaccgagtatctccaagaaaaaggaaaagattatttctttcaaaagtaccgaaaagacagcgtcagatgatgaagatggtgataatgacatggctttgcttgtaaagaatttttagaaatacttgaagaaaaatggaaataagaagactaatgttaagacttcaagaggtatttcttcttctcttaaaccttttcaatctaacagaaaaaatattcagtgcagggagtgtgagggattcggtcatattcagtcaaaatgtacataccttaaagaggaataaaaaaagtatgacagcttcttggagtgataatgacttcgagggtagtgaagatgaggaaggtaatgttgctttaacttttgttatgccgaattctgtatctaaaggtaagaattttgtgtgtttgaataacacttccaaagatgaagaaaattcagatagtgatgaatatgaattaactgataaatctttaagggaatcttacaaggagatgtatgattcatggttgaaacttttttctgaaactgatctttggtaagcaaaaataaaaaattatcatttgaaatcaaacaactttctgagttaaatgaaaaatttgaagaagaaataattttaaaaaatgatgaaattagtaagttgtcaaaagatttaaatgcacttgagaaaaatgtaagaatacttaattctggttcttctatttttgacgagatacaaaattcaggtcaaaggaatcatgtg

SEQ ID NO: 73480 - DNA, 677 bp, Cannabis sativa
tacgatcaccagggtatcttgccgcacctccactactcgtactgatagcgtacgatttgtcctttatcccaaggatattccctgcctgacgaaaatgccctgccggagcagcaacgttctcctacgtcaccccagcctccaggccactgcctgccttcgttgttgtcgccctcggaggttgacgtcttctccagacacccctgcggtgcttcccgttcaactcccactcaggaacctctccattatcaactataagcttagttatacccttccccttcatagtaaaacaatttgatctcccagtctcagatttaatccaggtaccatacatttgaacagcctctccaatcttggggatcaccatagccaaaggagcagagcattctttattccaatgggcaagtttcccgcagttgaagcacaaatgagggagtttctcatatttgaattggatccaagactccggtttgccgtccgcagtaagaaaaaatccaacagggataggatgtctcagccacacatccacatacgcacgaagaaagcctcgatgaaccaattcctccttaggcttactgtctgttttcaagaaagaacccaccttcttccccataatagcagcattttcatccttcagaaacctcgtaggaagtccgtggaactggacccaaaagcttgcc

SEQ ID NO: 73481 - DNA, 853 bp, Cannabis sativa
ttgaacccaaaggaaccaagggttatatctctggtgttctatcatttctagctgggaatttaagggaattcaaaagctattgtaagggataagctaaggtaaccctagaaacttttttctttaagtggttttgtttgaaccagtggcctttagggtttgagttctgggttcttatcatgttatttgaagcttaattgagttgtttttgttggttatttcttgagttaagcaagtttgagttcaagaacaaaggtgaattttgcaaattgaggttatttttggttctgtcacttggaacttgtttattgtggtatgtttagctgatctagagcttagtttattttgagttgttttggtgagtctttattttttgtagtaaaaaatagtagagtgtttctgtggaaacggtctgccgtttttactggtgcagaaccaaaaaaatggcttgtcgtttatacagaaatggcttgcattttttgggcggttttttcataatgtcatttttttgtgtttccttgatatttagggctttaccatgttatttatcgatagagaaatttctagttttgagtttaggtcaccaaaaaagttttagaaagttgtttatcctatttctgtaattatgacataggacctccgttcaatgcgtgaatttccattcaggttgaccggcacacttgaatcaagaaacgaggtaagactagcataagatatgtacatgtatacgtgtatgtatgtaaattatgttctattatttgttataatataatatagattaaaacatttaaatgtgacatattatatattaatatgagattaatatatattatgtgttggatgttgtattatatca

SEQ ID NO: 73482 - DNA, 992 bp, Cannabis sativa
gtcccatattaacaaagtatacatatacatatatactttataaatttaataaaatatattttcataaaatatatacatatattttataaatttatttatgtagaattaataattttattttaaattgtaatacatatataaatattatgtgtactcaacaataattctattatgatatagtattaaagattgtttattgatattattattacattaatatttttttgtgttttgattttttttttttttttgtaactctatttagttataacatgtcaattagaatataatttgcttagtcgtgtattcttgaatagaaattctattgtatatgtattatgtgaaaataagagaaacatttttatcaaaaaataaaaaataacaaaataaatagttccaaaatattaaatgatcaaactacctattctttaggtttcttataaataggaaagttaatttgtaaaggctccaataaatgtatggatgagattacgactttttattctattttattttgatctagtaatttttttattttattacaccataattcttttcagtaaattttgtgcatattaaaaaaaatatgtaaataatttacttagaagaaaaaaatgtgtaaaaaataattaagtattttacaacaatacatcaaaaagtaatataattcttatgaaatatacaattttttttaagaaaagcatggactgtattaaatcaaatcagctgttataattcttatgaaatgtacaattttatttgtattaaaaaaaaagtcatctatcttacactacacatatcttaactcgagacaataacgtaaaacctaattattagtttaggaataatttgtagtacacccctaaaaaattattttgttttggtaattttttatttgtttataactttcaatttttttttgaataatttacagaaataaaaataaaatttaaatatttatttaatgcaacaaagtatttaaatgttatttt

SEQ ID NO: 73483 - DNA, 698 bp, Cannabis sativa
taaaaagttatcactaaaggtaaccgttttttgtagtgtgttaatatcgatattggtacaattaaatatcgagtcttatatagtttaataactttgttagccaatcggtaacacatttagaaggtattagctaggtactatatgtgtccaataacaatgctctgatattcctaaattatattataatacacgacttaaaacggatgtactgatgaactttctatctgtttcgatatttgaaagaatcttttagtttattttgttttaatgtacattatagtcatttaagatattttataaaatttcaagaaattcaaaataatttacaatatagaaaatattgttcaaacagtctattttacactcgtataaaataaaatagtcacgagtgcaacacactgtctgaacacagttttcggcgtgttaaaatttttcgaatttcttaaaattttgcaagatgtattaaataactataatttacatgaacatgagaaaaaatttcattaaaaaattatttccgatactaaaatgaatagagatgtatcgatgcatctcttttaagagtgtattatagaatttttcataatttaataatcacataaaatatttgaaactgtatttagacaataaaaaatatttaaaattttttaaaaataattacaatgaatgtatatgatcttaacaaaaaaaaaaaaaaa

SEQ ID NO: 73484 - DNA, 732 bp, Cannabis sativa
  modified_base (26)..(28): a, c, t, g, unknown or other
aacatcataaataattatttaaatannnataaataattttcataattaaaccataattaactgctaattcccaaattaaactaagcggtctttacaaacttgttgtttctcaagccattggattttctgatattgattattttgaagaagtttatattcattatcattctatttaagttttgggtttgttttttatgtgcttgtttgttggtactttttttttatacaagaaaaagtccattctataactgaaatatctaatatattatttccaaaaaataatatagaatgaagttatttaatagaatgattaaggtgctcacgttgcatatatatcaccttcaacttattaagattggccatcaaaatactgcctttattcggtatgtatgtgtataatatgcatatatttttcttctgcttttcctatatatctgctttaccaataacttctcctcttacttttttcgaattggtatgtccattaatttctcttatttgtttctttatagttttgtgctttattcaatatttatccaatgggtttattctgtattgatttgaatggattcaaatgttaggttattgaaaattgtgaaaatttggttattttggttacttttgttttactttagttactattggaacatagtaaagagtttttgtttcactactacaatatgggcctttagcttccttttttgtaatccattttataaaaagggaagctaa

SEQ ID NO: 73485 - DNA, 955 bp, Cannabis sativa
gataaatagatgcccctctacagctctgaactttaaaactcctcaagaattctggactggcaaagcacctagctatgaacatctcaaagtattcggttgcactgcctatgcacacatcaggcaagacaagctgcaaccaagggctctcaaattcttatttcttggctaccctaatggaatcaaaggctacaagctttggtgtttagaggaagggtacaagaaatgtgtaatcagtagagatgtcaccttcagagaagatgaaatgccactaaaaacaacaaagcaaatccccactatctcagatgctattcctagatgtgttcaagtggaacttgaacaaggtgctgagtctcaaagccaaactcccactgctgttcaaagaaaagagtctgagactactggcagcctagaagactatcaacttaccagggacagaaccaggagagaaatcagggcacctcagaagtttggctatgctgattatacagcatatgcactgtcagttacagatgaggttgacaacacagtgcctaaatcgtatcaagacgcaataaatggcaaagatggtaagaaatggctgtaggccattgatgaggagaaacagtcactagtcaaaaacaagacatggagaatagttagaagaccacctggacagaggcttgtcagatgcaaatggatctttagggtcaaagatggcatccctgggtttgaacaggttaggttcaaggccagattggtagaaaagggattcactcaaaatgaggggattgattatactgacatattttctcctgtagtgaaacaagcatccattagaattataatggccaaggctgcaaagtttgatcatgaggtggatcaaatggatgtgaaaacaacctttctccatggtaacttggaagaagacatctacatgactattcctgagagatttgaaagcaatgaccctgaagaa

SEQ ID NO: 73486 - DNA, 747 bp, Cannabis sativa
agccacgcctagagaataaaatttattagataaatttgaagtgattacaaaattaaattgacttatagactttctttgaatttaccgcagctgttgtaatctatcattctaatccaatttctgaagtgctaagatcttgaactctcttcaaatcgtaacacttacacttcctcccgaaaaacgacttacttgtaatcttcctcccgattaagagtgtctaacttgcggttttcatctcgaaaagcgtcccacgaacaagactttctcccacagcttgatgaacgatatatctaaggtgtataacctacacaattttaacaaaaaacaatccagaataatataataataaaatactaagaatttattggactcaagtttttcacataactaagaaactctcttcaaatttgaaagtaattttcgaaataatagaaattaaggaaaattaattacctaaaggtgtatttatacactttagaatccctaaatcgtggtcaaagaaccaaaaaacaattaggtcaataaataaaaaatcttttcaaacaaaaaagttagaatttgtttaaacaaaatcagtctgttcaaataggtgcattgaacctgaatagtttttcaacaaagttttcataaacaaatgaggaagctttgacaatctttaatgatatacttgtagtttcttggaaatataataaagatttttttaaaaaaatacaaatataatattaaataatctaaataaagaaaatt

SEQ ID NO: 73487 - DNA, 823 bp, Cannabis sativa
atcaatatatgaagcctttcactttttgagtagagtggagagtaaggatcataatgacatgcagaacgatcatatggtttgcctgtaagattgaaacctaagtacaaaggaaaaccaaggaacactatagtggaaagctttagggctcttcctagtggattgtccaagtaacgtttgtagagccgtgcgatttgagattcggggactggaacaaacaattgatcatgttcaagggagccgatgtttgaatgatggcgacgatgactatacttaaaagagaagtatgggaagagaagagcggagtggaggacaaagccaacagtgtcatccacccattggtggtcactgaaagcttggtgaccacaatcatgaccaaggacccaaataccagcaaaaatgctgccttggaagatccaataaagtggccaagctaagtattggagcgggtgtgggagaagatggaagtaagaggttgctatgtagtagaacaaaaaggagaaaaaaaggtcttgaaggacatgagagaaggaacgaagaagagaatggttgaagcaaagcaatggggtggaatggctttcttgagttggcttagtgtgaatggtggtgtggtgtgtggtgctcgctcaagtctactatttttgccaccggctcccatttttgtttcttcaaaaagattacaaagaaaaataataatgcaatattagtttttgagctaagcatgtatatatatatagtatataagaattggtatagctatgaaattggcaccacacaaagtgatagataaatttcataaatcaaagacaagagaaatgtgaattaa

SEQ ID NO: 73488 - DNA, 600 bp, Cannabis sativa
tttcccttacaatttcgagagagaactcaatatatcaaaaaacaaagtcaccaactaaaaaaccaaaagggaaataagtaagcacagactaaataacaagagaattccactgattttgctcgaggagttgaaattcattataataattgtaaagttgtgcttgaagtttatatttcctttcatgaaaatgatgagtattttaaaggcaatttactgtgatttttacaggtagaatagcacacagtaataagtaaatgctctcatggatgaagcgtattttgatgtagtaaaaatctcaaactctttgataaagaaaatgctctcacaagtaagagtaaaagtagtgctctcactttaaaaaaaaaaattaatataggtagggccgccctgagttgaaatgggttataggtaaaaaaaaaaaaaaaaattctggacacttaaagataaataacatttttaaaaactattaaaaaaatatgtatatttttcaaaaaaatatttttttatttgggttcctaaaatgagttggttttagggattatttcagaaaaacataaaaacaacaaatttttttttttttacaaaaatacggtttcacgg

SEQ ID NO: 73489 - DNA, 916 bp, Cannabis sativa
ggtgttaacaatgagtccatcaacattggaatgatgaatgttccgttatctggagttagagcgccacctgtggacgttattaatggcaaaataaggagaggtaatgtcagacctctcaatctgttccctgaagccgctggccctcaagtcggagaaacatccacgccagcagcaacaacggggcactttccacccattactttggcagtagtatccgagggaatcgtccagctcactactgaaaagtacaccatgatccaagatcaactacgcccctgcaggctgaggtggatggacggaacagggcccgacgcccccctcgagcccccactactcgcacagataaccctcaagtaataaattctaggcgtcgtaataaccgtgttcgcagggaacaaagaaccaaccctgaaggtctagacctgaatcagccaacctcgggagaccagtctgcgaggtatcccaactaggagacacaggttgatgaagaccctgagcgacgcaaccctcgcagcaggccttcaagagacaacgacgtagaatccacctcctcgtcttcacatggctgcacacctagcaggtatacaaggtccggttctgtggagacgcagcagggaggacgatatcaggtttgtaagggtgatttgcgtgatcaccttaacgctgttttcagagcacgctcccacgcccctcaagacgaggaaacaccccgtgatccccaaatgggcgatcaaggtgtaaacactcgcataaacccgcctaacgcaccagcagcgactactggggttaatgtcccgtcgaacctcgccgcagtagccatagctcctgtagtcgcagcagtcccggctcccatagccgggggtattgatcaaagcatgcttttgcaagctttgaaaatactcgagcagcagagaaa

SEQ ID NO: 73490 - DNA, 1116 bp, Cannabis sativa
  modified_base (33)..(36): a, c, t, g, unknown or other
taacattagatatttttgcctccaaaaataaannnnaggtatttaagtgtataaattctgaaacattaggtatttatgccgcaatttacccaatttgttatgcattttttatctgtttcagattattgaattatgatactatatattctatatatagtgttataaatattttttttaattattatttaaaatatctgatatgatttaaatttagaattcaaattcaaatataaatatctaataactgaatatcaaatattagatcttttattttaataattatcatttcaattaaataattatcaaataattcatttaattaataattagaagataattaaatcaatttaatttaaataatttaaataataaaataattaagttaaattaatcatgagtctttatatgtcaccttacacatgtagaatgggcatgcacgtgttggctatattttaaggtccaaaattaatttctcaattttaccataaataagatttgttatttattctgacaataattaataattgattaattctcattaatcccttatttcacaaggattaaaataaatattattcaaaaaaaataaataaatattattttctccaaaataatatatttctctctttaatattttttaagaataatattatatttaactagttaatatagttttatccaataaaactagataaaaaatactattaattatacaattcttaatcgccataattaatcaaaataataattttacagattactattttgctcttaagaattttttttccataaatattaattctcactcaaaatctatttatcaaataaaaccttcccccatacaatgttgtatagaggtgactcgaggactatggacctatgtttcaaagctccaataaatccaagattattatcaatctcatcaatagaataatttagtttattaattctattattactccactataaatatagaattgcactctttgacaatataaaattaatttatagaattcttacttgcagtccattgatataatcaatataagtagttcgccctccaatgattagttcataattagagttggtcaaaatactattttatccttttaatta

SEQ ID NO: 73491 - DNA, 851 bp, Cannabis sativa
ttttatcctcttgttggcgagttgaactgtagataagagtatcgacatgtggatacctcacgtgtttggtatctccctctgaaaatacaattggaggctcttctattttggctttctttagtggttctggagcaaacaccgattgctcattcttgacttcattgacatatctcttctgggcattagtactctctccagcaagatgcgaccctcccgagataaccaatatatccttgccctcaacaaagggaggttgtaatctttggttttctgggttgttaggctgaacaggttagttttgttcatttccttgtcgcttcacatattatctaaaatatccacaagaaattaggctctctatctcattctttagttgccgacactcttcagctgtataccctatgtctttatgaaatcgataaaatcttgttgggtcgtgtttgtgtctcgcatgtctcatcggctcaggttttcggaatgcaaccctatgctcatttgcgagaaagatattttctcgagtttcattaagctcggtgtaaacagtgtaaattggcacatatttatcatgctctttttgtttcttcttatttttagatgattctctcgagtcatcttttcttttggtgttcgaaccacttggattatcaacttttgtcgagatggtgcttgttgttgtagtacttgtgctgggtttgtgtcccgagccagttttcagcaacttcatctcgtttcttgcttcctgaattacaatgtgtactcaactcataagactatgtaattgagttatggttttgatctcacacacacgtgaataggtgtgggcatgtgagacaagagagagagagagagag

SEQ ID NO: 73492 - DNA, 1122 bp, Cannabis sativa
gttaggtactttaataagtatggtacgagggaaatactagacacttgttcactggagtaatgaggtgagaaaagaataacaatggaccgaaaagatccacgacatttataaaatgatagagtgaattcgagttgtatgctagcttcattgaatacacagaaaagttacactgatttaaagcgtaggattatctaattcaaaataggagattttgtttttctccaagtattgcctatgaaagagatatgtagagagggaagttaaaccctaaattcattagggtttttgatactagagtaagtaggccaagtagcctatcaactagtcttgactctttcattgtctagagtgtataatgtgtttcatatctccatgctgagaaaatatgtattagactcgacccatattctaagctgtgacgatgttaagatttagacaaatttattatatgggaaaaacatcatgtccatgttttgaactgaaaaaaggaagtactatgaaatgagacaattccactagttaagaaagtgttatagagaaacagcaagatagaaacaacaatttgagagttagaatcataaatacgggggtaatatctcgaaatgtttaaataaattttgaggaaaaaatttttataaggaggggatggttgtaatatctcgagaagtctaatggtaaatatttagggtttgtattaatattatgggtgaatcaggtaataagtgagattatgatcctactaatctagttcaacataaattttaaatgtgctataagtgggtaaataattataatttttaaattacagagatttacatagcatgtatgaatgtaatatgagctatatgtggaataaaaatatttagatttagcgaccttggagactggatcggggcccagaaatgtcataacaggttcagttagtagattggacgagaacattatgataagttgataatatatgtattagggtaattagaagtatgtaagatttaacttaacaccttacaaatatagatttcttagtggttaagaaacgatacgatgattattagtaaaaaaaaattattaatattatcatattattattttttttactgttattattattatattaatatt

SEQ ID NO: 73493 - DNA, 632 bp, Cannabis sativa
aaagttagatctcatttcaggaaatttgaactgaaagatcaagctggctaagctataaacagtaattgtttttgaaaatcaaattaatcattttcaatatacagtacttgattaaataatgcagaatatccaaccatttataaaccaacaagtcatctttaataaatcatgctcaaattctgagagatgtcaaaatcaagtttgccccttttggtagctgggaaaatgcatgaaaatcattggattgttcatcttttaaactagatgcaaaggacttgggagataatggaaagcatagaaaacaccaagaaagacaaacacggctcctaaagatcatcgctttctctctattttttttttcccatgttttctcatcaaccaaacaagtataagaaaaagctcaacaaaaatgcataaatttcaaaacctagttcacagctgcattacagtttgaaaaataaagtcccaaaaagacaaaaaaaaaaaaaaaaacatgattcaataattgaaaaggagacaaaaatgtaccaaactgaaaacccagttcgcaaatgccacacagcattaaaaaaagcaaaaaacataattcaagaatcccaaagatgattaaccagaaagaaagaagaaatata

SEQ ID NO: 73494 - DNA, 776 bp, Cannabis sativa
ctagaaatcatattgtttgcggaaggaaatcatacctccagctctacatataaaagttcaaaaataaaacgacatattgcacaaattattttaacaataataaccatgcatgctatgctagtgtaagtaactcactaaatccgagctaagagtcaccgggttgactcagtgctataccttacaaggaactcaacgaactcgtttgagtacttattctgcacctccacattgccaaatattgccctcatgtcatgacgtgacttaactctgatggcctctccttcctcctccaccatgactcgccgaatcgactcagccacagattcactactgaacgagccatttttatcatctcggggaatttctaacccgattcccatgccatgaagcaacctcgccattaaccccacatccgagcttccaccgggaaatagaatcaacgacagtccaagcccgaggccttcgattaccgaactccaaccgcaatgagtcaagaacccacccacggaagggtgagccaagattctcaattggggagcccaaccccaccatatcataccccgatccgagatccgagtttcgaatccagatggaattatgtccaaacccaatttcccttctaccaatggacgattgttaattacccaaacaaacggcaactcagatttctcaatcccaaaagctaactcgtgcatcgattcttgactcagactcaactcggaaccaagcgcaatataaaccacggacttgtgttttctgcaatctagccacagttt

SEQ ID NO: 73495 - DNA, 942 bp, Cannabis sativa
accctaaaccctaagctaagtaagtatcctaagccttttacttgtacatcctagcctaagcctaagcaacttgaattgtatataatttgtgtatctgattttcttcgacaattatatattatactaatttgtttttcaaaagtaagtatcctaagtatcattatagtaggatacatacatataatttgtttgttttgtttgaactaaacatatagatattatcccaacccattttaatatttattaagttacttcttcctcttacttaacatacactaataactaaagaaacaattaaccttctccatattctcagaatccaatattgtcattcgcaactaaaaaacaactgtatttcttaagttctttaaaagtgaacaaccttagtcctttaactgaagatttgtcttataatctctcattcaaactgaactggtgagactaattttactcatatcacactcaaatatattacagaaactacaacacatttttttgaaaatatatggtcttacatgtatattcgaattgttgctggatctatagacaaacaagagatagacaaactaaaactttttagtagcatgagggaaacaaagcaaaagtactcccacaagaaaattaaatagttgatttacattaaaagtactttcttaattgctatttatactttccaagcaaataatcttataagtagtaacaccacacaggcacaaattcaataaatacaccaatgacaattcaaacactcaaacttttagagtttgtagccacctctacgcaggcccagccatgggcataggcgggctatacctgtgcctagggcccacctagcccagggcccccaaaaaaatatttcccttttgaaattatacaattttttttactgattttgaaaaataccacattttttctaaaataaggacccaaattttttttttt

SEQ ID NO: 73496 - DNA, 628 bp, Cannabis sativa
tggttgacctacgaatttcctccttcgttgccttatcccgagtgttaggatagatgacctttaaaacatttgcgtctttggcgtctgaggagcctttagaagacctaccctccgacaattggcagtagtcaccatgtctctgacgttcaactcgatcctattgagggtctggaacaccgcttcatgacccttgaagtgttgagtgggagctatccgcagtagaggagaaatcatcgttcatttagtcatgaggtttgggctctcaaaggcttgaaacccaaatgaaaacaaaccgatgcccgcaatctttgacgttcttttgatggttatatgaaactttacccttattttttgggtgaggttgcaaggtataaaaactatccttaaatttatctcttttctatgggagtgatacaagttcataaaaaataaaatctcagcaagagtgggagcctcccaccttcgagctacataaaaaataaagagtctgaccattaaacaataggcctacaggatgagttgataatgttagacatttatatgtataatataaaatatatgtatgtgtatataacatgcggaataaataaacatatacactatatgaatataaggatcgaaatacctc

SEQ ID NO: 73497 - DNA, 609 bp, Cannabis sativa
tgccttcttagactattaccaaaagctattagggactaaaattccagccaaaagggaagttgttcaagcaattgtggatttgggactaaggtaacaagttatcacaaggatattctattggctgattacacaaggaaggaagtagaagatgctatttttgctattgatagggataaagcccctggaccagatgggtatggaagtgctttcttccaagacaatcggaaacttgtagggtatgagatagtagaggcagtattatctttttttttttgaattctggaaagattttaaaagagattaatactaccactattactctgattccaaaaacaaaatgccccaagagtgtagtggactttagacaaatctcatgctgcaatgttatatacaattgaagtccccttctgttatagccgaaaaatgataaaaaaaaagatgcacaacgctgaaaaaaaacctattttgcttgggattagaagggtggggctgcagtatgggatttccatgcctaggtgcggtcccccctttatttaaggaatgagttttctgctacgttaactgatagtattttttccataactctcttgatattgttcagaattggac

SEQ ID NO: 73498 - DNA, 997 bp, Cannabis sativa
gtttgctattttttatagctttgcctgaatttcaaaggatagtgtattacataaagggtcttaatttacaacatgtcctctttgattaaaaatttaaagatgaaattagatactcaacttctaactattgatagtatttgcagagatgatcaacattccatgctcttgggattacggacccatacattcgtttaagtttgtaggtcccgagcctatttcatcctcaatttcataagtccttcccagtttgggcccaacacccccattctagggtcttgtgaagctggaaagatccttcttaagaccaggtctcctatggagaattttctatttttcactttagaattaaagtgttttgccactttcctctagtacgtagccagtcaaatttatgactcctcccggagctcttctacgagatccaagactcttgcaacagtgattgattggtggaaagatcgtagttagttcttctatgggagggaatagtgctttctactgggaccattgcttcacatctatataccattgaaaacaaagagtatcctgtggtggtctaggcggtagtcctataagcctagagtacttgcggcaattctctaggccaattatttttgcaagccatgagattctttttgagtgtgacttttagtatcttattcatggcttctgcttgaccatttgcttgaggccttgcaactgcggataagctttttatgattctgtacctttcccaaaactcgtgaatatgtcgctgtcaaattgcttaccattatttgagactattttatgaggtagcccataccgacaaacaatatttttttatcacaaaatctaggctttcctttgccgtaattgagtttattggttatgcttctgtccattttgtgaaataatccaccacaattatagcctatttaaccccaccctttcccgttgggagggacctaatcagatctataccccacactacaaatgaccacgagcttgtcatcaa

SEQ ID NO: 73499 - DNA, 703 bp, Cannabis sativa
atataaattaataatgtgcagtcccaatcccaaccctaatgatcaacatcatattatattgtccacacattaattttttttcttcctatatctagctagctttctcaaccatattttttcattgctttatgatctttttgctctcttataagacattccacaataatatttgtcataagggaaagtaataattatacataaataagaaaaatataaatcaattttgggtccataaacatacctacttagtgatttctttccataattagaatgattcaattttgacaatattttattattattgtaccgtaatttggatcaacaatcaatcatttaatatgggttattaattcattgaataaaactctcttgaaagtacctaaaaaagaaacattaatccccatggattcttggctcaaaaaaaaaaaaaaaaaatcaccatggattctctctgattcaacaggatatataacagagtaagtgacaaccgagagcttcttcttcttcttgaagtttcttccaggcctggtctctggttcagtaagagagcttctattactgtgtttcctccctctccttctctctgttctccgacactcatagcattaatttctccttgatcttccccatgtcaaccttaatcattgcaaataacccccgtatcttacgcgctcagcatctatttaatgcaatctctctctcc

SEQ ID NO: 73500 - DNA, 1145 bp, Cannabis sativa
cttgtttattattttaacgattatcaaagtatgtaggaagcatattatattataaatatttattttaagtgtgttgcctttaagtcctaaacagcagtattaagttttatgatcgctgtctaacctgcctggcttataggttcccaggctaagtcctataaaatggacgcctcgcggaatacaagaagtcagggtaacatggttgagaccggaggcagtcggggaaatcagaatccctagaatcctcgtggtcgtggctgtggccgtggcagagcttagggtggtcgccctgtaaatccaccaaaagctcctccagactgagagcagagatttgcggaaatgctagatcgaatctgccagcaggatgaagaaattcagaggttgaggcaacagggtcttcctaccgtgcttcctcagcaagttgttcaggccgttgcagttctagtggtgccaatagaacaacctgttgttggtaaccgtatggggccgttgtacgaaaggttccgtaagcaagcacctccagtgtttctgggaggtcctaatgtgatgaaggctaagcagtggctcatagtgattgaacgtattctcaactttatgggagtggtgggtaatgatcgggtgacccgcgccactttccagtttcaggaggacgccctcgtgtggtgggagttgataacccttactcgggacgttacagttctgacatgggaagcatttttggagttgtttaactccaaatattacaatgaagccgtccgcagtgctaagcggaaagagttcattgagttggtgcaaaccgaggggatgtcggttactgagtatactacaaagtttgaccatctggccaagctcgccgtgggtatcgtgccaactgacttcagcaagaaagaaaagtatttggccgatttaaatgtgaagattaggcatgatttggtgatcaccaccaatgaagcaaccacatatgctgaaatggttgaaaaagctttgagagccaagggtgctgtgaaattccttcaagagccccgagtgactcgagtgtttgtggaacccccacttttcctactcctatttatggtagggatggtggtgactccaacactgatcaaaaaaggaaggttactttggcatctggtggttcagggcaa

SEQ ID NO: 73501 - DNA, 655 bp, Cannabis sativa
ttggatatccaactttttgtaattggattagattggattggatcggttcggttcaattggattggattggatgatgcccacccctaggtgggtggggcctatatatatatatattaattaatatgtataaagactgaatagtattgcgtgtgttgatcttaaacctatcatctatacgtacaagcattacttcatctatctatatacatacatacatacatatacttatattatagagagggtccaccttcaaaatatattgttctaataagaacactgttataagactagtactcacatctctataatatatcatacactctaattaattaatctgtgaatatttattatttaaaatacgattgaatttacttaaataaaaatctaatgtgatatttcattttctattttagcccccgaaaaatgtgagttctagacacgggcttagctcgcctatgcttaggccagaccctgactacaaggcaccccactaaaatagttacacttgcaattcttagctgtttcagcatctaatttcttagtccaatttttttcataatggtatacgtaataataatttaatacattttacaaaattttgagaaatttaaaataatttacaatgtaaaatttaatgttcaaactgtttatttca

SEQ ID NO: 73502 - DNA, 970 bp, Cannabis sativa
cccaaaccgagtcataggcttgaaaaccccatataaaatgtggtacaacagttacccaaacctaacacacttaagaacatttgtgtgtacaacatatgtacactaatctattgataaactggaatctatatctgttaagggaactttcctagattatgccttaggaaccaaggggtataaaattttcatttcgaagaaggaaagaccaaaggttgtgatcgctagaaatgttgttttcaatgagttagaatatcctcacttgacattcgagaaaggtacgtagtgtgtctccaagtgatgcaggaaagtagaaaataaagacattgcaagtgtagaaatggagtatgaaacgaagctcttagaagaaggttgagaggcaaaaattaatgaggaaccgaaacataatgttcagacagaagctgttgtggagccgaaagataaaaaatgaaatagaggtgtcgaaagggtttagacagacaggtttggaaggttatcagttggcttgtgatagacccagaagagtgattcaccctcgagaaaggtttgtgaaagtagacttgatcgcatttgcactggcggtagtttaacagactgaaattgaagagcccaaaagttatgaagaggcaatttcaggtggaaataagtctaaatggcttcaggccatggatggggagatggattcacttccgaaaaataaaacttgggtagttgtgctaaagctgaagaacaagaagattgtgtagtgcaaatagattcttaaggtgaaagagggaatcaatgagaatgaactagtgaggttcaaggccaagttagtggctaagggttttactctggtaaaggaatagattatattgaagtcttctcacctgtggtaaagtacaagacaataaggctaatgttgtccccgacagctcaattggagtttaaagttgaacaacttgatgttaagactacttttctaaatggattc

SEQ ID NO: 73503 - DNA, 651 bp, Cannabis sativa
agagagagagagagatgtggggtttgcttaggaatctaatgtggccttgaaagttgaagaatagcctttggggtagtgttggagaaggagagaatattctggggccaccagagttcaacagctaaaatccaaaatcttatactaaacaaagttagaaagcaacaacatcattagattatgattaagggttaccaggaaaagtcagcccacaaccagacgactgctcaaacttccaaaaattcactgcctttgtcagctccctgtcttttaacacgatcacaccattatttttaattatcatatatatatatatatgaaaataatcttataatttattagtgaattttatactctaatattagcaagcaaagctccccgataattttctcaattattcttttttattactcttgtccattttccaagactactagctatcttttgaaaaagagcactatgcatatcgatccatttattaaccttttgtttctttataattggaaagaaaagccctagggctagatagcagcttggactttaaatatctacaaaacaaattaatatattattatctatgacttataatgatttttttttgttttcctcttttcatgtctaaaacacttaatttatgacaaaaacgtttttttt

SEQ ID NO: 73504 - DNA, 1632 bp, Cannabis sativa
  modified_base (1430)..(1432): a, c, t, g, unknown or other
  modified_base (1603)..(1606): a, c, t, g, unknown or other
ttgtgcaactgtgttcattttgttcttttttgtgcttgttatttggtttttaccaaatgctttgtacaggtataggtgcccccaagtgactgagcagactttttctacgcatttaatggtaaatgtataacttgctaataaacttgactcaatttgaattgaaataaacatctttatttcatttattggtcgagaatatgtttgttactgtagtaacttatattgaagctattatattgatctagtctgatctttagttttacatcaacaaaaaaaaattgtagaaaataaaaattgtactttcataagtggtcacccaacctgagtactttgtcatttcatctgaacctttgggcgtggtttgcccaaaaggccgtttacttaagagtaaatgttctttcgtttggtacttaacatggtgatccgacctcgctagtagtattttcttaaatgttctccgttccaataccttggtactagaacgagttgcatttttttgtcatacttacccagcttgtatgctcctgattctagaacttcaatcacttgatatggtccttccctgtttgatccgagcacaccttccgtgctgtctttggtgttcaaaaatacccttatgaggaccatatctcccacaaagaatttctgtgctttcactttcttgttaaagtaccaagctaccttttgttggtgagctaccaatttcaagtttgctgcggttcgcttttcttcaatttcatcaagtgactccgcgaggagtgcatgattaacctcttggttatatgtcaatcttctgtgggacgaaggttcgagttctacgggcagcatagcttcgtaactatatgccatggaaaatggagtctgtttggtcgttgttttctcaattgtgcggtacgaccataatacttcagggagttcctccagccagtttcctttagcatcttcaagtcgtttctttagagtatctttgagtgtcttgttgacttcttcgacttgaccatttgcttggggatgtgccactgcggagaaattttttatgatcccatggcttgcacaaaaatcagtgaaggactgactgtcaaattgtttgccattgttcgagactatcttgtacggtagtccgaactgataaattatatttttcacaatgaagtcttgcacttttttttggatgtgatggttccaaatggctcgacttctatccattttgtgaagtaatcaactgcaactactgcgtactgtactccacctttgcccttgggcaattgtctgatcaattccccaaatggcgaaaggctaaggactttgcatttgagttagctcattgggcggtgcgcaaggtatcttcgaaaatctctggcatttatcacatttcttaacataggccttagagtcttcaatcatggtcggccagaaataaccttgccttnnnattttcttggataaactctgcccagccgcgtggttgccgcagaatccatcatgtaccttagacaaaagtcgtgtggcttcttcttgtgtaacacatctgagtagtggcatagagaatctccttctatacattactccatctatgatgatatatctgttgggttttatgccnnnnataaaactctttacaatctgattagt

SEQ ID NO: 73505 - DNA, 1021 bp, Cannabis sativa
atcgacgtgaagatttaaatgcccagtccctttattatttcctatcgccatgtgcctcccgcagtgattgcacacttcttcaatatatattgtcaatcatttgcaaagtagagtaatccactgcaggagatcttctcgttctcttatttgttgtccctccactctgagtttcatctattctattactagactctatttcttctgacataacaaattcaacatccttaaaaattcatttggccagacatataaccaatttctttgtcttaaaatgttcactgtctcctactaaatttaacaatgcttcttgaaaaaattaatataaaacaagcatattgtagacttgaaatataacatgcaattcaagtatttttgcaacaaaattcaactgaaatgtgtagagttttttttttttttgtcttgcaaagattgtaaatttaggcagacaacccatataaaaatttaagtaaaaattgggattattgtatatataataataaaaagttgtacacacagctttatgaatgatactaatctagttatataatttacaataatatttaatttactgctaaagtatgatatactcacacactttcctctcaatagtggtgagagcaggtatacttatttatttttaaatagatatataggtatatatgtatagatgtatgtatgtatatatagatatgttacatgtagagtggcatccatcattaacatttatttaccattatgcaatatgttaactatgtacctatactcagaatttttaccatcaataacttcttagctaatttctgcaaattccaaatgcaactcaaactagttcacatgaaacttaaagagttaccccaaatgcacacactgatgaaaaaaaaaggggaacaagcagtagctataaatagtctatatgcattacgaagttttctcttttgtgaagcataaaatattgatgacttttctgataaataaagctctgtatctacaattatgaattttaacttcttagacctgtaac

SEQ ID NO: 73506 - DNA, 862 bp, Cannabis sativa
atttatagtttcttttttctctttcaaaaaaaaaaaagttatcttttgtttttcatttactaactttaatataatatataaatctatctatatatacatattaaaaataggtaatcaaataattaagctactgatctaaatattcagtgatgagtttaatgggtaaaactttggtctaattcataagatatatatgaataaaattagaatatattttgtaactttatttagttgattatatttccatcatcataaaaaaaattagaatcgaaatgcatatttttttttattttatatatatatagtgtacttatattattttgaattttaaccaattaccaatttacattttatgtttttaaaattttagtcacaatatgaattttttttgtgactaaaagtgacttttggttacaacaaaaaattatttgtgactaaagcataccatgagtaatgctaagcacactctatattgcactcacttttacactctctttataaatgagtgacatgtgtaactttttataatatatttaaatatatttaccattatacttttttttactttttattaataattaaaatgtgttatctcatttacttgtttaatttttttggactattttattaatatctttttttttattaaataatatgcaccactatgcatctttcttttaatttttcttttataataaatatgcactattttatgtcataaaatataaaaaacactaactcttttttctttcggcaaattttgcattttatttatttattttttcatattgtattattctttaaattattttttatttcatattcgttgtaatatatataaagaaacaacaaaagagaaaaa

SEQ ID NO: 73507 - DNA, 1648 bp, Cannabis sativa
gtgagtttactacttgattgcgtatacttgcgtagtaattaataattttcagcaacaactcttcttcaagggaacacacaggacattgtgaatggggtactgcatgtttaattctaagttgaaccattgtgggaaggcagtttgtgcatgccctccacactaagtttttcatctttggaggcattttgagattccagaattttttccaaaaaagtttgacttgtgattcctcaaaattcaccaaacctttcagttcttggagacgtttataagcactcttaacagtttataaacccgaaaactccccaatccaaattaaatggtcctgactggtagtgatgttaagaggaatttgcacaattaactccctgtctcgaggatcaaacaagtcattcaacacttccatatcccaactaagcccctcaatagtcaaaagattggccactttagcattatgaagccccggatgtgaggaaatgacccaaggattagctttatccggcaaccaagggtctcctaaaacatcaatgttcttaccatcaccaactgcccatcttactccactagcaaccagatgttgtgcctcaagtatgcttctccacacaaaactaggattagaaccaatttcagccgtaaggaacgtaccattagagaaataacgagctttgaaaattcgagctaccaaggaattaggtttggttagtaagcactaaccttgcttccccaacattgccagattaaaatcccttaggttcctgaaacccattcctccttcagttttgtgatgacatagtctctcccaggacatccaatggatgccggagttactattaaccgaggtcctccaccagtattttgacatgagactctccatatctctaacaacctccataggtaataagaagacattcatagcatagttgggaagtgattgggcaacagacttgataagaatctcctttcccgctctagaaatgaaatttgatccccacccttccaatcttttccttactttttctttcaaatagcccaaagccgaaactttattgcgactcatagagcttggcagtcccagataaagactaccctccaaagcaggtgccattcccaactctccaccaagacggtttctcaaagtttcgtgagtattagtactgaaaaaaattgaagactttgagaaattaaccttctgacctgaagccaattcaaacttgtgcaaagcttctttaacccgaaaagcctcagttttagtggccttacagtataagtaactatcatcggcgaaaagcatgtgagagattcttggtgccccattagctactttacaaccgtgaagccatcctcgttgttcataacgtctaagtaaagctgataaaccctccgcacaaagaataaagagatagggggagagatgatccccttgccgaatgcccctagaaggggtaatagggccgacttcatgattcccatgaacaaccgtatatcgagtcgatgttacacatgtcaaaatcaaccgaacccagatctcagcgaaacccaacttccttagcattgcttcaagaaaggaccactcaattctatcatatgccttactcatgtcaagcttgagagccatatatcctttcttgcctttgcgtttcctttttag

SEQ ID NO: 73508 - DNA, 1003 bp, Cannabis sativa
attcccacccaaattgaaaatagatgagaatcaaccacttgatgttcaaagcaaaataccaaaacctttttctctctctagctttctttctcttctttccctctcttattcttctctcttggctcttggtttcacacgacaccaccatcagttttttctttttattttttctttttgtttcctttaaattgtaaatggccttttagcccttattggtccaagcccaagaaattaaagggcggactaaacaaatctccccctccgcctcaattggtcggctctactaagcccgctcttcgcctacaaacattaagcttctctttaggaaaagtctttgtaaacatatcggaaccattctcactagtatgtaacttttctaagtgcaaatatttcatcttaagcacatcacaattccaatgatatctaacatcaatatgcttggatcttgaatggaatgttgaattcttggagaggtgaatggcactcttactgtcacagtagacaatgtgtatttcttgttgcaagcccaactcttgtaggaactttttcatccaaaaagcttctttacaagcttcagttacagctatgtattcaacttctatagtagacaaagcaacacacttctgtaacctcgattgccatgaaacagcccccctgcaaatatcaccaagaatcctgaaatggatttcttggaatcacaatcactagctatgtctgcatctgtgtacccatcaagcataggttcaccactgccaaagcataagcacaacctagaagtacctcgtagatatctcaatatccatttcactgcttcccagtgatccttaccagaattagagagaaatcggctaacaactccaactgcatgagcaatatctggccttgtacaaaccatagcatacatcaaactgccaactgcatatgagtaaggtattgaagctattcatgtttatccttctcacttgtaggacattgtttggagcttagcttgaaatggcctgca

SEQ ID NO: 73509 - DNA, 536 bp, Cannabis sativa
aatagttcagggggcattttcaatgaccttaaaagttcagggggtatgatttggtacatgtcaaagttcagggggcaaaaatcttaattagcctttatttttttacattgccgtagagattttaatattgttgcccacaccttagctaaagtcgctcttacaacatcctctagcactgtttggtggctgagctctccaagttgtattcagaacatattagtagcagatgctactcaataatgcattctcgccccctcatttgttgagttttattactcttggtgcggtggttgagatattttcctaaaaaaatacattgttataaataataataataatttttttttgcggctaaactctttcaattattagtccacttgcacttaaccctctaagctcaaattttgatggtaaaactctccaaactattaaattgctagcaaatttaaggtgtcatctatttttacaattaacaatcaatatagactgcttatgtgtacatttttgtatatgtgtcacatatatattggtatacc

SEQ ID NO: 73510 - DNA, 956 bp, Cannabis sativa
cgtgggtgtaagggtccaatgaaaacttgaagcgaggacgttactacactagtataatatagacgtacatattacatacataatcttaaatttttcatctccaatctaatagataaaatatgtaacaaaaaaataatataagaaaatcatatttacattttaatttttactttcattgttacacatgtagatattatttttacaaaaatcttatataaaaatatattatttattttatgttatatattaatttttttttaagaaaaaaaacaactagttgggttcgtgggcgggtatgagtcctataagaacccgcgggttagcaaaaatcaaacacgtacccgtccaaaagagttgaccagattagacccgacctgcccatagggaacgagttttcccaaacaaatgggttggttgaggttagtctgagtcaaacttgaccaaaatattcaattctagttttgtttattattttggtatggggatgtgtatattaatattatatatttgaaatggaaaaaatataataaatttttttaaaaaaagtagagttttggtgaggtattttaaagaaattaatgtatgatgtaatgtaaaagtgtgctgtaaaataaagaaagtaaagttttaataatgtattttaaatgataaagtagataaaatatgggaattgctctacagacttgttaaatgaagcaacccattttcaaaaaaaaaaaaaaaaatagtccatacgttacaaaaagaaaagataataagaaataatttgttttccaaatatagaaccaatttaatgtaacctgccaggctgccatataaattatacagaatacactatgttttcaagaacaaaaattgaactaaaactcatgtcgatgataaggtaggttgttaaattggtcctcatccctttccattcatatttggaaaccaaatagaatattctgttaccaaat

SEQ ID NO: 73511 - DNA, 1413 bp, Cannabis sativa
acaagtgccggatagacgtaactgtgccaaagtctactagggtcggtcggctgaggattgcattgtaagaatttggacagtctaccaccacgaatgtgcagtatttgaaagtgctctggggtgtgtccggacacagggtaattgcaacctcacttttcccattgggataagtgtggttccgttgaatcctatgagctgggaaccgcttggcgacagatcccagtccgtaaggccgatcgccgtgaaggcttctttgaataataaattcacagaactccaattgtcgatcagtattctagccacgatcttgttggcgatgggagtttctacgactaggggtcatggtgaggaaaatgcaccatctttgcgtcttcttccgtgaaagtaattggctaatccatgaatcggggcctttgagctggaagctgagtgacttcccccacctcgttgtgtttaacggccacggcatagcgcttcagttcctttcgagtggtccctccaatatggggcccaccagaaatcatagccactcttctgttgggtcttagtggtaggcgaggggtttgctgaggtcctcctgagggtgcagctggtgccagcgctccgggctcaccccctggcatcccctagggtagaagtccccctgtcggaactgggttgagatggggcaaccgattcttgatccacttatagagatgccccaatcgaattaaattttcgatctcatcttttaggtttttgcactcattggtactgtgtccaatgtcgttgtggtactcgcatcttttgctgggatctcttcgggaactatctcggtacaggggaggcaatctgcggtagtgcatattttgccttgtggtaaaatacacacgctcttgtgagtccgttagctctgtgtactgggtgtattggggagtataccctcttttttggcgcttgtcctccgtccggttgctacctttcaaggacctcttgctccgggagccttgagaaggtccaattaggcttgcagtaggagcggagtgagacgagacttgtccacttacccccgaggggttcccgtagtgcgaagatgcgggagccaaggcctggctctgattatatcctggagtagcggagaattgtataccgcttatttatggagtaaccgaaggtagggttctcgggagttgaactccgggcacatatcctgccactctggtcaggtagtatgctccataagccactatctgggcctcctctaagttgatgtacttttggaccctcttttggaaatcttagaggttcccagctccttctagctgtaacttgttctagaatgggaatcctgtatggatcccagcttgaagaagtgcaagctgttgtccgtcatcaactttcttagtcttcgaggcttcttctttgaacctcttt

SEQ ID NO: 73512 - DNA, 676 bp, Cannabis sativa
ggtaatcctcttttttgttagctgtgaagaagaaaggatttccaaggtatttttccttcagatttaagcaatttattcccattcttccttcgatatcctcacgacatctccgagaggtatttggcgagaaaatcagaccactcttttgcttattaaccctctatccagaccagccctcatacttttggatacaattcatcatgttgtccacattcacaactgtggcttggcaaaagaagatggagtcatcagcataaaataagtgagatatatgtgttgcattcctagcaacacaaacaccagtaatctccccgtttctttcagctcttacaacaagcttggacaagacttcactacacagaatgaaaataaagggagctaacggagctccattaagcatgacagagaaactaaccatcgtaatacattgcataattacgttgcaaacctttggactaaacccatttgcttgaagaacctgtcgaataaagtctcacagaagcagtaaccttgtcttcaaacagagtgttaaactcgcttccaatattgctcccttccgattcgaaaatctcacagaagtgtttattgaaatagttcgtaatatcttcaccgctgagccaaactctaggtttctcttccacacttccagtgaagtttctgttggaattatttacca

SEQ ID NO: 73513 - DNA, 942 bp, Cannabis sativa
atattgggttgataaaaatatgctatagcccgactacaccgaccgacgtacacccctagtgctgacgaacgtaaaaaaaatattttagagttaagacaaaatctcatatccctgggtgcacttgaagataagggttatggatgaaagtatatgaatggaagcttgaggatcaccaaaggttctttgatagtgatgaaaggtgaaaagatcaatggtttgtatattgtccaagaagaaactgttccatccggagaagctagtttggtaaaggggcaagaatcggatatgtagttgtggcatcacatactcgggcatatcagtgaacaaggcctaggagtgtcaatgggtcgggtcggatctgatccggctatgatccgacctgatccagatcatgtaaggatctgccctgcccctccccgctagatcagatactcggattggatcagatccgacccgacttattcgaatcagatttgatccgactcgactattttttttaagaattttaatattatattacaattatatatccatttcaattttgtattattattaaatacaatactatgtttggtattgacatatattaatagattatgtaaagattcgggtctgagttcgagtctgggtttgggtccgagttcaggtcctaggtccgggtccgggtctgggtccaggtcccggatcccaggtccgggtcccacgtcagggtccaggtccgggtgccggattcgggtcagggtcagggttagggtccaggtctgggtctcgggtcgtgggtccgggtcccagtccgggtctgggtccgagtttggttctggcacccgggtttcaggtccgagtctaggttcgggtccgagttcagatctgaagggatccgagtcttgaattaagtttttttaaaataaattgaaatctggtcggatcagatccgatccaaaa

SEQ ID NO: 73514 - DNA, 1097 bp, Cannabis sativa
  modified_base (1065)..(1071): a, c, t, g, unknown or other
taaaagggtaattactccttgtgtcctaaaacaaaatcttgttatcttatgttctaaatacaaacttgttatcttatatgttttcattattatgtgttcatgtagtagttttttattagaaaatataaatattttgtatgtacactggattcaaatttgataaaactgtacgtcttcagtttatatgagttttaaattgtattacttagttacatataactgatgaaagtttaaataaattaatatacgtacttagtgaactaaatatatacaatataataaattattaaaaatataaaatattttgatcaaagaaattaagtgagtttcacttttatataaagtaaaaacaaaataataaggggcattgctgtagggacgagttgtagtgaatttatttgggttataataacttaattaaattattatattttttaaaaaaatatcaactttagtttgtgaagaatgttattaataagaaaaaaaataatattattattgtagttagatggttgattttagggtgtaaatacactactataatatgggtctttagcttccttttttttcaacctattttataaaaaaagaagcttaagggtgtaaaaatacccaccttattcgaaattgacattgagaggcggttttttggtaaaaaccgtaggtgtatatattaataaaccctatgtcattggttgaaaattggaaaattttaagggtttttggtaaaccttatttcgtcggttcctagcaaagaaccgacggcataagtgcacacatgtcaataaagtgtgcacctatgccgtcggttctttgctaggaaccaacggcatagggtttaacaaaaaacccttatatcgtcttcttcttccccacgataaaagtagccacaccagatccctgaaaacacacgaaaccctcgccaatcaccactaaaattcaccttatctccctcatttcttcaccatttcatcctatttttgccttaaaattttcaattttcaatatctaatctcatacactaaaaaaattttattttctcacccatttacactgtacccgaannnnnnntaaaaaaaggtggtggtataactccg

SEQ ID NO: 73515 - DNA, 639 bp, Cannabis sativa
  modified_base (581)..(585): a, c, t, g, unknown or other
ataaaaaataagacaatattttcaaagaattaatatttaataattcaaaaatatagaaaaataaaagaacattttcaaagaattaacatctaataatttgaaaaaatagaaaaataaaagaacatttttaaagaattaacatttaataatctgagaagatagaaaaacaagatagcatttttaaagaaataacatataacaatctaaaaagacaaataaacaagagagcattttcaaagaattaaaatctaataatttgaaaagagaaaaacaagagagtatttttaaagaattaacatcttataatccgaaaagaccaaaaaaaaaaaacaagagagccttttcaaagaatttacatctaataattcaaaaagagaagaagaaaaacaagagagcatttttaattccagatccaaaattgaaggatttgacatttagtgaagaaaaatattttagactattgagaatacgttggcttctaatatagtaattttattatgtataaaaatccaaaactacactcttgaaataagaccatctcctgtgagataagttaaaaattacttatttttattacacannnnntaaatataactctaaaataatttttattgataaatactcttttttataatcaaa

SEQ ID NO: 73516 - DNA, 849 bp, Cannabis sativa
  modified_base (665)..(668): a, c, t, g, unknown or other
aatagcgagacagccacctcactattctaaagaaacttgatgaggtgaatcatctgctaacacttagcgcttttttcacattataatagacaagggtaacaactcggagaaaagcgagatacaactgtctaaatcagcattcatctataaggataagaataaaaagcagttaagttgttattatgtattatcccacatgcatttaaatgaaacatgagaattgtccacatttcatgaatagttatatttaaaatcgttttcctataaataggggcagattccacaaaaaatgggaggagaattcgagagagagaaaaagatatattatcaatgatatattgtatttagaaaatatcataaataagatagactcgtggagtatgcagatttaactgcaaaaccacgtaaaaatatctagtgttatatacacatttattattttttattatttctgtgacatatttattacgtaaaggcttattatttttagttaaggaaaatctacgttaacagtttggtacttttatggagagcctaaggaataaaactcaaaaaaatccctccttacaaacagaaatcattccatggctgatcacaatcaaaatgatggaaatcgtcttgaagaaactacacattgccttaggaaagagccaatgggttctcannnnccccatacttctggaacaacacgttcaaggagaaattatggtggtgataatcaaaacctagaaaaactaatacttctgtaggatatgtacctagaagtgaggatgcttataatccaactaggtatgtaccattagtagaattagaaaatcgacaactccgacaatgcttagccgaatctaa

SEQ ID NO: 73517 - DNA, 828 bp, Cannabis sativa
ttttgttctaatggtaagcttttataattatagataattaatctaatagtgataaatagataattgtataattatagttaatatttgggatgcacttgaatattattttaagtaatataatattgattttttaaatcaagtaaaagtcgtttttttcatctttctacagttataatcttcttctcattcaagttataatcttcttctcattcagtgtcttctccatcttccaattaaataagaatgtcgtttcctcatctcatatttctataatccatttgtcaaactattattattattatttatttgttattgttatcattattgtttgtaaaaattacaataacaatgaatctttagctccacgagactctaaaaaacatgtaaattatctcaatctctcacaattaaagtttgaggtattttgattctttctatcaagacattaaacaaaggcaaacaagataaaccaaataagcatgctattgaacaccatcaactagggtagaatatcgaacgggtttaataggtttcaggttcataagtttttgaaaaaaaataatgcacctctacccgcttgttcatgtcacagattcaactggtttcaagtttgtaggtttcgtattagcaccgtctacagtaaattggttacaggcaggttcataggttttttttaatattatatactaaatattatatatgatatatagtaatagttatatataagactcttcttttataggagtttgaaaaacaaccctatggatggggatgtttttcaaccgatcttattgttggattttttgccctaaataaaactcattttaa

SEQ ID NO: 73518 - DNA, 2818 bp, Cannabis sativa
  modified_base (1221)..(1238): a, c, t, g, unknown or other
aaagaagatttgagcttcatcttcacttggacaatctctacccttctgtccaaccatccgactcaactcgctaggattgcaatccaaatttaaacagctaaagctgaaataagaagaaaataaacatgagaattttcgacaagggtgtgtgtctaaaatgttatttttacgaaacattattaaaacaaggcgctattatgcataatgattacaaaattagattattttgctaaatacccattagaaattacttatgtaacttatgtggtaagaattaaagtattatacatgattgattatttagagaatttatatactcaccaagaacatcaccaaggacaaatgtttgagacttgacccaaatttgataagcgattgggcctcctggagggaccaaccaataacccaagccatctccaactacgtgtgtcgtttgtgctgtactcaactgcatgagatttagagcaactgctatggctaaaatggccaatttaagtaataataatgatatacccatgatttatatatgtaaatatgtactctgaaatgtctagcaaatattaattctgtaccttttgagctttgattgaagtagagtgtttatataaagaagcaacacaaaatcatgtgagtatggtggagctaactaaatattaattgttgtagagttcccatttatattgtcttatgagaaaaacacttaatttatttataagctatattaatcaatttcaagatctacaagctatatttgactaatatatgtcttattggagcagggttaggaagactagttaaatcattattaactaataatgtaatttcagtgacggctgagttgataattatttaaccgtaaaatacaatttaatgatatagttttctaaaggacgcggtttagactttcttttagaccacttcaattttgtatttaaaaagtatcgtttggttggaggtaatgaaatcaaatagaatggattggaaaaaaatttcattctattcctttatttggttgcatttaaaaccattggaataccattctaatagaatgacctttacatcattttagtagaatgactattctattttaaaattaaaggaaataccattccaatgcaagatttgaaaaaaaatttaataatttttttatcaaatttttttatgcattttaaattttactccattccattctaattccaattctcattcccattcctattnnnnnnnnnnnnnnnnnnccaaccaaacgccacctaagtgtcccacattacatccacgtggcaccctattactgattatcaatttttcatatcatttattaaattaaaatacataaaacctgatattaaaatacatcaataggagtatgctatctcttgtggtgtttgtcaccttaaggtgccccatagcatctactttttttatgtcttgcatgtaggggtgtgcataaattgatctaatccaatgacaatcgatcgttcctattacaaccaaccgttccaattataatcgactgtcaaatatttgatatctaattgtgatcggatcagattggatgttatttttcaaatatccaattggattagattggatgttggatcgggtgtccaaaaatctaatacatccgcaacatccaatcaaactaattagttgtttacaccaagagtagccctgatgatgtggacatcaatgtctgacacatggcaaggaaacatcctcgaggttgagtagtcccaagtcatagcaagtcggtctgggaggggtccctagccctcagcccaagttgattttgggaactctacaatggaaatttagacttcaataacttgaatcaaactcactatctttcagtattacgtaccatcaatacatggagcaacctagtccaagccccgagagttgaaattacacgaacctacaacttggaagcaaacctgggcacatagggtttcaggcaactcctatgttgacattcccaactagggtttagtttatgagaccgtcttagtagaaatgggtttttcacttgcaatgggacatcaactagatacataccacagacatatttaaggcatcagattcagaatcagagcaagttcatttttgagcacctagtgccctagggccccgagcaccctagcgcccaagttgacaaattatcaatctaggcgccccttccgaatatcagatcgacaatccgacttttggtcttctttgtcttcataaaaaataggaaaataagtcctttcggagaagaaacaacacttcatgggtgccaaaaatagggccatgtttacattttttcaacctaggccactttagatggagtttttcaagaatacttctgagaatcttcaccgttttcaaaaaatattgagattcaactatttctcgagaccaaacaaaacatttaatgagccaaaagggggacctagtgcccaggttaacacttggtgctgcgcctagcgcctaggatgatatattgtcaacctggattgttttcgatcaagttcacaaaaatgtgttcctagaattttttcaatcatcagatataatgaacattcaaggaaacttggggagaaaacaacaatctcgagcccctagaaatagggcccagcacccaagttgacttggagctggtcccagcacccaggttgacaatcaacctgggacgctgccttcaattgctcaaatgccaaaactgatgcagccattgaattcaagatggtcaaaaatggggtaggagacctcgtaccaatatacaaccagctatcccaaagatcgtacgctccatgcctaaccgccctgacatgtacaa

SEQ ID NO: 73519 - DNA, 808 bp, Cannabis sativa
agttattttattgcatataaattagtgtatcaactgtataaatgcaatccattaaacatcacaaaataaagtccaaacacaaacaaaatctcataaaatactttttggaagagtatatatataataaatttacttttatattcattccttgataaaatctcaatatttattttattgatggaagattttagagttttaaactttttaactaatagtttttttttttttttttttgagaaaagacttttttgagaaaagaccattaaaagaccattatattaattgaaatgaattacataacaatcataagtggaggtgaaaatttcttcaaccaaatacaatcagtaatccaaacttagccaaaacatgggcataattattagtagatctagacacatgagtgatctgtgctcgtggaaaaaatgatacttaaaagtttaatctttcagaatagtatgaaatgtagaattacaattcatagaagctttaagtccttgaaccaccttcatcgagtctgtttcgatgtagtatgttgaaagattacgagacatgagccattgaagtgcgagagcaaggccaagagcttccatttcctctggtttgtaacaacctttgattggtttagataaagctacattgacagagccatgtgaatccctcaaaacagcaccaatgcctacaatcccattcattttatccatggctgcaccagtgttgagtttaaacttctctggtggaggagcaatccaaggaggcttcgctggaatattttccgtttctgcaagtggatgtataaaagtatcgaaag

SEQ ID NO: 73520 - DNA, 1039 bp, Cannabis sativa
ttaaccacaaagcttgcaaagataccccataacatgcgacaaactcaacatacatagtagatgatgtgattaaagtctattaaatacttttaaaaaatagttgcactagccaaagtaaaaatataacgagaagctgactttaaatcatctacacaaccactaaaatctgatatgaataaccaagaacttggagattgttgacatgcttatacacaagcataaaactatttgctctttgcaaatatctcatgactttcttggctgcaacccaatgatcatggtcaggatcatataaatatctcccaagaacattgactttgaaaataatagtgctaacttgagcacatatcaaaatccatactacacttgcatatgggatatttttcattgcttttctttccaagtcgtccttaggacgttgttgcttagtaaatttgttccctttcaaaataggaacaataccagccttacataaatttatgttgaatcttttgcggacacgattaatgtaagcttcttgagataagccaagaaatttttttattcttatcacgatgaatttcaatctccaaaataaaagatgcctttccaagattctttacatcaaagttggtagacagaaaaattttggtctcatttagtaatgacaaatcactgttggcaagtaaaacttgatcctcataattaaagaacaagaaaaatatgacgactcccgttgatcttcatataaatacactggtcaaacttgttctctacgaaacaaaacgatgtcacaaccttatcaaacttcaagtaccactggaggagatgcctgtttgagaccaaaaaacggatcatttcaatttgcaaaccaaattttaattttcattttccttgaagcctttaggttgagacatataggctttctctcttaattcccattaagaaaaagtagttttaacatccatttgatgtagctcttaatcaaaatgctcaaccaaagccataataattctgaatgaatcttaagtgtaaacaggcaagaaagtttcatcaatac

SEQ ID NO: 73521 - DNA, 1419 bp, Cannabis sativa
  modified_base (1073)..(1076): a, c, t, g, unknown or other
taggaactaataagatgataatgctagtgaagtctttaacatattcaaatatgatatatatatatacatatataaataaaaacgtagatttcataaaaattataatattttttaaatataaaatataatgcactctccttaatttagttaattaaatattatatatatatatatatataaatgtgacctatcaaagtttataattaatacattttttttaattaacattaatgactaaatattactactattaaactgagtttctaatattttaaacatcactcattctatatttaaattacttagttcaaatttttaaatatattgaataaaatatatttgaaaattaaaaaaaaatatcatatttttttcaatggacatacataaagtttccgtcgctgaaattcttaatgtaaaactttattgtatgcgttgttcgatattggcccccctactctttaattctagctccgtccctgggtatgaatatctgtcatggtacagtcaaatattgtaagaagtgaatttttttataaataaatgctaaggagtatttaacacttttatgagatataatatcgttattgatttaattcaaaattgaatcatacttattttaatttattaaaaattataagaaattactaactaattatacaacataatgttatagatatggtagcccttaccaatactcatttatatatttatatataaactatattaattattgtaattcttacccattaaaaaggactttgattaaagtatttgaagcactttgactattttcttaaaccaatatatacacgtgatgttttcaattttccaaactgtattcgcaccgcaaaaataaaaattcacaaaaattgcactacaaaaaaaggtgcgatacggtgcagtttattcagtttagactataaataattaaactatcacaaatacaacaaagtttgagcaacacttgtcaaaaataccataaggcttgaaaatgaatttgtaaaaaaaagtttcaagttttaataatacaatagttagtgagcttgggttgggccttcacatattggacctannnnaatataaaaattagtatttttgtactatgcggtgcggtatggtttgaactgcctatgaataatttaaaatcgcaaactgcaccgcatgcaccgcgctgatttaggaaaaatttaaactgcgaccggtttgagtggacggtttgagtggtttgatgaactgcctatgaatatttttttttacggtgtgtggacggtttgagtggtttgatgaacacccctaactattcaggactatttataaaaatattggaaaatgaagatatgttttgatatatatggcataaaaacttaattgccctaaatatggcattttcttaggaaaacttacaaatatgggaaaaga

SEQ ID NO: 73522 - DNA, 991 bp, Cannabis sativa
gatgcaactaaccacagaaaagatgttagaaaaaacaatactgatgcagaaatactaaacaagagtatttacataatttgccactcaaagacatgacacttacacataatttactaaaaaagatcacctttagtgacaacagtatagttataatataatttttttgtgttacttgtgaccactataaaaaacggttacttttagttacaaccttttagtcacaacaagtgttgtgactaaaaatacatttagtcacaataatttttgtgactaatacttttagccacgaaccttttaatcacaatgtaaaaataataatttataattagtcactttattatttttgtcacaacttttattaattgtgactaaaagtgaaaaattttatagtaattggccaccaagtcaacaatttaataacttataataagaatcaatttactaatttaattgagcgtatacttagtcaacaagaatgacaatggaggaataaaaagagagactgaggaaaaggggcattagaatgattaggaccttttcaattttaggaaaattgaacacattttttgatttaattaaacaatttagtgccttatattagaatccaaaagtaaaaaaacactacaaagagagacacaagttgtcccttataaatagtaacatgaatagagaatatgaatagaaaattattacataagtgaataatttaacacaaactacacataattaatactaatttccaaatatagaatgaagtaaataatatttacataagtgaattagaatgaagtaataaacaataaagtgccacaaactccaacaaatccaactacaaatcccactccaattcccatataaagccatgacatgttaagccacccttcatcatattcttcagcatcacttggatcatgaatatctttagggctatttggtgtctcatctccaagacatgaattgtttagtggaagtccgcacaatccatcattat

SEQ ID NO: 73523 - DNA, 1582 bp, Cannabis sativa
tttattttaatcacatttaatttgtgatcaaatatagtcaatgagaatatcaatattatcttcatacgtttttgtacacatatagaaaatattctaatattctcccatttggtcaatatttaggtctactacttaaactcaatgttcctcatcattatataataaacacattaatcatagcgataagttctcattatatggtgattattatcttcaatgtattatgatatagttattgcataacaatgtactttatgtggcaatatttttaatcgaataaatctaaaaacttatgtttatttttgtcctctaaaattttctcaaataaaaaattaagattcacataaatattagaacacatcaaaataagagtttcattaataataactttatttatacaagttctataaggcactataagaaatgtcacttttgccagcacatttatgcgctgataaaagtttaattagtatggcgttggcaaagaagaatatacatttgatgtgttggcaaaagagatttgcaaatcaacgttggtattagaatttttatcggggcaaaatgaaaagtgctagcaaaaattactttttttagcacgtaaatacgttggtaaaagttagacttttgccattacaaatgtgcgccggtaaaactttaacctttttactagcacaatagcaaattgcgccggtaaaagtaacatttcttgtagtgagagaatcaagtcccatgttctctacatgatccttgaatttatgtggtggcaagccttttgtcataggatcggcaatcataaagtcagtgctaatatcttgaatgaccactttattttcttccacacattctctaatagctaagtacttaatgtcgatgtgcttactttgacttcatcttttgttgtacatagccatgaaaacaatagttgaattgtcacagaacattcttaatggccttgatatcgaatcaacaactctaagggctaaaattaaactctttaaccatacaccatgtgatgtagcctaaaaacaagaaacaaactcaaccttcatagtagaaataatgatcaagggttatttgttacttctacatgatagctccaccagcaattataaacacgtaaccagatattgatttgcgtgaatttgtaaaaccagcaaaatttgaatctaagtagccaactacttctagatttcttgttcgtttgaacataagattgtaatttttagtatcctaaagatacctcataatcttctttatagttttccaatggtctatccccattactataaaatcttcctaacactccgacagagtaggcaatgctgggtcttatgcacacttaagcatacaataggcttttgatagtagaagcataaggaatgttcttcatttattctctttcaaaatcattatttggacactggcttaaattcaatttattacccttaacaatgggagctagctacactaggtgaacaattgtaatgaccgcttaattttaatacaagaattagaagataattagagtttaatttgaaaatagagtttcaattatgatttacgaatttatggagatatattt

SEQ ID NO: 73524 - DNA, 1194 bp, Cannabis sativa
cgcgcccacaacctccttgccgcgacgaaggtcaatgctcgccgcagtgagaacctgctgctaaaaaaattatatcgtttgttcagagtagtattttttccataactcttttaatacaattcagaaatagacgattcaagatgttccgaaaagctgagaacgagaattataactttcatgtttaactccaagtctagttctgcttttaaagttgtcaaaatttgcaattaagctctaccttgtaaaaccgaaccttccaaaattgacctttttcaccaacatatgctaaaacaattccaaaatagtccaaacacatgattagccttctaaaatcttaaaaaattaaaatcacactaatcaaagatttaaagagtctatttaaaaatattaacacataaaattggtcatatttataagacatgattagccttctaaaatcctaaaaaattaaaatcacactaatcaaaggtttaaagagtcttatttaaaaatattaacaccataaattggtcatatttataagataaatatagagttatcatttactcgttgaggtagtggttttggaatatactacccatattttttgtgacatttttaatacacatatttttaccgccaccgatagttaatgtgcactgcttaggtggaattttagtactccaaaaatttaatatagtcatgttatatgttgttggactcagtttttaatgtagaatgcaatgatgctaattatttaaccatttgatagaataggcgaaattgatatctaagattggactaattaaataattggagctcgggacttgagagcttaggatcgtctttttggacaaagtttaatgacttgggagactagatatatactcaacttgattattagacttgtttttattgtaatgaataacatttgacatattctaattttattaatttataaaatatttgaaaaatagaaaagttaatctgcatgtaatctagattgttctagaggcactgagtgtcaaatatatttttgtacaattgtctgtacacgttatgattttagggttttatcaaattacactggtcgttatgctttcaaattttttaaaataaaaagaatatgtactttttctatttttggtgtctatatatagttttactgatgagagtcatattaatcatgtcttgtgcatattatattttcatgac

SEQ ID NO: 73525 - DNA, 697 bp, Cannabis sativa
gccaattgtgattgcccctggataccagaatctcaggatgtggaagagttgaatgggccacctactggggtggacttctccagggttaggagaaaacagaagccggttttcttgaaggactacacagcggggaagaagaaacaacgacatgggctagttgaagtagacactgtgaaaccggcagacttgcggctgttaaaatttttccaaaagtggatcacttacgcgagggacaaccaccgtcctaggcatgttcacactggcccagccaatcgatcctggttcgtcaaactgatggtgcagggagaatggctcgacgatgctgtaagttatttcttaacagaataaatttattgtgcttttaaatttatgtgcgatttaatgcgatttatatgcgatattgtcaacattatgcgattttgtgcgacttatatcccattttatgcaatttattcacttcttttattatgtattatttgtgcgacttaagtacgatttatatgcgatttttgtgcgattaatgaaatagttttttttatttctcttgtgcgatttcatgcgattattgtgcgacatatgtgcgatatatctctaacttttttcttttgaaacacagcaaattgatgccatggcgcacttattgagaagaagacggaacctctatccagaagtgtacactcgaaaaggtgtagttttg

SEQ ID NO: 73526 - DNA, 1173 bp, Cannabis sativa
  modified_base (412)..(412): a, c, t, g, unknown or other
accacacaatataaagaaaataagttaatgtgaaagaatgatggtaaataaatctctcttaaatataaagagttaaaaagatttggaatacttatctgtataagtgaaaggttgttaaagtagaaatcatgaccacaaaatgtctcacttctcttgcccattaaccataacacaaaactaccctaaacaaatagggacagtccataataaatgacacaaaacgccataaaaggcacataaactataaatagcatccaaactattaaaaaatagttcaaaaaacctgtgtggtctcacaaatactttaaacatataataataaaatactatcataaatacttaaagaataatcattataacatatgagggaaacaaattaaagtactttgtgaaattcaaaattgatgctatnagcgaaacaaaatataagaaaagatttcacagtaagactaaataaattataaaaaatgtttttagtaatatatataataaaatagaagttataaaatttgatataagacataaaaattaaacaaaattggtataaaataaatagaaaaaaatagaattaaggctacttaattcttaaaagaaaataaatgctaataaagaaattatgaaataaatttacaattatacctaaatattattaaaataaaagctgtagtaaattaatatataactaaaaaggaaaaaaccataaataaatataatttgatatgtattattatagcaagaataaatatattaaactatattataccaaaaaagcataaatattatataaaaaagtaaatataaattaaatgtagtataaaattaccacaagcaaaataggtaaaaaccaaaaacgaaataaaaggaaactatcaattaatgttactaaagaggaaaaaaatcaaacaactcaaatgaaaactaatgatatttttcaatcacaataattttagtaattaagaaaattatcataataaaatatgaataaagttaatattaataattaatactataaaaatagttgactaaaaactaattaatataaaataataattgatatttaatactaagattctctcaaaattttaatatcgaaataaaaactaaatcacattaaagtagcaataataaaaatcacattaaaaaattaattaaaaattgcaataacagaaatta

SEQ ID NO: 73527 - DNA, 1155 bp, Cannabis sativa
  modified_base (33)..(45): a, c, t, g, unknown or other
  modified_base (72)..(76): a, c, t, g, unknown or other
atgtgtttacttataatcgttttagaagttcannnnnnnnnnnnnaatcaacatacttgtgagtatatctannnnnctggtaaaataattccaacagttcgatcagtgttgggtgacccaacaacatgttgtaactcaagggcaagttgacaaccaagaagtcttgcataatagtagcatttaaaggtgcctcgcctacagttaatacgagctcgattatgccaaggctggcgatgttatcttcagtgaatccgcagagattcaccatacaaggccttaacttggccttttcgagccccattttccttagagtctccttatcaatgatatttactgagctcccattatcgattaacactctcttgatcctcttattggcgagttggatgattatgaccagcagatcgacgtgagggtatctcacgttcttctggtgttcctctatgaatgtaatggggggttccttagttttcacctttttggaaggttctgggcaaagaccaactgatcattctttatttcttttacatatctcttctgagtgtaattgctttctcctgtaatatgcggccatcccgaaataaccaggatgtcctctccttccacaataagaggttgcaacccctggttgtttgggttattaggctgacggggctggttgtatccctggccctgtcttctcacatactgcttaaaatggcctcgagcaatgagactttatatctcatctttcaattgacaacatttgtcggtcgtaagcccaatatctttatgaaatttacagtacttgttaggatctcatttgctcctcgaattcctcataggctcgggtttaccgaacgctaccttctactcatgtgcaaggtaaatattttctcaagtttcattaagcttggtataaatagtatacactggcacatatttttcatgcttcttttgtttctttctatccttcgacggttccttaattccgtccttccttttcggaccaaaaacccccgagttatcaattcttgtggaaacagtccccattgaaccattgctaggtttacctcccgagcttgtttttaacaagttcatttcctttcgggcttcttccttccagacaaacacttgagctctttcgttgaatcaatgatgtttcttaccggacgt

SEQ ID NO: 73528 - DNA, 953 bp, Cannabis sativa
atttagagatctatggaatagtagtattattgcactatcaaattgcaataattattatggatcaatcaggtatgcatatacttaactatcatatattgttattgtgttctatattatatacaaatagatcttgggtttattgttaatttatctaacatgtattatcagattgccttttgtatatgatttaggacctataatttgtatatgttaattgttaatagttacatattatttttgtaataaataaatgataaaattttcattattgaatcttaaaacgttagggattttgtttatccttaaattctcgttttgttgatatattatatgtatgaaatcattgagtacattattagaattttaagtttaaagtattagggttttattattatattatgaaattatattttgtggttttttattttattgtttttgatctaaaattgattatcaatatctcattatcaattgtttatgaatgttcctgcatgatttatttcgtatttcggtcgagattggtatcacaatcaatttttttttatgttcttcaaattttttggattgctttttccattagatctacttttttagccattaatacctaaaattagtagcgtagattgactagaaatccaatcaagagcaaaacccctccttttcccattctttttgttggttttttggccagttttcctctcagactcgactggtctgaaaccgggtcgcgtgacccacctcaaactcggctagaggaagaagaagacctgccagccggaaagcccactctcagcctcggtgcgtgggggcgcgtgtggcacctccgggagtcgttttttgacttttttttttgcagtgtgcttaaaattaaatttatgatttttctatgatttttaattaattttttgactctttttaataataattattattttaatgataattatgtagtt

SEQ ID NO: 73529 - DNA, 1200 bp, Cannabis sativa
gtaaaatgatgaaattaatttaattacgtgcttaatagaactatagtattatatagtatgcctgtgttgtcttttcaggtgtgttctgacaggctagcgcagtatagtcacaaccggaaattttgggccgaactgggttcgggcccgaaatccaaattggattgatttatttggcatttttattatgggtgataatctaaaatttatttggtattatttgagtgtgaaattgcaatattgctcttggaaatgtgtatgcatgttaattggccctaagggcattttggtcatttgacctcttattattatgtttggaaaattggatttttgttaagaaaatcaaagtaaaattctggtttttcccctatctcacccgacccctctctctctcacactcaaaccctctttgcttttaatgttgaatttttgaaagaaaagcttggtcttggcttgatttgaagcttgaggttgaaggaaagatttttgttcttgctttggtgtgaattgaggtagcttcttattcaattgcttaatgttattctgaattttatggggtaaaacatgcttaggttggttgagcttgattatgcatgctttgtgaaatgaacatgtaatcttgataatttgagtatgttaatctttggatttgagttcttgagcatggattttgatcatagggtatttttttagtatgaatcatgtgttattgtgatattttcatggctgaaattatttgaattgtagaagattgagctcttgtgcaagagcttgaagttgccatgtttatgcatgaatcttgtgttgtttgagcaatctaaagttttaagtttattgctggaattagttgttgaaacatgaattttaattccttgatgattgctatcatctattcttggtgatttgtgagttgggatgtgaattgggatgaatagggggtgttgtgttgctgaaatttgagtatgttcttggctggtttttgggttctgcaccaagatgccgcggcatgctctggagcatgagcatgccgcggcccgcccctcttggtggaacctgggttttgtccccaggcgtcgcagcatggtctgggcatgccgcggcccgccctcgtgatttttgagcagtttgtgtcgagttttgaaaaatgcataacttttgatttcgaactttgatttgggagttctttatatcgtcggaaagctc

SEQ ID NO: 73530 - DNA, 832 bp, Cannabis sativa
aatggattatgaaaattggaatgttcaattggaaccatcaaatatctcaaattacatattttatgagtaattacatagtaaaaaaaatattaaattgtgtgattacttccaattacgctatcgctttctaaacacacacccctaattcattatttatttatggtgcgtttggaaaaccatggaggagtttgatttgagtatataattcgaagtaattagataatctcacacgtttgtctggtcatgtaattacacagtaattgaaaatctccaatcacactctctaatgtaattattaaagactttccattttaaatattaactcctaaaaatattattttcttatataattattaaattatgttatctttaagttggagcacttggtataatacttttttttgtaactctgttattatatagcaaatggtaacacattttttatattattttttaaaataaataagtgtttcctactatttattgattataaaacatatttcactatagttttataataaaaatatataataatgtatttttgtattattttagtactaaaaagattgaatgtttattatataataataatattattattctatatttgtattaatttggtacttaaataagattgaatttttattatatattcaatttatataaggaaattaataacaatatatacatttgttatctcaattttagcactctgatgtggcatcacatactggtgacacgtggaatcgacttcacatatatgctcgaaagagatatgccgaacagagtatcacacatttttgcacggacgaagccttcctggtcgggtagt

SEQ ID NO: 73531 - DNA, 631 bp, Cannabis sativa
accagccccaaccacaccccagctacaacaagcagcccctacatcagaaggcgtaaaaacatgcctttttcagcttgaaaaaacttcctattctttagactatacaacctgtatttgactaaatctttaatctcatttacaatcttcaaaatggttaaacaactactattatgcacacaataattcctatttttccaaatcaaataaacagtggcagcaaagagcacattaaccacaccagaaatcctgttagagatccaacaacgccacctattatagtccagcgaccaagcagcaataccacaccaatcaaaaatcctcctcaccacttccctagagacacaacaagagaaaaaaaggtgatggtgactctcctcttcgctcccacatactgggcagagagtagagactaaatcaatgtgaaacttgtgaaagttgtctctagttaacaagtgtccatgaaccacctgccataagatgaatctatgcttgggcagagcaaaattacaccatatagaattgtaaaaactatcaatattcagagttattgatcccaaatacaatcttgcagcaacatatttacctttcctaaccgctgctgtcaccataggcttgctgaagtgatttctca

SEQ ID NO: 73532 - DNA, 1034 bp, Cannabis sativa
taaaataatttccaacagtaataatttccaaatacgctcctttatgtgattaaacatttgcttcttatcacgtttagaataagctggtaaaccaaggtatgactcatgacaatcacatataggcatgcctaggatgtttcggaaagagtgttttgcagcctcagttgtatttggtgaaaatgacatgacagacttatcagtattcaattgttgaccagaagctttgtgatatgtatccaaaactcttttgattgcaccacaagatctatcatccgcctcacaaaataacaaactatcatcagcaaagagcaagtgagaaatggacggcgagtgtcttgagatagctaaaccttttaagcagccaatagactcttcatattgtaacaatcgagacaatcctttagaacagatcaagaatagataaggagatagaggatctccttgtctgagaccccgttgaggtttcacattgcctgaaattgcaccattgataataaaagacagttgagtagtttgtaggcaattcatgataagagtaatccagcgaaggctgaaccccatctttcccataacagccgctatgaatgaccactccactcgatcaaaagccttgctcatgtcaagtttgagagctgaaaaacctttcctacccctggttttgtgcttgaggcaatgaaccaattcaaaggctaccaagatgttatcagtaatgagcctattaggcaaaaaggcgctttgagtttctgagataacatgaggaaggattgttttaaatcgaatcaccaaagacttagagattagtttgtagacaacattgcacaaactaattgggcgaaaatctttcattgattttggtttttttaatcttgggaatgagagtaatcagagttttgttgagagcttcaggactaccccctttgtttagaacatgtagaattgcctgtgtgatcaagtcgccaacaatatcccaattatgttgatagaataaagcagacattccatcaattccgggactaccatctccattcattgtt

SEQ ID NO: 73533 - DNA, 677 bp, Cannabis sativa
tattatgtctcattttaactttcctcaaactgtgtgtctcttattatgaagtgtatttctactactaagatttcttttttgattaatggtagtgttactggtagtgctaagcctactcggggtcttagacagggggaccccttttctccttatttgtttattttgtgtgttgaaggtttatcttctttgcttagacttcatcaggacataaatagtttaaaggctatttctatctcgcatagggccccttctttaactcatttattttttgcggatgatagccttattttctgtgctgctaataaagattattgtgctgctctaactgaaatctttgatacgtatactaaagcttttggccaagctatctattttaataaatcttatattctgttctctcccaatgtttctgctcagattaaagatctttaccttactaatcttaatctgcaggataaacctttcattagtaagtatttaggtttgccccaatgtctctcgaggtctaagcatcactctttctcttttctcaaagatagaatttcttttgttcttcattcctggcattctaagtgtttttctaaggctggtaaggagatccttcttaaggttgttattcaagccattcctgcttatgcaatggcttgttttaggttgcctgttaagctttgtaagga

SEQ ID NO: 73534 - DNA, 949 bp, Cannabis sativa
tgctacttttttttttatgtacaaaaacataaaaaaattggtagcagatatggttcgatgggtccgatggggggtacgatgggtccgatgtggggttcgattgtgtccgatgtggggtccgatgggggagtatgattgtgtaatgggggtgatgtaaatagacggtatcttagggatatcataaaagttgtcagatcctacaaatattagttattatgtgtttaggaaaaaaaatttaaccaaatgtaagtataaaaaatcaaatttctcttactaattggattggatcgattttttaataggatatccaattacacattaaattttaatattaacttataaatatgaagaaaattacgtaaaaagtaaatgtcactatttatttaagtttaatactccataaaaatatcatcattacaagtataatgtaactaaaagtttaagataactaaaataacaatattgctaagtaataaaatttaacaaaatatcatgaaaataaatacacaaaataactaagtattacaaatttaacacaagacaatccactaaaaatataatgaatatatatatattttaatatttttattatataaataaataataattttttaatatacatgtaattggattgaattgatttttaattagattttgatattgacatctaatagtcgatctaatacaattagaattcaacttttaacatctatttaatttaattgtaattagatatctaattttttgtaattaaattaaatttgatcagtttaattcaattatattagattggatattactcacccctaatacttattaaaaaattaataatacattttggaaaatacaaaaaataattaataaattatatagtcttatgtcaattggaagtggagaaaagaaaattaaatgggaaacattatttccaaacccactaaaaaacatgcac

SEQ ID NO: 73535 - DNA, 1133 bp, Cannabis sativa
ttttttttttatttttcttcttcaaatccattttaaaaaaaaaaattgaaaattcaagattcttgatggtttggctgatttcttgtttccaaatttttctttgtcatcagtttccctttttgttattgaaattcaaaaattaaaaaaaaaatccaattttttattgttgaattctagtttccctatttgtgtcacaaagttgttttcttatttttgtttgtcaatggtttcccaaattgtttcacaaagcttgtctctttgttttccattttctttgtgtcattagtaagctagactttcgaaattcttgaaaaaaaataaaaaaaaaaagaaaagaaaagaaaaggaaaccaagagcaaaaaaaaaaacctctcttcaactttttttgtattttcttagtcaacataatctaaaggcttgtttcctaaaatcccacacgtgttccaaaaatcatcaactgttttttagtcttcatcggtgttcttttggtttgttggttggaattgattcttgagtcctctcttgcactgtttgcttagtttttaaaattattaaaaaagaatatgagtggaaaaaggcagaggtatgagcttatttgagcataaaagccattaaatttgagtgaaaacacgagtgaaattaagtgacaaattattttgagtgaaacacgtgagggagtgtggtgaggtctttttttatctgttctagcattatttttgcagaattcaatcatgtcaaaagttctagaagaaaatatcggtaatgaagctacaccatccactgttccaaatgtacaacttcacacttttataggggagatgaggaggatgatgagagaggagtgtgaacaaatatatgcgaggttagatagggtagaagagggaacccaacagatgccccacaagaacagagttcaccaaagggatgataatgaagtagatggggaagggataatttttgtcgaagagtttgatgggatgttagtgggtaaccataggaggtgtggtcgggatatagaagctaggaatcagttagataattatttggcaaatataaagatgaaaattcctccttttcaagcaaagagtgatcctgaagcatacttggagtgggagaagaagatggaattggt

SEQ ID NO: 73536 - DNA, 819 bp, Cannabis sativa
cccaagctgtgtttcaaatgtgggtttcttacccatgaccagagcatttgcttcaagacacccacagttgtaaaagatagctcaggaaacttttacccaatgtatggcatctggcttaagagcgacgcccctgaaagatcaacattcacatcccccttggccaaatggtttcaagattgggtacttcaaaaacaaatcttcctggaccctacacttcgaaaccaattgaaagttcaaaaggcgttgcgtaatggtgaatcggcggaccttagggagtgcagaagacaacttccgggcaagaagagaattgtttccgatgaggagcaccaggaggcatctcaagacccgctggctattacccaactaccattggttagcttgccgggtataggcgaaattgccccttttggcaacaacacaaaggaggtttccatccaagagttgcagaaactcaagaaagtggctgctggagatgatggggaatcctccaatggcaaaccggctgttgtgaggatgacagaaaagcctgaggcaagccgcaacagtccaaaatccacctgggttaggaaaaggacccctcaagctcctccccataaacttccacatttgggtaaacatgctatagccgttgcacacgatgaagtactgaatgcctctgttgaacaaaaggaatctgagaacctaaagcaaccttctgaggctcttactcttcgtgtatcacctggacatgaggcccatagtagcagcccagtattgaagcccataataaaagatatcccatattgttcctctttactcgggtcccaagccactcctatg

SEQ ID NO: 73537 - DNA, 1101 bp, Cannabis sativa
gaaaactgttatgggaaatgctgctccagccataacagatcaagaaattgacaagaccagactttggcaccttaagcttggtgatgtaagtgaaaggggactgcaagaactcgaaaaacagggactgctgaaggacaagttggatggaaaactaggattctgtgaagattgtgtttatgggaagtgttgtaagacaaagttctcttcaggtctacacatcagcaaggaaccattgaattacatacactctgatttatgggggccatctaaaattaagacactgggaggagctagctactttctcaacatcatagatgatttttctaggaaggtatgggtgtatcttttcaattctaaggataatactttaagtacatttgtcacttggaagagactagttgagaatcaaactggaaagaaattgaagaaactcagaactgacaatggtcttgagttttgctcaaaccaatttactgagttttgcaagagagaaggcattgacagacacaagactgtacccaagaatccccagcaaaatggattagctgaaaggatgaataggacattaactgagagggtcagatgcatgttacattgtgctggacttgagagacctttctggggtgaagctgtgaagacagccagctatctcatcaatagatgcccttctgcagccatggagttcaaaaccccacaagagagatggacagggcatccacctagttatgaacaccttagggtgtttggatgcactgcctatgtccacataaggcaagacaaactccaaccaagagctctgaagtgcctatttctaggctatccagatggagtgaaaggctacagattatggtgcatggaaccaggctacaagaagtgtattctaagcagggatgttgtcttcaaagaggaggagatggcaatgaaatctaagacagacactaaaccaaatgaaaactctagtactgaaccagttgggtttgaggttgatgcagacactacaaatcaggcacctgaagaacaggctgctgatcaagttcaaacagaagaacctatgggagtagagactgacatgagtggtgatgattatcaactcactagaga

SEQ ID NO: 73538 - DNA, 1234 bp, Cannabis sativa
caataagaagaagaaacataatagattttaagagatggtttcactcagtaaacaaaatagattttattatttttccagcaaaaacaaaaattgattaatttgagctacacttcgctcattggtaggtgcatctcttattttttttttgtatggttgaaatgctaatgtgaaatactaaaagccctagtcgtacttaacacttttattgatgtcatattataatatcttaaaatttagaaatagactaacaaccataattaacttaattaaaatactaatataggattatattaggaaaatttgacatttcatgctaaaatatcacacatagtcttatttgatggccacaaaataaacacaggttagttattctttagttttaagttagttccaaaaatacccctcatttcatttctccccaatctctttaacttccttctctctcctctttctcttccaatcttggttgcttctcaccactgcaccaaagccatcccctccatggaaccaccccctccattcaaaccacccactccattcgaaccctctcgaccacggcaacactcaacccaagagacccacgaaacccacggacccaacgagacccacaagacccacgcgaccaacgagacccacttgaaccccagggacccacgagacccactcgaaccagtctccgttcatcttcgtccctgccaccatccacaaacccactagaaaactcgaactaggtttgtttttttagctgtttttttttttgtaaagtatcctttaaatttagaatctgtgataaaactgaaatatgttgttgattaaacttttgttttctaattttttgtgtttggggaagaatctaggttaggggatatagctttttttgggtttttgaatgtttgtgcaattttaagcaatttatgtgcgattacatagtcactgtacactagttttgtgtttgtatattttgcaatatttgtgcgatatttgtccgatttatgtgatacctgtgcaatttctgtgcgatttatatttctaattaataatcatttttgtttgtaaatgcagatggctccaaaactcattctcccattttctgagcatttttgagggtgtatcattttagaggaaataagtattttgcttcaataaaagctaagttcgaagcctttaagttgaccgacaaggtgaaggaaactccctttggagatttttagaatgccaatgatctaaaattctc

SEQ ID NO: 73539 - DNA, 1243 bp, Cannabis sativa
ttagatgttgtaaaaataaaatttatatttaatatattaaaagaaaaaagatgttaatttaattaaatatattaatattctataaaaaaataaaaattataatttttatatgttaaaatattaagtcacattattgaattgaattattattattattattatattaatatctatatattaactacaagtaaaattattttttaaaatatgtgaaagatttaattaagaaaaaaaaaatattttaaactaaattaaccacaaaataaataatttaaaattaacaaatgttagagactcaaatcattatttttgtagtttgcattatatatattaggagcattgaaaaataaaacacaaaatctaataagtaaaattaaattagaggatgaataatttaaaaataaatatatcatcaaatataagaataatagaatatctcttttttgatagaagcatatatatacatatttataggtacgagattagttattaagtaaatgtattacaataatagtaataatagtgagagttattaaaataaaaaatcaccattgataatgaacaattaattaaaaaaatactaacataaatattatctttcattagcaaataacatcaaaaaaataaagaaaattaaataaattcaaaataataagaaaatagagaacataaagtccaatgcctagagaatgtcacatgacttatattatgctttcctttatatatataagattattattattattattattagaaaaaaaaatataaactcttgtgtattcttttatataaatatatatttagagaatattaatttttataacttacttttggaataaaataaatttagaggaaaaattgtttagaaaataaatagttttttttagtatgttattattggttttaaatgtattaaattatattaaatggcaaatagatggtaaattattaaaatggattaagaaaatgaaaaataataaaaatgatgagaatgcaaagaaattgaaataaagctcatacacagcacaactctgatactttcttttatatagatatatagatataaatttagcatttatgtcttttattataaataaacacccacatatttatatttttatatatatatatacatatgcatatgtaaaaaagaaagaaaaataaaaaaaatgaatcttacaaagcaaaagtaacaaaagaaaaataataaaattactcaaataatataatatatatccaattt

SEQ ID NO: 73540 - DNA, 783 bp, Cannabis sativa
aggggattccccgccccgtccccgatgcggaataagcggggatcgagagtaaaatccttaacggggatggggacggggagagcactccccgctaattacccgccccgtgtgcatccctaagaaggagacatcaaaaaaataaaattctaacaaactaacaagacactaatttatatagctgcatttctcacaaccaaaaatatactctgcagtcattgatgcaagttagaattaaaaaaaaaaggaaaggagcattccttatatatcataaaaagtaaattatgttggatttaatgcataaattaattgtcttaaaaattgaaaatatacaattgatttgtacaagacatgcaagattctcttagtttcctagcacctgaatctatataaaacacaaatcaaattatcaacattttagttgcagacaaagtcaatataagatgagtccagagacttgccagagcttcaaccagaaaaataataatatagaaatatatacgaacttttttaattaagcaacttttgaagtaccatgatagtattgtctaagtcacaccaattcaacatacaattaaaaaaaaaaaagaaattcccaattaagaataaaaaaaataagtgttccatatttattattcttttaattgtactaagtcaatactactatacaactcttgtcaaacccttttaaattaccacaactaagaacagtacttcataacaacaataaatgatcattttagaatgtgaaaacataatgtaaacaagcaactctaagtagaataa

SEQ ID NO: 73541 - DNA, 968 bp, Cannabis sativa
tgattctagtcgtcttctcaggtgaagtcgtcgaaattaatggtggttctctttctggttgggtttcgtttcggttgtgttaggttgctgggttggtcaatcgaaggttttgtgcgtgagtttgttctttttctcaggtgacgttgttggaattaatggtgttttctcgcatgccgaagttttttcatcgttgctgacctcattgcatcgcacaaatgtttcaatctgaggaagtgtggatatgtgggttaaaagtgtgtgtaagaggcatttgtgtaatttttctttattgggttgtacatttgtttatttggctggcggaaggtttttttgtaatattattattttttttttattaaaactgaaaaaactcctaaattttatactaatatgtacataaatgacataacaaacaaaataaataacatcataaatcagtaaaatatatacaaataattattttgattgataaaaactacaaaataaaatttaatatatattatataaataattattttattttttatcgttaaattaaatcaattaaatattttttttattttaattttttaaaataatatataagattctcctattaaatcaaatgatgtaatttaattttttttttaaataatatattctcttttataatattttgaatattttgaatcttattgaatagaaagaagtgttgtgacttgtgagagaagaagataagttagaggggtgatttagaaagtaaattaaaaaagatgagatgattttggtaaattattttcaattatgatgcctaaatataaaaactcaagatttcatataacaatttaggtgccgtttggtaacactttgttttctaaattttacaaaatgaaagtaaaatttttgtttttaaaaattttacttttgaaaaacaaaaatgcgttttgtaaccacttttatttttcaattttgaaaacaaaaaaataaaa

SEQ ID NO: 73542 - DNA, 981 bp, Cannabis sativa
gtatttttaatatttcttctttaccttttgtaatttcttctctgatttcggatgatttaagttaatgaagtttcatttttattcaaaaaaaacaagtcctcattaaaaaaatgaaaaggaattttcaacaagtaaaaatgtgtgtagttttgtcaacatttgattggtgaagtggggtgcatgttttgttatgttgtttatacgatataatatttagattaaataattgtgtgacaagtaattttgtcaaataatttatataataagaagttacatagttagagtataaattatagaaaagagttgcaaattcttaattagtaaattgagttactagttgtatctaagtgtgattaaatggtagtcatagaatatagttgttgggaacttatttctatcgtgtatagggtgtataaatgataaaaactaatgttgaaagtattgaactgtttagagtaggagtgggcaacatccaatacaatccaattgaaccgaactgatctaatttaatctaattataaaaaattggatattaaattacaattatattggattagatgctaaaaattgtattctaattggattggatcagttattggatgtcaatctcaaaatccaattcaaactcgatctaatctaaatacatttatatatgttaaaaaaattatttatataattaaatttttattatattttttttttgtatgttaaattcctaacactttgttgttttgtctatttattttcatgatattttgtattattttattacttagaaatgttgttgttttaattatttgaaatttgtttagtttcattacacttgtaacaataatatgtttgtggagtattaaacttaaataaaaggtaaatacttaatttttatgtatatttcttcatatttttaagttaatattaaaatttaactgtgtaaatggatatccaattaaaaaaccaatccaatccaattagtaatcggat

SEQ ID NO: 73543 - DNA, 1264 bp, Cannabis sativa
ggacttcgacgctcaagttagtacgattttagtaaaaaataacaaaaacaaaaaataaatgaaatgtagatggtagccggacggatgagtggacaagcgaacaaacggactaaaggaacaactacggtggtgaggcttaagagaagtttagaaaggacgactgtctgcttgagcaagtgagtagtgtgagtatcgaatcttcgatgccttgcgtctaccttatgatttttttatcgtgtgtcctcagtaccgttgccttccgtccacgtcacccatcagactcgttcaagttagttgctttcctaattttaagggaacagtaactgtctttctgactggttcaatatttacttggttccacccgtttggctgattggctgggctcggacccgattgcgggtgaactggctcatggcccataagttcacatgtttgtctatttcaaggcctaatgagtttgtctggctactttattgggcctaataatatcgggttcattaccgatgggcctgtctgacttgcatatcgggcttcttaaacatgttgtaaatattaagcaattttttacctctacagtttgtccctcaatgtccaacgagaattcattctagttggggagttaataatatcaaattaggtgctactgttgaataacctgagagttggtcaagtggtttacctgcttaagtcaagcgatgtatgcgtatcttgctgtttgagataagaaaattgcatgaatggttcaagcatggcgattgagtagtccttgccgcatgcgggtatgtggctatcttggctgagtaatatttgtgtgaataattagttcttcaaagagtttcttatctaaactaagtcatcttgttggtctaatcaattagacagacgcttggatataaattgcttataaaagtcatacattgggctaaataaaaatatttggctgtctatttcgaaatacgagatgaaaagagtagatagacgtacatatatataaggtgtgaggaaatagacatttggttacgtaaagagatagatatatatacatatgttgtaaggagatagacatatatatatgttgtaagaagatagatatattgggttttgtgccctaaatagaacccatttcaatataatcagatttactaattaataaaaaataagaaatcattcttgttgcatggttcacatgatttatttcatgattatgtttaatgtatgaattctattaagtccagaacatatatatatatttattcatgattat

SEQ ID NO: 73544 - DNA, 752 bp, Cannabis sativa
  modified_base (709)..(721): a, c, t, g, unknown or other
cccttggtaacatcattggtgaatgtgtggatgtatttgaggactcactcaatgaaggatgtgggccatttctgcgtgtaagagtgaaaatcgacatcaagaaaccacttttgaggggaagaatgataactttacagcaagcaaaagaggaattttgggttgaattcaggtatgaacgtttgcctgaatactgtatggaatgtggatgattgggacatccttttgataagtgtttgatctacctcgaaaagttggacaatggtgaagaaccagatttagagtatcggccaacattgaaaagttcaccactcccaatttcaagttatgatcgctacaggactgatttttctaaggggaacacttggccattagtcactcgattggcaaaaacctctttgatctcggccattccacatttaaaaaaccaaaattcccctcagtcaggacacttactcacgggtgaatcttcacaatcaaatgtcatttcctctgccatttctactggagttcatatcaatctgtaccatccacacaacaaaacacaactttgcattctggaatggttaatgctctgcctactggtgttgttaatacacatgctaacatagttttcccacccataatcgacgtcacataaaaggaaattttgttaataagtctattcaatggacttaacaaagattggtgttcctagtattataggtttgannnnnnnnnnnnntatggcttatggtatacctggtaattactta

SEQ ID NO: 73545 - DNA, 674 bp, Cannabis sativa
atcagggcattacaaaaaacaagttatttatttacctatggtggtactactatatcttagcgctcaacaaaacaaacaatggttgcaacttcatcaaattattctgaaataattgcactacatgaagcaggctgagaatgtgtatgattgagattgctcattcaatatatttggaatcatgtcatatttctaagaaggaaggtcctacaattctgtacgaagataatgctgcatgtcagctcagataaaatgaggtttcatcaaaggtgatagatttaagcacatttcactaaagttctgttccatgcatgagcttcagaaaaaagaggatatagatgttcatcagatacattttgtgataatttgacatacttgttcacaaaggtccttcctacaacaatatttaagaagttaatatataaaattggaatgcgtcaactcaaaaatttcaccaattgagataaacgttgcaaagagaaggagataagaaaataattaatgtactctttctttgccataatattattcctacaaggtttttttgatggtaaaattttagtgaggcttatctttaatatataacatttaaggaggagtgttatgaaagaataatgatagtagatgtctttatttatgcatcacctactttattactctatttattttatgtaact

SEQ ID NO: 73546 - DNA, 696 bp, Cannabis sativa
taaaagtctgattcaaactttggacaaattcccccgattggaagaattgggtgacagtaccaaccacatcatctcccactatatcccagtgggcacgatagaaacgcccatgcatcccatccggtcccggggccttcaactgacccaaagaccacaccacatccttgatttcactacggctaggtgtgcgcataaggtcaaaattctcagcatctgtcacagccggggcgatctcctcaaagatctcactgatcaggtccggactgcaacgggaggaggagtacacattcatgaatctaagacgaaaatattggccaatcgcatgacgttccgtaatccattccaacccatcatctgagacagccccaataaagttacgcttccgtcgaataatggtcgaggcatggaagaatctcgtgtttcgatccccattctgtaaccagagttcacgagacttttgcctccaaatttcttgttctctcttggtaacctcctccaattccaacagaatatccgcttcaagcttcagattatcctgtgttggggtccgagattgcacctccaccaggagtttctctaacatactcagtttagccttacagaagccaaaaacctcacggttccacttagataacagtttccttgattccttgagtctcgacatcagctgaaaactacgagtaccagttacaacca

SEQ ID NO: 73547 - DNA, 564 bp, Cannabis sativa
gttcaaaagcgagtgagagggtggaagcgaagtttcttttctgctgggggaagggagattctgattaaggctattctacaagcggtcccgaattatttgatgagtatgttccagttgccagtggcgacatgtgataagcttcgttcgattgtccttcagttttggtggggtactaagagtgataagagaaagattgcatgggtgaagtgggagagtgtgtgtcaaccgaagtctaagggggggttaggcttcaaggattttgtgctttttaatcaggctatggttgctaagcaagtgtggagattgttacattcgcctaattctttgcctggtcgggttctaaagcataagtactttcccaattcgtctattttggaggcgaaagatcgccaagggtcgtctcatctgtggtcgagtttgatgtggggcttggagttgttgcaaaagggcatgaggaaggttgtgggggatggtatgagtattaatgcttttcgggatccctggctacccagagctagaacgtttcggcctatttctccgtctcctcctagtaatgtgatggtg

SEQ ID NO: 73548 - DNA, 837 bp, Cannabis sativa
gaaggaactattaaaggcatcacgctgagtagagatgggcctactttatctcaccttttctttgttgatgatcttattcttgtgggtagagcgacaattgctaaagccaaaggtatttagagctgcattgaaaaattttgtaactggtcaggccaacgggttaataagctcaaaacctctattttctttagcaataatactagtggcggaatgaaaagaggtatcatgtaggagttgggactcaacctacctaccacgaatatcaattacttggggctcccgctttttagttctaaccgtaaggatgcggatttcaacttcatcctagacaaccttatgtcgaagttacacggatggaagttaaaattgctttctaaggtaggtcgggccactcttattaaatttgtgggtctggcactgccagtttacaccatgcaaactactaagctctctaagaaacttgcttcaaaaattgatggtatggtgagggattttttgtggggctgtgagcaaggtaaccgtggcctttaccttaaggcgtgggaccacatgtgccttcctaaagcgagaggtggtcttggatttcgaaagactgcggaattaaacaaggctttcttggcaaaatggggatgggcccttattaacgaggatcagtcgctttgctgcagagtgttgagagccaaagatctgaaaagtaaaccttttgtggatgctacctataataatgctgattcttggttttggaaaaatgtggtcaagactaaagctatcctcaaaaaaggcgcttgcaaactcatctcaaatggggaagacacaaacattaggtcggacccctgg

SEQ ID NO: 73549 - DNA, 927 bp, Cannabis sativa
cgaggaaatcttcgagccagccaatcactggtgctgataaatttcccgaggttaggaatgaggtctcgaccgcagcgaatgaggtctctgctgcaggaaatggaatcttctgctgcgaggaatgaaggtctctgctgcagagaatgaggtctatgcagtgagggttgtagagggacatcctaacgattcagtacaccaggtcgagtttttttttttttttttagagctggtccttctcgagccctcctgtcccctataatgaaccttttattctttgtttaggaaaatggcctaatggtttacccctagtggcatttttgtaaagatatgtttgtaaagttaactgaccaacttagcttttttcttatcttaaatgccttgtacttttacatttgaacttaatatatttgtgcttgcttgcattttcatttacattgtaaataactatattttgatcagatgtagagtactcttggtctttccattgctcgtgattttcttattttaagtagttagtaatcttctatgtgcaccgacagtttattaattctgcctcgcaataacagttataatctgtcttaggcaaacttgaatatacttttaatgatcttatcactttgtaaatttttgattgcttacatgagtagttatactatctatccatacactaggtttaattacttttatcaagacacctttatgtctcatttaatactttcctatattgtacgagccattaatattcagctttgtacgcgagttatgagttatatctcatatataactttcgattttcctttctcgtcagataggtttaaatcaaaaagttatgattgtttgattccttcctcgtcagaaaggtttgatcaaaaaattttaatttttttttaaagttgtgggtttgcattagatcatgtatttccagat

SEQ ID NO: 73550 - DNA, 1438 bp, Cannabis sativa
  modified_base (451)..(454): a, c, t, g, unknown or other
tatacttcctttcgatcttgattcgttctcctcttcctcgccgtgttttctgttcttctccggcgacgttcaatgtccgcagttgaagaattcgtttcttcaatcgacaattcctcttccttcatagtcttttctctgagttcttgagacgcctctctaagcttctttctgtccagccatgtccaacgatcaaggaatggaacgagacaatgaagccactgctcaaatcgacaatggtgacaatcggattcaaacaccaggtacgggtttgaacactcaaataaacagacctagaaatccttatgaagatccatccgatccttattttctgcatcatggagaaaaccctggaaacattctggtatcccaattgctcactggacaggaaaattacattgcttggtgtagagcaatggaattggccatttcagtcaagaacaaattggggttnnnnaatggttccatacccaaacctcctgtaaccgatcagattctctacaatgcttggattcggaacaacaatatcgtcatttcttggataatcaactcggtttctaaggagatttcttctagtattctttacgacgaatcagctgctgcaatatggaatgatctaagagttaggtttcagcaaaggaatggtgctcatatctacaatctaaggaagattttgatgaatctaaagcaagaaacccaatccgtcagtatgtattttaccaagctcaagacagtgtgggagcaattgtccaatttcaggccaaattgcacttgtaatggctgtacttgtggaggagtcaagaaattacaagaacaccacaatatggagtacatcatgtcctttctcatgggattatcggatctttattcacaagtgagaggtaatattctagttatggatcctttgcctgaaattaatagggtttttcatttagtgtcacaggaagagaatcaaagaggagggaaaattgctactgccgatcccaactccaacatggcttttgcctttcaaggagaaagaaaccccggaaaatccgatacttccaagaaccaaggacagaaacgcggtagacctttttgcactcattgcaatatgcacaggcacaccatcgaaaagtgttacaagatacatgggtaccctcctggatacaacaaaccagaaaaatcaaaaggtgctgcagccaatcaatttcagaccacaaatgacactggttcggatgtgaaagacaacaacactatgctgcctcaattaacaccaaaccaatatcaacaactactcaatctcttagcatctcaatccactaatctgcctactaccgatcccaattcttcctcaggtagttcaggtattgtattaacaaattatgattttttgcctaaagagaaatcttggatagtggattcaggtgccactagacatatatgttcagatttaaagctt

SEQ ID NO: 73551 - DNA, 1212 bp, Cannabis sativa
  modified_base (126)..(132): a, c, t, g, unknown or other
ttaattttttggatttaattattatatttatttgttaacgggagattaaacctaatcgttaaatttaacagaatattcttttattttgaagtatattctgttaaaccaagaaatgccgttagatannnnnnnttaatatataaagatataattaaaaacaaattgataatatgaaattatgaataggagaaataaatagtttcaatgaatttaattatattttatgtatttatttatgtatataaatgtataagaagaaagatttatgtttattgattttcattatgtgtatatcaaatgataaaataattaatggtgtgaataatgaaaaccaaaatctgctacattattattaaatggtaaataattattataaataattaatatttatacgtgtattaatattatattgatagtgaattttttattattctttaggttaatgtaaatcatgtgctaaatttaagtgaagaataaatgtatattgggcaattcactcacaaaagtaagtacattttaataaaatataatataaaagtgcttttgattaaaaaataccaaaaaagaaaaaatatatccctcaacttattcttttttttttctcaaaggtccaattatgtatttactataataaaattattagtgcccaatatttaatacttatatacctcagtactcaaagataacacttaagcctgtgaacaatttatatattaaaatatttttcacaatccattacaatcaattgagcatcatataaaaataccacaaaactaatattaaaaagaataagatgttgaacatcgacttttaaggagaaaatattatcatgaatatcattatatgcacattaacatgttaggtcttctcttaaggatatagagttgacattcaataattatatgaaacaatttttctctgataaaaatttttaaagaacaggcaaaagcgtgtttatttaatattattaatacagttcaatcaaagaagaaaaaaatacaaactattaaatactataaatcatatagtaaaactgagtttgaattttgtaatgacaaacctttgaaaatcttatatttgagccaaagcatccaaatatatatagctcctgtatgcacacacatctcaaatttgcaatgggaaatttgattttctatacttattaaacttaattttattttttttaaaccaatacattttacactataaaaa

SEQ ID NO: 73552 - DNA, 1847 bp, Cannabis sativa
  modified_base (1067)..(1071): a, c, t, g, unknown or other
aacatacctcgaaaccgcaaaactgccataatcagaggacatgctttttttcaaaaggtattatgacaaatataccctttataatcattaaaaaaaaagaacttttttattttattaaaaaaaagagctttttaaggggcaattgttataccaaaattcggctaacacatcagaggaagacacatgtcatgctgggaaaaatacaaacccaggcacgttattataattacatttgaggtagaataactcgttaaaagcataattaacagagtatatttacaactctggtgactgaatagtcttatgcgagatgaagatttacaaactgtttccttgtgcaccaacgagaaatcatgtaacttcaaatgtacaagacgaggcactaacctcattacgtggatgagatataatgactgtgaaggcgctcagcgtataatatacagtatgcaaactaagtataacagacaggtaaaccaaatcaagtgatagcgaggtgtccatctcgccataagaagacatgctcgcagtagcttcactagtcaactccaggcatctttcaatgagattcacatcgagccagttttctcggatagaagctgacattcaaattggttgttgaagttcacctcatcaccaagaactgcgattgtcatatggagcattatgtcttcagagcagaagcagcgagattaacattatcaaccttagaaagttatgggaaaagctccaactcaatatcaaggttattgatactgagttcctaccgagacattcctgaatattatgatttataacgtgtttaatacacgtttactttgacccagtaaaaccagactaatcacaactgtgtgatattcaaatattaaccgcatttattttacgtgatatgtaatcaaaccttacaattttagaggataattgttgtaaattgtaaagatatcagtcaactctgaaattaaatgcctacctatgtaattataaatagaggcaagttagactgaaaaagggacgaaaaaatcataagagaaaaaagccctagaacggtatcagaaatctaataagattgnnnnntggactatgcagaattttaactgtaaaaccatgtaaaaaaacctttgtgttcataatttttttttcaccatttttatttttctgtgcaaacttatcatcgttaaggctcatatctggttaacgaaaatctgcgttaacagaataaatttccttcttttttcatttgaatcaccttagttggcatatcatatatgtttggaaattttttattaatatacttaatacacataatgttatcccattttttgcagtatgatgtggcagaatacacaagtgacacatgtcctacattcttcgcatctggacggagatggatgtcccaaacagcctttatcctatacatctgcttgtatacctctaattacccgagcagagtggaaggtagattatctgagcaagagcaagtttagcttttcgaactacttatcaggacttagctactttagaatgatctcgtgaagtccaagcacgaagacaatccttagaatcgtgggattacgtcagaggaatatgacaacctgttcaaatttcctattttgtgtatcataattatgtaatgaatattatttcctattttatacattgtaggcaaaagagaaaccttccctcatgcattaaggctctataaatagtgacttagctttactttaaaggggatcaaaggaattgctttagagagagatatctaagagaattactcagagatttcattgtaagagctttaaaggagaaaaacactttgttctttgtcgcaagttaatacaatctaaggggag

SEQ ID NO: 73553 - DNA, 1022 bp, Cannabis sativa
ttcatagcagcaagattgaaatcatgaaatgacaacaaccaagtatgaggttgacaagtttacaggagctaatgacttcagcctttggaggatcaagatgagggccttgttggtgcatcaaggcattgctgaagccattaatgtagatgcattgaagacaattgaagatgcaaagaagaaacaagaaatcgagacaaaggcacagtctgtcatcctactcagccttggagatgaactgctaagagaagtttctgatgaagagaaagcccttggattatgggaaaagcttgctacaatctacatgaacaagtccctcgcaaataagttgtacttgaagaagaagctatacaccttgaggatggaagattgcaaggaacttagaagactcctagttgattttaacaagattgttcttgatctgaacaatattggtgtaaaggtagatgaggaggatcaagctataatcctactgagttctctgccaaaattgtatgaacactttgttgatacaattctttatggtaaagatactctcacaatgtcagaagtgaaagcttcattgaactccaaggaaatccaaagcaaatatgatagcacaatggtaaggggctgtttgtcaaaggaaggcatgacaagaagggtcataagaattccaaatatggtggtgatcgagggaatcaaaagacaaagacaggttcaagaaacacaactgacaagaagtgtttttattgcaagaaaagaaaagaataaagaaaagggacaagcagatgttgctgatatttatgagtcagctggtgttctggtagtgtcaaacacagattctagacaagaatggatactcgactcaagttgttcttttcacatgtgtccttgtgaagaactattttgcaatcttgagaagaaagctggaggtactgttttatagggtgacaacaaagcttacacaattcaaggaactggttctgttgtgatgcagatggaggatggtgttcaaagaaaaatcacagatgtcaggtatgtcc

SEQ ID NO: 73554 - DNA, 749 bp, Cannabis sativa
atcacatccataagtcctttctcgacatgtaactcgtccttgggaactagggggatcccattgtctccaaccgctaccagtttcaaccacatcatctcaacattttatgttttgtcaagcatccatctaaaggacaagcctgaaaattcataagtcggcttggtcgtgcaatgatcaaaattgcaatctacttaccacttacatgggaactcaatatgctcctattcagttatcaatgtactaacatgcttttctaatcatacatgacaattaaaactactaaacacatagaagattatcgaactgtgaatcaagcttatctttgatgatgattgtacatatcttgacgatcttcggagaacaacctgacgactttgataccaaattgtaatatcctactagttaggcacgctatagtattttcttaattgttgtgcactccctttccttattaaggagtttattaaaaaacgcaaataattaaaaaatttcacaattaaactttactcctaaatatataataatttatataatttggaatcccattttaaaagttacataaatttacaaaatgcttgtattacaaaagtcatcgtatatcgactatcaaaagtgagcttaaaatgtcccgaagaccttgaacactccaggtaaaattgtcttgatatgtacaatctttacccttagctttagacttgtcccgattcagttctagctcttacctgcacatacacgtaataactgtgagt

SEQ ID NO: 73555 - DNA, 765 bp, Cannabis sativa
aggagatttcaaaaggtccaataaacgttgggctaagctttcctttcttactaaagcgctttatgcctttcataggcaaaactcggagaaataccatgtctccgacctgaaaattgatatactgtcgctttggattagcataactcttctgtctgctctaagctgtgagtatttgcactcggattttatcaactgcctcacttgttctctgaacagcctcgggacccaagaactttctttcacccacttcatcccaatgaataggtgatttgcacttttttccatacaaaagttcataagggtccatcccaatcattttcttgatagctgttattataagagaactcgatcaggggaaggtactttacccatgatccttcaaagtcaagcacacatgcccgaagcatgtcttctaaaatatgactagttctctcagtttgtccatccatctgaggatgatatgctgtgttgaacttcaactgagtacccatagctcgatgtagactctcccagaatcttgatgtgaatttcagatctctatccgaagtaatcgactttaggacaccatggagacgaacaatttctctaacataaagctcagcataattgatcaatggagaagtttgtgcggacaggtaagaagtacgctaacttgtaaacctgtcaactatgacccacacagagtcatattgtcctctgatcctaggcaatccaaccacgaagtccatggcaatatcctcccatttccactctgatatattcagt

SEQ ID NO: 73556 - DNA, 1232 bp, Cannabis sativa
ctagttttctaatttatgtgatttcttaggctgtttgaatatacacatagagatttattactataaggactgaaaaatatctcgtgaacattttagaaagttgcatctacctccatttatttgcttcaaaagtagaattacccataaatcaactatttattttctttggtgggctaattgtatattgtttgtaggaaatggtggctctggtaaaacagttccaggtgacacggtatcagatttggattctctcactattcctgtcaaaatatccagtgaatttcgtggaagcatggtcggcaaattcaaaccagtctacctgtatgacggagaacaaatgagtgaaatggttttaaggcttagggaagattccattgctaacagttttaatgcaacatttttcttttggaagacggcctggggccgttcgccagggaacataatctagagaggggctgtactcttaagtttgaacggagggacgagctgcctactcatcttcccggagtaagttttcttgtttgtttttaatatatttcgaaatttaaatcttagttaatcattttaaattatgatatagagaccagatatgctactgttagacaacaattgggtgtacagggtgaaggcctaccgcaatggggtagagttgcctaattttctggtaattatgtatactttagagagaatctttgtttgtttttattttttgttttactaagtttatttacttctctttcacagagtaaggacaagctcgaatctcttacgcggagattggatgtcgaaaatcttcctcaggaggtagaaaataaaggcgtggagacattgtttagtcaatatggaatcgttggtatacatatgttcaagaggactgtggatgcgatagcaacaatggagttctccaccttcgagggggctcacgaagcttttcttcgcgtaaatcatacagtatgtactattcactttctagctacatacaattacaacaaataaagtaaaaagaaaaataaataaagtaagatgtgtataaaaaaaattacaacacttactaatatgttataactttaattttttttttttataacgaattctaactatctcaataacagcgataccaccgatacacttacatgccactgttcatctctgtgttgcaagtgcaattgtggtttgtttatttctttcctttcaacttacagcttacacagagtagcaaaacatcaaaaata

SEQ ID NO: 73557 - DNA, 1353 bp, Cannabis sativa
tttacctaccaaccactagcaatggaccttacctctcaaccccaacaacatccctctgcctatactgatgaagaaactcttgttcatgaatttgacaacatctccgttcaccaagattccaccccccaatcctactgtttggttgccaaaatcctctcccccaaaattatcaagtctgactgggttgccaaagccatgaaggaagcttggatggttcgctgccccttctccttttctgattatcattctggaatgttcctcattcgttttggctgtgaaggtgaccgtcgacgagtcatggaaggccagccatggcactttgaccgtaaccttatcctcttagccatcccagacgcttttgatactgttgttccctctcaagttagctatgtctcactttgggtccaaatccacctaatcccctttggcaagcgctcccatgaccttgctaaatttctttctcttcaacttggcgatctcattgaggttcatgccgcctctctgtatgatgccataactccctttatgcgtatccgcgtccttgttgatgtcactaaacccctacgccgtggtatgaacatcaaatttcgatctttgccttcggttaaatggctgaaatttatgtacgaggggctccaaaactactgctattattgtggaatgcttgatcacaccttcaatagatgtgaaaaacttctgaaatactgtgatgtatccccggttcccccttccctcccttacaaggacattttaagagcacctgccaaaaccacttataaaaaaagtatctttgatctctccaactctgtccctttcgaagaatcatcctcacgccactctgtttccaaccaaagcctgcaagatgccattaaccaattcctcatccccagtatggtcaacacgtctctgtccctggatgttttatctgatggtagtcgatccactccctccccacctcactactctgtcatggccaccactaactttatggctgggattcctagcctctcctgtcctctatctaccacccctcttatgactacctctgttatcactagcattgacaagggtaaatcggttatggtctcggaatgtcctcgaatcatcctctcccctcctcccttaactctgtctggtgctaaacgttcgttccaaagacagaatgttcagtttggcaactctgttagggaaatgctgaagcgtgccagagctgccactgaggatgaagatgttgctgtggtcccttccctggatacctctgatgatcaggcgggtgttgcttcgcaaccccgcccggaaaaatgagtcttctaagttggaatgctcgcggtttagggagttcccgagcattcc

SEQ ID NO: 73558 - DNA, 1132 bp, Cannabis sativa
  modified_base (581)..(584): a, c, t, g, unknown or other
gataggtcttattcatgtcaaagttaaaattttgagccattttcactaagacagacccaaaaattgaaaccctagttagattgttaaccttggttctaggtgaaaaccctagaagcctgggtcgacttttaggatgctatttcctctcttttcagtttctataccttggacttgatttttgcttgtcttcttggtttataattcttaaagatggtgagttggaaataacttggcaagatccaaactcccattctggtgttcttagagtcaacttgggtgcagggctagggacccctcctaggttgacttccatgactctaggctactcaactttgggatgttttctttctttccacatgtcaaacaatgatttccacatcaccaaggttagtttttgggtaaacactccacaagtcatttttatttctaggatttttggttatagattacattttggcataatttctttaagtgagaaaatttgtcatcccttcaacattgttgtcactcctaattgcatggtgtttaccgagattttcggaaacagaataaaacaaataagaactgaagaataaataatnnnnagagaaagtataaaatgagacaaatagtttttaatgttgtagaggcattaactagccttagtccatgagtcagtattattcagtaaactcttagattgtaaatgccttagagaatacacaaaatgtatgttctcaagttcgcctgagcaaagtttacaagagcgttcaacccttaatccataagattaatggggtattttttaatagtttgagaatcacattaggttttcccattccctttattagggattttacagtaaataatattctcgggctttctcatgaaagccagcccatagagaagacgacctgctgactaggtgaatcaaattggatttatttgatcaacaatgtgtacattgattgtcggcaattaatattaattaattgcataacatttgttgtaggaagtttccccttaaatctagatataatgtacagttatgatctgacaaccggtacttccttatttgtatgcaggaattattataaatggttgatcttaggtctatggatctcaatcatggcatggttaggttcgatctcaa

SEQ ID NO: 73559 - DNA, 905 bp, Cannabis sativa
  modified_base (838)..(866): a, c, t, g, unknown or other
ccacccatccgaccacagtatatttttcacagaacctacttcactatggatgaatatataagatattcaaactccattaatatgtattttcaagtaaactatattttactattataaaacatatactatgcatactaaccttctaatataacgaggagtaatgtttgccaaacaccgagcaaaggtcaccaaaaatctatttagcaaaaaaataaatattaagtaaataaatttttaagtatagtactattataataaatacactatttatgtataaatatatatatgtatgtatttgtatgtatatgtatactatgtgtatatattatatatattatatatataatatacataacatatataatatataatatatattagatatatataatactaggtgagtttacacgtgcaattgcacgtgtcaaattcttcatttataagaaattgagatttaatatttttaagtgaagtaaaaagtgtaaatatatattatattatacaataataattacaagttaactaaaactgagcattttaagtacatatataacatgtcctgtataagattctcattatttaaatatactttacatagtatttataatatttgtacattatttatatatttatttatatgctcttgtagatactttaagcatcattagcagtgtttgaggtgctcgattcaccgttactttcgagcggtgagataacgttgtatttggtttgacttccaccactatatgcatccgctctcgcttttaagtaaataaaaaatttactcgttgtaaaagccttgcaaccgataatatatttgttggatatattttaccannnnnnnnnnnnnnnnnnnnnnnnnnnnnattaacatcctaatatgaattttaaaacaatgaaataaa

SEQ ID NO: 73560 - DNA, 635 bp, Cannabis sativa
atttttgcaatgtctattcgaatgactaaggcaaaatacctaatcattatgaaaagttttatggcatctctattgattacttaatcttaaacaagtattttacattaatgttcatactagaatgctatgttgaagacttagtctagaagaaacttattgtttcaaactaagattgaatgtcacaacaagaggtccctaagaactaattgtaagagtttaaatgcacacttgtggacgaatttaactagactcctactgttgagtgggagccatgattcaaagcgtaggggtattgaatttcaaataggagactctgtatttcttcaagtatcacttatgaaagaggtgcgtagatttgaaaagaaaaaaggaaaattgaaccctagatacatctgtccttctgagatactaaagcggataggctaggtcgcctatcgattagctttaccaccctcgttgtcgggggtgtataatgtcttccacacctctatgttgaaaaagtacgtgtcagatccgacacatattttgagttactatgatattaagctccacacagacttatcttatgaggaagcgacttgggaattaaagtcgtagatgcgggagttgtatccccaaattattcaggtaaattt

SEQ ID NO: 73561 - DNA, 618 bp, Cannabis sativa
ctatatagtttcctattataaacaccttaataaatacctagttaactttacactgcaggttcagacaaaaaatctaattttatacaaagtgtatgattatgcaaatacaaactcttacatagtaaacctagagaacaaaccatgtagttgtcaaagttcagctgtaataaaatattggaaaatttacatctcaatacatttttttaatttaataccaatattaacgtgagttttaaaattggtgatattacggtattatattaccgtttttttatatttaatatattggtagcttgttaaacacatttaactctattgctgatgtcatggttagtttttacatcatgcctaataagttatgggatgcgtgcacacattttttaattatgaacaattaatttttttctctttttggttcggattccaaatagaataggcagagtttatttgtaaactttctattttttatataaaaattaattagaacagtactcatttttccttattttattcactatgtgaattggttatttatggtaaaaatctgttcctctatttttccatctacctcttttaagacgattaatccaaagaaaaaaaataaaggaaacaatgtgt

SEQ ID NO: 73562 - DNA, 796 bp, Cannabis sativa
cgctagcgaggctcacaaccctgggatgattttagggatgattgttgtaaacatattacagtcaactttgtaatttactgcccactatgtaattataaatagtggaaaataagataaaaaaacaggacgaaaaaactcatacaggagaggccttgaaaaataattagaaatatggacaagattgactcatggactatgcaaaattttaactgcaaaaccacgtaaaaagccctttgttcatgcttttatttttttttacagcttttattttttgtgtgtgaaatcgatacggtgagactcaaatttggttaacaaaaatctgtgttaacaagttattatccacgtgttattttttattggtaatttaaattaatttttaaataaaaaataaaatttaatgatctagactaattagggtttattatgtggccattaacttaacacttaatggctaggtacctagaaaagttctagaattttagcttaggtattgttactgtcaaaaaataaacaaatatgtatctacaattcaaagttaaaattgtatatttataccacaaattactcatttattttaatatgagttatttgattatatgcttaattaaatatacgttatgtatacatattaatttatatatttttttaatgaattatggtacttattaaaactttttatgaacgagaaagttgtattgcttagaaaataattttataaagaaaataattctaagaaagacataaaatataatctttagaaaataatttttaaaaacggttaatcctcaacaagctt

SEQ ID NO: 73563 - DNA, 721 bp, Cannabis sativa
tctcatctcataaaatgagatagaaaccactaatgaaaaaataattccgaaactctttattttcaaaaaatgtgaacacatcttttccatcatcatcactattattattatcatatacactaaatatgattagttactcatatattattatatactaataatatatataactctcatgcataaaattattatctcccaaattttatgctaattaatatattaggtatgttactatatcatctcatataatatatactcatcataatatatattatctccacataatatatattatatatgtattacatatataaatattctcatcataaatatatattatcatatgttcaacatatatataatatatatatataactcatatacatgttatatattatgtatatcttacatatacatattgtaaagtccttttttgataagttagatgccaaaatattttttattttatggtgagatttatttgtgctttcaatccgattttctcacctttattatttaatttttattgttcttttctagtttaggaaagattaattttcagctggctttttcttgtatgaaaacttcttgaaagagaagaaattctcttatggaaagtttgtttttaaaggaaacatagactatttttattttccttaatgaatttgattgtgtcttgatacaatcagatcatccgcactgtttttggaaggtatcaaga

SEQ ID NO: 73564 - DNA, 795 bp, Cannabis sativa
ctttttaattcagcttgagacaactcttcatcagcctgctcatcatcataaagaataatccctttattcttgccgcttgtttgggaaatatctgtggaaatccctctaaccgtgggatttgttgaattaccataattaactcctgcatcagtggagttcacaccaggggagttcacaccagccgaattgcccatggaagctttaccagaacgcaggtatggtgatgctgtgaaattctgatgacgtcgagggagggccttcatgcctataccatatggtttaacaatcaagtgtggaggagtatcaaaaagacggggacaagatcgctcagaatgtcccatctttccacaaataaagcagaaagttgggacattttcatatttaaaagctgcataaaaaatattcccatcccgctttcgaaacttcatgcgccgtttcaagggaagatcaagagaaacagtgacacgaattcgaagaaactctctccagaccccggtgaagttgttcggatctgattctaggaaagaaccaatgtaattgccagcatcttttgcaactttcattgtcataaaaccggactgcaaatcgtggatttgaatccacaacatatcaagtgtattaaggcttacagttctggggttatcgccatcatttagacgggaaataattagttgcttgcgatcgtaagtccatggactacccgagattacccgctgtatgtccaactcatgataaaattgaagcagaaaacgattttgatccaactgtttggcatacatccccttgccaggtttc

SEQ ID NO: 73565 - DNA, 870 bp, Cannabis sativa
ccccaaattcgaaccaaaacccaattatacctgcctaactgctctagtacaaatcaatatcacaatcacaacatatcccaagcaccaatacacagtaatttaatcaccaatccatttcaccaaattaaaatcaaaacttcactcttaatttaacatttttaacttcacaatcatatagtcaagaaattaaactcattgaaacctaagcaacttaaaatcaacaccaaaataaaccctgaacttgactaaatactcagccactaaaccataaaaacctaacctaaactaacctagaaaatcaaggaaagaagtgaggacttagcttaaagcttaaagaatccttggacaatgttaaattctattaaagcttaaaaattggtgaagaatttccctccattgtagctgctagccttagattcgaaggggagaagaagaggggaatggggttatgccattatcttaacttctaggttttttcctacaaattaaataaaaacccctaagcttataatataaattatatttatctttttctttctttcttttcttcatcccaaaaagtcacataaagacaaaaataataactctaggaaaagactaaattgcccctcaaaaccttaaagcctaaattccaccctaggggtattttggtcattgcaaataatccgccaaaccgacaacttaaaattctaaactagtccagtgtaattccaattcaatttatcttttattgtcgtgacatttctaaccttcccgtcaagttccactgttgcgaggccaaaaaatattttattcgaattatggtatctacgatacccacatattctaatataatcttcgtaattaataaattacgctttattattcatt

SEQ ID NO: 73566 - DNA, 831 bp, Cannabis sativa
aaaacaaatttttaaatttaataagtatagaaaatcaaatttcccaaataattttcattcaacaattgttataaaacaattaatttttttacgttttaaatattttaaaaattaaattgtaaatttaaaaattaaacaaaactatttagttaaatttaacacttaacataagagaatcataaattgtgatcaatatggtatttatgtcattttaattaaatttaacacaacataaaagaaggagtcatgaattgcaataaagttttaaataaaaataattttgccaccaaatattttacatggagagttaagtattataaataggggtgagcatggattgaaaatgggccgaccaacccgaccaacccaatcctaaatgggccgaaacatggtcacatttagtgggccgaacctcacatgggttaaaaagaacccaacccgcactgaatgagttgatcatcgggctgagggtttttcaacccaatcaacccaaattgggccgaccagcccaactaaaaataataagaaaaaatatttaatatatataatatttaacatacatctaaaatacgaaccctaaacctaatacaacaacataacccttcctctctctagtttctcctttctttctccaactccaaacactgtcgcccgtcaatcaaccattttttttgttttgaaaaaaaaaactcaaacctccatagctatgttctctcttactcagtcactcacacgctcatctccctgccccatcgtcgtcatcgaggctccaactccaacaatgctctcccactctagccgcaccagtcccaccgttcagatctccaactg

SEQ ID NO: 73567 - DNA, 855 bp, Cannabis sativa
aatctctctctttctctctgcttgtgcaccgttggcgctgccgacggaccaagagctccagcccaccaaagtcagaccacaaaatctgaatccccaaaccacaaaatccaaaaccccgatttccctcctccccccgagctcaccctcaatgccgttaatggcgagtttcccacaaccacgagacgagggtcatttctagcttcaacaatcgtgaaaactcgaggaagaactggatctcccctcccatgagtttttcagctcttgtctctccttggtcaacgacgaccagatttggtcctcccaaatgtgagcgagctacaagctgagctgaaggaggaggaaaaagaggatgtggatttgaatttttacgagctacaagcctagattcgtttttttttaattactgctattgttgattttttctttaggtttaattctttgaagctttagaatttgggaagtttagggtatgaagtggtgatggttgtgggaggtggtggttgttgtgggtggtatgactgtggtagtgtgattaggatttattttcttcaggaaaaaaaagaaaaagaaagaaaaaaagagaagaaaaataaagttgagaaaaaaaagaaaaaaaatagaaaaaaaacattatataattttttataatattttaataagtaatattgtgtggaccactaaaaatttgtcacatgtatatttgtgtacatgtggacagtccaatgtggcacataactgatatttttagatggaagtgtgtagagcaaaatgatacgtgggtttagtaggtttagcactcaaaattttgatttttgtggttaactgttacgttcaataggtaataacaagtcaata

SEQ ID NO: 73568 - DNA, 1648 bp, Cannabis sativa
tgcttcctcagtgtctctaccaactgtttgccacgaatcctgataaaacgcactaccaaaaccatctggtccaggagccttgtctccagggatagagaatacagcctccttcacttcctcagcagagtatggagcagataaaattcctttatgtatgtcattgagtttaggtcccaagttaacaattgactgatgaacctgtcttctgttagtcaatttcatccctagcaatcccatataatagtctagaaaagctttttgaacaccttctggattgtctctccagatcccactctcatcttcaatggagaatatcttgttttgaagtcttctagttttcaatgaagcatgaaagactgctgaattctcatctccatatttagcccaattaagtttagcattttgagaaataaaaagagaaaaagctttatgtacctctgtgtaatgctgattaactcttatttcctcctctatcaattccttgttcatcggatctttactcaatcttgtttgtatctctgcaagggctgaactagctaccatgtcttccttgtgaatgtctgagaagccctctctatttaacttctttaaaacttccttcaatcttctcaacttaatgaccacttgatacattttcgacccttgcacaccagaactccaagaatcagccaccaacttttcaaattgtggagcaagtttccacatattgaaatatctgaaaggcttctttcctgagttactatccttgtaaatggacaccaagataggagaatgatcaaaggacatttcgggtaagaaaactgcctctgaacttgagaaggaattcatccaacttggattaatcattgctctatcaatttttgaataaaccctctcctccggtttctgcttattattccaagtgaaaaacgccccagaatacttcaaatcttcaaggttgcattgcaaaatacaatccttaagtctttgagaaggtgtagcttgggctttcttaccaactctttcatttgcataaagtatctcattgaaatctccccaaaccagccatggttcaccaatattaatggctaacttttccagttcagaccataactcttctcttcttttctcatcattaaaaccatagacacaagtaacatgaaactttcccactctctgttttggaagaacagtacaatgaacaagttgacttgtgcaaagcccaatgtctacagtataaacattcggttgccaagcaacaattattctccctttatctagccaagggttattgtttgtgaagcaccaaccttgaaataaacttgtatacaaatcacccatactcttattcttaactttaatttctaggaggctaacaaacccaacttttttttgaataaatcagattcctgatttctttgtgtttctgatggttgttaatccccctaacattccaacatagtaatctatccattggaagtagagggatctcccccctctctcatattgtcatttacaaccatctcattctcactatccaggtacttaaacctattattcacttcagtaccccctggcactttttcaatgcacactttctttcctttcataactctttgaaatccttcaggatctgtttcaatcggttgagtaccctgtgtcttttttg

SEQ ID NO: 73569 - DNA, 715 bp, Cannabis sativa
cagagtggacaactgcttggacatctcttgttgaacctcctccatgacagctaaacgattgttcaacagaatgactccctacacatctgcagaagcagaactggaacttggaccagcaacaagatttgcaccaacagaatccttaggacgcttgggaaaagatccatcaaagtactctgagggttgaaagatggttctagtgagtggaggcttgagtgtctcatgggaataagccacatctttctgagaggaaagaactttatagattaagttagaaaaaataagcttgtgactgcggtttttacctcttcagaaggaaacaatttggtccaagataagagaagccaaattgatggtcgccctaaggtgattcgaaaaagaagatgagctaagtcttgagataccatagtcttgttggagtttggaagccaattactaagagcaaaccgcatgagtgaggcatggccataagtgagatgagtgatacgaagactttgaccagcttgccattcaactcgtgcaccagtgagattagtaatcatgaggtgacgatccatagtcactggagcatttgtcacacctttgagcagattcaaagcttcgactatatcattctcagtaaaggaaaactaatggccacgaacataaactttaccaaagaactcaaatttcttatcaagcaaatcatcaatcaagttagcataaaattctttga

SEQ ID NO: 73570 - DNA, 804 bp, Cannabis sativa
gtaaaataattccaacaacaacattgtccaacgagatgtgaaattgttggaatttgtctcgagtaagcagttgagcatttatagcttgccaaagcatgaatctatgttttggcataatgaaagaacaccaaatgctcctgctgtattcacatatcacctgcgagaatctgctgttgtagagcatattagtcttgaacctcccagccgcacctgctatagcaatatcagcttttgaaaatttatcttttacatgacaaattttcttccaataccaactcgtatcagccttgagatcatagaaccaaatggagttatttttaagataattatcattgacccatttcacccaaagaatgtcactcttggatgaaatggcccaaaaatattgggctatgattgcttgattccactttgtcccctctttaaatcccagccctccataatgtttaggaaggcaaactttctcccaactgaccacatggagcttacttctattcccattccatcctcaaaggaaccctctacataacttttcaatttccttggtgatgctttgaggcaagacaaaaatgctcgttaagtagttccgaagcctaagtaaaatcgaatggattagctaagctcttcctgcaaaagagagatgtatgcttgcccaacagagaagtcattgtttgatcttcttgataatcacatcacaatcttcagctttccattttgtcagtctcaaaggaactcctagatactttagggaaaaggtgctctcagttagagttaattctctcaatatagcctgtttagtctctt

SEQ ID NO: 73571 - DNA, 997 bp, Cannabis sativa
gattgatgcgaagaatatggatgagttgatttgtgactgttgggagcattctgtattgtgaatcaaatagtcgattctctaactcatgttccgtgtcataaaaatataattggagatttgaaggatgaccatcagaaggaagtaaatctgtgatgttgtggtagatttgtccctgtgctctaaaagtgtatattccgttgtttctttggcagagattttgatcatatttaacacccaacgatgtgaatgcaaattggttgttataagttcgaatatatgtccgaaaatgtgcagaatcacttgtgttggaggttaataattcataaagttcatttggaacttcatttgtggccagataaatttttccatctgcacaacagaatccatttgtttcatggataaatctctttgctttacaatgtatgcatatggggaccgacggaagtgaaaatgcttcagacggcacattttgtagcaaatctcgaaatcgagtgatcctattttgcgatgggcctaacataatgaaaggtttaattaggtcaaattagcaaactgatattttgttattatgaatgtatattaatataaaacaaatattgtgatgttggagtaacccttacttctagaagttgttgacataattgtctggctaactgagttctcgagatcaacagatgggatctgtttgtgtaatttttattaggtagactgatgagaagaaaccgaaggtaggatcaattagaaaaatgaaggcagtattctgtatatacctgatcaaatctcccattattattggaagatgaattttggtagagattatttttatcactatatccatttgaagaatccagatcttgataagatctctttgatactctgtcaccatgtttatcttgtcgagaattgttaatattatcagcatgataatacgaatgttgcgtacttgtagatgccgcatgatcatcagtacatgggggtaaattgttacgattcaaat

SEQ ID NO: 73572 - DNA, 1020 bp, Cannabis sativa
tgagagctaagggtctagtggacggtgtgatatgcatttggaacttgattttgtgattctttgtggtgcctctactttatttatatattttgataatagtgatgagatatttatttttaaaagctaaccatacaggaatttttattaaatcaagggtcctctgatattggctgatttcctactgggctttataaactcaccccctatttttttccattccaggaactcagtttgatgctaggatgaggatggtaccattgaggaagaaagttgttattagtttaatcttattttacttattaaacttccaatgaaagtaattttgtatttaagctgtaatagataatttggatgacttaaattagctaagtgctagttagaaatgaggagtgatggatgctagatattattttagtattttattaacttattaaatctatctatttcgtgacaacataactgtggggatattattgttcttttatattgatgagtggtcctgattttgttactaatattttcttattaaaacaggagtgttaatccattatttttaaattataatttttgtgatatatataaattcaaggatcatttattagcgttatcttcctacaagggttaaagtgtgacctttgaccacccaagttatggatattacatatctgccatggcctagggctcgggttgtgacaaaaaaacggtatcagaaccccgggtttaattaccttggagtgtgtcaccaaatagtttagatttaatttaaataatagttgtaacaagtatcttggtatttatatatataagacatatttatattattagaacggttggagaagatggccctccagttaacgtccaacctctacaagctaaattccctatgaactttcttctcaaagccttaaaagcagttcccgctcaatagatggatccttccactcgatagagtcatcactttcaaatctttcatcggatctaagtgtctgagtttgagggtggacaagatcccatggtagc

SEQ ID NO: 73573 - DNA, 958 bp, Cannabis sativa
agatagtgagataccaatcactcaggacatgatagctggtgaagctacaattaatgttacattgtatatataactatatatatagagatatatagtattatcactattaaggccggtgaagaaataattaacacacctatagaccaatccttgttttataaatattttttgttatgattataattatattattattagccacgactaaccatatatctcttatttttctgttgcctgttctttttccttgcaaatttttctccactaagtaattgcatgatataaatataaatacccgacccgttaaagagcgtacgtactactagttgcatggacctatattaatggtcgttattattcatatatatttgattatatacgtaaattttccatgctgattcgaaaactatatatgtatactttaattagtggatgaaacgaggagaatattgtgaagacgtgagtggagttttattatataaatatatatatgtacatttgggaggaagtgtgaaatagactatatttatgaaaacactatacttacacatattaaacatacctttatgacatataatgatcactacaaaaattttacttagtcacatcaaaacttgtgggtttgtgattaattataaattattatttgtaattaaaaggttgtgactaaatgtattaattacaaaaattataatttattataattaaatatacttttagtcataattattttgactaaaattaaattagtgaaaacttgtaaccaaatactatattttagtcacaagtaacattttgttgtaactaaaagtcatatttaatcacaaaaaaattatgttaagactaaaaaattatcactaaaaataacatttttttgtagtgaatatataataatttttttattattacttggattatagtaattattataggtagtaataacaatgcaatatttaag

SEQ ID NO: 73574 - DNA, 641 bp, Cannabis sativa
agagaaaattaatgcaagagtgttttgtgaaatctcagctcaatgattcaagagactgagtgaatatatttataagctgggtcaataatgaccaatacagagaaaagccaatggcttggttacagctgtaggcaaattgtaacaaacaaagaataaattgtacaaatgcaatcattgccacatcattacaagaataacggctaaatcaatctagggatcttcaattgacagagagaaggacacctgtcctagacctggaccacacagcagccacagcagccatcagtagaggaaaaatgcagcagagggaaataggttcatttctttacatcccctctcaaatgcaggggtgaattttgcacaccaagtttgtcgattaagaaattgaaccttgaactcgacagtccctttgtcaagcaatcagcaatttgatcagacgatggcacatatctgatgtccaactctttgtttaagactttgtctcggataaaatgaacatcaacttcaatatgctttgtccttgcatgaaaaactgggttagaggccaaagcatttgctcccatattgtcacaccaagtaatggcagttggtgttttgaagctaatttccttgagtatagattcaatccatgaaatttctgc

SEQ ID NO: 73575 - DNA, 2740 bp, Cannabis sativa
aaatccattatacaggctcgcaacatatctttaagtatctgtattgtcctctaaaactgtccatcagtctgaggatggaaagttgtactaaacttcatcctagtacccatggatcgctgaagactttgcttaaattttgagataaatttcggatctctatctaatataatggacttcgaagccccggtaacctcactatttcttttacatataactctgcgtgctgatctactataaaggttattttcactggtagaaaatgtgcggacttagtatatcgatccattgcaacccaaatagaatcgtacatccctgtggttctaggtaacccaaccacaaaatccatggtgacatcttccctcttccactcaggaagagtcagaggctgcaacaaccttataggtctctgatgtttagccttaatctgctgacaagtcaagcaacgggatacaaattctaccatatctttcttcattccgcaccaccagtagaaaggttttaaatcctgatgcatcttggtagtgccaggatgcagtgaataaggagtggcatgggcttctcgagaatctcatttctaagttccacactacttggaacacaaactctggttctatacaacagcatcccattacctgacactgtaaaatctatagcttgaccagttaaaacctcttctcagatcttcaccaattttggatcagttaactaagcaactttaattttgtctaatagatcagattgcaaggttaaatttttaagtttgcctacaacaaactcaatacccgatctgaccatatcatctgctaggtgaggtgaaatcttgatcatactagtcacttgcccgagaccctttactaagggcatctgccaccacattggtattctcggggtggtaaaaaatttcagtgtcgtaatccttaactaactccaaccatcgcctttgtctcatattcaaatctttctgagtaaataaatatttgaggctcttcgtagagaccatgccgccatatttttaaagcaaaaactactgcgacaagttctagatcatgagtttggtatcgccgttcatatccctttaactgaggggaggcataagcgatgacccgatgggcttgcatcaaaacacatcccagaccctgtctggatgcatcgcaataaaccatgaacttctctttgtcaaatggtagggctaacatcatagttgtaatcaacctctgtttcaactcctgaaagcttgtttcacacttatcttccacaggaaccgctgattcttttcgttgagctcagttaaaggtgttgagatcttagaaaatccctcaaaaaaccgacagtaataaccagccaaacccagaaagcttctaacttttgtaactgtttttggtctcagccaatccctgacggattcaatcttccctggatctactttgatctcatccttactgataatgtgtccaagaaaagacacctgagatagccaaaagtcacactttttaaactttgcatacaatttatgttctcgtaatcgctgcagaaccatctagagatgttgctcatgtttcgcttctgattgagagtacacaagaatgtcatcgataaatactataacacatatatcgaggaaatccttgaataccctattcatcagatccataaaagttgtcggagcgttagttagtccaaaagatataaccagaaattcatagtgcccatacctagtgcgaaaagcagtctttggaatgtcctcctctcaaattctcaactgatgacagcctaagtggagatcaatcttagaaaaaactatcttctgttgaagtcgattgaataggtcatcgatcctaggtaaaggaaatttattcttgatgggcagcttatttagttctcggtagtcaatgcacatgcgtagggattcatctttcttcttaacaaacaacacaggagctcccaagggtgacacactaggtcgcaaaaatcctaggtcaagcaacccctgaagctaaatcttcaattctttaagctctgccggagccattctataaggtgcctaagaaactagttgtgctccaggtgctaaatcaataacaaaatctatttctcgtgtggtaaacccggaagttcatcaggaaatacatctaaaaattccagagccactctgatatcctctggctgaattgactcaagtcgtgtggtatctcataccactgccaaaaaccctaggcatccatcttgtaacaaatctctagctttcaatatcgagatcaatggaattcaggatccctaaactaatcccacaaatacaaatgcttcctcgccctcgggttggaagatcaccatcttccgcttacaatcaatactagctgagtacttggacaagaaatccattcgaaggatgatatcgaaatctgctaaacccaattctattaaatcagcactcaacttcctatcctgaattctgatcagcatagacctaacccacctattagagataattaattctctgccaggctatagggttccaaactccttatcataactatcataaggtctacccaatttatcaaaaaatttagctgccacatagaaatgagttgccccagagtcaacaatacagagaagtaagagttattgaccgagagttgacctgtgtctgagtaagagtagacacccttgatggaacgagctttgctgctatcttcagttcttctttcttaagctgtggacaatctctcttatagtgtccagg

SEQ ID NO: 73576 - DNA, 937 bp, Cannabis sativa
ggtttatttaatcttgggattccactgactactcatatgtatacaacaaaataatatatgaactcaaaattaagaggaatttgcttacactatttagtaatcaatctataactagtattaagaaaagaaggagaaaacattttattgagaatgtaatgttcgacttatttacaaatgagagaatggtacaatatatatatagtaggaacaccctaacaacccaactaacattcagtcaaagttagttaaacataactaactactgacctaaagaaaacaaagaagttaattaactgaattaactatttcctataaaacagtataaaccagtaactgaagcaagagaagcctaaatcccctaatacccccctcaagatggagaataaatgttgcgaatggacatcttggaaatgtgtgtattgagaattggagaagtgaggggcttagtgaaggcatcggccagttgaagtgagctggaaatagggatgagtcggatagtggagtttttgattttatcacgaacaaaatggcagtccagttctatatgttttgttctttcgtgaaatgtcgggttgttggcaatgtgaattgcagactggttgtcacaataaataaatgcagggtgttgctgtggaatttgaaggtcttgtaaaaggtattggagccatgttatctcgcttgtggtagcagccaaggctcggtattctgcttctgcagaactcttggaaatggtgggctgcttcttagttttccaggatatgagactgtcgcctaaaaaaatgcagtatcccgtggtggatcgtcgagtaacagggcaggatgcccagtccgagtcagagaagccacggagagtcagagcggaatgagatgaatagagcagtccttgacctgggtttcctttgagataacgcagcaggtgatgtatggcttgaagatg

SEQ ID NO: 73577 - DNA, 782 bp, Cannabis sativa
aaaaaaaaaaacagtacaaaagttatttttggagtgtaacagtataaaagaaagaaaatgggaaaacacagtaaactgtgtaaatttccctaaaaatgccactgaggtataactcactcaaatagctctcatgaaaggcgaagaatatctttgttttttggtaagttgaaaaatatcttatttatttattaattaattaaatttatctctctaatttatatttaattgaaacatacctctcttttaatatgtattgtacttaaaatattctggcataagagagtcacatagaaagtatcttaaagtaacaggagcaaaactggtatagtttttaaaaaaaagatgtaaaaatgatagattttaaaaaagagggtaaaaataaaagaggacaatataaaaaggttatagagtctaattacctctctttttttaatccattaatcaaaaatactatcatattatatttcattaaaatttatctatttttgtgagtggattacctaatatacacttgccctctacttagggcccgtttggtatagcttttggaaaagttaaaagctgctttttaaaaaaaactgtgataaaaatgtgtttggtttaccgtcaaaaaacagctttttgaagaatttttgaagaagctacagctaaaagctgaagttgcactaacccaacttttagaaaaagttattttgattaaaagactataataaaattttttgtgtactaaaaccatatttaatttattacatattaagaaaattaaaataaactaattataa

SEQ ID NO: 73578 - DNA, 741 bp, Cannabis sativa
  modified_base (686)..(693): a, c, t, g, unknown or other
tctgaacatatgtcaatgtctaactttttagagattcatgcatcttatattgacaatctagtgaaaaaaatgtaaaggcaaatatattttagaatatatttgtacaatcataaaagcggtgttacctttaatctatattttggtatattttgaaaaattttataatctaattcttttttttatgattatgtacgttttagttaaattatttgtaatttttcactaattaataacactatgtcaccattatttgtagcatggaacaaagctgccttggaaaatatgtttaagccatagcatctaagaatgataatttatgggtcaaatgaatacacaatgtagaggtttcatcccaaaaccaattggcaatgagaggagtagcccattcctcttatatattctattatctttccacacattagcagtgtgggactctctaacaataaaagaaggaaattggtgggattacttaattgcccctattacagagtagttggtattggaagaaaattgtaacagtaaaggatgtggagtctaatagaagagcaaaacctccaaatggagcattaatatcacatttgagaaggctatcacttgtttcgtctagaatttgatcgagtgacatgaagcaatgaggtatggaatagattatttaatatcctaagggctcatttggaacgccgtannnnnnnntattgtattgtattgtattttatgcaatatttttatgtaaaactatat

SEQ ID NO: 73579 - DNA, 719 bp, Cannabis sativa
aaatatgtatttttaaaaataaaatatttttgagccatatgctgggtagcccagcccttagggataggttttgccttagcttagacgacatgatctttttaaaaaaaaaaaatgaaagtcatcatttaataattccgttaccaagctcggtaagagctcaaccggaacagtgtccaaattgaaaagacgatcaggataagatatagaggctcttgcaaaggaatgagctgctacatttgttgatcgtttcacaaaataaaaagaaatattacgcaaaagtacttaataaattcttgcagtcactaacaactttgccaaacaaggaaagcataaccattaaaaaatattatattttgaaagaaaatttataattttactgttacacgaaattttttataaaattattgtctttttataaaatatccgtaaaacaacaaaaaagaaccattaaaataaaagtggaacaactaaaagacaaccgtaaacacaatcgtggaacaactgtaaaaacttaacaaagtacacagtataaaacttacacactatttttttaaaaaaataacactactttttttaaaaaaaaattctacttcacattaaaaaaaaaaaaagtaaaatagttaaaaatttaagtattgagtgtaaaaatccatttaattaatctgatatcaatcacatacattttatgtatacagctgaacttactcaaactaaggatc

SEQ ID NO: 73580 - DNA, 887 bp, Cannabis sativa
  modified_base (608)..(614): a, c, t, g, unknown or other
gaaataaacacatataaaattttaaaaaaccctacattggtggcagcgtaatataatggctccttccgtttaaatctctaacccttgttcctttttgtcgcagagtactacaaagatctgaacttggatctccttcgggtgatggaattcgtcacaatattccacactataattgagtattgacttgaattatgggagcaaatactctcttccctataaggttcgaattctagaggggataagagaagagaatttgaaatttataggagcctctcttatttgtttgacaaagtgattttgagttaacaggttaaacaaacagcctatcgttatctatttatagtattctttcaagggttaggatttaaattatatggaattaaaaaagataaaataatagcttgattaaatacttgttggccgaacctattttgggccctacaagttcaatttcgctatttatttaacaacttatcattaatttcacaaatttcatattttaattctaatcctataaatgtcaaatttatctatttaatatttataattaattatcaaataaaattttcatttaacttatttataaattagaccttacaaagtctctnnnnnnncaaataaaccctaaatcctctttacatctcaattaaggccttgcatattaaaaatttgtaaatatgatatagtctaatttagaattctaattgattaattagacccatttaataaagcctacgagctaatattatctcaactagtgcaaggaccatgggcctatgtaaataaactcttaataagttgttctagaatttatcgagtaaattgtctatcttattaattcttcctggctccactgtagattgagaattgcgcttttgattacatag

SEQ ID NO: 73581 - DNA, 1882 bp, Cannabis sativa
tgattaggcgatgcgatatattggtgttaggttgtggcacgggctcacctgattatgtgatacaattatatgatatatgggtacatgtttttggtacgggctcacctaattaggtgatgcagttatgtgatatatgggtgccaggttatggcacgggcttgcctgattaggcagtgcaatacaggatttttagattaaagcatcgacttgcctgattaggaaaagtgatgtaatcaagatggttactttatgaggtaacatatatatattaattatattttaaatgaatgtgattcctattatttgtataatagttttgtattaccagatatctgtatgctgatgcttattcatggcagatgccagtagtgatttggatttaatcttatgaacaatgcgtaatggtttgatatgtataaatgataatattcgaataataaactatataattattattattacttttcttgttgagtccttgtgactcacgagtgctatgtggtgcaggtaaaggcaaggaaaagtttgagctgccatgagatgactgccttctccaacaatgtacatattgaccctaccggtctacgtgtcgagttgtcaggagttgttttgggctgtatttatgttgtattttggttttatgtttttgaggcatcatcgtttatagttcttttgtaaaactttttataatagggatccctagaacacgctttttatgtcgttataatgtccgtttttagtgttttattatagtcaagttttaatattatcatgatttttagtatttaattaatctattagtattaaattagtttataaaatcacgcatgtggtgttcctatagattaggacgttacaatacttaatttttatatttttgaacggttgttttttggttgttctgaattttttttaaaagtatttagggtaagagaaaattttccatgtgaagcttccctctcgtgatgttttggtagtcctccctggcaaaagagttattgagttatagtttatttttgtaattttatttggttattttattttgtagatttaatgttgtcttagtaattttttatgttattgttcaaggattgaaattttaaatacttacgttctgattgaaaaagtagttggtttttggctgttctggtgttgctctgtgattaggtctgtaaatattgaagatggaggtttcatatggggttttgcggtgtgtacactataaaagaaatattaaggtgtgaacaacatcatttcaaaaaaaaaaggtgtgaacaacattttggtaaaaaaaaatcgtgtagcagtaaaaatgaaaaactgtccccaaaatttagtatttttgtaaaatgctcattttttttattaaaagtataaaaaaaaataccaagtatatcattaattttattattattttattgtacaaaacaacaaaaattatatgtaaaaattttttaatttaatgcaataactcaatttaatgataaaatattaaaaatgacataaaagtaaaatttaaaagcattgtatttattgttatgtaaattttgcatcatgttctattgtgatccaaatttgaataatttttattgtgtgacaaatttagatcaatttttttttttttttgataaatcagcaagattattattgatccacaaactattcaatacaaatacaatgaaagagcgtctttacatgtaaagacctcaacaaaaacaatttcactactttttttttttacaacttgtgaaaccattctctatctttttgaccactctttttaggccaaactagctctactctatgcttaatactactcttaattctttgtacaatggtatctttgttttctatatgattattccatacaatgtcatttctt

SEQ ID NO: 73582 - DNA, 1356 bp, Cannabis sativa
atataatatataataattaacttcttcaatgatctggagcacttttatcgtacctatgctttaaaatttattaggtttggcaaatattgttaatgcacaacatgtattctttggcctccatgtacatttatatgaaaataataattaaggacgagcctgttctctcaaaaacagcccaagtagttattgtcttttattagtggttataattaggatgaagagtatctaattctatacaaaggactgtttggtataatatgtattcttatagtatgaggatgatgatgatttataaggtttttctcttctcaaattttgaaaaattattactacatatgaaaatgggcattacttaatacagtaattttaaattctttttagaaagtagtgtctatacattcacaacaattataatacaataaattttatatattaataattgggtaaatattaaataatgtgttttgtgtgattggattaatttatgacaaataaattatacatatatattagtaattttacatttttttttcttcaaaataatatatcatatttttgtgttcaatttttatacataactaatcatagtttattttaataattgggtaaatatttgatataattaaatttatcaaaaaaaaaaaaattcctaataaagcatataagtttaatgttgtattttccactttaatattccaattaataaaattaattattttgaattaccactaaataagtacataagtttgttaattatagtatgtcaattaatgaacggttatttagtttgatccaatcaagcggagggggtgccaaacatctctaagggccgatggttgagtagcagagaaagaggctctagagatcatcggggttcggtgtgttgggtggttacgtcaagacttgacttttttgatgttttgtgtggagaagttgctgcttgttgcttggctttaaagacgacaactgagaagggatgcaattttgtaattattgaaagtgattttagggtagtgattaactctcttaatggggtagattccaaatgggagattgaaaacttttcgagtcattgtcgaagcacctcttctgtttttgtgggttgtggtttttctaatattgattagatttgtaattttatggtccataatataatatggctaagtaaacttttaccttgctataattgtttggatgttccagtcttaccgccgaacttagtttgtaataactatgagatataacttacttatatgatatcaatccaagaaagataaaatggttttttagaagcactatatatatactagtttattgttacgtgcgatgcacgtatgctatgttttatattaagta

SEQ ID NO: 73583 - DNA, 767 bp, Cannabis sativa
gggtgaggcggggcagccacacgctcaacggggagaagaggagctaccacggatgaccattaccttaactgagttgataagactactacagggattgaaggaaaccaagtgggccccaagaatggccactgaccccggcaagagggacaaagggcgatactgcgcctttcacagagaacacggtcacacaacttacgagtgcaggcagttgaagattgaggtcaaccgtctggtgaaagaaggattcttctgggactgcctcgcttcgaacgccatgcttcacatccagcggggaagtgacaaaggccaagatcaatctcctccaccgtacattaagaaaaccgtgaatgtgaactcgggagggtcagacctgagcgggaattcagtacgagtttcaatggcacacgcccgacgggtccaatcggtaagggcgatggaggtaattgacagcgacggccctaacgtgctcttatcattcaaccacggggaagcctctgaattggaacaccccacgatgacgctcttgtcatcactctggacgtagcccatgttcgaatgaaacgcatgctcgtcgacactggaagctcagccaacattttatttgctggagttctgaaagaaatggaaatcgaagacttaaaagcccaggacacccagctcactctagtagtattctcgggggaaagcgctgtcgctcgaagtttcgtccaactacccgtctacgcgaacggagtcaacaaattagtgaagttcttaattgtggattg

SEQ ID NO: 73584 - DNA, 1317 bp, Cannabis sativa
  modified_base (1290)..(1292): a, c, t, g, unknown or other
tttttgtgtatttatgaaattattattttttttttggctatttacaaaaatatgagagaaaaaagcttttattcggagtgtttatcaaaccgtctataccgcacaaaaaatgttagttcaaatcttttgtggtgtagctatgatttgcattttttttaagttgcctggtgtagtacggtttataattttaaatgtaataattacagttgaaatcataccgcacacattattaaaaaaatacccatattataaataaaattttatgtttaacatatattaacaacccatataattataaaagcctagccaactcagtttaggcaatttccttatcaaacatattaatattcttccatcaatgagaaccaaatattcttagtgaaatatcatctttcaccttctctttcttacgcagatagtaattcaaatattttgtgttaagacattttgactcaactaagcatagagaaaaaattacttgagagatatgaagaaaaatttatgttcactacaaaacaaataaaaaggacttgtttttgtctttatttatttttttaaaaaaaatgatatttgtattttttaataaataatttttttgtattattattatatgatattttaaggtgttgaatattaatactaattttttaattatttattaaattaaatttatgggagcataacagtatgctacttttttgtagtgtttgttactttaatgtgacccttaacattttagttattaatatgttcatatttttattaacttcaattagaattttgaacttttttcttaaagtgcacatatgtggtacttaataattgattaacaattttctaaattatttattaaattaaaatttgtagaaactgatattgaaatgtacaaataacggtatgctacattttgtgaaacttgatagttgataccttaatgtgcctattaacatttttattattaatatgtacatatctttattaactttaaaattttaatttttttttttttccttaaggtgcttaataccatactgatgtagcacctaataatttattagcagttttctaaatcatttattgaattaaattttgagaaaattgatattgaaatgcatcaataataatatgctactttttgtattgcttggtaacttaatgtgtctcttaacatttttgttattaatatgaagttttatagtgcaattgcgatttggaaaattatacaaattgcatgtgcacgtgttcactaagtacccgatccaatccaatccgcaaaatgcggatatccgnnnttgtgcggattggattggattgaaa

SEQ ID NO: 73585 - DNA, 988 bp, Cannabis sativa
  modified_base (905)..(909): a, c, t, g, unknown or other
tgacttttcttaagagttgactttcactttaattttgactttcggttgacttttgacttttaaagatttcttttgaataaggtctcgagttgttgatccctaaatgaatcttttgctcttgatatgcttgttgaattctttttgggttactttgaaaagtttggtaaaaatactaatttgtcttgaaaaaattattttcttttttaattttgctacaaaatcaacaaatcattagcagcaaataataatcaaatatttgttaatcatcaaaataagaagacctaaaagtttgagttaactatctccccatttttgatgatatcaaatatttgattattttgaaaagagaaaggaaaaatttaaacaatatatattgaattagatatccaaaaaaaattgattaaaagataccctttttgattatttaccttgcatgttttggtaaactcccactcaaattttatacttaagattaaaagattaaatatcaaaaaaaaaaaattgaagttgtgccaaaaataaaaataatcatgaattttctccccctttcattcatcaaaaggatggcaaggaattctcgaaataaaaagaaaaattaagcaacacatctcatgcatttagaaaaacaaataaaaccataacatccaacaatgacagacaaataacattcaacaaactaaaaagaaaatcaaacataaagaaaataccatccaacacaaagtcaaaaagcattaagtctttgcacacaaacaaaacaagagtaaagatactaaaaaaatgcaataaagctagtttggtggagggccaaaacgatccatgtatgccctccattgtgtcatatcatcttaaacatgttcaaactcatcggccatgtcactcttcatggtgttgatatcattgttgannnnngtgaattgagagttgatatcattcctcaaggtttgaaattgagtgtcaaacgatgtgtgaagacaagcaaaagcctcct

SEQ ID NO: 73586 - DNA, 881 bp, Cannabis sativa
actctgataataagatgtggtttttagctcaataaatacgagaaagaaaggcaaggaagctataataaagcatgttagttcatcgtgttagttattactagtgccatatattttggttgttgttgtatagcttaataaattttatcactgtatcatattataattgaacattacacaataatgatcataaatttttaagagctatttttatcttccaaaagtttttgatagaaagtagaaaaataaagtgatattggtaaactctatttctttataatacttctctgcgataggaccataagtacatttattgattatgataaaatagtaatatgttattacataagcacatgaattctatctacaattatgtgtgaacctataagagaaaagtcatattctagtgtaagtaaaaagaatttttgtaaaaagtcaaatagtccaataaagacctgccaaataaaaaatgcaaagattctaattgtatagtcaaacaaaacaacaatacccaattttgtttaccacaaaaattaccccatcataataaaacaaaataaatgtctagcgataccatcactcaacacaaaatatatatatatatatttaacacagattttgagaagaaaagcactacatttacacaataaaaatcctccaaatttaatcagctcatttctccaagacaacccacaagaaaacaaaaataaaaacaaaatagaaaaagaaaccatgttaaggaaaaagtaagaacccataccgcagtaatcgtcctcctccattgatggctctcccaaggtctttcgtgtggtgtgatagtgatgggcgattggaaggtgttcgcttggaaactgggtttaagaagaaagaaggtgtgaaatgca

SEQ ID NO: 73587 - DNA, 923 bp, Cannabis sativa
agagagagagagagagtttttgagattgagtgcttaggtttctaagctgtggaatcatgttcttaaaggggtcaagaactgagggtgtactgggtagtgattgagaaactgtgacggtttctctggtgtgtttcacgagtgcagaagagcattgtttctctgatattagtgcttgtatctactcttattctccatattaatgaaatcaagatgttgtttctcagctagagtatggctagggatcaaccttgatctctaagaccagaaccaggataaaacttgttgtcttatcccttgttcaattctattatattgcattgtgtttaattgttattgttgtttttgttaacagtttagtgcaggttttggagtttgaatcttggtgttattgttgccaattttacaacagaaatgatatttaatggacatagttaaaataaaataattaatgatacatgttaaaaaaaaatgactctacataaagtcatttttaatacttctactgaagcattatcctaaattttaatttacagtaaaatattatatttaggtgctcatcaattcaatactatatagttttatacaaaatattacataaaatataattaaatataatgttatacgataaaatacaatgtaatatgacatgccaaacgaattcttagtggcgtttagttggagataataaaatctaatgaaatagaaaagaaataatttttattctattcttttgttgggttgcattttaaagtattgaatcactctaatggaatgttctttctaccattttaatagaatgactcttctattttgaaaaaaaaaaagaaaataccattctaatgtaaaatgagaaaaaaaaaaattatatttctagggaaatttacatggtatactaacttttgctatttctttacaaaaatact

SEQ ID NO: 73588 - DNA, 766 bp, Cannabis sativa
ttgtaagtataaatgtagtaataggcgtgtgagggtaattatgtaataaagtgagtaaaaaggatttttcatgtaaaaatttctaaataatattgtataaatataaagctgaaattttaaaaaaataaaaataaagaaaaaatttaaaatatataatataacgtatttttaatttaatttttttaaatattttaaaaatctttattttaaagcgtataatgtcattgctctaaaccagcaaattaattaaattaaaaaacgtgtaatccgctaatgttatcgataaagtccctcctcctacctcccatcatcccatgtctacttcctttttttttctcaaaattatcattttaacattttctcagtttatctattaaaaaaaaaaaaaaaaaacattttctcagtttgtctttaatttcgattaaagaaaaaaaagttagcctaattagaatttttgtcatttaaattttaacatatattaaattctacctttatttttaaaattgttaaaaatgtctcctaaactattaagattattatatttaaagatttttatctaattttatttaattttactatttcaataattatttacgtactaaattattctctccaaactttaatatttatcaaatcatacttcttgaactatgacatgtattaaattacgactcttaaactttcatctatattaaatttttgggtaaataccattttggaccctgtgttttataaaagttatagattggaccccgtgttttgttaa

SEQ ID NO: 73589 - DNA, 1083 bp, Cannabis sativa
tcaacagaaactgtataaaattgctgatcggaggtgtcgactccacccttcccatgaaaggactacgattcccagtcagtttcaaaagctccgaaactcacgggatactttttctatatacttttggagagttatattattggggtaataatttaagctcaccaaaaagcaactaattttgcgccaagcaaattaatatattagggaattatcaaaaaaacaaaaaaaatcaaaaaaaaaaaattagtatattagggtgtctaatccaattcattttgtgattaaaaaaattaaaaaacaaaattgttaccaaatgatatctaaatatcacctcatttaagtttaatattctataaacataccatcattagaagtgtaatataactaaaaatttcaaataattaaaataacaacattattaatacttagtaataaaataaaacaaaatatcatcaataaatattccaaacaatcatatgttacaaatttaacacaaaaaaaaaaaaatcaataaaaatacaattaatatatatattataattttaatattttttgttatagaaataaatataaataattttttaacatatataaattgtaaattagattaaaatcgatttttaattgaatttttagattgacatccaataaccgatccaatctaattagaactcaaatctagccatatgttacaaattcaacacaaaaaaataaaataaaaatataattaatatatattataattttaataaattttattatataaataaatataaatattttttcatatataaatataattgtattggatcaatttttaattaaatttggagattgacatgcaataactgatttaatttaattagaatttaaatattaacatctaattcaatccaattataattagattaaattacatgttatccacccctatatccacctacatagctttttaagggtgccactacagatcttttcaaaaagtattatttagaagtgatgtgatcctttcttagaaaacgaaatatatataattatgcaataatgctaaatgtcaggatcagatgtttttttttttttttt

SEQ ID NO: 73590 - DNA, 1652 bp, Cannabis sativa
  modified_base (1124)..(1141): a, c, t, g, unknown or other
aatatcaagaaattgacatcgttgaaatatgcaaaacaataccccaattcatctttgtattacgaaattctttttttttacttagttttaacaatttgattatttttttgtactactacgttataattttttttttcataaaatttatttgttacaatttcatacttttttctctcatttttttgagttagtgacaactaaaatgacaatttattttttaaaaattaaatgaatgattaccttaataataaaaataataaaatcttataattttaaaattaagtatataatataattggtaatatataattaaaaaaaataaaaaaataactagaaaaaaatataattttaatatgtcaatatctactagtgcacattgtgtcaatttaaaaaaaaactaaaaaaaactcatcactgtatattaaaaataatgtatcaaaaaaataaactaaatatttgtatatatatatatacaatgcaacacaaatataacaaaaaaattgtcaagaataaactaaaaatatacatccataaaatgcaaccataaaatcaaaaaaacaactaaaaataactatacaacaaaaaatattctgaaaactacgtaaaaataactaaaacacaacataaaattgttaggctttatgctctaaagcaactatttaatggataatatattagaaaagatatgaaacacaagtataagataaatgaatgcgtaaattataaaaatataattaataaatatttgaaaattctatattcatacagagtggtatgatcatgtaaggaagtacaagagaattaagatcatacaacataaacaaaataagtcggtagtgtattaaagtatgaaatccttaatttggaattaccaagtatggttttctaagcactatactctttaatttggatcacatatgttgatagacatttagtaaaagtattgtatataatttgattatgcataactggaccaatatgaactaacatcttttatcaacgtgttgttattataaaagagttattcatatcacaacgatgatcattagtagatcaatctgaatcctgagtattcacgcactcctgtttgtgttaattaggttctttgattcactcgttaaagnnnnnnnnnnnnnnnnnntcttacaacttctattttgagaatttttgattggattttagccaacctatgtggagtcgtaataaatgagattcaaactaaaattgtaacaataaatgtaaataatgataccaaaattcacaataaatttaaagagattcagatccagatgtcggtaatagcctactccccttgtgttttattaatcaaagttacaaaagtcaagaacatgctcttaaatggaaagaataaaagagtgtttttcctataagtgctcaaactcgcagatctctttcccaggtcatgggtgacccttcatataggggaaaaggtcggtgcttctcgctctaaaagatgcgaccaatgtggagccatcttaattgcctccttagttttcggaggtggttgaagtctgattcttgtgataccatcccactatttttgtgggtttgtaaccgtcattgagcttcttatgggatttgaatatttgaactagccactaatgattgatgagggtctccccaaggtgttg

SEQ ID NO: 73591 - DNA, 641 bp, Cannabis sativa
gctaatacaacaaaacccccaaaaaaataaaagtgaaaactttttacaatttcagcacaaaaatcataaatcgaaagagtttctatcaatcaattagggattttaagagataaataaatataattcaaagaatttcattttctcatgtttcgatttgaatcaatcaataaagcatattcactggattgagaaaccattaaattaaaaattcatacctgtgattgagtgagtgaaggaatgattgtttatccgatcaatgagttacgtatgctcaacaagcttcgcgcagagctagggtttttgtttggtttgggtttgaatgaaaccctaaaagaaatgggtggaagaagatgacaaaggtaatatgagaaagagattagaagcttaggtttgggcttatcttattgggcttattaaatgagtttggggcttatctcactgggcttattaaatgggcttgggcttatcactgaatgaaaagaagtaataattagataaagcatggggtaagttgaaaaatgactatttattaatcaattaactaaatttacttctaatttttatttaattgaaatatacctctttctatatgtattgtatttaaaataccctgacaaaagggagtcacatagagagtatct

SEQ ID NO: 73592 - DNA, 1036 bp, Cannabis sativa
taactacatttattactgtgatttcggtttagatctcttttatacgactccgcgtcggttggctaaaaatccagtcaataattatattttataattttaaagatattttttaattacattttcataaaatatcctaaaaaaacatcaaaataacatgtaaaaggtataaaagaaatgtaaatcaagatgaaaacaacataatataagaataattagcaattttccccctgaatttttgacaatattaattttggcccttaagatatacggcttgataagaatcctccctgaactattacatttacagaaatttagtccttctgttaggttctgtcacattattctatttaaatgatgacgtgtttttatgaattagcaattttgccccttaaactttgacaattatcaaattgtaccccctcaaaataaaaattggaaatattcaatattttttttttagtaaattttaacaaattaatttagatcttaataaaaattattttgaatgattaagaaaattaaaaaataaattaaaattttaaaactaattacgcaatataaaaaattatttattttttattagaaaattcatttagacattaaaaaaatatattaaaatttaattggtaaaaatatattaaaaactaattttttcaagaacaaactcgaatatattttatctttatcaaaaaaaatgtagatttatttaagtaaacataacatttttttagtttaatttataacattttttcaaaataattttatatttttattgaattttttaattatttttttttatttgttaaggtatgagtttattaatataaataagtttgattttttcttcaaaaaaatcttagttcattcaaattatttattagattctcagtttgatattttaacacacgtgttgataaataaaatgaagtttgaaaatattttttaagtaaaattaatattttttaattaatttaatatttaacctaacagaagaaacatgattctgtaaaaattttaacaagttgtatattttaag

SEQ ID NO: 73593 - DNA, 723 bp, Cannabis sativa
caccgattacatttatgcaattaataacgaaaaattatgaaaaaaaaatgacacatgaaaatgggtttattatttctgtttgttaacagggttaaaaatgagtttgagacatatttttggtcttttagcatcaatttgaagctctctcaacacatcttaactttgtatattatgagaaagaaataagcaagaaataaaaatgaagattattttattatgcttaactaaagatgctttggtacagtatgccttaatataggcagcaaatgaagatcacagttagttagataaaactaactaatgttctaacaatctgacgagtacctcaactaacttaatcaaagataactaacttaattaaagctaattataatatatgtagaaaataattactatttattaatttaattaataaaaataatagaattttttacatctttttttttggttataatgattctcattaatagggataagaaatttgaattgctaaaaattttttacaaaagttttttttaggatgttcttattatgaaaatttaaataaaaataaatataatatagaattgttgtccgaatacttctttcacccacaaagtagtttactcattttattagttaattcgatttaatattttaataataatattattataattcataatttacagtaatcaaatatttatataatttttcaatattttaagtttatatttatttata

SEQ ID NO: 73594 - DNA, 1337 bp, Cannabis sativa
ccctaccctattctaagagttaattagattttctttaatatgatatatatatatattagtgtaggttatggtggaaaacgtagtctttttctttttcttactatagcaggagagattcaatggctctaaattggggtaaactattgagtttatgatcagttatatacaactaaatagtataacttggtcttgtcttagaatttaataatgaaatttgctcactagtcacttttgaccaatttcgtatacttaaaaataccattttttaatgagaatagacttgcataatcaatgcaatgcattttgataccattaaacttattattcgaagcaaatgtaaattaaatacatgatatctacttgtaactatataatgcatgttcaggtgtgtaagccttattatggactcacacatataaggcttactcaaataagatttcatataattactcagctaacttgtttttgtatttgttgttgaaagcagcatggtcaaaacacttgaacggtaccaaaagtgcagctatggcgctgtggaagtcagctgcaaacctgcaaaggagcttgaggtatacacacacacattgttttatatatgtttgtcttatttatactccaaaattgtcttatattaaaatgatggttttgtattaaataagtgggatacttctaaaccttacacctggaagtaatatatctacagtacagttcatacatatatatatatatatttcaatcaatgtcagttgtgtcaagaattagtacttgatttatgtcagattatttttctcggtaatgacatcaatttgtactgtattacagagcagctatagggagtacctgaaactgaaaactagatttgagtccctagaacgaactcaaaggtacttacattattacatatacatgctcatacagattatattataaatctccctaagctagacactactgtattgtaatttaattcatttgagaggctttagttattatgaccacatacatgtattttggacaattaattaacttgtttactgtagattattacaatatagtgcttgagtcatttagaatattttgtaagatcaaatccactatttattattagaatatagtatattttgcatcaatatatgatgacttcaagtcttcttctttttttttttttttccttcccttaaataattaaattaaattagctagtttagtgaaaatggagaaaagtgaaaattcatctgacaattctgtttaaaagttcagagcagaattatgattttacatttacgagttaaggaaaaggtctcccccataatatagtttttgtaatgatattgcat

SEQ ID NO: 73595 - DNA, 2629 bp, Cannabis sativa
  modified_base (703)..(731): a, c, t, g, unknown or other
  modified_base (868)..(874): a, c, t, g, unknown or other
  modified_base (1560)..(1564): a, c, t, g, unknown or other
  modified_base (2029)..(2032): a, c, t, g, unknown or other
  modified_base (2188)..(2189): a, c, t, g, unknown or other
  modified_base (2296)..(2296): a, c, t, g, unknown or other
  modified_base (2552)..(2555): a, c, t, g, unknown or other
  modified_base (2593)..(2595): a, c, t, g, unknown or other
ccccaaccacgtaaaaatccctctcttaatttcttacagctctttaatcttctattattttattggttgccgaaaacctcagtcaacagtaactagacctaagtcataaagaccgcaaccacataatatatatctatgacatttgtatcttgttcatagtggttttaacaagatcattctctgcaaagagaacatgtgccaatatccacttgaaagtaagatcatctatattcgaatatggatgtacattcaggggtggatataatttattgttaaattcttagacgattactctagattttaccttacgcaaagaaatttgaaatatttgagaactttcaagaatttctagtaatgtaaaaaacattaaggttagtggttaaagatcttgcgaactgatagggatggagaaatatttaatggatatgtagttcaaagatcattaagttaaatttttgaattgtatctacacttacctccctagaaattcgattttcatattaatgatagtaaaatgtctatgattagttactagcagctacctgagtccttctaggaaataccctagtgatcgataggaaaacttcaaaatgatgaaatggttgcatacttagtctaaaccattactagattcaaggatgtcctgatcgtgaacttaagaaaagctaaaactgttagctaaggtttacatgtttgatagctnnnnnnnnnnnnnnnnnnnnnnnnnnnnnatggtcattaagataagaaaatgtttctttcaacaaatactactttctaagaatatgactaaatctaaaaataaagtagcaaagtagattttttttttattccaaagtgttttatcatcttattctatataagatgnnnnnnntgcctctgttgtcttaacacaatcaatgaggataataccattattgttcctagacagatagtttcgataccttgtcgtagtcggagggtttcaaggaattcactctgttatgacttggaagatacttgtgattaaaatctaatgttagtttaaacaagtaatggatagtcagaataaggaactaaggagcaaagctaggagaactgtgattaaaatcattcatatggagtaattaaagtttttccattacaagggcaagaagggaaatttttgaaaataagtctattcaatgtacttaacaaaacttcctaatcctagtattattaaaggtttgagattatctaaatctgtggcttgtggtatgctaactaatttacttactctagtgcaagtgacttacttagtaagatgctgatgcatttttctaatggctgattctataggaagtcctttgactcctagacatagaattttatttatctaaggaaaagttttaactattccagaaaagataaaggccaaggaaagaattccttaagatcaacagggagaggtcttaggtatgctttgctatgccttagaccagacacatgttattgagtaggagtaatgagtaggtattagtttaatccaagagaagaatattggaagacaattaagaaaatcttaagatcaagaagaggaannnnntgttagtcgataagggtggtattttaatgcccttagactacaccaaatcaagtttctagacttgcgtcattgctagaaagtctattgatgagatggtgattactcttggggtggagcattaattttggagaagggtaaaaacctatatgaaatctctaactctactagtgagactggatgttaaagttgcaggaatgatacttattcagcctatggatggttctatacagtttttgacattttaccaataatgagctaactattagtgttgcttcctgatcaacacagaagtagttgccaaaaagtaaagaattcaatatccctagaagagtaaacatatagagagagaaatttcacaatatcaaggattttgtgactaaggatatgtaatggtagagaaagtgtgtattgaatacaacttgtaagatcctattacaaatataatactacatactacacttgatnnnnatatcaaggtgttgagattaattgaaaagtacttttagttttatattattgcaagtgggagtttgttgggtattctgccctaaataaaacacatttcaatataatcagatttactatttgataaaagataaaaaaatcattctatgttgcatggtnnacatgatttatttcaagattatacttaatgtataaattctattaagtccataacatatatatttgttcataattatagtgtagtcaacacagtagaatataatcatnattatatgttcaaaagtttaagtcacatgatttgtcagtttactggatttacactgacatgataatcagcgataaggtatacttacaccttagataactgttatgtccttttcaggacattggcaaagtttaccagtgtcggattaatagagtatacattggattggactgatattaaacttggataagatatcataaacttaccatcatatctttctaagtcaataaaactggttgatcttaggtctatagatcnnnntcttgatatggttaggttcaatcttagttgtattattnnngttcttcaatttgttcgttaaaattgaccaattg

SEQ ID NO: 73596 - DNA, 1135 bp, Cannabis sativa
tcggcttgtcttttttaagaaattttacatgtaaagagattgtacaggggatcagtattggagaatcccctaaagtaaactagtaatctttttccgtttaattttttgaaaatgaaacagataaaccaaaactatatgtttttattttattatttattggcctgataacccgcggatggttgctttctgaaaaagaaagaaatcgtctattaaagatatcaacttaaaaaacaaaattctatccaaaaaaaaaaaaaaaaaaaaagaaaagagaaaaagaagctattgggatgaaagagcagtttcattaaattataaaaacattaattaatttgctaattcattggcgtaactgtagcttccgtcactactatatgaatatgatgacatccagctttcccgccacgtggaaataaacgaaacaaaacaaagagagagagagaaagacacagctctttcaaagtcacatgttaatgccatgggaagactttgacaaacaaataaaaattgacatcactcacagctcatcatccaaattccaaaccattacccatactaccaccaataattataatgcagcatctaaatatgttaatggcattacctatttaccaacatgctatctatcaaaataaatattaaacttaaacatgagatgatgagacacaccaaaattcatatgttagcacttttcatatgataaaacaacattaaatctctagaagatttaaattttttgttaaatttgacataaaaaaaaatgagtttgtactatctttagtccactatttataattgtgctccaatacataaaatataaaataaggataaaacaattaattcattgataatcatttaatattttattgagaatctacaaatttattattttttattcttttattatttaaataatgataatatagtaaataaagtaaataaaatttagtaaaaatcaatgaatcacaacaattattgacattatagtaaagaaaaagtagcatttattgtaggctaaatttggcacaattcaccattagaatatagtttttttagatttgctaaaatataacaatacactacttttttgccactctactaaagatgctcttaaaatcctttttttttttttttt

SEQ ID NO: 73597 - DNA, 658 bp, Cannabis sativa
ggtcccgggtccgagtttgggtcccggtctaggtccggggtcggggcccagaccaggttcgggtcccaatcccgatcctggttcgggtctgggtcctgggtccgggtcgctagtctgggttcgggtctgagtctcgggtctcggtccgagttagggtccgggtctgggtccaagtcccaagggatctgagtttggggtccgagtgttgaattaagttttttttaaataaattgaaatcgggtcggatcagatccaatccagaaaaaaattaggcggggcagagcggatctgatccaagatccaataagtatctgaatgtttcggatcggaactccaactcgctccaattaaatgaatctttttgacatgcctatttaaattgagcactgttattagatagtaaaaatagtattgtcaagaactattacgaggtgaacctttacaaatgactagtaatttttcataataattattaaattatatagaacctaatatgtaagttcactacataataatatgacattttaaatagtactaaacactattggtatctaatagtagagttaattcactacttttatagtctaaaatatgagtctaaaatatatttatatatatatatatcatattttagttataaatagtttttttttttttt

SEQ ID NO: 73598 - DNA, 958 bp, Cannabis sativa
actacttaaaggtgacgtcagggttggccttgaattgaaatgggcataggcaaaaaaaaaaaaaaattaggctcttactataaagataaatgttatttttaaaaattattaaaaatatatatgtatatttttaaaaagatattttttttatttgggcccctaaaataagtaggccctaggcgtgggcctagcctgcctatgcctagagtcggccctgggtgacgtcatataattatattaattatataaaatctgatatttaattatttaaacagtaatatgccaccaagatgttagcatttatgttagggtaaacactattttagacactctattttacaaaagttattgattagaccttctgttttgttaaatgacgaaatagtccttatattttctaaaatagtaaaaataagactctgagcttaatttttaacaattttattttttttaatataactaaagataatttctaatacgaacatatataaaaaaatgtaaccagttttgtcataacatgtctagaccaaattattattaagttttattttaacgaaaaattcgtacagggtcctatttgtacaattttaaaaaatacagagtctattttatcatttaataaaatagaagatctaattaataatttttacaaaacacaggatccaaaatagtatttactctttatcttattattataattattgccttatttttattttggtttttcgtttttgaaatggaattattatttaaagagttgatgtatagcttgtagctgtcacatgtcttttcaacttttccaacggtgatgatagatgagtgccacatgtttgtaagcatgttttattattatatgagtttccattgatttcctctattatttaaaaccctaattagatttttttttagaaaaaaaaaattaaagtatgtttgtattagtaggatgtatatttaggtc

SEQ ID NO: 73599 - DNA, 890 bp, Cannabis sativa
agccccacatggcatgtatagtgaccctttgtccaattattttcaaattattataattttttattaataaacttttgatccttttttttttctaattaatgacaatttgatcatccgatgatataataatatttcgactaagaaggtttcattggtcagtttttatgtgaccgttataattattgaatattacatttgactgatcaaatgatttttgttaggtattgcgtaggtcgaaatcaaaatatcagttattttgaaaaagaaaaagaaaaagaaatcaaaatatcagcatcaaagggaaaataaatgtattgaacatgttttaagacggtgtagttttactaaacactataatttatggaaatttcggctatagttattcaaaatatcctataaaatttaaaaaaaaaattgaaaaaaatttaacacacatagaaaataaggttcaaacttattatacacgtgattcttttattttatatgtgtgtgaaataaattggttgaatattgttatttttttgaatttcttaaaattttacaaagtttcttaaataactaaaacgtacatgactataattttttttttttttttttgaaagccgaaacaaattacaatttaaggggtgtaaatcacccataatttataggtcacttttacctattattcctaaaaatagatatatttatagacttttacatatatgaataattataattataagttttattgtgtgatggtggatatattatagttatttaagacatcgtgtaaaattcaatataatttaaaatatctatttcgcacacataattactaactttttttaccttaaaatatttgtttatcgaaattttttgaaaccaatattgaaatgacttttgagcta

SEQ ID NO: 73600 - DNA, 702 bp, Cannabis sativa
actaaagagttgttcatcgagaaactcttcatttatctgcacctcttttgcattttggctttcttctatttcgagtcttgaaagatgactaacaattagattctcagtccccttcgtatcctttatctcaatgtcaaattcttgaagcagtagcacctaccgaatcaacctcggttttgcatccttcttggtcataaggtactttattgctgagtggtttgtataaactatcaccttattcccaatcagatagggccgaaacttatcacaagcaaacacaattgcaagtatctctttctccgtggtggcatgattcaaccgagcatcattcagggttctactagcatagtagatggtatgaaacaccctgtcaaccagttgtcccaagactgctccgattgcgtagtcacttgcatcacacatcaactcgaatggaaattaccaatttggtgaagtgactataggtgttgatatcaatttctccttaagaacttggaaagctttcaaacattcttccccaaactcaaaaggaaccccgttaacaagcagatttgacagcggttttgagatctttgagaagtctttaataaatctccggtagaatccaccatggcccagaaaactccttactccttttacagaaacaggagggggtaaattctctattgttgacaccttggctttatccacctcgatgcctgc

SEQ ID NO: 73601 - DNA, 695 bp, Cannabis sativa
atttttgacggtcaaaaaaattcaaagggcacgatttactacatgtcaaagttcagaagaaaaaattactaattagtcattttttatctatatttttgggcatgataatttttggacattgcactatccattgggcccatcccattcccattgtcatgatccgaatgctaaataaaagacaacaaaaggaaaatgagcaatttccatgagtgggcagtgcaatggcatcatatcttagcatgaccacctaatgaactttttgactcaagaatgttaattttccgatttccaataatgatttagctcccaagttgttgaccctttaaatttgtaatcagttcaaaattgaaagtgatacatgccttcaaaaatgtcaaccatggtcgagggagacaataggatttcttattgggacaagccaccctaaagacttccttaccccattacccattttcattttattttttaaaagatacgtatatattttaataaatacgtatatttttcgaaatgtatatatatatatatataattgaattacgattgcttgtcaactttttcaacaccgtgtgagtgtgagctatgaagtatgattaggattgaagaactaaaagtcaatctcttatcatataaccgaaaggactaaaataattgagaaaaacaagttgtcgccaattatattagaatttctttat

SEQ ID NO: 73602 - DNA, 584 bp, Cannabis sativa
aggctatatggctcttaaattggatatgagtaaggcctatgatcgggttgagtggagttatcttcatgctgtgatgcttcaaatgggatttgttgaaagatgggttagattaattatgttttgtgtatcatctgtaagctattctattatgcatgatggtcatcgaatgggtcctatccttccctcacgatgtattcgtcagggagaccctttatctacttatctctttattatatgcgctaaaggcttctttgctcttatcaagaaatttgaatctcagcatcttctccaaggttgtcgtgtggctcatggggcaccatccattacacatatgctctttgctgacgacaattatctgttttgtcaagcaacgcctggtgcagctgtggggatttctaatctactccaagtttttgagaatgcttcaggacagaaaattaatttccacaagtccacaatcttttttagtccgaataccagtgctgtaaatcggactcaaatttgcaatagacttgtcatgcccgaagcatcagaagggagtttgtatctgggcctcccgaatattgttggtcgaaacaaaaatg

SEQ ID NO: 73603 - DNA, 711 bp, Cannabis sativa
aaatgttatataaatataactaaagctataaaatatacatatattttagtaattgtaaaaaaaaagtataaaaaagctacaaatttaagcacaacacaaaaatattagacctgcgagttatgtcgggtttatcctttaaaaatattggcacgatatgaaacaactcatattttgttatagtataacatgacagaacttattttttaaaaagtataaataaatatagatcaaaccaacacgacgcgcacttagaatactctgcacgtgcacaccaatttttttttttcgtaaaataattatggaacccaaataaacaactagaataagcattggaattatgacttttctttttctaggtgggattaggacatttacaaaaataaaatttgttcctaaaattacaattttacggatttacaatttttttgaatacatttttacgacattagacaaaaatatcagtttctgtacaaaagaaaacaaagttgtataataagattggatgcccaacatttcgtagcccaaagaaaggcccaaataggaccggtccttcaaaactatagcaataagtgaaaattacatataatatgggtttttgaaaatattttacttaaatatggcaattttaactttgaccacattatattaatttgtaacattaaaatttaagttcaaaaaaacacaatatatgagcgtctgccctcctgagtg

SEQ ID NO: 73604 - DNA, 540 bp, Cannabis sativa
gttttccacccctaatttccacaaatgccatatttctagaaaataactatataatggatttcaagtcttgtagaaaagtagtactagaagccttcaatttcgttaataacaactctagattagactttaccctttaatgttaattaataattactcaataaaactattactttgatcatttttttttccactcaagaaagattacttttaccgaactctttaattaagtaaatatagtgtactttgaattatataaatattgaaaaatttgatgggctttacttttacacggtagaaataaataatgaaaaaaatatgataataaactataattaaagtttaaaatatggaaaataaaaaaaaaagaccataaataaattcgataaaactttcaataataagtattctcagaaagtcgctggagtagttgtcggtaccgaaaagtcgccagcagcagaaaagtcatcggtaccgaaaaaagttaccagaaaaataaaagttgtcagaaaaatcactagaaataggcctcatatataaatt

SEQ ID NO: 73605 - DNA, 1403 bp, Cannabis sativa
tatcgaggaagtccttgaatactctattcatgagatccataaaggccgcaggagcattagtcaatccgaatgacattactagaaatttgcagtgcccatatctagttcagaacgcggtctttcgtatatcttcttcccatattctgagttgataatagccggatcgcaagtcgatcttcgaaaataccatttttccctgaagctggtcaaacaaatcatcaattctgggtagggtaacggatattatatttgtttgttcttttcttgttgatcgtcaacttgtttagttcccgatagtcctgcacgttctgagggggaaccatctttctttttcacaaatataaccggagctccccagggcgatacactgggtcgagtaaacccaatatcaagcatcccctgaagctgtagcttaagctccttaaattgtgctggagccgtcctatacaaagctttaaaaataggttcggctccaggtgccaaatcaatcaaaaagtcaatttctcgttgtggcggcaatcccggctactcctcgggaaatacatcgagaaaatctttaaccactctgactacctcaggcccaaatgtttcgggtctgctggagtctaacaccactgctaaaaatcctacacatccactgtgtaatagatccctagcccttaatactgaaataaccgggatccgagacccctgaaccgttccaacataaacaaatagatcttcaccttctggctgaaaagtcaccatttcttacttacggtctatactggccaaatacttggacagaaaatccatcctaagtatgatgtcatacactactaattttagctataccaagtcaacactcaacttccaattttcaaacctaactagcataaacctaatgcacttgttggagataaccaactctccgctaggcattagggttccaaaccctctttcaagaaaatcataaggcctacccgaaagattaattactcttgataccacatacgagtgtatagtcccaaagtcaaatagtacatttaaaatgggagttgttgataagaagctgacctgacaccatagaaggactggatacagcatcaacttgggtgataacaaatatctgagtaagtacaggctttgcttccagcttcggcttatctttctttgcctactttgttgcgtgaagaatttaataatttcacacaaaagatagaatataacatcacttaaaaagaacatatttgttaaatacattatctttgaccgttcaatactagttgttggccaagtaaagataacatctcataaatttacttgttcattctagtttcaccttgtcatttgcttatgtaaaacatcaatactcttatgaaatatgaagtactcacttctactttcttaataaacaccctttt

SEQ ID NO: 73606 - DNA, 816 bp, Cannabis sativa
  modified_base (315)..(315): a, c, t, g, unknown or other
  modified_base (646)..(648): a, c, t, g, unknown or other
tgagatcttgacccagactcaaacctggacccgcactcgagacccgaacctggacctggagccgaacctagacccagatcggcgtctagaactggacacaatcccggacacaaacttgggcccaaactcaaaccagcacctagaattacacccaaagctagacccgaacccagacccaaactcgaacccagaccaggatcaaaagcaaggacttagacccataactgaatccagactaagatcgggattggaacttgggactcggaccaaatctagacaagacccaggactggaacccacacccggagcctgatntggacctagactgaaatctgtacccgaacccaaactcagaccaggactcgaactccgaccctaacacaaacccaaactcgaactcataatcgcaaatggaactagaacttagaactgaactaggactaggaccaggacctaaacccaaatccgaacccatatcaaaaaccaaaaagacacctaaagccgaaccaagactaggtttcgaaaccgaatttagaccggggcctaaacccacacaataaccgggacctagacccagaatcaggatagggattttggaaaaaaaggacccggacctgtattcgaccgagacccgaacttgaacctnnnacccagctcgtgactcggcaccacaaatagaaccagactgggacccgagcttgggatacggatctggagcaagggcttggacaaaacctgtagtcggtgtctggatttgggacccaactccggagtcgaaccctgagatggacccgaacccacaactggacctgaacc

SEQ ID NO: 73607 - DNA, 1527 bp, Cannabis sativa
atatatatatatatatgaaaacacacaaaacaaacatacctatctaataaagaatataccaataaatatatgattgaagactaaaatatattgctacatgatattctaatctattcaatcaaatggtatatgaagtttacttttggatatatcctatttagtgctatgttttaaactttttaaccaaatgcgaaatatgattggaaaataatttttaatattgcggtatattattttcagaacaatgctatatctagatttgcatcaggtttcacataaaataaagatttaacattatggtatatcatttttcagaacattcacatatcagttttacttttaggtatatgaggtttgttatggaactctattcatatgccagtatattactttgagagtggggtatattgtttctatgtaaggtggtatattaagaacaaactaaattatattacagtatattgcttaaatagtgtactatattattttttatgtgcggtggtatataaagaacggaagacaaagatgtttattgtaagttttgcatctttgacgatttaacagtgtggtatattattttttagaacaatgatatatttagttttgcatcacataaaaaatgtggtatattattgtttttatatggtatattgtttctaataatgtggtatattatttttcagagcaatgatatattggtaaataatttttaatactagtataagatacaaataaaatcatacatcacaacctaaataacatattagacagcgacaacaacagaaaaatctaaaaggcaaacagtataataaggaataaaaataaaagagtagcagaacaaaaaaattaaattatcatatagttacaaatcaaatctaaaaacattactaagaaagaatttatgatactggacgaaaagcagagaaaacaaacctttatgaacaaatttgaaaaattaaagagaggagagaaaggaatcgagatgcaatgatcaaaaaattcaggcgaagtaaacgaaaaattttgagagagaagaagctttcgtcgttgtttggaatcagcctctgtaattttagatctataagtttgaggtgtgaaatccaatcaaaaaaaagaggagagcttcttcacacattcgattaggagaaagtaggagaaaataattgaaaaaatttagtggagagaaaaattagatgagagaataacctttgatcgttttttggatgaatgacagaaattcctaagacaaacttgaacaaaaatgaatgaattggaaaagatagaagacttgctccatgttttgatcaagctctacatttgcatcgttttttataatttcttttaaaggaataaaacatataataccttttacataataaagggtagtttaggtattaaaaaataaaaaagaacatttgttttattatttaaaaaaagagacattaaccatcagagttagaaataaaggaaattacactttttatgggattttaaaggttttatgataaatatgacacatttaagttt

SEQ ID NO: 73608 - DNA, 986 bp, Cannabis sativa
  modified_base (928)..(928): a, c, t, g, unknown or other
gaattcacagacattggttagggcgaatctcaagctaggccaaaaccaaaagttctgtgctaaagctgtcataaatttggaacagaaggactctctgatctgatctggatcggaaataatgaacatgaactttaaagcattgtttttctcatcacacatcagatgaggaagttcaaaacatttgccaatttttaccagctggatgaagaagaacaagagctggtcctgctgaggagggagccatggttggggttgggggcatttgaaatgtaacataaaaaaaattttgcaagttcatttctcacttgggaaatctgtgattatttatcggggctttattagagatgttttgtgaatgagtagattttccccaatagcaagtagtaaaaggaaattcaaagtctattgattaatcaaagaaatggaaagaaaatcttaattaagcttcctttctctcacacttaagtttacaattggacaagagtaaagagttgcattttctttcattatgttattgattttatatatgtggctattaactgaaaaacttgttattttttctttttatattaaaacattacaatttaaatataaactcgatacatatatcttctttttcttttatctttaaaatattacaattcaaatttaaaactttacatatctcttttattttatattaaatgtgcatatattaggaatacttctcaatagatgttactcattaatatatatttttttaaataaaatttaacaactttattaaatagcaatcgttaataacaatagaacgcacttcgttagaataatcctccaactgaagcacactacctgtagagaaacaagaatccctgactaaaacatgagccaacttgtgtgcagattgtttgataaaacacaactcaacattatttaaagataagagaanagtacgaacatcatgaactaaaagaccaaaagaggatgacaatgtaatttggctatca

SEQ ID NO: 73609 - DNA, 651 bp, Cannabis sativa
ttagatatttacaaaagaccgaaatgcccttcaaatttttgtcggagtccaaaatattgattaggaaaaaaaactgttgaaaaaaaatattgaaagtgactttttttttgctttcaaattttttgatttttaattaaaaaattgaaaagtgaaaacaattttatagaacatgtttttaaaaatattttcattttttcaattttaaaaatagaaaactgattaaaaaaatattatcaaacgccactatgttaccatatcatattttcaatttattccttcaaaattcattgattaatgattcttgtggttgatttttatttatttttttgtttgtctatttatctaattttttatgaataatatatatgtatttaattagattttataaaaattaaatagaattacgggtaaccatgacttttttcccaatagtctattggttattctgcaccatcagtgatggttattggggcgagtatgattatataattctccaacagagataaggatggtgttgacctcaaaaagtgatcaaccgacagcgaagtcgtttagatctgatgcttgccacgtgtgtgtacaaataagaatgaaaagcaatagacaataacatttgttatagaggttcgacccccttgtgatagcgggtaa

SEQ ID NO: 73610 - DNA, 882 bp, Cannabis sativa
aaatactaattttttctgacagttgtaaacaatacttaattttttaagcgacagtcatccaaaaacaccgtttttaggaccgtcgcgaattctgacttttgtaattaatagtgggactaaaccctcaccatctttacttttggacatttttccaaaaatcctaataagtattaatgtagtagtgtccatttttatatacccactatatataatttttttaatgaagaaaaagaagagcaataaaagaaaaactagtagaaaaataacccaatcttgaatctcaaatatgtttcctagctaggtaatttagagttgtgaaagtttagtaaattaaaacataagtttatttaaggcatctctctcatatcagtcgcaactttaatgtttaagttcataaattaactaagcatgcccttataatagacaataaactttatagatagaaaaaaaccccacctcttgtgtaacttttattactttaaacttcatcagatacccttacaaaaaaaaatctgatctcgtattttttaaagagaatgctaagagacgtcaaacaccacaagaggtagcatattattattagtataaattaatatcgcgtcccacataatttcatttaattaataatgatataagaaattattaatcaatcgcatcatgctaccagggttggccctgaaatttagtgggtcataggaaaaaaatatttttaggccctcatttagaaaaaaaaatgtggtacttttcaaaattgaaaaaaatatatataattttaaaagaagataaattttttttggctcctaaactaggtgggccctaagcacaggcctaacccgcctgtgctcaggcccgaacctgcatgctgcattgggatgatgttgt

SEQ ID NO: 73611 - DNA, 1564 bp, Cannabis sativa
atgattatatttaatgtataaattctattaaatgtagaacatatataaatatatatttgttcatgattatagtgcccactacaaaaatgttaggctgtaccgtgaacacttttgccgaggacattggaaaaatgtcatcgatagaagaaatttcacattggcggtaagatttcgcgcatttttgtaggggtttgaagttcttctaacgaggacatgggttctaatgaggacattgtcctcattagaggtagtgttatattcagtaaccctgttcgtctccttcattttcctctgaactgaaaaaattcccatttatgaaaccctccgcccctacctctcactacaagaaaatagggccattacctacaaactataaatgtcgataaaacttcccaaaatgtaggcaaatacgttaacctacaaataaacaaataatttttatttgtagataaaaaattgtggagaaagattttcacctacaattaattatatttgtaggtatgtaaatatggtggatcccacctttcttagtcaatgatgatgagtaagcaagtgatgtggatgatgatgtgtcattctatgtggcagctgacaaggattgccccacagaatgacatgttacatatgtagaaattcacgtgtcagcttagtcataggccatgctagcacatgtcgcccattttggtatacgtacgtggcatattctagtaggtccatatggtatattttgataggccaacgtggcaaattttgataggtacacatgaaaaaatattataagaacacatatatatatatatcaagtgccatgtggcagaatggtataggaccaacatggataattattagagggccaagtgtctgtagctgatattatgtgtaggtaaaggcattagtatgtgcaaataaatacattagtaaatgtagacaaatacattcaagtgtaggtagaatattatcctaaataaaattaattttcttataattaattaaataaatacactgtagcaataataataataaaatttatcctttcttcattcataaataactcaaaaataacaaatctcaatattcatggtccaacatttgataatttttttttttaaataatataaaataaaatataaactaattatcatcttgttgctcttgattttcaagcgagtctcttgatcgatggaggcacatgagttggaggcataagattgttatgttaaagaatgcctacaacaatactaagttgttcattagtagtatcaaggcggttatatgcttcattaagtctttggactaattcctcatatgttggacgatcaggctgagtagtatcacgctctgaagtaaaaattgtaccactaaaagatcgcccccaccctcgcaagtatacaaagtgatgcccaagaatacgttccataatatttttatcagacaactcttcaagagtgtgttgatcccttaaaactttcatttcattgtaattatatatttttattatttagtattcgaataatataaaacttatgagaactgtaactttaatagataaattacttacatataa

SEQ ID NO: 73612 - DNA, 959 bp, Cannabis sativa
tgttaagaaaaacgtaaacgtttaaacaataattcaaaagtaactacatcatcagtcacaagcttaaattattaaatttgttttctttttcttttattttatgataaaaatacatgttatttctttattaattccactatttaatatttatcacaaatttgctatatttttgtgtattataaaaataacaatttttttatttcaatagtattactttatttataacgtacacataaaaatattatatttttgattatatcattaaataaataaaaaaaattataaaatatttataaaagttggacaataccgcgcaaagcgcggcttagttctctagtttaaatataatcattagaatttttgtattatggtatggtaaaatgactattgctatatttaatattttacatataatttgataatgtgtacttagaataaaattattaaaataaaattctcaacaaaaaataataagaagagtaaaagaaaaagaagtaaagaaataaaagttctcattttttataaattttatttgagtatataattcaacaaataactataaaagaaattaaaagatatatagataaaagcatatacaaattaaaatacatatataaaaaaatgacaaaatccatattaacattatcaaagaccatattttgttatattttttcttaaatcaacaaattaacaacagtgataatactaataaaaatataataataaaataatcaagaaaatattattacttttctgttattaaaataattatattaaaaaattattcttgcttttattaaaaaatatgtacaaccgcgcaaggcgcggttttattgcctagttagactataaaagaagcacgatctattgccattgttcatatgagaattatgtgatgatctctcaatctacattcttcatgatcactacatatatacatagatgattataaagattgt

SEQ ID NO: 73613 - DNA, 1801 bp, Cannabis sativa
aaaaaaaacctttaacatatgatataaaattaaataataataataacaatacatataataataataaagataatgataataataataatattacaattttattaataaaagttattttgacatttcttagccactaagaaatttctaaccttagggtatttagtcagccccgagtactctaaaatactccggtaattctataaacaacttatctcaataatcccaacaatatcactaactaaaattgttgtgacattgttggccttcgatcgattctctagggtctttggacctgaaattttttttatttcacaaataacttacattatatctatatattcccaataagtctccataattaataaattatgtttaattatctacttatagcaaaatttataatttatgttaaattaggctagcaagatcataatcatactcattactacctaattaactcataatatataataaaccctaattattcataattaggttgttgggatattacaccgaacctctacaaaaataatgtgtcactttactttcttgttcttattgtgtacacgtggtgatatcatacgacttcgttgtcggttggccaaatttgagatcaatatatagggacaaaataccatcttacatttcaatgtattttatccttaaacacttagctacttgtaaatgatactttagaaaactaatgtaattaccaaaatgagcgatctatcattatttcgtttagccaagctcaaaagaaactattgtttcacttcatagaagttatagattccatatctataattaacgctcccactcagttgcactaccgaattctcaagatgtaagtatgggctagtcctactagtaagctggtaacgaacaagtcaaagaacccgtataatacaattaagctaaaacttaaccatctcaagattgagatcaactgatctaagagcaactaagtgatatcgccttaaaaattaaagatataatggtaactttatgatatctttttcactatcaatatcggtcgagtttgatgtatagctgatacatccgatacaagtttactttgctaatgccttagaaaggacattctagttatacaagtgtaagtaaacaatatcactaattatcacgtaagtataaatatactgcactgttaaatcgtgaaactaaatagtttgaaacaaatattcatgtttattttctactgtgttgacaacattataatcgtgaataacaacatgttcaaaatttaacaaaatttatatattaaacaatatataattatgaaaggaatcatgtaaaccacgtaatataaaatgatttctaattttttattaattaggaaataaatttatattgaaatatatttaatttaaagctacaaatactcaaaataccggagaaaggtttacattgccattgtaaatacttgtttgtatttaaaaaaagccttatggaatatttaaaaggtttatacaattcatttaattataaatagaattaaagtagagatttgtttgagatttttccattttaagaatgagaaaagaagtaaagtagaccaagaatagcttgctaataagcttgtttagtgatgtaattgttgtttgtagtgtttgaatatttgtgcaataaatttcttacttatttatatataaaaaaattatttagggcataaaattttaacacacttaagttaagagtgagtgtatgtttatattcttctctttaatgggtattactcatgtatgagtattttattcttgaccattggatcaaatatctaatg

SEQ ID NO: 73614 - DNA, 718 bp, Cannabis sativa
ctccattcaatccaaaatattcccaggttacctatttcctcatgaaggacggcgaatttggcttcaattccaatatgaaagacttccatacatgtgcttcaattgtggaagaattggccacgagatgcgccaatgcactaaacctcgagcaactgggattcaagaagatggggtagaaagaccgagttatggttcttggctcaaaattgattcgacgggaaggaatgctatcaaaaccagcactgaggccaatcaatcccaatctgaaggaatacaaggaaacaacaaaatctatccccccaaatggcagaacagagaattgcagaggaaagggactcactcttaatcaccaaatcgcaaggaggtaccaataatatgaattctaatatcaataattatacaaataatatgttaaatcttaataataccaatctaaccaccaatgttattccctctcctatgatgatgaatgagatgaataaggagaagacaacaatggaacaagggaatcatggaatacgcaaaagattgggagaagatgttcatactgagacatacatgaattacatggggggtaggacatgtaaagcaagaaccatggaggctgaatttggtaacacggggctggaaaacaatctttttgaggttccaataagctacgatggcggcagtaataaccagcagaaaggaacaagggaaaaaagaaggaagtttgtaa

SEQ ID NO: 73615 - DNA, 1207 bp, Cannabis sativa
tggaaaccaaattattttcttactctttcctcttggattgaaagcatcatttatgccaaatgcccttaacaatgaaataaattttcaattagacaatataatgattattaacattataagatttgcatattagataaatttaatgtaaaacttacgttctaaccacaatcaagacatcctcccttggatcgctactagatggatcgtagaaatagcattccttgctaaatggaaaaatgactatccccatccaatatgtatagtataaatacatattatgtcattatttactatttgaaaataaaaaattacaaatcaaaagataacactatcactcacccagagttatacggtacacataagaacatccttttgtctgctatgcctaagcgttcaaacatacatttggctcgattctcggtattatatatttttgtagcaaacttcgaagggtccataaacaaagtgtgttgagcaatttttaacatgacaagttcgtcatataggcctctacataatcaaaataacatattaattatagttattataactaatgaacaaattaattagaaccctatatatttacctcatatatggtgagatgacacatgcactgattcttgaagatgcataaactgtgtaatataatccatatcaagataaatgggtgacggtaattttctaaagacatcctcaggcgctgtaattgtgcacatcaaagaacctttctgcttcaatgtcacttttgcccaagtaagcaaactttttggaaagtgacttggaatgttgatatcattgggccttagacttgatgttttgacactagatgatgatgatggtaatgtctctttaccttgcggttgggttgtaggtgctattggtgaactttggctcttctttcgtcttgttatattaatccttagtcgtgatggtgtctgcaaatgaccaattatattagaaagtgatacaattgaataacaagtagtaaaattaagatatatatatgttacctcaaatctttttaagactaaatgttttgaccatgagagaaaagtgccaaccgcatctcctactttgataatctcatctgatattggctttggtaactttgcatcggcatcaataatttcagatttgcgaactcgtagagatttgataactttttgacaatgaattgtatctgaaaaaccgtgtttttgcaaatgtc

SEQ ID NO: 73616 - DNA, 970 bp, Cannabis sativa
aaggcccttacagatagatcatcagctttgtgtgacttttgctcagggatggcactctattaggccaatactgaaaaatgtcaagaagacttatacaaattcaagtaaattttgggcaccaaattctagcatagtcactagtaggggtgtacataattgttccacgtagaataaatggtaaagtattgagtcatatacaagaacacgggttactctactcattaccaattgattttgaaatgaaatcccataaacaattcattttttatataatatttttattatatacatttatatataacataatttatatacattagttaaaaaaaaaggccaaccattccatccccatgtacttttgggggaatgacttccacttgtgagtaaaacaaaagcaaatatattcatacaaaactattagattattttaatatttaaattgaaggtctttcataaatagaatattattttttatcaaagttgtaaagtaatacttaaattatcctaaaccagataatacatgtgttgggtaggtgaaatgactatacagatttattaaaaaataaatggctttgtttttcttaaaaaaaaaatagcttttttgtaaatttggattgaatttaatgagaccagagacagagttcatacaatggtaaaatacaaagtttatatttttgagtaatttatgggcataaatacttaagtttaacccccagttataaataaatagctaaatttaatttttggcggtaataatagctaagttatatttttgaaactctgtaagtacctgaccattaaatattaaatcattatccacgtgtcattttctgattggtatatttaaattaattttttttgaaaaaataaatatataatgattttgactaataagaaattgccaaatggtaatttacttgacacttaacagctagatacatacaaactttcagaattataacataggtat

SEQ ID NO: 73617 - DNA, 1640 bp, Cannabis sativa
gattcaggatcactggatccctgggcttcgttagaaattttatgcctcccctcctcctcctgacttaactctttcttattttctctccccatcgggtggttggaagttagataggcttaatacattttgactcctccacggtaacccatatccttaatgttccaattcctggtgcatgtggctcggataatctcatttggggtcaagaatcttcagggattttgagtgttaagagtgcttatcaccttcctttgacagaccgtagtatagcttcgggttcctcttttcaaaatagtaagcggttttggactatagtttggtcttcaaatgttctccctaaagttaaacacttgatttggcgagttttgtcccactcaattcctgttgcttcctctttattttttcatcacataattccatcccctgcctgcccgatctgtcatcaaaccacggagacagtgaaacatgccatcttggactataagtatgctagaaaagcctggaaaaattcaaattttattggtttttataatagtaatttaactagctccatggataacttttttgttgctgcctttgaaacttttgattctcaacagagtgctatacttttttgttttgtttgggaaatttggaactataggaataaagtgtttcataatcataaaaggccttggccacaagatatttttcaatctgcttgtaattttttggatgaatttcaattagctcgtgccaagaacttcaaacaggatactgcaacttcacagtgtcaagatctaatccctaccccagttgtaggaacctggcaagttaacactgatgcaactattgatgtggcctctcaaaagactagtttagcttcaattgtcacggatgagcgtgggatcattaaagcagggtttatgctcccattacaaggagtgcttcctccggatgttgctgaggcaaaagccattttggctgcggttcaatggttacaagctactaagctgccggtttctatccttctttcggactgtaaattagtagtggacaaaattaataatgttttttgtaataattatgttttaagtgatgtaattaattgtactaaagccttgctagctcaaagccctggactcgttgttaagcatgttcataggagccataacatgttagctcatgatcatgctaaaatcggtctcaggcttcttagcgagtgcgtttggaatggttctttgccttccagttatacctgttgactttgttcttgcttctttgtgaaatgaaagcttcaggtttatcaaaaaaacaaaagtagtgccttttagtattttttttgttttgaataattataattttgcctcttgaatttttgataatattgattttggcttctaaaatatacggcttgttaaaaattccctgaactattacatttatagaaatttaatccttctgttaggttctgtctaattattccgtttacccgatgacatgtctttgtcaattaacaactttgttctctaaactttgtcaactatcaaagtgtacccccttaatataaagatagaaaagatttaacattgttttagtaaatcttaaaaatttaatttaaatctgaaaaattattttgaatgattaagaaaatttaaaaa

SEQ ID NO: 73618 - DNA, 738 bp, Cannabis sativa
gtacaatcgacttagtgaatatttttttttgataaatcagtgagttgtattgcataaaaccaatcatttgtacatcctaaaggcacctcaagtagaggcccggaaattctctctatttacaaatctgaaattcccatactgatatgcacaatttcttttacaaggattggatccattctttatcgtggctgcttattttctgaggttgacacattgttaatctcatcttcaacttcccttctatctcttcatttactcgacctattactgccagtccacctttccaaatcccagcatttcttgccgtccacagatggtgaacaagagaggctggtgcagcagccaatatttgcttcttaccgttgcttattttcgatttcccgatccacctgatgatgtgagacaagctttcacttcttactttccatcccggccaatcattaaggttgttgaggcattcccctgcaaatttacattcaaaaaacaggtgtcgagctgtttctttcccatcctggcacaagcagcagccctcatcagtctgcattcccattctaaccagtctatcttttgtctttagcctaccatgcattgctaaccatagaataaagtaatgtttaggtaagtttcggcgagcccaaacctccttactccagtatattttggtcaatgagggagttagaattctataaccagctgttatagagaatttgtgtgctgcaaactctcttgtatctatca

SEQ ID NO: 73619 - DNA, 630 bp, Cannabis sativa
gttgagtgcaaatgaaaaaaaaaatagctaaatttagttataaaaaactcataataaaaaaacgagaaaaatggtgatggaaatgataaataaataaataaataaataaaacatgtttttaactctaattcgactcatagtcaattttgcacatataacatgcctatgaacaaccagaataaagggaggagagactgagaaaaagacaatttgaaaagagataaatgatttcgatcaaccaataaagcaaattgaagtagcattgaagagttttaaattgttttaattctttcttttttactttctccggattgtgtatattttaagtaatatattgagatgataaatgacatcacattaattatagttctaaatacgtgtcgtattaatctgatccatattttaaaaaatccgtaataatatagttgtgtcgtgttgacccataaatataggtcgtattgtactatgtcgtgccaatactttaaaaggtacattttcgtgtcatgttttactcggactgactcggttttcataaataggtctgcccattttcttagggctatttacaaaaatatgcgaaaataaagataagttttgatatatatggcataaaaacttaattacactaaa

SEQ ID NO: 73620 - DNA, 727 bp, Cannabis sativa
taaaataatttccaacactaagagcaacccagccggtcctcaatctatacaaaactttctgcactatactgctaaattcatctaattacaaagcaaagaaccattctttatctacatttgagattttctttggcaaaacaacattaattcgagtccttagactccacttaatgtcacaaacaacctgcttttgattgatctgttcttgctgccatatgagttgatttcgagccttccagctgctgtaaacaagtgcagcaactgctgtagaaaaaacttgctttttaaattttgacacctttgccttctcaatccatcgaacaaactgctgaatgtttgttgctcttgctttccatcccagccagcttttaatctcatctagccaatagctggttgtcttgcactcaaagaacaagtgttgaacattctccttgtattcatcacaaaggcagcaggtttcttgaaccttaatgcccattttcaccagtctatcttttgtttttaatctgttaagcatagtaagccagaaaataccactatgttttggtgtattcagtcgagcccatacctcgttacaccaagttttccttgcttgtggattgctgaacattttatacctaggagctatggtatatttgcttctctgaaacttagcaacatcagcaacagaactgaggcagttcttgaggttaaccagcttctgatggaaattattttactaggatct

SEQ ID NO: 73621 - DNA, 1222 bp, Cannabis sativa
attcctcctaaatctatcatgcaatgatcaaacctggttttaccaattgtgcattgaattgtacttgttttaggcaacaactttctttgaagaacaatgaaaaccttctcccccatacttactttctcacctccattcaactttttcttatttggacacagctcctcaagagtgttagcacaatgaggctcttctttgattttctcaagacatggaatttttacctcaacttttggaagagtttcataaatcgcctagatgggctcctctttcttatatttcttggaaaaggtggaggatgacataagttggtacaattgatttgtatggcttttttctgtgatagtagagcaactaaagtaggagactcaaccattggtggagataatccttcaagggataaattgttgactcctttagttggaatcaaatcattaacttcttggtgtggtggtaattcaagttgtgtaccactttgaaggtttatggccttgacattcttcatttagttactttctatttgtccaggtaaagtatttgaactttgagtttcatacccatacattgatgtttccattagctctgcaagattctctaacttttgtaaagatttttgggtgctttgcacaattttttgaaagtcttgctgaaactacaaggtattagcttcttagatttcaattagcttagcattagttggcttttcactatatggtgcaacatgaataggttgttgaacttgtgcataattctattgcatatgagtagtagaagccaccaaagtgttgagcagattaataagagaatgatcttgatcttgtggtgctataggaggatagtaagaagtttgttgaacatattgattgatcctactataggaagtgttagaataatctccccattattgattgaatatgtaagtgttgtagtagcgatcatattaatacacttatggtgagatataatatggattacagtattattgattttacatcgccatatttctaaagaaagatttgaaaattaaaaccacaactagaagaataagttagtaaagcaaaaattaaatattaataataaaataaaataatagcccccggcaacggcgccaaacatttggtacgcgtcgtaagccacaaaaaatttactaatatttatttctaatacctccaattattttagtattaattgtaagtacggatcgatcccacgaggactatgt

SEQ ID NO: 73622 - DNA, 678 bp, Cannabis sativa
aatatttaaaattccgtacaaccgtatttttataattttttttttattatttttgtatattttttaaataatccctacaatttttcttttttatgacatgagatttaatataattttatctcatttcaattgacttttttaaataagaataaagttgaatttgtgcaaataaagaaacgtaataagaatgagaatcatcacatgatgttgagtgatcgatcgccaaaaatctaaaaggtataaatactgtttttttatagaaatattaaagagtcaccactacgtgtcaaactatcattagctagtgtaattcaacgtcaaatttgacatgttttgatttgacggtggcataagtatacataagtgtcatttagtaatatttttattttgtaattttttaatcgcaaaataaaagtaaaatttttattttatttttgaaaaacaaaaatacgttctgtaaccaattttgtgttctaattttaaaaaacaaaaatgtgttctctatttttttttttttcattttttgattttatttaagttggatctaggtcaggataggatttgggttcgggtcagaggtcgattttactgctagggttgtgggaggaatttgggactgggtctggttggagtccaaaatattaattaagaaaaaaaactgtttaaaaaatattgaaa

SEQ ID NO: 73623 - DNA, 1057 bp, Cannabis sativa
  modified_base (150)..(156): a, c, t, g, unknown or other
  modified_base (764)..(768): a, c, t, g, unknown or other
  modified_base (962)..(963): a, c, t, g, unknown or other
atactcggtacgttagtcatactctagccgtaccgatgtgctactatatcagcctatactcagtacgctagtcatactctagccgtaccgatgtgagactgtcaaatagtaaggtgctaatgacaattatatcagcctatactcggtacnnnnnnnatactctagccgtaccgatgtgatactctgaaatagcatgaaagcaaaaataaatatctaatttaatctaacaggcttactaacatgcatgcttaacatgtaaacacatatgcatactgttatactaattttacctctattccaaaatcacatcaatcacatcaatcacaggctcctaaatcacatcaatcacaacactgataaccgaaacgctaaatcacttcctggggacttaaacttgaaactaaaattttccgtatcgataaataacatcgcaataccctaaataacgcaaaaatgggaaaaaaaactagggttcccaaatttgccccaaccagtagaccggttccccaaccggaattctggttctgggaaaaaattcctggaagccaactggaattccagttcctacaggcctccctgaaccgaaattctggttcagtgcaggaatttttcaaaatttcataactcatgctattcaaccccaaatcaaaccaaactctccagacgtgctaattagaccataattaacatttctaaagtaacaaaacaaccacccaaccacagaatgaaaatttgccattaaagctccaagtttgagttcaaannnnnaacttggttaaatctaactaacaatcaacaaaacctgcttgaatccacataactaaacatatttaagcttcagataacaacactaaacaataacaatagctacaacaagaaattcctcaaaacatgcaaaatttcatttccttaaaacccaagaaacaaaagaggaagctataagaaattacctagagcttaannacttcaaatccttgaagaatcttgctggaaatgcagaaatacagaagaatctagctgttctaaaggtggctgaaagagagagagatagagagag

SEQ ID NO: 73624 - DNA, 753 bp, Cannabis sativa
caagctttgagagggtcagccaggatcccatgacccaacaaaaaccgaccaggatcaccaaactcaggcatgaaccggacagtttctaaggtgaaaccctagaatcggccaactcccatgaaaaaaccctagggtcagcctggtctcaaacaagacccctagggttggccagggttagttttgaatcaaaatgcatatttttcaaaactttaacgtgttcttcatgactcaaagagtcaagaatcacaaaaaaaaaccaaaatcgaatctttttcatcagaaaatcacacattatacattctaaaactatcatacggattcaaataccaaaaagattataatctagtgtgagaaccaaaaagtttctaatatcttaaaaagcttgaaacctatggaagattcaaagaagagatgtcaaagaaaagaagatgacacatacatggagagagaagatccaagaactaaaggcatgccatggaaaaatctaatacttggctagacaagcttgctcgacagaggctactataggcaagacgagagctgggatgtccctatccaaacagatttttgaataaggacttgaggggaaaattttattccaaattttgtccacctgacatggcatgtccattgaagccaagattgagggcacatggaatacaaccttgtcaatagcaggacaaagtctccctacaaggcatggcagaaccgtcaagcatcaagtgagaggagttaagggagccatcaagaagc

SEQ ID NO: 73625 - DNA, 931 bp, Cannabis sativa
agtgtatatatgtttgattaattccgcactttatacttaaacatatatatttcagtttatacatataaatgtctaacattctaagcctccaaagggccaaaaaaggagtagaaatagttgcctttctaggcaagaagaagaatgattctcaagaacacaccctgctaacaacaagaaggctagcactaggccttgcctccattgcacttgttgggaaaacttgcaatgcagtctctttcgctgaagacaacgatttttggatagatggtcgtattcctcttccttctgtcaataatagtaagtatagtacacaaaatctttaggctatacattagtcattgatgtaattggttttttcttcctctttttgaatgctaattatgacagaaattgataatgagaacaccgacactccctcttttctgaagaagagaatcttcattgcagatatagggctcaaaggaagaatgtataggctaagaaaatatgcctttgatcttcttggtatggaagatttgattggagaagacacattgaactatgtccaaaagtttattaagatcaaggcaacattcatgtattataatttcgataaagtaatcactgctgcaccagttgatgacaagcaacctctcctagatttggctaacagattatttgataatgtggacaagataatcatcaaattaaaatgaacacattattcattttattttatttttgtttgtgatggttctttacattacagcttcctaagaaatattttgtttgaaatttgcttacagcttgatgctgctgttaaatagagaaacatacttcaggcagaaacaacttataaagacacaaaggctatactccaagaggtcatgatccgaatggcatagactttgtagatatggttttaatcatttgatttactattcaaatgggg

SEQ ID NO: 73626 - DNA, 676 bp, Cannabis sativa
tagcattagggcgttacaatccttgtccccatacctcagctcaaaatggtagagctgagcgtaaacatcgacacatagtcgaaatgggacttacccttcttgcacaagctagcatgccacttaagttttggtgtgatgcttttcacacagctgtttatttaataaacagactgcctacaccagtcctctctctcaaatctcctcatgaaatcctttttggccaaaaacctgactacaatttcatcaaaacttttggtgccgcgtgtttcccatgcctcagaccttaccacactcataaattccaattccactccgtcaagtgtgttaatctaggctttagcaatgtacacaagggttacaaatgcttaagccccactcgtagaatctacatttcaagaaatgtagtgtttaatgaattcgaatttcccttccagcaaggctttttaaacaactaccaaccagaaactcctatcatcattcacagcccaacttggtcgatgttaccaactccatccctttccacacctgaaccacattccactcaaccatctgatggcacacctcctggagcagcatcttctctgtcgcctactggttctgattcaccatgtactcccatcactcatcctccaacaacaacctcagcagatgcccaagacactcatgacagtcctta

SEQ ID NO: 73627 - DNA, 1041 bp, Cannabis sativa
  modified_base (356)..(359): a, c, t, g, unknown or other
attggcagatctaggtggtgctgagaccgtatccgccattagacctccaaattcaggtctctaatttcgattccacccgctgtttgcttaccgagaaagtgcgagaaaatatgaatcttgtcaccaacgttctcactcagtcaattaacagctacaaagatacacagattaacaaagacggaggatgtagaagacgatgacgacatcaacaacaacggtttctctgtacaaaaaagcccattagaattgatttatattttgggccattagaatgggccacactatgaggcccattagtccaacaacctatgccaaactttctcaactttcttcttctttatttattattattattnnnntttaaaaaaaatatttaatttgaagatgcaaaatcaattaggtacgaaaaaaggtaaataaaggataagtataattttttggtaaaattgtaaaaaatttcaagaaaaaatgaaaagggaacgaacgggatgctttggaggaagcaattttgctatgggcaagtaaaacaccacttttattaatcaattaatcaaatttacctctagttttatatttaattgaaacatacctctctttttatatgtattgtacccaaaatacctataagaaagaataaaaataaaaaaggacaatataaaaaaagtataaagtgtaattttctctttttttgctattggattttgtaattttgagattcataaaatacaaaatgggtgtatgcccaaaacattattggtatggctaaagtgccaactattgcaactaaaattatttgtaatcatcataaaatctaactatctcttttattaatgaacgttattaaaaaaaaattacatttataatccaattataataaaaagattggaagtattcgtcctagtgagctaacataagtaggtgatatttagtttgatggaatagaatgataatcataatagtaagggctatttacaaaaatatgggaaaatgaatatatgttttgatatatatggcatgaaaacttaattaccctaaatatgg

SEQ ID NO: 73628 - DNA, 754 bp, Cannabis sativa
cagtaccatgaatccctctccaccctatcactcaactgaatagacaataccaactgcctatctctctcctcaaagagatcattaaccacatttgcatcccatcttctcaaccccaccggaaacaaacaccccaccatttgtccctccaaagcaggatggttggaaataacaaaagggttatgttgatcagggagccacaagacttgaaggatattcaccgaagtgccatctccaacagcttttcttgcaccggctataaccagatcttcagcttcaaaaaaacttctccaaataaaactgggatttggtccaagactagcagtaagatatgtacccaaggggtaatatcttgctttgtaaattctaccaaccaaggaattttcattattcagcaacctccacccttatttaccaagaaaagctaaattataattatgaagatcccgaaagccaataccaccatcatatttgtgtcgacaaagcctcttccaactcatccaacttacacccttactagaagagtttgcatgagatttccaccaaaatttggatatcaacacctcaaggttagaacaaattttttttgtcaacaagaacacactcataacataggaaggcaatgcttgagcaactgacttaagcaaaacttccttacccacctttgacaaaaacgactttcccaagaaaagattttcttttgcattttgtctttaaggaagcccaagatagtatttttatttcttcccataataca

SEQ ID NO: 73629 - DNA, 755 bp, Cannabis sativa
aataaataaaataacaaattgaaagtaagaaaaaaaaattgtatgtataaagaaatatttaattttatttaaattgtacgtaaaaaaattatatataaaaatggaatatacatttaatttaataaattttaaaatataaatgtgatttttaaattactattttcttacatttaaattttaattgtatatattatttttttaaattttttataaatatgtgtggattggattagattggttatttttacatgccaatcaacatccaatccgcacaagtgcggatattcgcactttgcggattggattggatcgtgcagattggattggatcagctattttatgaacacccctaacccaactagatatataccattagtggaattagaaaacaggaaacttcgacaacatttagccgaatctaaccgacgaaacgctaagttggaaagagagactgtagcagccaagacggtgcagggaacagttccacagaatcaaccagagcctacagtgaggagacaacaaggaagacctcgaggctccagaaccagaacgcaagaagcgaatcaagagaatccatctaatcctcaagaagaataacctaggaatacaagggatgtccccatggataatcaaacatccaaataacacaagaaatcaggaacatcgacgagatgttccacaaacttcccatggagttaataactaggggaatgaacaaaacgacgtgccagaagcatctcgtaggaatgagggag

SEQ ID NO: 73630 - DNA, 754 bp, Cannabis sativa
ctaggaaatagctttgggaattatcaagccttagcgttttctagcaaagtgctttcttgatagaaaacttctcttctcaataagcacattagattcctttatatagtgtttaggtgatcactcttaggattcataataccatctcatttctctcatataatgagcattaatataattgtaacaactatatttcataatatttaaatcatattatcaattttgtgtaacatctcttttattacacaaaaatatgatcaattaaaagaagttacaaaagcacttaaatttgtaactcaactccatgttataaagtgtaggttacaattttaggttaaataaatcatattttacacaatttatttaccaaacacttaatatatattattcacataataacatatattattaccacattttaatctacatattattatattaaataatataacaattataaatatactaaataatttttgtttttaaatttttttgaatatactccatccctacccctaacgattaatgcttgatcctattattaactctatttatatataacgacatacaatggatacaagaaaaagcatttacaatattgatataattataatattaaaatcaataaccattagaattataatatatataggaataataaatatttgatttttctttatatgttttgcttggattttatatatttcgttacatttaactcgtgactacatgctcttaatttttgtatgatggtacg

SEQ ID NO: 73631 - DNA, 1007 bp, Cannabis sativa
  modified_base (523)..(525): a, c, t, g, unknown or other
  modified_base (558)..(558): a, c, t, g, unknown or other
  modified_base (940)..(957): a, c, t, g, unknown or other
aaatttataataatgttctacttgttcaacgtcagtccctgaagtgaatacaatattgtttactactcatatattttcaagagaaagtggaaacaaccaaaaaatgagatatcacacacaatcaaaatgcatgatatctatatataatgtgtggaattgaataatagtagtcgtataactgtaatagggacacactttatgccatttgtttcaaaccaatcaaattactaacaactcaattgaaaaccgacattctcactaaaagaatttttaatgttttttagagaaaatacttttgatattttgttacctaattagtattggagtgaattgtcaaagttgttaacgttgtcgttggtgtcaagcaatgttagctttggatattttgctttaaagttaaataatttaatactttaaaaattaaaataaataatgaattaaatttaagtggttttttgtaacactttttaatcaattttttgtttttaaaatgaaaaagtaaaaatattttttaaaaacatgnnntataaaactgttttcattttttaattttttaantgagaattaaaattttgaaaataaaaaaaattacttttaatatttttttaaacaatttttttttcttaatcaatattttagacttcgaccaaacccggactcaaatcctcccccacggccctattgctgaacccaacctctgatctgaacttgaatcagactccacacctagatccgacttaaataaaatcaaaaaataaaaataaactttacataccatatttttattttctatatttaaaattgaaaaacaaaagtggttataaaacgcgtgaaaaacaaaaattttacttttattttatgaataaaaaagtagaaaataaaaatattactataattataaagcaccttagtatcagagcaggcccggccctgggcatannnnnnnnnnnnnnnnnnctagggcccacccagcccaggggcccaaattttttttttcctcttttaaa

SEQ ID NO: 73632 - DNA, 1032 bp, Cannabis sativa
tcgtgagtagggtacctctgctcgaactactttaactcttgagaagcataggctattacctttcaaacttgcataagaacacaacccagaacctgtctcgaggcatcacaataaacaacaaactcttccttatttgaaggaagagttaacaccggagcagtaatcaagcagtgctttaactccaaaatacttttatcacaccgatcagtccagacaatcttcaaatttcattccgctcaactccgttaagggtacaacaatctttgagaaaccctcaacaaatcgacgataatacccagctaaacccaaaaagcatctaactttcgtagctaatttttggtgttgggccaatcccgaacaacttcgatcttggctaaaactaccatgatcccatctttacccactatgtgccttaagaaaaagacacgagataaccaaaactcacacttttttgaacttagcgttcaacttgtgatctcataaccgttgtaataccgatctaagatgtaactcatgttcctcttctgacttagagtagaccaaaatatcatcaactaacacgatcacacatttgtccaggtaatccttaaacactcaattcataaggtccataaatgccgctggggtattagtgagtcaaaaagacatcaccgaaaacttatgatgtccatgccgagtctgaaacacaaccttggtccgacattcaccctgattgtgtgccttacagttcggacactctagatatgatcagaatgaagatatgcggccctgatgaccacctctgtttctccaaaacttctgttacccctgatgttctggaagcgttagcctttcgcttgtgatcacggttaccacagtcggtccccttactgatgttaccactcacaggaggatttgatgccgtgacggcatactttacagcctactcgttaatcacatgttgctcagcctcctcagctatcaaggctagttcaaccactttcttatataaagtgtcgtgagcaatggtatgttggaattaattttaccagg

SEQ ID NO: 73633 - DNA, 1345 bp, Cannabis sativa
tattgtcgggcttcaggtcagaagattaatctagacaaatcagttctttcattttcaccgaatacactacctacggttcaagccaatttacatcaagttctacaaatgccaatacaaccatgtcatgaaaggtatctggggcttccatcttactccggaagggataaaaaggtgttgtttggagacattaaagagaaactttggaaacaattatcagcttggcaagagcaacttttctcaattggtggaaaggaagttcttctaaaagcagttgctcaatcaatcccaacgtatgctatgagttgcttcagactctccaagtctcttattcatcaaattgaggtcatgatgaataaattttggtggggttcaaactcttctaaatcgggtatcaattggaagacttggtctgctctttgtcaaccaaaatctgaaggtggaatgggtttcaagagtttccttcacttcaaccaagctatgttggcgaaacaggcttggcgggttttttctaatcccacttctttgcttggtcgcattctcaaagctcgatacttttacaactcttcttttctggtttctaacaaaggatcatacccttccctgacttggcaaggaattatttggggaaaagaacttcttgtaaagggacttcgatggaaaattggttctggtcaaagcattttgtgtaatactgatccttggattcctggtattacaaactttttgcctttgcgatcaaatggaattgcaccagatcagcgtgtatcttcactcatcacttcagcaagacagtgggatttggaattgctaaatgcctcttttcttgcctctgatgtggataagattcttcaaattccattacctattttccctactgaggatgctctaatctggcactttgattcgaatggttcatacacagttaagaccggttacaaattggccactgatttagaagaacagcaacctgctgtctcgggtgttcaaattcgaagttggtggcataaattctggtcttattctctcccatccaaagtgcgaattttcttgtggcgggctctaaatgattgtcttcccacagctgcaacacttcatcacagacatattggtgactcccctctatgtccaatatgtaaatcagctgccgagacaactactcacgcattgttcttctgcaagagaccaaaaaagatatggccaacttcatccttttcactttccaaagagattactgaacgtatgtcccttacagaaattttgcttcatgcttctgatttgtggacagctcttcaaatggaacaattcattacaatcctttggcttctttggcacgagagaaataagg

SEQ ID NO: 73634 - DNA, 1723 bp, Cannabis sativa
agtagcagagaaactgaggggaattcccagaataagattcgcatccctgacattaaacatatcttgcacaagagagacatcccaacttctatcatccacattcaaaagagagttgaccatataatggtcaagacctggagtagtggtggatacaaaaggattattattgtcagggagccaaggatgagtcagaatgcttgttgccgtactagtgccaatgatcctcctagtaccagaacgtaccaagtgttgggcattccaaatactacgccaactcagcattaagaaaatccgatcgtgggtagtacttggctttaaaaacttgactaacaagagatgagtcagagcataacaatcgccacccttgcttggcaagcattgcaagattaaaatcatggagatgacggaagcccatacctccaaagtctttatgaacagccaaccgatcccaagacatccaaataatgccttgcccactagcactctttgttttccaccaaaagctagccataagcttctcaatatcattgcatattttcagaggaataagaaacacactcatggcataagttggaagagattggatgacagtttttaacagaatttccttaccagcacgagaaaggaacttaccatcccaactatttatgcagttaatgatcttattcttgagaaagccaaggataaccgtcttcttccttccaataatgttcggcagtcctaagtagaaagagccttcagtagcttcaggcatgccaagggttgagcatatttgagttctgaccacaccatcagagttaggactgaaaaatatcgaagacctggatgcattgacacgctgaccagatgccagctcaaaagagtgaaggagtctattcatactgtctacaacactttgggtggcttggcaaaataaataactgttcttagcgaagagcatttgagtgatagatggggccccgtttgccacacgacacccatggatgatcctatatgtttcatacttcttaataagagctgaaaacccttcagcaaaaataataaacagatatgtggacaaaggatcgccttgacgaatgcctcgcgaaggaataataggacccatgatgtgaccactatggataatagagtatttaaccgaagtaacacatttcaggataagattaatccatttgttggcaaagcccattcgacacattacagcttgcaaatagccccattcaactctatcataggccttgctcatatcgagcttcaaggccatatagccttttttgcctcttcttttcctcttgaggtaatgcatgatctcaaacgccaccataatgttatcagagatgagcctaccgggaaaaaagcactttgagttggagaataatctgatcaatcatgcttcgcattctcttcgcaaggactttagcaataatcttgtaagatacattgcaaagagcaataggacgcagatcacccattgtggaaaagtttttcttcttcggaatcagaacaagattggtgtcattgatatcagggggcaaatcttccgatcctaagaaattagtaacaagctgaacaatgtcaggagcgacagtatcccagtgatgttgataaaatccagggcccatgccatcaggaccgggagctttatcaggatgcatttgaaaaatagcttgttttatttcttcaggagtaaccggctgtaagagagcttcattatgatcatcag

SEQ ID NO: 73635 - DNA, 672 bp, Cannabis sativa
ttgttaaattttacttcataatcataaaaacaaaatttcggttcatataacaaaattctacaagaaccataacaacaaaaataccttttacaaatataggaaattcttctttgcacaatagtatttcctacataacagtattaatccttggatattgatttgtttttgtttttttatttttttgaacttaataaattttgtaacattaaatttccttatgcaaaacatctagatatcaacaattaaacttccttatgcaaaacatctagatatgaatatgatgaatagggtttctcataaaagaaagtaataataagaaaacaactgttctctacaagtgggaaaaccatagaagaaacccaagttgaaagaaaaacaagttgcaagatgaatagttttggtctttggagtactatgtatagtagtagtacttcaattattaacattttaaaaaagaataataagaaaaaaagaaaaggaattattgttgtttattttggcagtagtccaattctgatatgccttcatgcgtaagatccaactcagcttcatatttacattggaggatcttaaatggtttcattattattcattcgtataattgggtccccaatacaacgcacctagcttatcatatcaacttctttaaaaaaaaacctctaattttctgta

SEQ ID NO: 73636 - DNA, 689 bp, Cannabis sativa
aaaggtgtgcctaattgtgaagaaagcttggagctagagcacatgggagtggattgaggctttgaatccaatatttttgttctgactaatagatctttgcatacttatgttgagtcaagaaaatagtggactcatcttggagaacctcaaatcctaggaagtaattaattggtccaagtttcttaagagcaaattgttgatgcagctgttcagtaatatgactgacttgagcttgatctgcaccagtgattagtatgtcatcgacatacacaagaaggagaagtttcccatttgtattggtaaagaacaagcttgtatgtgacttagaatttgtaaaaccccactgtactagagaagattttagtttgtaaaacggggcccttggtgcctgtttgagcctgtatattgctttgttgagcttgcaaacatgattggggaagttggagtctatgaacccaggggtgtgatgcatataaacaatctctttgagctcaccattgaggaaagcattgttaatgtcaacttgctggatttcccaattattggttgctgcaagggtaatatagttcaaattgtgcaaagttttatgaatggactgtatgttttagtaaaatccaatccaggaatctgttgaaaacttttagcaaccaaacaagccttatacctgttaactgtgccatctttgttat

SEQ ID NO: 73637 - DNA, 862 bp, Cannabis sativa
  modified_base (360)..(367): a, c, t, g, unknown or other
  modified_base (707)..(710): a, c, t, g, unknown or other
  modified_base (774)..(776): a, c, t, g, unknown or other
ttaagaaattataactctaatgctcatttttaatattggggtccacaaataattaaattcataaataaatataaaaataacagaaatcagtgctaattatttttactaaaccaaattactaaagcgatcattacagtaatgcattactatattttattacactttaaagaaaaataatacttcaatttttaattttggcacatgctaaaagttgtgctaaatttagcataagatataatattgttctaaatttggcgcacaataaatttacttttttatttactacaatgccactaattattaagatttatcgacccttacataattttatcttctttatttactatattattattattnnnnnnnntattattattattattatttaggaaataaaaaataaacaataataatatttatagatttttaataaaatattaaatgatgatcaataataattatattatcttacatcttgtgtatatgtataaatagttggtaaatataacataaatttactttttgtatcaaattaacataaattttacattttgcgttgaagatagtgccactctaatactcataaagcataactaaatttgttatataaaaaaaaaagaaataaatttgtaaataaatttttttaaaaaaagttctatttgcaccctataaaagtataaatatactttattattaaaaaaatatannnntaaataatttttaaaaattactttaaatattttcttaaagaattttcctcacattattttatgnnnatttcaatacttattttgatttcatttttataatttttctaactcatgtatatatattttttatttttttctaagaaaattttata

SEQ ID NO: 73638 - DNA, 886 bp, Cannabis sativa
  modified_base (303)..(305): a, c, t, g, unknown or other
taaaaaagtaaaaaataccgcctcacagtatttttgtaaaaaaatggcaaaaattagtataccatgtaaatttcccataaatttaagagaagagagagagagattgggttggggtaggtaggggtgttcatataatttgtactgaccaaatcatttgagattggatcaaataaatttggtgtaaatgatttggtcaatttggaccgcctataaatttttggttcggtcacggttttaacatttttggtaatagtttaaactaaactaattcgtataattattttatatatatttaatatatannnatatatatatatatatattggacaaatgttgatatttgagaacaacttgagataaaatattgaaattgacttatgtggtatagttcttccaaataaaaaggtctccaaaagtcatttcagaaaagtaatttgtgttccggaaggttgttctcggacaactttcttgctatccaggaagaaatcttgtggaatgatagttgtcctcttcgaaggttgttctcggatgactatcatgtccactttgggtgtagtcttcaggaaaggtagtcctccagaaaggagttctagaaggtagtcccgaatagtcgactccgactggttcgttcttattcgggatggtcttttagcgagtgccttgatttgtgactccaagagccttcatactcactcccgaatgcactcctacttatgctaacatggatatctcgctcaaaggatagttggttaagttaatttttacctaacttaacaacctaagtttttacagccactgactttaggatcttgttcttaagcctacatatacaactaacacttatcattttagagatatcgatcaggttgagagagagagagagaga

SEQ ID NO: 73639 - DNA, 982 bp, Cannabis sativa
ttaattaattataagtaaaaaaaatactcaaatatatataaaaattaaaataaaataatttttaaatccctcatcatatttaccgatctctgttaacttttaaatcccaaatttttataatttatttttatctttcttggtatttatcttcatttattctcttcctcctcggtctccccaaacaacgataacggaatagctccttgaggttaaacccactgaacctttgccaactcggctccactaggcaccgattcaacccgagacatcgtagattcattaccatccactgaatctccaaaaaggtacaagggattttggttctgggaaggactaaaagatgaacgatcgcctgttctattggagaactcaaatccaccattgatctgattagaaagggtggttacgaagtcgccccaatcatcttcggagaataaggcagtggaggagctggtcttcagattggtggaaatagaggaggcggtatgaacaggagtcattggagcaatttgaagtccccaaagccctcatcgtcgtcatcgtctgccataggtgagggctctggttccggtctctgttttctcccaggtacgcctctgttttgtgctttggtttattatagtttgcagattcgggttatgcaatttcgggttattgattttttctaactttagagcttacgatcaagctgcaatcaagtttcgtggagttgatgctgatatcaatttcaatgtaaccgattacgatgaagatatgatgcaggtgcgtgccacatataaataaatatgtttagtatatgatttatatttatttatagttatagttttgtattaacaatttgtctaattttgaaattttttgctcttatttgagatgaaaaacctgagcaaagaagaatttgttcaaatactttgacgataaagcactgggttttctcgtgggagctcaaaatatacaggagtaactttgcataaatgtggtc

SEQ ID NO: 73640 - DNA, 778 bp, Cannabis sativa
atgtcacaagaaaaaattaatagtaacatttgtaaaaacgacacaaaatattaaatttagtgacattttgaaatgtcatttaaataagtaattttattgacatttaaaaagtgttactagtgaaaatttttattggcatttataatttattttcaagttatgtataatatattttaaggcttagttattgattttgtagattaaaaataactaaataaatattagcattaaaccataataattttttctcagtaaacaaaattgaactccataaataataataatatctaagcttcttcatccatgtcatttgcatctaataatattgatgtatcaataattatagctggcatatcttttctaattaaacttatattttcattctcagtatcagaaggtgccccacaaacttcactttgcaaataagactccacattcttgttttttaattgtgcgctcatattataataatctctaggatttatttttaaagctacatgccattattcgtgtttgagatcttccacatacattacttgttctgcttgcgaagctaatataaatggttcatcttcacgcatcaattttgataagtttactcttgtgcaatcttcttctttcttaatgccacttgttgaaatccaatcatacttaaataatacaacacaatttgctgaacaataatctagttatataataactgttaatatctcataaaatgtaacatcttaaaaaatagggtttggatctctagtacttgaaaaactttgagttttgg

SEQ ID NO: 73641 - DNA, 905 bp, Cannabis sativa
gttataaccttatgaaggattatgagcagcgctacccaacgcatgatttagagcttactactatagtattctctctaaaaatatggcaacattacttttatggtgaaaatgtgagacttacaaagattttaagagcctcaagtactttaccaattaaaaagatttaaatatgagactgagacaatgactagaataggttaaggtttatgattccgagattctgtatcatcccgagaaagtcaatgtggtggcgaatgccttgagtagaaaggtctatgtttagaaatggttaagattgaaattaaatttgtggttgggaagttacaacctgacagtttaatcagatttgttagaaaaaaagtagaagaccatagttagaagatcctgagctagttaattcgggatgagatgctggccggtcggcctagggactttttgatctcaaatagcagaatgttactatttaaagctcgagtttgtgttccagatgatggtgagcttaagaaggtaatccttaatgaatctcatgtaataccttattcgttacacccaggaaccaccaagaggtatcaagatttaaaatcttattattggtggcatagaatggagaaaaatgtagtggattatgtgactaaatgttagcacgttagcaaatcaaaactaagcacctgagaccgacagggttattgcaaccattagcccttcttgaaaggaagcgggaggatattgtgatggactttgtagttggtttgcctagaaccacgagaatgtatgattcagtatgggtcataatggatcatttcgcgaaatcagctcattttctgccaataaagattacctatatagtggctaagtacggtgaactgtatgtgaaagagatagttctgtttggttttatgccctaa

SEQ ID NO: 73642 - DNA, 699 bp, Cannabis sativa
tatagagagagaagtggaaggctcagtttttctgaaaaagttaatcaagaaccagagaatggaagcctcgatgaagaatatctcatctgccagttgcttggaaatttgtttcattgtattcatttggttttgacccttcctacttagggcatcaactacaacattaaccttcccaagatgatagaggatttcacagtcataatcctttactaactcaagtcaacacctttgtctcatgttcaggtctttctgggtgaagaagtatttcatacttttgtgatcggtgtaaatctcacatttctctccatataagtaatgccgccaaatctttagctcaaatagtactgttgcaagctctagatcgtgagtagggtacctccactcgtactcttttaattgtcgagaagcataagctattacctttctagttagcatcagtacacagcctagaccttgtcttgaggcatcacaataaatgacaaacttttccttatcagaaggaagagttaatactagagcagtaattaagcgttgctttaactcctaaaaacttttctcacaccgttctgtccaattaaacttcaaatcctttcgagtcaatttcgttaaaggtgtcgctatcttacgaaaaccctcaacgaaccgacgataataaccagctagacccaaaaagcttctaacctctgtagctaattttgg

SEQ ID NO: 73643 - DNA, 625 bp, Cannabis sativa
aaataataatttgcaaaaattatatgagaaaaaaaatttatgtgattcaggtgttaataaaccttagtcaacgagttagtctattagcctctaagggcaatattcatgtgtttacagtatttagcaggaaaccctaactcgttacccttagtttctattctaaagatcaagggtaatcacaacagagttttacatatgcgtttcttttagcttgacctctttgcatgagaataaaggagtatttataggctaagtagcgggtatagatagacccatgacccacctaagatttgttcttaaatccctctgttgggatgaattacatgtaatgttagagttgattggatagtccagtgggtcgcattatgtccgtgcatgtagcagttggataatggggattattttgtaccatttggacacgtgacacgcaaaagtttaacctttaaaagtagggaacacgtgtcactcaaagcttgttcctttgcaagcagaagtttatagtgtctgtctggtaaaaggatggtggtgatgcgcgcactaccatgctcgaatgtgggaagcaggatctgattccgtcaggaaaaacataactgtcacttaagtgacctggcgtgtggagaaagtc

SEQ ID NO: 73644 - DNA, 709 bp, Cannabis sativa
taagatatttttaatttatgtttgttgtacaactattatggccgcatatgaattaacaaaaactaatttagttggatgattttcatcctatttatgtatttaactttgattatttttaataatattcattgttcaaaatgaaaaaattaattattttatattagtaaacccttcatatattgaaggaaaaaagaaccgaaataatatagaaatgtttgttgtaattgaaatatataataattctgtttttttttaacaatcaatattattaaaaaaggaaaatttatatcccatactatttttttttactgttacacggtaatatttacttttatattgtcttttttttattattattattttgtatactgccgtatcgtgtattgtatcatgagcatctattaatctatttttattatttttaaagtgttataaatgtatgatttaacttgtgttgtcactttagtgatagattttttttttattttcttttaattgaagttgtattatattttaagtgatataaaagtgtgatttgacttgtgttgtcactttagagacatatttcttttttcttttaaataaaattgattataaaaaatgtgataccctaaatattccatacccgttcctttcactttaatctcacttccccattattctctcttcctatttatcatattcgtcttttttttttcactctctactt

SEQ ID NO: 73645 - DNA, 969 bp, Cannabis sativa
  modified_base (482)..(486): a, c, t, g, unknown or other
accgagttgcccatgttgtggctaggcactcttgttttctctctggtcgtagcatttttgagtataatgcttgggacgagttaatctcccttttgtattctaaatgctaattattcaatgaaattactatttcattttcaaaaaaaaaaaaaatggtaatccatataagtggagatttatttaattataatgaatatgacacaataaattataaagatcatgttttgatttgaaatcaccgaacggagaaacaaaaacaaaactaaaccaagtttggcggaaaaattaaggaacaaatgaacttcattgattgaattgaagtgtaaactatacaaactaatagcaagaatatgtagaaggtttcttggagaaattacagagggagagaaagagaattagaacttaggtggcgtttggttggaggtaataagatggaatggaatagaaagaaaataatttttattccattcttttgtttggtnnnnntttaaagtattggaatatcatttcaattttttatcagtttttttatgcattttaaattttattccatttcatttctattcctattctcattcccattcccattcctatattttcattcctcccaaccaaacaccttaggtcgcgtctagttgaaggtaatgaaatggaatagaatggaaatgaaactatttttattctatttttttgtttggttgcatttaaaattattggaatactattccgatagaatggtctttccatcattttggtggaatgacaattccattttgaaacagaaataaagaccattccaatgcaagatttgaacaattttaataattttttttattaattttttttatgtattttaaattttattccattccatttttattccaattctcattcccattcctatttttatattttcattcctaccaaccaaacgccacctaataaggttaggctgaaatgaatataaca

SEQ ID NO: 73646 - DNA, 961 bp, Cannabis sativa
  modified_base (658)..(670): a, c, t, g, unknown or other
aacaaaatcatatacaatattgaatttgggaacatggttagattttgttttacttaaactagaaaaaattactaataataagtcattctcagcaaaaaaaaaaagtaattaagtcatatttattgctttctttatttttgtaaatattggaaccaccacccactcatatttatatgggacttagtacttttttaatgggacattaaaattctaaaaataattttagacactaaattattacaataaaactctaaaatagtgagacattatatagactatactaattttttaaaaaaatttaatattaaaataatgtatttatgattaaacttttatatttatatatattataatgtgagatagtttaataataataaagaatattttttaatgtaaattttagtattgtggttttgaatagaaaaaaattaatattataaattatagggtgattctacaatgcaccctgttaaaagggatgtactgatacacccttgacttgtttcggcatccagaagaattgtttagtctattttttttttatattcatgtacgttatagctatttaagttaacctacaaaattttgagaaagtccaaataatttacaatatagaaaataatcttcaaacagtctattttacatgcgtataaaatannnnnnnnnnnnntgcaacacactgtttgaacgtagttttcggcgtgttaaacttttccaaatttcttaaacttttgatggatgtcttaaataaatataacatatatgaccatgggaaaaaatttaactaaaaaattattcgggtattaaaacagccgatagtacatcagtatatctattttaaaggggtgcattgtagaatttctctaaattatattcttttggttttgaatttaatactaaatttaataatagagttgttcttaatattaattatttaagtggcattttttttggcaataat

SEQ ID NO: 73647 - DNA, 1004 bp, Cannabis sativa
atgtatatatatatgtgttatgtggggtaaaggggtaagatgattttgtatggtaaaagataaaagggttagctaaacaagtgctctctctagcttttgctcaaggatcttggtggtgattctcattgaagacattgaaggataatggctcacatggatggtatgggaggtatgtgttttattgactttgatgctttaaataaatactagatcttggttttaataattatggattatatttggttgatgctattgaatgcttataatctgtaattgtttttcaacaatctgtgtaaacattttcacattttttgacaagagattaaatatagggaaaaaaagaagaagaatatacatctaaaaatatctatctatatctatatatcactcttaatgggtattactcattcatgggtaatattgtaaaattttaagtttttatgcttagtttttctatctaataaaaaaaaatcccttatttttacattatatgagttagagttgttccatcagttgaaaaaaaattaagaaaaaaagttttttgacaaaaaaaatgttgagcttgacttaagtattttgtatataaacatatttttgatatagtgtaaaaataattttttttgattttttttaattaagtagctaaattaaggatagaaatttaaatttcttttttattattcataatttgatcaaaatctaataatctaatatttttaaaattaatatttatagttaaattgtttagtaaccatgaatgggtaatatccatttagaagtattccatatatatataaaggagaagtataaggcggtgatctggcggtctaaaatctctctaaaattatttttttcttctctccttaattctctcattttaaatatcttattaaagcataaaatctacaaattgatattttactattattttaataaatttttcataaaaaaatatctagtataaattaagtattttttttaaaaaaaaatactattgttgaccg

SEQ ID NO: 73648 - DNA, 764 bp, Cannabis sativa
tttatgagttataagctgatattagtatgataataaagattaatctattcgttttacaagaaaataagaaatttccaaaagattacatttcactctcaagttctctctctcttttgaaaccctccaaaccagctggggttgctgtgtttttctccatttttcttgttggttccagcaaattttaagggatcttgaactctaggtaagtctcttgtagttccctctttagtttcttgtttttaaagaaaaagattaatgcatgtttttgggtttttggttacttttcttgcggctggagtttaattatgtttttagtagttaaagtatgtttatttaaggtgatttgagtaggttttcatagctagtcagtgggatgagcaagctttgagtttttgaactcaagcttggctcatcaatggaggtttttgtatttgtgcaggaagctgtgttttgttgctttcaaattgatctttaggatgcttagaacaggtctggaaggtttcatgtggattggggttgttttggtttagttatagaattttcggtcattcctgcactgaatcggaatcccggttcagaggggcctgtaagaaccggaattccgattggctcccaggaattttctcaaaaccgaaagtccggttggggaaccggtctaccggttgggggcaattttgggaaccctactttttcccatttttgtgttatttagggtatttccatgttattcatagatagggaacatttagtgtcaagtttaagtc

SEQ ID NO: 73649 - DNA, 921 bp, Cannabis sativa
  modified_base (872)..(895): a, c, t, g, unknown or other
tggaacatagcgcttatggaaaagcatatttgggcaatatcaagcaaacaagacaatctttgggttaggtggattgatgcggtttatctgaaagggttgagcttctggacagttgaattcaagcaagatgcgagctggtacttcaaaaaaatccttcgtcttcgctcaactgtcaatgaatcaaatgtcatggctgctgtcaaaagaggtaaattcagcgctaaacttttttatctctcatatattcaagcttgcaagattgattatgcaagaaacatctggaatagaatggtccttcccaagcatcgattcataggttggcaaatcgtgaacaatcaactgctaaccagagataacctcagccaatttttgccaatttcttcccctttatgcccggtctgctgtcaggaaaatgaatcgcaccagcatctttttgtgcactgctgctttacccgaaagctgaatggtgagatcaacaattggtgtggccaatttgagtggccagtagacttgaacagatggttctccaagacagccagcaacttgcaggaaaagattattgatactgttattttggcaacattatacacggtttggacaaacagaaacaaatgtgtgtttgagatgagttgcaagtctgttagtattttgagtaaagagatcaaagaaagtataaagtctagatgtctaatgggttgtaatgggggaaaagggaagcttgataactatattttaaatgtaattaacagctggttgtgagagcagtgtctcggtctgctggggttgtgtattctcttgtttgtatttgccagttttgaataaaaatatttcttcttgttcaaaaaaaaaaaaatacactagaaaaatacttnnnnnnnnnnnnnnnnnnnnnnnnattttcctttgactaattaattcatt

SEQ ID NO: 73650 - DNA, 865 bp, Cannabis sativa
atatgagacttaagagagggagagagaggtgcagatttatgaggcttaagaaagcctttgtagcatatggaatgaccaaaaatgacttagcttgacacatgttttaagtgagacctaatgccctttatatagtgcagggcttacaacaaatctagtttaagcaggttgatatcccttaaagcgaggagatatcacctcttatttacatattaaatttatagaaaataacctattaattattcctacagaataagtaaattacgaaagttgaatccctattatcgcaggttgttgaagtccattcgtagctgagagtgtgtgtccaggttgaaagctataaagatactaaaagtttttgcaaaaagaggagttggtcggcctacccttatcttgcaggacctggccaacctatgtactcctatggtcggccaggtattgctcctgcagcatcaagatgtgtctgccagctttcccatgtgcttacaaacttttccatgtgcctgacagctttggtaagtgcaggccaaccttagtatgtgttagccagccttactagcttctttgtgcaactttccttgaaaaggccaggcttccttgcttgaaaaggcccttcttggtctaacagtcaccttattggctggctaccttatgctcaaactttggccagccttaccagttttctctggcaaacctatgtactccctttggctgaccagacatggttgtgggatttcttaactactttcttaaatccttttgcttgttgctcgatggtattaccatgacttataaggagactttgtcctgctattgacaaggttgtattccacacgtcatcagtcttgacttacgttgacatgccaca

SEQ ID NO: 73651 - DNA, 701 bp, Cannabis sativa
ttctgaaatagtagccgacttgtgatttaaactagtgttatgaattcgtaattgtgttccattaatgattaattaatatttgttaaagataaacatatatttttctttttcttctttgttattattttttctctttcttttctaatagttgtttttttttttacttttttttttctctttataatgtttcttactaggtaaagactacccctactcaaacttgaagccctctgatttctatggttacgcattgaacttggtgtttttgcttgtagtaatgtgaagctactgttaaggaaaagtaagtagaaactagaaacgtttggtttgtgtagtttcttgaactctcaaaacacttgatttgtaacaaaacaaacactatgtcactatcctctgacaattaataatttgttttgttatgtttgttttggcttgtgcttaattgttacgtggatatctcaaatgaatgtgtttgtgataatgtctacgttgtaacgttcattatgctgaaattgctgtaattttttttttttttttttgtgatatgagctcattaagtgtagataatatatgcccaacatatattaattagtagttggaaaattgacatcacgtagagattgctatgatgaataatgaagtgtaattttgaaaaatagcagtgtacaagttcattaattaatgttactcaaatggttgat

SEQ ID NO: 73652 - DNA, 1192 bp, Cannabis sativa
  modified_base (843)..(844): a, c, t, g, unknown or other
aagaaaccaataatggtagtagagtactaatgggcaatgatgtttcttgcagggttgttagaattggtaaggtggctataaggcagttcaatgataaagtgaagattttgcataatgtgaggcgcattctagaattgagaaggaatctaatataacttggaaccttggaagatgaaggttatggctacaagtccttgaatgggagcctaaggatcacaaaaggttcaatgcttgtgatgaaaggaaagagagtacatgaatttgtatgtactcgagggtgaaactgtacctgtggctgaggtagatacagtaaaaggtttagaaagtgatctgcagatatggaatcaaaggctcggacatatgagtgaacaaggcatgaggaaattgcacaagaaaggagtcattgaaaagctttagacatgtgcattaccattctgtgagacttgtgtttatggcaagcaacacaagatcaagtttacagtagtgattcacaacacgaagacaatcctagagtatgtgcatgctgaccttggggggccaagtaaaatcccaatacattctgctaaacactacttcctatctattattgatgatttcaatagatgtgtttggacctacttacttaagaccaaagatgagtgtctagaacaatttaagatatggaaagctcgggtagaaaaaaaaacaaatttagaggttaaggcacttagaatcgataatggtctagaatccatcaacactgagtttgataaattgtgtaatgagcttcgatcatctcgttgtgactacaagtggattcactatatttgactagaaccgatcttggtcaaagttacttgttgnntacaaatcatcactatcaggtatcaatcgtcattgcaagtccgtttccataatgactgggggcattttaggaaggcatgtgcaattcattattcatccctaatcatcccggcatgactactacgggattcactatagttgactagaaccgatcttggtcaaagttactcgttggttacaaatcatcactatcgggtatcaatcattgttgaaagtctgttaccataatgactaggggaattttaggaacgcacgtgcaatcagttattcatccccgatcatcccggcgagactactagtggattcactatagttgactagaaccgatcttggtcaaagttactcgttg

SEQ ID NO: 73653 - DNA, 520 bp, Cannabis sativa
ttttttttgacaaaatacgaaaataattataaagtttgaatatttaataatattttttttccaaaaaaaaagaatatttaataatatttacgatgacaagtggcttgagttcaaaccagctaattggatccgaaatgggccggatcttggcccatttgcatgaaatgtgttaaataagagaaaatacaacacaatttttttatttttggaacagaaagtacaacacagttgttggtttacaccaaaaaatgaaaaaaaaaataaaaaaataaaaaaaatcacagttggtggtctatactctgtactatatagtctgtgttctatactatcaatataaatatatataaccctattaaatttcaacaaaaatatataaatatatatatgtaaccctaaaagaaggccaaaaatttaattaaaaaattcaacaaacatgtcaatgaaattaggataaattatacttttggttaagttatttacttaattatacttaatattaaattttacatattttaattta

SEQ ID NO: 73654 - DNA, 739 bp, Cannabis sativa
atcaaaatgagtgtactgatacaacttttgattgtttcggtatctacaagaattttttagtctaaattttttcacagtcgtgtacgttatagttatttaagacatcctgtaaaattttgagaaatttggaataatttacaatatagaaatcaatgtttaaaccgtctatttcacacgcgtataaaataaaaaagtcacgcgcgtaacaaactctttgaacactgtttacgacatattaaatttttatgaatttctcaaaattttgtcagatgtctgaaataactataatgtatacgaccataaaaaaaattagactaaataattttttagatatcgaaatagataagagtgcatcaatacacccatttttaagagggtgtattgtagatttttcctatatttttttttttttgagaacaaaaaatcttgtatattaaaagaggtttgtatatataaaaaagtatgatttttcttaggtgagagcatcacttttgctctcacctgtaaggacattttttaaacctttgatttttaatctaatgataatagtttgttgtagtttattcgttatcatgaggtagcaatatagaattattatttatttatttttaactcccctattttttagctatgatctaattttttttctttcactaaaatgatatatgatattatcattattttttgctaactttaatgagatgatgaagaacgaggcaggttggaactggtacaactg

SEQ ID NO: 73655 - DNA, 1083 bp, Cannabis sativa
aatggcaagaagattagggaccaggggcagtcctcgggcaccaagattggaaacggatttcaggtactttctgagtgtgcagacatggaaataacagtagatgtagtaggtctaaaggtgcagaatgatgactatgataatgctaatacaagagaggaggggaccctctcttggtaatggataagatcattgtgtggaatgttcggggagccaacaaccagcaaaaatagcaactaataaagcagtttattaggggtcaaaatgctggttttgtttgttgggcttctttctctctcgaacgaaacaagggtgggtcaaggttcacaaacttggaaccttgtacctaaatgttttcaatggatggtgtggcgtcaaatatagcatggcatcaaggagggaaaattgtgatagcatgggatcctactaagtttgttgtagatattttcaagtgcaccagtcaactaatgcacttgaagatagctgcagcagatggaagatttgattgttttcttactgttgtatatggagcaaatataaaattttaggtttcaaattttttcttttttcaattttaattttttaaaaatattttaaatgatttttaaatatatattttttattttaaataagtttaatgaatttttatatatatatatttttattttagagaagttatgtgctcttaggaaggtttaactcctgaaaactttgtgtgcactttctctacaattttgtctttaattattgaacttcttatggatttttcaggctgtgttttctctctcaattcaaagtgtaatatatagcatcctttagcaatgtccctccccgtagagagtgtttgtccctccccgtagagtgttttgtgtttggttcgtattgattgtttttgctgtgtttttttcctgatctgtaatggcatcttccagtcgagaagactattccctatctaaaaaatggggcagatatatgccttgaggatgaagaagaacatgtagtctcattggcagatgattgtgaagaagaggaagatttgaattttgatgataggtggtgtttagtgggaagattgttatctgggaa

SEQ ID NO: 73656 - DNA, 1662 bp, Cannabis sativa
ttattgttatcacttttaaaatattaccgtatattatctatgatcatgtaacgccctgtcccacagagacgccacgtgtgtacttttacaaacttatttttaaactatttttattaatttacgaaaagtgtggtgtaattaaaacttttaatcaaaataaaaacataacttttataaaagctaagccactgttaagtatagggatcccctgtataaaaacttttacatttgttccaaaaactagtattacaatatcggattacactttcaaaatacaataaaaagggtggatcatgtccactggaagccgaggtatcgcagttgatatgtacatcgctggaaaacctctaactcatggttggtccaccttccccttccctttacctgcaccacgaagcacccgtgagtcatagagacttagcaagaaaagctattaaatcacacgcaatataaaatgcaagtaataacatcatgatataacaaacatactcatcatacaacatatattcaacaatgcataatcaattaaacgtctataagatgagacaatctcagtccctcataaagtacccttaccactcgttatccacgagctatttatgccactattcttacccggtaaaaaaacgataagtaagaaacctatctgcagttttaagcgagtgattactcataacggtaatgaccgtatctaattctcgatcataatcgagtcacaacaataacaatcattactgcaatcataatcgaggcatcaacgataataatcacttcttatctgacatacttatcggtgcttaaagcttttcttacttcagtccagtaaccaggcatgcgggctgacctgattggaactacgctcgacgatcccgggtcctatgtcaccataacgaagctcgataaataacttcgtaaaaaacttcgggaacaacctttcataactggacataactaactctcacaatttcaaaacagctcaaacaccactaaaatcactcaatctaaactcttaaaaacaccccgagaaaaatcggtttcgaggttaaaaaccagagtttccttgctggcaaaactagctgagcggtttcactatacctgtcaaaccgattaactagtttctcagctgcagaaaagaaaaaactcaggtttttgcatcaaaacctaaccaaatcaccatgaaacctgctcaaactctccacaatagtccaaaatcataaaaacagtatatacaatcaaacaatccacaacaattcatcaatttgaacaaaataccataatcaagtaaaattaaactcactaaacttcatccaaaccaattcaagtcaaatagccactaaaatcactcaatccaaactcatacaaatcctaaaacaaacttaaaaacataatctaacctcaatttaacatctctatccttaaatcttaaaaccctaacacaaaactaactttaaattgaaaaattcttaaacaacatagtaagaaatagggttatacaaaaaaaaagtttaaaccgcccaaactgaaccgaaaaaaccgataaataacaaaccgaaataacccaaaaaaaaaatacaacccgcccaatctgttaattgggcgggttgaaaataggtccaacccgcccaattaaaccaaataacccgaccaacccgactttggctt

SEQ ID NO: 73657 - DNA, 903 bp, Cannabis sativa
gtccacgtattttgggcaaaatcagaggcaacaccgaaataaacaggggatctacaagtaaaacgatttatattaactttcacaagaaatcagtttcataaatcaataaaagttacataatgacaaatagaaaccagttcttcaataaaaaactacatatgttattatgtagaaatcaattttattgatttatggaactgttccctatgtcttattatgacaattttatttgtatatgactttcattatatttgttagttactttcatctgtataagaacaaccagaaatcaattcataaatcaatataatttacataatgatacatagaaacaagtttctttaagaaaaaattacttattttattatgtagaatccagtttcattgatttatgtaactggtttttatgtttcattatgtaatttttatttgtatatgactttcattctatttatttttaacttatttttaatttagttagtgatttgagattttaacatttaatttgttatagttttgtatgagttcacaagtattgttatggtttcataggttttgttatgatttttcatatggtcaaaactagtttcacagggttaacaagttttaaactcgtttcgaagttagtttaaccgtgttcaacggtttgaaattgattttattgggttcacagtttcaaaactgatttcacatgttttgagggatctgtaatgggatagctccattttatgatgttattgtataatttgattttaagtttctttttttattattttgtttctaggttcgaaactggttttcacatttatattttatttttagattattgatatatattgtgtgatgttttgattatatttgtgattaaatttttatttttgtatgtgtgtgtgtggttttttt

SEQ ID NO: 73658 - DNA, 932 bp, Cannabis sativa
atataattcaaagtcatacaccacaacctagcaagttctaaaataggacattaaaacacataaaacatgcatcaaactcaaaccatatacccctcaaagttcagatttaacatctagactaaactccaacccaagagctcaatccataaaactcaaacaataaagacttgctcatccaagtcaaaatctcaagcttcaagcaaaataaattcaaagctataaatcatgtattataaacacaaaatatcactcaattaatcacactcaaagcttacccaaagcaaagatcaagagtttaagacaccacaagttcataacatcaaaatcaacccaatttccacaaacatgcaattcaataatttcaaagctcaaaacacaaatttcaacttctattttagctacaaattcaacatgaaaaaggggttaagaactacctcaatcacaacaccaagctaagctcaaaaacccaccaagaatccaagcttcaagatcaattttttaacacttaacaaattgaaaaatatggagataagagagagcgtgggggttcaactatggctgaaagaaaaccctagaattttctatttcattttctagaaattgttttaattcaaaatagcacatataccaaaaattacccaaatgcccataaggccaaataacatacatacatacactccaagagcaagaatgtccttaccacacacaaataaactcaattaattttcaaattattcccacataaataaaatgccaataattaatccccaaattatatttagccccgaacccggttcagcacgaaatacccggttgtgactattccgcgccgaattgtcaaaacacaccagaaaaaggacaaaacatgtatactatataatgatatagtccataagcacgtaaataaattaaattcacagttttacccttct

SEQ ID NO: 73659 - DNA, 1173 bp, Cannabis sativa
caaaatagagatctgaaaaaataattgataaaaataattaaaactcatcatataattataaacggaaactgtaagaatatagtaccaaaacttttaaaatagtaggcgacaaatttataagagactatatatattgatattttcttaattgatttttatatagatattttaagtttttaattatttttataaattcttaaattacacgattaataagctttgatttgagatacaatcaaatttagtgctagttttaatagttatgatttaaaattgtatataaatatttttttattaattttaattgagagaattagataagactatgttgagtgatttttaattgtatatagatagatagattttttaatttttaatttttttgaaacttagttgttagatatttataaagttttaaaaaaaaaaattactacgttttttatttaaaaaattttaaaaataaaaaaatataattaaaaaatgagaaaaaagataaataagttttaaataattagaaaaatattagaaaatagataaataagttttaaataattagaaaaaatgagaaaatagataaacaagttttaaactattttagagcgacacgtcatcgtcttatacttctcctttatagatatataataataataataataataataataaagttataaaatgaggaatgagaggattagttttatctattctctcatttttctaattatttcattttatgttatttaattagagataaaaaaaaagtatataactgtaaacaattactaataaataaatatatgtattaaaaaaaatatggagaatcaccctttgcacggtatttcttagtttattttttgtttttgcgtgatttattacgttagtttatttatatatatatatttatttttctagttttgcattaataataattgtacattttattaatacgattttttatccaaacgtacattttttattcttgttaattatctttcatttctactttccacgtatatttattgggacaaagttttaatacatggatcaaattttgatcaaatagaatatataatatccttttattgactattttttaaataattaaaacaatagactaactaatttatgagataaactgtaacaatcataaaaactaaaaataaagaagaaaaa

SEQ ID NO: 73660 - DNA, 653 bp, Cannabis sativa
ctaaattaataacagtgagtattagcgacaagacatcgcaataactggctagaggatgggacaattggggcctacgccgtatgcactacaattttggaggtctccaaaaatttaaatttatatatattatataaatatatatatatatgaaaataaaatataacatataaatcttagttcagtatatattgcataaaaaattatagcaaaattggttaattaaaatacatattttggtgatggggtgcaatgttcgatcctcattgtattcacttttattttccttttttttaaattcaaggattttcaatgagagttttttcagttttaaccaaaaaatgtaacaatattacaaaaatactttcagtcggccgaataaacaaatatacggaccaaataaaaaattacacaaataccacttacacacaccttcaacccacaatccatgttttttgggattaaaattttcgtctgatatgcaatcttcgggtaaccacccagcaacccaagtcaactaaaataaaatctaaccacaaagagaaccaccattaattatggtgatttcacctgagaagacaattggaatcaatcaaaacatggtctgttttgaattcatgaaaaaaaaagtacagaaaaactactatgaaactaaa

SEQ ID NO: 73661 - DNA, 857 bp, Cannabis sativa
ctttgaggctcatttgaatgttattttatggcttgccaggattgtaggccttgttaatgctaactggatgaagccataggaagtcttcccatagggagacgggcacctcgcttacttggttttgaaccgagacgactgttgcacttagtttttactctaagggctttcacaattgatatatgtcactttcaccttccaatgtgttctgtccttgatgtctcactattcgcattcaatgatatgatttcttgctaatatactaagtgtcaatttatacattgattcctcgcctatgaccttacagtcagcacgttataaatgtaataatgagttattccataaaaagtaattgcaccgattcacattccctttaccctgacatatgtccttcattgaggtggcaaccgaattttgggtataacaatttccccttaaaaagttcttttttagtaaaaaagagctttttaataattacagaggccattttcgctaaaatcctttcttggaaaaaatgcatctttcgattctagcggttgtacgattttgaggatcattataaatcgtctattcatattctgcccgacatccaaccgttagatttcccaatccttagctttcttgtcactaaactttgtgtataaaaggccggctcaagctggtcattttttacaaacctctgagatccatttttaagaattccatctttttccttggctagaatggtccttttctgagttcaaaagttcatccttccaaactgataataaccagatgtaccaaccactttccatttgttcccacagacttcaagtctcaattgaagccgaaaatgatggattccaaggctggggagcttc

SEQ ID NO: 73662 - DNA, 719 bp, Cannabis sativa
ttgtcgaagaagaaaatagatcgccaaatccagtatcattggtccctctaacatcactaggaccactagcatcattggtccctctatcatcactagctcttctagcatcactagggcctctagcattactcgttccatctggacgactactactagtaccacgtgtttagcgattttctctacggggtattcttttttgtgtcggttgcttgggtggtatatggtacgatagtggagtcaagttcaaagctataacagcaaaggcctctgtatcttggtcctctcttacatcatcattgccctcaacatatcatttaaggtcggaccatcaccaaaaccatcaataaagggcatttgtgctacaatgtcatttgtcggcatcataagatttagttcaggtaaaacagcggctgccaacacctctggatttattttggagcgaaactcccaacctcgctacgagtatccttaatagtacttggtgtgggactaggattgatacagaaattcttcttcaccaaagttacaaataagagagtaaattaatctagctttttcacaagcataggcaaaaattaccttacacgcttatcatttccaataacttcaggtcaatacattaaaccgttcatgtacttgtaatttacttctaatttcaagtcataatgtactttgtcaacatcaagttcttcgtacaaaagatcaaccaaatgtgagta

SEQ ID NO: 73663 - DNA, 980 bp, Cannabis sativa
tcgaagcagcccctgttttgagtgattctggtcgtcttctcaggtgaaatcgccgaaattaatggtggttctctttctggttgaattttcgtttcggttgcgttgggttgtagttgtgtgatagttgcttaggaagcatggatcctgggttgaaggtgtgtaagtggtatttgtgtaattatttttatttcgacttagccagctgaaagtatttttgtaatatttttacttttttttttttagttaaaactgaaaaagccctttttattttgtgttgaatttgtaacatttggttgttttgtctatttattttaatggattttttgttctatttattacttggtaatgttgttgttttacttattttagttgcattagtaacaataatattttttatagagtattaagcttaaataaaggatgatatttagtttttatgtatcttttattatatttttatgtcaatattaaaaattaagtgtgtgattggatatctaagtaaaaaaaattgatccattccaattagtaattgaattggattgaattggattagattttgaggtctaattggattagatctgataatgattttctaaatccaattactaattggattggatcgggtgaagagaaaaatattagattggatgaatgcctaaccttaaagagtattaatactcaaatatttttttttaaaaaaaatttaaatttcattactatttcgataatatattaattgatataagtctaactaatatatttcggggaggtttgccatgagaaatttatgataatttaattaattaaaatattataatgtggaggatatgatcaaaggcgaaaccacaagcatctctaatagtattctttttttttagctaaaatagagctatttttatcatggtggtcccaatcatactccctactttatgtaacaccttactaatttaggcgtgatatcgtgattttatattaactgt

SEQ ID NO: 73664 - DNA, 1005 bp, Cannabis sativa
atcaaaaaccaaatctattccaacactgtttataatctataataagccacaaatagtttactttaaattttctgaataatctaggtactttctataattaaatttagaaataatataaataatttatgaaaaatacaaaatcgacaaaatatctaatctatcaaatttgtaacagtttataatgcataaccaatcatagaaaataaacttatatttttctaaccaacctaagtttttttcataattaaattaagaaataacacaaataattcatgaaaaataaaaaattaaccgaaattaaaatctaccaattttgaaatagtttatatctaataaataataatataaaataaatttagatttttctgagtaatctaagtatttttcctaattaatttaaaaaaactaattcatattgcaagaaaattatgaaactttaccaaacaccctaaaataatctgtagaatcgaaatctacaaaaaaaaatatgagaaaaccacctcagatatgcccatatcgtttcgccggagttacgccagcgagcccctcctctccgacgacggcgagcctccaattccctacatagttgcttttcacgcattgttttgattggtgaagcttcctacagtgcccagaacgtcaagcagaccttaaatcactaaataatacggcccaacattgttgtcttcttcgttgttgtgtaccgttaaaaatggagtccaacgattttcgttcaaggccttaaagctctcattcttcacgtccaaatgccttctaggagtccctttagcttaaacacaatcttattttaacccagaaatgactcatacacgttcaaatccgagatggctcaagaacgtgcttgaacgtgcatgagaatggtggatttcgaaagttgttgtcttagcccgtttcgtcatgaccattagcttccttagatcgtgtagaagctattcaaaacgatccaacaaacccaaaaactctctaagtgtttcaaaatcaaaa

SEQ ID NO: 73665 - DNA, 805 bp, Cannabis sativa
ggaccgccacaagtgaaaagccacgttacaagaaaggaacatgtgttccatagtttcaacctcaattccacaaaggggcaactgtcatccccaattggaaaccctttactaatcactgaacgaacagggagagttttggacaggatacaccaccaaagaatcttgagccgctctgggactttactattccacaactttctccaaatggacggggcgacctcgcattgagtcgctctttcaatagcatgggccctataagctgatttgtaagagaaacgaccattactttgtaaagtctaaacccagctatccttcccttggccagtcggattgcctcctttcaagattgccgaaatagtctcatgatcgaacatactgttgagttttttaatattccatcctccattgtctaacagtagctctgccactttaattgcaccataagtagtgggtcctctagggtgagggatgaaacctttcctgtgctctatccacagatcgtcccatatattggtgtcctgaccatcaaccactagtttgcaggcacccttacgaatgatggctctcgttttaaccacattcttccaaaaccacgagtcagagtctttataattacagtcaagaaaggactttcctttaagatacttggctttggcttccaatattcgacaacataaggattggttacccgtcagaaggttccacccccatttagccaggaaggcctgattcatctctctagtttttcagaagcccaaaccccctaaagacttggggagatatagtttgtcctaggcttttaggt

SEQ ID NO: 73666 - DNA, 1129 bp, Cannabis sativa
tagtgtaattaagtttttatgccatatatatcacaatatatcattattttcccatatttttgtaaatagtccttttgtttcatttacttatgtctcaattgtgtaatttcacaatattaaaaggtaaatgttctatcatccaggtttcacatgacttcaacactaatgatcaaatcgataactacatgccactttctcaactagatttgtcattctccaccacattgtttaatcttaaccatgaaatatattttcctatattttttttattaaattattgtacaaagaagtatttttatagatgtatgatattatatttatgtttttacaggttggtttgacacatgaaaattcaaatatgagaacaagtacgactagattactcttataggtatattagttttatcaacaattataaatgatacaatttattttaaccatttcttataagattataattgcacatcgacaagttaatcagtctacatctactgaattaggagggactcaatttttcaagaatgcaattttacttggtggattttcaattttataaaaatctctaaaaaaaatttttagagaaaaaatcactaaaagtttggtagaaatgtttgaaatttaatttatataattggaattacataatatgttatgttttttttttctttttatatataaagaatatcatatcaatcatcaatatatatataaaagaatgccaaaagaattccacatggcaccttaattgtcattatctcctaatctctttacttctaattttttttaatttaatcttaatttgctcatttatatttttcactttccatatatacattaattaatgggccttaatgattacaatatcattatatacatttttaactttctatatattggttgtttttaatggacctatatgattacaatttcatttccttcaatttctttagggtgaaagaagtgagaaataaacaaaataattcattcttttccttaacgaacgaaaatattgagagaggtgaaggatttcattctttttttagggtttcagaagagagaaataataaaaaaaaaaaaaagggtattttacataaatgtatacattttcttaattaattacaaaaaatgt

SEQ ID NO: 73667 - DNA, 735 bp, Cannabis sativa
tactactactcatgatgatgatgatcatattgaagacaaaatcccctttcacctttttatttctctctgcaatcttcttcttcttcttcttggttaacattctcatctttaattttatatatgtgtatattttatatgatgatgatagtatgaaattaataagcaaatgtattgtactgataaatcaagcttattgtgtagataaaatcggtccaacaatggctgtcttgagacaagatattcatcagaatattcaggtaagaattacatttatgtatatatataaatatatatatatatactataaattttccaattaatcaaatggggttttgatttctttgcatgtttttgttctgtctaattaattaatccaatgattgctaagtatgtttgttggttatgttttgtatatatattaataatgttaaatatatatttaattatgatgttttttttcattatttatgttatattttcaattatatatatgtgtaattaacatgcatataattaatatggaatatatatgtagagactggaaatggttcatgagactgattcttcaacatattccaatttggttgagattttgaagaaagaagttgctcaaggaaatgcaaagaaacctaacagctgtactagagcattgctctggcttactaggtagcattatattgtaattaaacatttatatatatttctatattgcagtttacacatgcatatttatga

SEQ ID NO: 73668 - DNA, 869 bp, Cannabis sativa
tattattaagaattacacaaaaggtaaaactaatgagtaaagaaactaaattattcaaactaatacgctgaatgattttaattaaagatttgcaaaaaaatatatattattaaaactgtatatatattatgtaataatgaatttgtgaatcaaattatcataaagtatttcatgatttcaattttaacattatttaatggtatttattttattttataaataatcttttacttcattttggaatattaattggatatatgacaagactcaatacttcaattctgttttttttttttttctgaaggaacaaacgttctattaagcaaaagcaaaagtgggaatcacaggaggagttccctccccttgaaaaactttagcaatttcactagaaactctagcttttcttgccaaaccatccacaaaagttaagttacacctattagtataaataaaattgcaaacattaaaagtcttaattgaatctaaaatacttaaagaaatacttaaaagcttccagttatagatttttcttctctgttggaaagcatggactgcaacagccgaatccgacaccacacaaatctgcgaccaacttctatctacggcccaagatagagccatttgaattgctttaacttcagcttctaagggggaggttgcaggtgattgttgcagcatgtatgaccaatggccactcctcaagtctaccataactgcagcaagacctgctacttcactttgccaagaggcatctgtcatcagcaacacagcagcatccgaaggtatattcccctccatattgagattgtcttcaagacctcccaaccgttcacctgtaaactgaggcaattccaccatttcgagccatt

SEQ ID NO: 73669 - DNA, 812 bp, Cannabis sativa
cctaccacttggcccataggtggaacatgtgaccgcggattggcggctgacctttaagagtttaggtggtatgctcaaccggaatttcttccatgccgcccaacgcgatgctggatgttgcggctagttgcttgtaagaaacttgataggctttttgtaccagtacggtagcctgtcttgttcggtcatcgatgggttcctgttgagccttcaacatttccatctccctatctctccattcaacaaactgacacctctgcccttcgaacgcaaggtttattatagcacaaagctcaacctgatcatgatgcaaggtattattatgaccctgcatgagtgtaagatcattgcggaggttcaggatctcagtatcatctcctatggtcgtctgagcattggttgagaatgggattcctgtactgggagtaccttaatcggttgtcgaactggtgtttccagtctcttgtacatcgggtgtgatcccaacaagaggagatgtcacaccttgacccacagcagctggttgcgtgcttggttgctcaggattggtaactggtgggacccttgtatttgtaggagtctacagtgtaggatctaccaacagtggagcaacctaatcaaccacgcctctgtgagtttgcactatcattttgtgtgtctgataaaacttaatgcaaagagcagacttggattattgctctcaatgaaagcacgaaaatgttaacatcgcttttagccaacaacaaggagtcaattaataagcgataagaaatgtaatcaagataaggtaagaattagtaaacagtaaagaa

SEQ ID NO: 73670 - DNA, 762 bp, Cannabis sativa
gagagtaaatgctttttactggcttatgtgatctgatcattatttatttaccactttccattttagatagtatgcaagcatctagagtatttatgtgatatgtgatgccatacttagaatgatagatgttaagtgtttatttttatggagtaaatagttgagttagggtttaagacaataagtgcatagtgtggtattggtgcttgactcgccgaggttgttgattactgggctgtttgtaaaatggaccttccataattatctagaccacagggcgatctagtagagcctggtgtagaccagaccaatccaccggcatcgcctgcagctccacaagatctaggggataatacggaggttggaaatgctaatccacctgctgattggcagcagatgtttcaagaaatgcgaggtgtcatacttcgtcaagaggaagaattacgtcggttaaggtaaccggcactggctgcaacctgtaactttttgggaggtacagacataattaaagtttagtagtggatgagtacaatcacccgtatccttgataatatgggggtgatgggagcagagaaagtaaactgttctactttcatgttacaagatcatgcccgcattcagtgggatatagtgggacagactcgagataaaagtatgataacttggaaaaagttgaagagtctatttgaggaaaaatttataacattgctgtgaggattgaatgccacaatcagtcagacgtgatgattaccactgctcatgata

SEQ ID NO: 73671 - DNA, 654 bp, Cannabis sativa
gctagggcttttcaatgttatgaaaaatgttctaatcgatgcttttataagattatctgaaattaagttttgcaatatatatctagaaacctgtttttttattaatttttttttataaattgtcacaacccgggttctatatagtccgtgaaagatatgtaatatttgtaaatatttgattaaatatcacattctgagtactcttgttaaaaaataaagcttataagtgattttttgatttaattaataaaattacatatttaaaattaaagtaagatccaacaaaaaaaatgtaatgttattaaattagtggatgcatccacatgactatattaaattttccttctcagcttttcctttcctcacaaactagggctgcacatggatcgggtttttggattttcgggtcttcggggttcgggtcttggaaatgcacaaccgaactcggttttcgggtgttcggatgtgtcgggtatcgggtcgggctcttcgagtttggcatagtcgggttcgggtcctattgggctgagctcgaatgtgtaatttctgggttgaaatgaaatttaattttttaaaatacaatttttttttatttttaacattgttttgacctttcttttataattaatattttttggtgtgggtgagttggac

SEQ ID NO: 73672 - DNA, 1126 bp, Cannabis sativa
  modified_base (335)..(336): a, c, t, g, unknown or other
  modified_base (971)..(974): a, c, t, g, unknown or other
tcacgattgcgacaataagatagcatactttccatgttcttacccagataactaaagtcagccttcttgttgtttagccaaaatttgaagaaaacatcggtaaagaggttttcgatctgtttcacctccgcatctagcttctcacgctccttgacattaatttcattttcctcggcaggtttggcacgagcatccttctcgcttttaagctcacctctgagacgctccttcttagcagcaaccctctcaacagaagtttctaggtcatgaatcctctgggagtgttcttgacggaggacatcaagttcaagttggagtgaggctgctccttgctnnttgtgctcctcttgtagggcgagaaccctagattgaccataggaagtaatagtcgcagcctgtcacacatcataacatgtatgtttgataatggttaaaggaaagaatttttacaagtaggagaaacttactctgatcatctcgtagcacccaagagcaacgatctgggcaggggacaaacactcaagcttagacatggtcttgtccatgatatccatgaggccctcggtgtggctacgtgccactgtcaaactcgtggacaaagcctgacaacgaccctctaagggcagtgcagcaagtgactcggcccccgtggacgtctagccaatgaggattgtatcattggcggacccagatgcggagtcaggaggaggtagccgagatgagattggcgatccaacagtaggggtgtgaatatggacggtcaagcgagagttagtcttcctaaccttaccaggaggagccatgggagaggcgttatagggggacccctcttgctcctggtaggtcgtttttcgtaacaggctggccatatctacaaaacacacaaaaatgattagcaacatataataacacataaattaatgaagaaatgcaatacgaaagacaaatagcgatcatcaccaagagagtcnnnntccctaattggccttttcttagaagaccccggcatagtgcttttcgctatggctgtcagtgccagcatcggagatcccaaaggtcgtgggatttcccgtactccgctagaaggggtaacaacaaagtgttgcgttttatgccctaaataaaa

SEQ ID NO: 73673 - DNA, 906 bp, Cannabis sativa
  modified_base (27)..(31): a, c, t, g, unknown or other
actaatcagattgtaaagagttttatnnnnngcataaaacccaacacttttctctcaagatcacttgtatcttcgttatttctaaaaacaaaaaagatgcctagaacactttttctgagaaaatacttggaactcacctaggttgacaaaatgtcaacctgggcactacgcccaggcaccaggtcaacctaggtgttgggtccttgttttgcccaccaaatgcttctgtttgattcctaaaaaaacttgtatctcaattattagtgaaaacagatagtatgcccaaaagaatttttaggagaaatttttggaaatggcctaggttggcaatatgtcaaccagggcgctgagacctagaaccaggtcaacttgggcgttgggtccatgttctgattcccagatggctccgtttgtttcccaaaagtatccatatcttaattgtgtatgaagtagagaatatgcacggaagactttatctgaactactgttggaaatggatcaggttaacagcaagtcaacctggcactaggacctatcaccaagtcaacttgggcgatgggtcccagttttagactccaggttgatccgtttctttcctaaaatactagactccttgttttttatggagaaaaagaaaattctcagaatacatcttcaatattgtggttggaagcctcccaagttaacaatatgtcaacctggatgctgggggcatcacctgcaccaaccccttgattcagctcaacctgcacctgcacacatgtagctatagtttattagtattttagcattatgattttattatcatagacattttatttcatgttccgtatggcccattggccttttacttttgaacactacctatttccaaccttagggctttcatgttcgtactcttggcct

SEQ ID NO: 73674 - DNA, 730 bp, Cannabis sativa
gtaaaataatttccaacaccttattcattgcattcggcaaccaccaaaatatatcaagatttaaaaccctacttcttgtggtatgggatgcaaagagatgtggcagaattcgtgtccagtgcttaacctggcagcaaattaaagctaaacataaaaggccgacaaggttattgcaatcattagcccttcttgagtggaagtgggaggacagtgcaatagattttaaaactggttggccttgaaccacaggaatgtatgcttaagtatgggttatagtggatagattcataaaatcagctcactttctgccaatgaaagttacttatgtagtaggtcagtatgttgaactgtatgtaaaggagatagtttgtctccatggagctcctaaacccattgtttcgcacagagatccaaagtttacatcaacgttttgggtgagtcttcagaaagctatgggtacaaagctgaagtttaacacagttttccaccctcagatggatggtcaatcagaaagaataattcaaatactggaagatttactgcgagcctttgtcatggactttgagggttcctggagtaagtacttgcctctaattgaattctcctacaacaatagctacaagtgtacaatagggatggctccctatgagatgttgtaaggtaagttaaattcgtagagtaagcagaaaggttatgctgatccgaagcgcagagatgttacatttcaggc

SEQ ID NO: 73675 - DNA, 878 bp, Cannabis sativa
aacatacttgtgagtagatcgaagatcctggtaaaataatatccaacactatggtcaaaaaaatctaatatgtattttttccctatttttttgggcctccttcacctttaaaatgagagctcccttagcttatttttttacttacaaaaactacccacatggtcagagcttctctctctagaaattggagcttctaaaacttagcctttttcataataccatctcatgagaaataaaaccttgaaatagacatagctccatgactgtcgtgatagagggagtgaactactataaatttgttgtgtctctcttataattacttaacaactatttcattctcgccaacctagcaagcaggtgtggcttagaagtttagtctacaattctgagtcaacattttggtgctttcattgagagtcataacttaagaaagttactaacaagatggttgcaacacgctgtacaagtgttgatagaggaatcccaataattggccaattaaatgggggcacacccattgatggagttggaactggaactactcctacatcacaggtgtaagaacaggcctcagaaccagctcctcaactcttcttccaaggccaccaaatgctcttggggttggcactaacgaccagatcccacctggggagcctcacgtggagattgatgaccctgaggaggtcgatccttaggtcgccaactcagccaaattgtggctgacttgcaacaatagttgtgagactctcctgataatcaacatgaatagtttcaacactagttcgtggaaaactagaggaacattgaaagccaacgtgtggagcaggtataatggagagctaacttgtctcaatagattagagaagcttattgctcta

SEQ ID NO: 73676 - DNA, 907 bp, Cannabis sativa
aaagagcagttgacacctcatccatagttaatgtagtctttctaaccaaaagtgtagtcactagcgtctcatatgattttggcaaagaagccaacaaaataatagctttatcctcttcatcaattttgacatctacacttaacaattaagttatgcactttataaatctatttatatccctaacatcatctccttcaatcattttcaagtcacataatttcttcttcaaaatataatctatttgttagggattttgaaatataaagtttttctaaatttttccataactcagacggatataattatactttaatttaggacccaaacttaaacatatagtgcttatcgctttcgcctgcaactcctcccaatcttcatcagtcatactctcaagcttttttccttgcagtgcctttgggagcccttgttgtaccaacacatcttttaccatgttcttccataaactgaaattgttctttccattaaaaagctcgatcttaaattttgtggaagacatcatctttgacatgttttgtgtttatctaaacctttgctttgatattgtttacccaaaaacttttcttgatgacgtggatatcaatgtttgacacgtggcatgaaggatgacatcacggagttgagtagacctgagtcatagcagtcaacatgggaggggaccctagcctagagcccaagttgactctgggacctccaagatggatgtttggactttaataacttgaatccaactcattatctttcaatattctataccatgaacacaagttgcaacctaatacaatcccaaggagctgaaattacatgaacatgtagcccagaagccaacctgggcacctagggtttcactcggtgcccagcccaagttaacatcctcaattagggtttc

SEQ ID NO: 73677 - DNA, 942 bp, Cannabis sativa
ctaagaaaatttatcaagtttaaggagtcatattattgtgagtggtgacatttgagaaaataattttttaaattttcattgattcatagaaatgattataattattttagacatagtattatggtttgattggttgttgatttagggataatttttccatggacaaatcttattagaaatcctttttgtaattatttttcttatgtgaaaaaaaaaaaaacaaacaaacaacaacaacaataagagcaacatttctatcattctctctaaatatgttggcacttgtttcaaaaaaaaaagtttgtatcatttaattttttattcgttatgatcctaaaataaatgtaaaagattctttattctccttcagaaattccaaaaatattggtttgtggtaatatttatggtggtttgtccaaataattcataacctatctttgtatcaatgattatttaactgtttgtactaaaattgatttatccattcatgtggtcactttttaatttcaacttaacgagtgaaattcttagccacatataaatacatgcaatgacctgtgagattagtagagttgagacttttacttggtatatttgtttcaaaagcctttatgtgctacgatttgtaataagaaggtttagttttggtgcacacactcacaactctaaatttatttaaaattatttttatagctcttattggactgtttctaatattttgttttaatagttgtgtgatttttagaatttttgacaaaaaaaaaattatgttgacattattatttttttttttttgcttgaatttcttaaaactaattatatgctgggattgtaattaatgttcaaatttatatattttagggcttttttttcagttttaatcaaaaaaggtaacaatattacaaaaatgcttctagctgaccaaataaacaaatatacagc

SEQ ID NO: 73678 - DNA, 1737 bp, Cannabis sativa
  modified_base (1466)..(1472): a, c, t, g, unknown or other
ttatattgacaaatcttttaagtaacaaaaacagtttgttatagttgtcattaaccaaaaaaaattatactattaattgtaataatataacttaactaacactattgtttgtttaacatgcaagtgataattttcaatatataaataaaaaagtaatgttacgagataccaacaaattatattatatattagatctattgttcttactcaactatttttatgttttaatcttataatattacattacgcaccaaaaattagaccacttttattgtgttataatctgtcaagattctgtcgacaacccatcgataatcaattgatattcaagggataataaataaaaaaaaaacaaaattacaattcggttgtaatgcttcaactatcgagaacttgtcaagaacatatcgataacgcagactttaacatgtcaagaaacaaaagctaaatcttaatcgataatctatcaacaactcgtcaataattaatcgatattcaaacaataatcaataaaaataacaaaattataatttttttggcaatgcttcaactatcgataacatatcgataacatatcgacaaccctttaataatagctaaacttaatgactatcaccaaaagctaaatcttatcgacaactcgtcgataatcaatcgacatttaaatgagaatcaatgaaaaaaattacaattttttcaatgtctcagctatcaaaaacatgtcgataacatatcgataacacatcgataatatctaaacttaatgacccccaccaaaacatgtcgataatctatcaagagtccgtcgataaataatcaagaacataaatcgtttttatttttcccaaccaacaccattgaattagaaaataccatcaccaccattccaaactgaccaaattttcagaataacccctcgagaaaggtcatccctcaccttgggacatccgtgccgagaacctatcgagaacgtatcaagaaccagtcgagaaagatcatccctaacattgagacaatggtgtcaagaacccatcgagaacgtgtcgagaacccatcgagaaaaatacgaacagacaaaatactctaaataacgagatctcacgatttctgtaaaatttatatcaaaagcaaacaaacaaacaacaaccacatagatttaacgaaatatatactatacatggtgtaatgccctcactattaggcacgttaccgacgataacgaagaaaccctaatcccctaacctgattactaaacagaaaaaggcgggaaatttaaactttaaatgcaaatcgaatgaaaataaacttgtaataattttaactttacaaacaaacaaatgttacatgtctcggaatcccaaaaacaatttacaaaatattacaagtctgtttacaatagccgacctaagcggcaaaacagagtaacaaaaaaaatcatcactgatagaccccaacccgcttggtcnnnnnnngcccgaacatgtacatacatcacccacctcccctgctcatggctgatcagaaacagatttaccctttccttcacagtagagcacccgtgagccaagccttgcaagacagtaaaatatatcgataatcacatataactcatcacataaataataatgccatttcatattgacccgcgatttacgctcacacgcctatttatgtctatgtgtcatagacctacgtgttactctcacacgtctaattacaataaggccttagaacggt

SEQ ID NO: 73679 - DNA, 1332 bp, Cannabis sativa
taatcaaaatgtgatgagacattgttgattagttatttgattttgaactcaaattcaaaatcaattttttctatttgcaaatgcaaaaattttgacatattttggtgtcaaattttagtgaaaataatttcaagaatgaaattaaatttaagagaaattataaagacaaagtggtcttctatatttcaaaatcaagatattatcttgatagtgaaatgtgaaagtgttggggtgcatactcgaatatgaaaatttgagacatgcttggtgtcttaaaataaagtgtaatttagacacgtttgatgtccaaattagtgtttaattttgatatgcttggtataaaaattattgagaatttcagttgtgtgaaaatttatcttttatgattaagttttcaaagcttaagtatacttaaggagaaaagtggtcatgtaataatggacactagttttggctagcaagattcgcttggaatcgaaaagtgtgtggttataacaaattgcttaatctccgtacaagattaaagcatgaattttcgagggatgggacctaaacttccttaaagttttactcattgatggtaacctatcttaacaatagtaaaaatctagtcttaagttcaataaataataacaagtcaatatagtggaaaaatactactcaacttgtccgtcctatgaaagagtactaatggtaaaatttggagggtttaacccgaaaggttttataatggaatgatgtgtctaaagagaagttgtgagacactaatttccacctatatggactagaggtggtacagcctcttatgagaattgggagttattctatagagagtccatgaaatggatgtttcacatggccattaacggtgcacaagcgagatataatgaggtctcaagtgaactctagcaaggatatgtgtgttatcaccaatttgtattaaaagaatagtggttcaatgctatgacaaccaaaatttcaaaaaaatttgtggtaactacactaaggtaaaattcaagtcgaaagacatttcactttatgtatctaagcaagatctctataaatcaaagtgggggatatatgtaatatttgatcgattaaataatgttacaatagtgtgttacaaattttaatcgagtaggagaacgttatattatttgttataatataatatagattaaaatatttaaaggtgatatattatatattaatatgagattagtatatattatacgttggaggttatattatatcatatatatagtataataatacacataaaagttgtaacatatgagaagttactgttggaatatgttttaccaagatcta

SEQ ID NO: 73680 - DNA, 888 bp, Cannabis sativa
  modified_base (840)..(843): a, c, t, g, unknown or other
gtttaagtcgcttatacggacatcttgtaataagtcgacaacctaaggcatgccagtccatatcggattattgaggttgttaggtcatctggacgagctcgtagagtaaggaattgatctttacaattggcaggaggatctcgaaagtcctcgcatatatctcagtatatgtgagtcttaaactattccttggtcctattctatgcgagccatatgaatgcgactagactctatcctagccacatcgtctcgctgagtttggttcaggtgaggttcatactcaagaggtctctcactgacaactcagctctcctcgaggagagtgagtacacgtgtcattttcataggagtctggtctcgagtttctagttgaggaaatcttactataacatcaagaatcatagcaaaagccaaaatcgaatcttttctataataaagtcacacattacacatttcaaaattgtcatgatgatcaatataccaaagagattacaaattcacatgtgaatcgaaaagtttccaaaagcttaaaaagattgtaacttgttaatgacaggtacaaagaagagatatccaagaagagaagatgagatgtatataaagagagaatataaaatatccaaaagcatggaaggaaaaaagccagcacttggctagataaggttgctcaatagagactactataaacaaggcgatggctagaaagtccctatctgactagacgtacgaacagggactttgggggtaaatgttattccaaattttgtccacctgacatggcatgtccacgtaaggcgaagatagagtacagctggagtacatgttggaatttattttacnnnnatcttagatctactcacaaggatgttgtttaacaccctaaatatg

SEQ ID NO: 73681 - DNA, 1189 bp, Cannabis sativa
ccataaaatggcagcggctactgggtttaaaaactcagaaaacccaattcccagccacgaaaatgcatcgaaaaacacaatttttatgctaaaccagctcacaatcatagtaaagtttcacctagcataaatcaaataaatagaaaagaattacacctaattcactctccaacaacaccaaaaaatcagcaacaaaaatcagcccaaacacacaaccatttcaaccaaaactctcaaaccatcaaataggttttcagtaactatacggagcgtaagcatacaatttcatacattaaaacccaacaatattaaccctaaaaaatcaggtttaaacatgctcagccagaagcacactcaagagcaaaacttcacaacatgcaaactcaaaaactaaaagtttcccacatgttttaccatcaattaacaacaacaattagggataaaaatcatatttcacaacttggaaaatcaaccctaaaaatttctaacaacataagtgcaaaatccataaattaaacaagttcaagttacaaagcccaaaaacattactctcaataaattttagcaagagaaattaaatttaaaatagtaataagtacctcaaattatagcaaagaacaatccccaacacctccaattccaagctccaaaagttagtaaaattcaagcttgaatccaagctatttcaagcaaaatcacaactttgggaagatgagtttaaggagagagatggaggggtcggttggtggagtaaaaactagaaaaataattccaattttactcaaaaatgctttttgtttcaaataaaccaattatggaaaaattacaaaaatgcccctagggcaacataacactcatttaggcatacaagggcaattaagtcaattacatcacataccacatattctattaatttttagatttctcacatataaataaaatgccaataagcacatattaaattaaaattacagttttacccttctcgagtcaaaattactaaaatgcccctggctcacgtacggggtcttagcatgtcatatttcatattaattcacatataataaattatataataatataatgccatgataatacacaattaactagatagggtttgctaatcaattttcttaattggatctttttcgcggatcgggtcggggccccgacccgacggggcagtccc

SEQ ID NO: 73682 - DNA, 1735 bp, Cannabis sativa
ggttacaaactagcacaaaatggcttagtttttccatctgtaaggccgtacatttcataaaattactaaattatttacaagccttaaaatgtagaaaaactaaaatgttgcttttgtttataaacataaaatattttatatttaagctcggtttgaactaaaaaatataatgattaataaataaaattaatacaatttataatttaataacacttaataaaataaatagagcgtgccctagaccaccctcaattatatggccctcaacaattacacacacaagcctctaatgtctcactcgccaccgactttctaacttttacaaccttaatttgtacatggtaagtttgataagggtgagctactaaacttaataaggaaatgcttgtcacgtagtcacataaaataaacataaatataactaaaacttagatgtacatgtttagagaactaacgatatatataagcttaatcttgtcactagcaactaataactagtttctaagtcacattataattgttacgtccgagtccaactttagaaaatgagctattggactaaatggtggaggggttgggttcagtaaaattatacccactactaaatagccccctatttatcatatagacccaacagtatttaaccattatcttctaatatatctaatttaaaactactatacattatttaaatatgaaatcataattatactaaaccatatcataaccatatcatagtcatatcataaccatagcataactatatcattgtttaaataatgcgaatcctttgtaccggccattatccaaacaacataactagtttaaataatgtgaatctgttgtaacgactattattcaaactacttatacatatctatagtttagataatacgaatctattgtatcgttcattattcaaaccgtatacaacatatatatctattgtttaaataatgcgaactcatcgtaccgtctattattcaaacaacatagtataataatgaacaactaaaaataggttagaagtcttatacctcattctcactccttttgtacattatttcatacaaaaaacttaaaagtttatgtttaatttccttaattactttgaatgtggagatttgaactttgattgcaggagtgacactgagaattattgtatgctttattcaatactcacgaagtccttagtcctcaaagagaaatataggctagtctatgagaaatatattagagctcaaaatcttacaatccttctctatgtttcagccaccatgtgcaacccactaaaattgtgatcatagtatcacataaagaaacattagagtttgagcctgaacataaaagaataacgatcttatatataaccttaaaaaaataagattggagtttagatttaacaacttacaatcaccctatgataaccaaataaaaaagtgatataatgatggtaatggtgaaacaatcaccgacgtctcaactaaagaatatggttacaagttgatgataacaaatggtgatataaggtggtataggaggtgattgttgtatatatatatatattagaaaagaactcaaggttcaaccttacggtgtggaggatggaaattagatagagcttgaatgataacaatggtggtggtgatgaaaagataatattggatgatgaatatggggcactggttaagagagctagattttatctttagtgttgaatatgagtgagaaatga

SEQ ID NO: 73683 - DNA, 858 bp, Cannabis sativa
atatccggaaatatctcagaaagtttggagcaaatcagcttggttatacatttgtatagagtattgcagcacacaataggtctatagtcatttgcatctttgggactatttgttttgggaacaagagatatttatcgtttcattgagcatgttaggcatcaccccatcttgaaagagctccaacactccttgggtaacatcttccccaatctcattccaaagccccttaaagaatcccgaaccatacccatctggaccagggctcttggaagaatggatatcaaacatagcctttttaacttcaactttcgtgaaaggtcttatgagccttacatgctgctggatgtcaaggatcttaccctgagcaagaatagtctgatctaatcttttggttgctaaactccctttccccataaagtttttaaaatggtttacgaagtgctcaacgagcttcggatagtcttcaataacttcttcattcctgcagtaggataggatcctgttttcttgtcttctttttttcaaagaggcatgaaagaagcttgagttctcatcgccaaatttcatccagtttatcttcgcatgttgctgcatatagctagtataatccttctttgcaaaaatatacacttgttgagtgcttttcttagcaacttgaaaactttggttgttcgggtctgctgccaggttccctctagcagtgttgaatacctctttggccgctttctaagagccaattatgtctccctgattgtctctgtgaaatctcttcatcacatgcttggttctcaacaacttttgaacaataccttttagtcctttgctactagtctaattattccagcaacaaagaatagc

SEQ ID NO: 73684 - DNA, 1307 bp, Cannabis sativa
gataaattgagcaggtttcaggtcgtggtggaaaacacaagctgtgcagtgtgtgggttagctaaagagagtcaccatcatttatttttctgcttcattttttcgcagtaagtgttggcaggtctatatgtgtggctgggattttcaagttggtccagtaatttcatcagctggtgtacttggatcaggtgtgtgcaatttgatttcttagggagaattatgatggttgtgttggctgcaataatataccatttgtggaggaatagaaacaattgtatcttcttaaatttctctaaaactgtaaatagtatagttaataatataaagaaggatgtcaaatatagattgttcttgctcaaaaataggaaaggctgcaaatggagttgattacacttaagagattgatatgtaattaatttttgtgagttgagtctttcctattggaaggggcttgagggtgtatttgcttggttcgattgatgaaattttcttcttgataaaaaaatcacgatccttgtcacaggcgcctacacacttgtgggcatagtcatgccatccaccaagggcacaagcagcaaaaaaaaattaaatttaaattttttgatgagattttgcacaatgtttggatacaaaaaaaagtgcttgatatcaatttttgtgataaaaagattaatatattagcttaaagatttataaggaatttttttaaaaaaatagaaaaattggtacaaacttatttacaacgataaaaaatagtttataagtccatacacgatgtatttggaacacaactaaaagaaaaaataaaatcaatcacaattcttgtccacggtcgctcacacatttgtgtgcatggtcatgtcatccaccaaaggcacaagcaggatcaaatgaaactttgacttttttcatgatattttacagagtgcttggatacaataaaaaaaatagtggatgttttcatgacaaaaatattaataaatttttttaataattttttcactaattggtatagtgtgaatttttcacctagaaactcgagaccaggctcccataaaaatgacacgtggactcactttcctcgaggagtgatgagctgtcaaaaggagaccacttgagtaaaaatctcgcctgaaccagacttagcgagatgatgtgacactgacagagtctagacgcattattacacctgcatgatgcaagaccgaacaccgggtttaagactcgtataaaccaagatatatgcgatgtccataaaggttttcatgggagttagtaaagattaattctttacttagtgagctggt

SEQ ID NO: 73685 - DNA, 781 bp, Cannabis sativa
aagatctttaactacttatctttaactacttaccttaacttaccttaatggttttcaccatttctagaaattcatgaaatttcttaaacattttgcatttctttgcacaaggtatattcaagagtgatcaactaagaaattaacaataactcatatccacccctgaatgtttatccatatgtttgaatacaaatgaacatacttcaaagtaaatatttgcatgtatttccttgcagaaaattatcttgtccaaactactataaacaagatgcaaatgccaaagatgtattattgtggttgtggtcttttgatgattcctaggtttagttataaaaaaagagttcttagaatagttcaagtgaattatggcaacaaaatacgaaactcataattcatatatttaacatagagtttagatccattgatagaaaatggatattaacaacttgtgaatgttatattatagtgttcaatgtattctggaaactaaaatttaaaatttctacttggaatctaaaatttaaagttagggacataaatttgtaccaaatattcaatgagtaattattctagcttagaccaccactaaagtactaatttaactctaaatttaagttgcctttagtaagcatatataaggaggacatttttctgagatcgaagatttatatcattacaggatataatatctggaatatagtcatatgcgccactcatttttatagaagactatagagtgacatcataagaagatgatttataaaccttcttgcccaatgat

SEQ ID NO: 73686 - DNA, 650 bp, Cannabis sativa
ttagtcgatggattaatgtaattggtgatgggatagttagaaacactaaagagtctagcctgaatgctggtgttatccaagaggagggacttgtggtacccattttttctgtcttttaatgaactggaagttcttgcaaaaaaaaaaaaatactatccacctactaagaatttgtcacatttgatttatatatatatatttttgcaattatcttaaaaattattatttctcataattttttaatatagatatatatatataaagtgtctacacatttagtactttatgttttatctaaatataagacatgtactatgtgttttcaataatatgtatttaatattttgtattttaaacatatggtatcctaaatttaattttttttttataaaattttattaatataatcaaactgtctaacattttataaattttaaattcaaatttaattattagattacatacaattgagatgtttagttaaattgataaaagtgtattaattaaattttattttaggtactaaatatgtaaaatttaaaaatataaagtataaattaaatattattaaaaatacgtatcaatattattaaaatagttaattgtacaattgagataatatgttcgtgctaaaaattaggtttagatta

SEQ ID NO: 73687 - DNA, 1108 bp, Cannabis sativa
tagaaattatatttctcaatttaactttttttattttctttctcccaatctttggtgcttatatagatggtttagaggttaattaagtaaatttacattttattattttttataaaaataagaaagaaaacactgtttggatttaatataattgagtgttgtatttagtatttacacaccaagtaggtgaggatgtttattgttaataaatgagaagtatttatttttttcaaaaaatatctcttttgctgcactcacaaaaaataaataaatagataaataaataaacgttttttttactccctaaaagacaaaaataatccacactatcttcattaattatctcattatttttttttgataattttattttatggttttaatatataaatttgtaaaaatatgatttttttcgcaaaaaaattattttaaggaatttttttagaaaaaaaaaattaaaaaaaaaataaaaaaataatatatcaggtacctaattatccttttaatgtaattaattactcatctggttatcataaaggttatttgaatttcttatattttttaactattcttcaattttcccatgaaataattttttttaaaaaaaagaaaaatctatatttttacacaaaaagtataaaagcccacaaaatttataattttctcttattttttattttctgttttgaaaaaaaaaatctcttccacttgttttgtcgcattatttccacatggctacctatttttttttatcattattcaaattttcacatgtgcactagcacaccaatagctagggtgcgccaccatacactgatatgacaattaattgatataataaatcataataataataataatataatattattattattattatgtaggcttaattatttattaattattgctttaattaattgattattactattgaatatttgttatatatagttaattaccaaaagtataataatcacaaggggtaagttgaaaaatgccagttttattaatcaattaatgctctaattttatatttatttgaaatatacctctttttatatgtattgtacccaaaataccctaatataagagagtcacatggaga

SEQ ID NO: 73688 - DNA, 667 bp, Cannabis sativa
tcctaaaataaatactacttggggtgaggtattagctaataataagctaataaatgtaccgataatttttttttaatctacattcgtattagcagagacttttgttatttatttattattattattattattatttggctaattaggatttttatttttaaactttgacatgaattaaaatcatgtcccttaaacttttaaggccgttaaaaatcctcttgaattattgggatagttggatttaaagatttttaatttgtctaattttagtaaaaaaagtttaacatggatgaaagtttagagggtatcatttagtacatgtcaaagttcaaaggacatgatttagtagatattaaagtctagggagcaagatttagcacttaaacaatcaccaaattagtaaaattgaatgaaattagataaaagtccttaaatccaacaatctcaatagttaagggacaatttttaacggccaaaaaagttcaaagaacataatttgatacatgtaaaagtttatgggacaaaaatcttaattagcctatatatatgtctccttttgcgtcacacaaacaagttaaatcattattgtaaaaacattttattttgtactcgtttgatacgttatattaggccgtattgtattatattattaaattaaattatatat

SEQ ID NO: 73689 - DNA, 1429 bp, Cannabis sativa
ttgtacaattttagaaaatatagagtctattttgtaatttaacaaaacagagggtccaattggtaattttttcaaaataatggtctaaaatggtatttactcaactaataatagcactctaattttttttataccactctattttttaatattttattcatttttcccttgtaaatttaatttttattacgtaccttacttacctccacttataataataattaactatttttctatttttaaaataatcaaaccaaatacttataattttaaaatagccaagtataattttaagattttttttttttaaatataaatatatttttgttaagatcatttatattttaattaaattatttcaaatttgcctcgattagtgtattagtttcaagatttaactttaaaatattgattagtttataaccatttcccatctatttaagttttataattaaaaattataaaagataaacaaaatatcacaactaattattcatatatgtttttaattatttgaatttactttgattaattttggtctaatttagtaatttttttatagttagttttatttatatttataaatttacttttataatggtctataattttttttaggtaatgattaatttttaattaattttgttgaataatttttttaattactattacatcaattacatcgactttggatacagagataacacaaaaagggatgactcatttcatgagtgagagaagaatcacaacaagatagaattaaggtctaaaggaataaaagagactatttatctttttttttttttttaattatgtctgcttacttttcgctcttcacttcacaaaatatttgaaaaaaattatataaaaattagtaaggttaaaatttaatacaattttattactaagttattattaaataaaaatataatttatttcatatatataattttaaattttttaatcactcgcgttgcgtgaattgtttactaattatttataattgggagttaaacttatgtatttataaagcgaattacttaatttaaactcaagatttattctataaaaattgccgataataaatgtactttaaatgggttccgttacctctaaaaaatattaagatagtacattaatatcttcaaattcatttttgctcgctattttctctgacatgctcatgatgatccttatttaaaagcctagtttaaagttatgtatacattatattatatatggtagtgataacgtgtaacgccctaactattaggcacgctacgctaataataataaaactctaatcccctaaaaacgggattactagatagatatacgcgggaaatttaaacttttatctaaaacagaatgaaaataaaacttgtaataactttaaactttacaaacaaaagtgacataatttgggatc

SEQ ID NO: 73690 - DNA, 535 bp, Cannabis sativa
aagcaacgtagtcgcaactatgtatatacaatgtgtttggacatcgttaagaaaatatttaacaaagtattattgcactgataataatgatttgtagtttaaaaatattttgcgaagaaataattgtaagaacactataaatcactgtgaactcaactaatgttaaaatattaataaacttaccatattagaattatttttttatgagatccttgtgttgtgttgcctatatgaaatacctacaaatgagactaaaaacagtgtagcctgatcagtgtgtaattactaatacatcaattttcggagcgttaataaaactgacagccaactgtaatgcaacatcacagaaacaaaaatatcaaaaatacgtggtcagatccatgacacaagatgaatgcaaatttagtttattgtcgtgattggaattgaataattttaagattaaaattcatgagaacaacgttaatgcaacaattagaatattagttattatagtgatacatatttgtttggattatacctgatttagattgat

SEQ ID NO: 73691 - DNA, 818 bp, Cannabis sativa
aatacttacatgaacaaataaagagaaaaagcgtttgggccaattgggctttttgaggttggagaaaagttggtcgacgtcggagcaaacattaccggcgggagaatcgaggaaggctttccggcgaagtggtggagaccaaagaccactctgttgataatcgaaatcgtattgtgaggcatcgaagaattttcccagaagcctttccgatacagatttcgaaaccatttgaacattagttgtggttgttgtggtggttgaactttccgattccgatgatgatgatgatgatgatgacgtggccgatgaggatgatgatgaaggtgatgatcttgtataagacattgtatatgttatatatatatatatagagagagagatgaagattatatatagaatagagagagagaggaaattggatgttttgggaaatggaatatacataatggtctctttttatatgtgtgtttattgtgatcgaatattatgttgttagtaggatccacgttttctccaaagggatgggacccctttgggtgaggattctctctgtgaggttacttctaacgagttgtttattggatcatatctaatgtttttattaaaataaaatttaataataatatgatatatgataaaactgtatacatttactgtattgtgttagtaattatcttcaagttgattatactaaaaaaaaattgtcgaaaattaagctcaagacgttatttttaccattttagaaaataaagagttcattttgtcatttaataaaacagaaagttcaattagtaatttttacaaaacacagggtccaa

SEQ ID NO: 73692 - DNA, 1030 bp, Cannabis sativa
ggagctacggacacaaacagtgtcaaaagtgttgttcttacgctggggaaactgtaataacagaagccaaacctcacaactaattgtacaacatatccacatatctgcgtcggaagctttggctttttgtagctatataaaagtttttatagaataaataaaaatcctgaataataatgtattgttttaatttattatgtatcagtttgtatgattaaggcttttaattaatattatcagttccgttcaggagcaaaaggaaattaaaaattatgagaccacatccattaattattattttgcaaattatatatcttaatagtgttaatttttgtttttaaaatttcatgttataacatatgtgtacattaatagttcataatatgttaatgattcatgttattattacttattctccaaaactcaaattgattgcctgataagcttcctctagcaggattcttacccaaaaaaatcattcttatcacactgatgatttgtgtccagtttgtgatgctttatgctttaatgggtagttcttctctatgggccggagtgcagaaagctttgtgttgttttcaattgggagatccaagtttggttggtatggacttattcgcttgtattcatatgtttattgatccattaacagatcaagatgattattgtgattggttcaagcaaaataaaatggtgcataatagagtggtcatttttgtcgagttggatgtcaattggggtgtaatggctctcaagcgtttgcttaggtgaagtccccacctgttcagaggactcccatgtgggtttcaagcatagctgatttccttaaaattaatgttcacgagactatggacagtgagggggcgttgtgttggtggactctttcagtgctaaggctgcagaggccatggcactccgtagcattgtggttcaatgaatcaagtttggtctcaaaaagatttgctttatgtctgattgtttgtgtattgtacttaaatttaagaaccatattcctttagatagctcttta

SEQ ID NO: 73693 - DNA, 652 bp, Cannabis sativa
ggaagagaaagaaaaacttatcatgcgttaccactccgaccttgatgatccctaacaacaactctactgctacaacaacctttaacattaatcaaaatctcaaatcttcaggtgatgcttttacaactcgctccttaacgacattacaactatttttgtccaaaattagtcttggataatcaatgaagaacactcaaaaattgacctctccatcagctcaaaattgtaatgtatcatattgttgcgaggtaccaagcttgccaagccaatataacaaaatactcaaaataatcaacaagaaagcaataggatcctcctaaccgcataccgttcctcctaccataccacaccgacaacatgtccccacatgcaccattcctcctaatatataaagcttttctaaaatatttaaataggttatattttaatgacttgaagaaaaaaaaagttggaagtaaataatcctaccgtgataaataattatttgaaatttatttttaacaaaataaattatttattttccttaaaaaaattagagttgatacattattatgaaaaaaaaaataaaataataaagtttttctcccaaacgataagactttgtactaaaattaattgtttattttgtgtttttttttttggtaaataccat

SEQ ID NO: 73694 - DNA, 1906 bp, Cannabis sativa
  modified_base (1585)..(1585): a, c, t, g, unknown or other
taattatttagggtagtttgtttaaaattttcacgacttcttgtattgaaagtataaaaaatgctggcacaataaaattgcaaagtaaacaagttatgcactagacaaattttactagttgggatataagagttattttggttaaggtatgatgtaaagaagattttaaagtgatattttaaaaatatttttaagtgaaatagggtttaaagaggattaagtttaaacgattatagcttttagctatggttggttcatatttttaggaattattagcctaaagggaaagtggtggaaatttagtattcagattctaatattataatttaaaattaatcaagtaatttgaagactaataaatacggaaatattgtaataaaaggaggtggaaacactaattgtcaaatctgaatttattgtcttcagatatatttgggaagtcaaattttatggaatttggtttgtaatctaagtcttataggaaggtatcattataaaggttttttatggtaacttaaaagactacaatatttggaagttttacaacctatcttttggaaattaaagaatgaataattatgtcataataactgaattggattattttaagtcatttcaattcaatatagattaattataatcaagttttaccataaataaatatgtataaaaatggctttattggataagtacaataaagaaatttgtaatattttggaaatggggacattaataatgaattaaaatggttgattttgtctattttaggaaggattatagaataaatgggcattaatgcttaataatcaaagttattttgtttcattattgtattgaattacactaatcattaataatcaaggttattgaagtacattattttgttgcttattttattattgcgataatttttaaagtaaacttttgatatcctatggatgggagtattgcagggttttttattattactagattacatatcaaaatctttttaggtctgagggtcttagtaaggaatagtaatcctaagatgatgatgaagtaaaatactagagttaagttactaatagccaaaggatttccctttggctagttatagtattttatagggggatctagtttttcaatttttgagttttgagtaattttgatcggtttcataattttctaataaaaaaattttctactttttttatttgttttcagctggaatttcagtgttaaatgctgaaactttagccctgttagttagtcttgactgggctcatttgtgtggtcttccaattcatgcagtttattcagattcgttagctttggtgacggatatcaacaacgggaagatgaatttcaacgacttaggagcattgtttgaagatgttatagctttattgtctaaatttcttggggcagttttatcccatgtagctggctctgagaatttagcggcccatggcttggcaaagcatgctctacggttagacgatgagctatcctggttcgaggaggttctagcgctggtagcagacgtgggcgtcgtaaattcatgagtgattctaatcactttgtcaaaatatatatatatatntatatatatatatatatgtaagatatctaattaaacgacataggaatgaaaaaaaattaaaacttgaaaactttgtaaactcacaaaaattaaaatttatagaaaacatatcataaaatgtgggatctaaaatccaaaataataaaaaaaatctcatcatttaatatcaaatctaaaaaaaaatagataaataaatatgcatgtatatataatcatcaatatatatataaaggaatgcacaagagagtttaggtggctttttaccttttcttcttcctatttttcttattttgtgacacattctcttattttatttgaaaa

SEQ ID NO: 73695 - DNA, 1087 bp, Cannabis sativa
  modified_base (38)..(41): a, c, t, g, unknown or other
aggttgttaatccaacatacatgatagtaaatagatcnnnntaaaataatttccaacacaatatccatggaataaaactgagtaggggtggtccgattattacccatcttttctttgcagatgatcttatcctggtgggtagggccaacctaaatgaagctaacagtgtctggaattgcttggagaggttctgctcttggtctggccagaaagtgaataaactaaaaacgtctattttcttcagtaataatacccctgtcggtatgaggagaggaattaaggaagcgttgggcataaattcaccggaaggtgctataaattatctgggtctgcccctgttcagatctagacagaaggatgctgactttaatttcatattggaaaatctcacctctaaattgtagggttggaaggctaaaatgttgtcgaaggctggtcgagctactcttatcaagtcggtaggattgtcgatgcctatctacgcgatgcaaaccaccaaactctcgagtcgtatggtcacgaaaatcgatggattagtcagagatttttggtggggttttgaaaaaggaaatcatggtcttcattttgaaggcgtgggacaaactgtgtcttcctaaatcattgggtggtctaggatttaggaaaacaaaagagatgaatctgcccttccttgccaagtggggttggaatttgtcaaagggttcccaatctttatgtagcaaaattttggaagccaagtatctaagagggaaggattttctcaactgtcgctacaagaattccgattcctggttctagaaaaatgtcgtgaaagccatttctattttaagggagggggcttgtaaagttgtaacaaatggcagggcgacgagcgtttggagggatccctggattccccatctgaaaggttttatcccgagacctaaggtaggcgtaataaccaatgatcaatgtgttgatgagctgttgcttgcaaatggagagtgggatatcccaaacctaaatggcctttttgacaaagaaacagtgactgcaatagttaaaggtggtaaaccatcaggccttggggaagatagatgggtttgga

SEQ ID NO: 73696 - DNA, 684 bp, Cannabis sativa
tgtgtcgtgtcgtgccaacattttaaagggtaggcccggtattttcgtgctgtgttttgctcgtaccgactcgtatttcttaaacaggccgatccattttcatatccgagcttaaattcgtgctttacttttttttttttttttttacaatttctagattatatgtatattttaaaactttagttatatttatataacttctaaacaatattttacagataatcatataaaaattattaacatcaatatcattaaatttaaatatttacttataaatatttaaatttttaattcacatcttataaataaattaatatgtataatcttatttttcatatttaaataattttaattataaaattataatatttagtattacatttaagttttattattattaaataattaatcaattcatattttgttattattaataaattattttttttaatatgtcgtaccgtacttatcgagtttgttgtgtatcgtgctctttaggctagtctattcatattgtcgtgcctttcgtgcttctcgtgccatgttgtgtttaagaacatattttttgtgccgtgttttactaatttgtagcatcgtgtcatgtcgtgttcaaacctgtattttttcgagcctagtcatactcgtgttttttgaatttgtactggttttcgtatcgtgtcaaaa

SEQ ID NO: 73697 - DNA, 1250 bp, Cannabis sativa
aattgcaattaaggatggtaattttatatttgatgaacttgaagcaaagggtaaaaagttcaagaagtccaaacttcctggatttgttgttgcctttcatgtttggttttatgagattattcctagcttgtccctggaatattttctgaagaaaggttttgagtttcgccgaatacttaattggcaaagtttcgaggttcctgattttgtgactttacttgaaaaggtttgtaataatcctaaggtaaaatagtctttgtaactggttttgttatatgtttttttttttatttggcttgttttatagtttagaaacttgttttttttaacaggttattgtagatgattttcgtgttactgatgctgagagacgtaatcgtcttttgaagaattttaagtttcaagccgtgtatcttcccaagagtgtggatgatgagaaggtaagaaaccagtttttatacattttgtttacaaattgttttttaacaggttatttcatattctcttttttaatttttattgtatcttttgtaggattttgaggagaagtttgagaatatttgcacaagtttatcctctattaaagattttcaagtaggcatttgtaatgagatgacaatcttgagagatgagtattctggggattcggcgaagttgagtgtaatgattgaaaaaatgaactccaaaaaccatgaaaagatggacacaaccgatttgtttggtgcttctgatagagtggtaaatcatttattattgtttttattaaaaattattagtttcttttaatttttatatgtaattattctttagtataattgattttcacattgaaatttgttttttttttttaaagttgttattatttttggattaatttttcttgtatttttttctttatatttttttatgaaactgttcttttttctttttttaaattgaagaattcgtttatttttttgttgattaaactagttttaaattttagcactgttttaaattattttttcttgcattatttttatatgttgttgttgaaatggctttttaaagttaatattattttatttttaattaaattacgcttgtgttttttcttattgttttgtgtatggaactgatttttttcttttttaatcaaattattattttttcttattgttttgtgtatgaaactagttttcttctcttttaatcaaattagttaattttttacaggcttattatcaggatttgtctgatgatgttggtgg

SEQ ID NO: 73698 - DNA, 1604 bp, Cannabis sativa
aattaaagagtaataaaaataaaattaaaataaaaaataaaaagtagaaataaagtgtaatttcctcaaatctaatctgatcctttgaaattattaagtcaattttttcttactaaatttcttaaaatgaatttagattcttggagagtttagagagttcgagtgtgagaaagtaaagaacactaaaaattgtgtttgaacaaggaagattgttaaaatcgtgtatgatgaaaaaattaagattttattttaaaattaattgacaataagtagaatagcacacgttcttataaattgttatattaattttgcacatattattattaatgtgagactcgtcaacaaacttcattttcgttcacaagctaacaattagttatttatttattttatagaatttattaatgaatgattcataatcttgcctcctaaacttttgataatattgattctgtcttctaaaatatacgacttgttaaaaaaatttcttgaacttttatatttacagaaatttagtcattttgttaggttccatccattattctgtttaaatgctgacgtgtctttataaattaataactttgacaactatatatcaaatcatactcaaaattaaaatgagaaagattcaatatttttctttaataaatcttaaaaaattaatttagattttaaaaataaattattttgaatgattaagaaaatttaaaaaataaattaaaattttaaaactaattaagtgatttaaaaaattatttattttttttattaaaaaatctatttagatataaaaaatattattaaaaatttaatttttgtaaaaattaaattttacaggaataaggttgaatttttttttcctctaaaaatctagatttgtttaagtcaacataatattttttagtttaatttttaacttttttcaaaataattttatatttttattcattttttttaagatatgattttataaatataaataaatttgatatttttttttaaaaaaaaacttagtttgtttaaattatttattggattttaataattttagtttgtttttttaagataatgtttatacataaaataaagtttgaaagtatttttttaggaatagtttagatttttttttaagtaaatttaatgttattatcaaattttttaataatttttaaaattaatattttttaatagaaaaagagacaaaattttattttggtcaaaattaggggataaattttttaatttttaacagtataaaaacaaacctaacagaaagagtataatcatataactgttatatttcagggataacttttaataagctgtatattttgaggggcaggatcatgtagtcatgtctgaccctgggcaggcgggctaggcctaggcctagggcccacctagcttaggggcccaacaaaaaaattactcctttttaaattatacaatttttttattaatatttaaaaatactatattttctttaaataaaggatcaaattattttttttcttatgatccattatatttgaggattgactctatatagcattaaaagttcatatagtaaaaatactaattattttttattaggctaattagta

SEQ ID NO: 73699 - DNA, 944 bp, Cannabis sativa
aggatttaaaacccatttactagtggtgcagattgaagaaggatgtggtagaatttgtatcccggtgcttgacttgtcaacaaattaaggttgaacaccagagacctgcaaggttgttgcatccattgactattcttgagtggaaatgggaagatgtcaccatggattttgtggttaggttacctagaaccacgagaatgttcgattctatttgggttatggtggatcaatttactaagtttgcacattttctaccagtgaaaacaacctttatagtggatcagtatgtagaattttatgtgaaagaaatagtgagattacatgggactccgaagtccatcatatcggatagggatccgaagtttacctcaaaattttggcaaagtctccagtgagccatgggtaccaagctgaagtttattgcaactttccatccttagactgacggacagtctgagaggaaaaatcagatacttgaggatacgttgcaatcctatgtgatggattttgaaggctcctcaagtaagttcttaccactgatagaattttcatacaacaacagctatcagaatactataggaatggctccctatgagatgttgtatgacatgaagtgcaaaactccaattcacttggatgaaactagagaaagaaatatttaactccaaaattagtacaacggaccaacgaggctatagaaaagatcaaggccaaaatgcttgcctctaagagtaggagaaagagttatgcagatccaaatcgcaaaaacgtagaatttcaagtatgagatcatgtattcctatgagtgtctctgatgaaggggaataaatgtttcgggaaaaatggcaagttatgccctaggtttacagggcatttcgagatccttaaaaaggttggagtggtagcttatcgtctagccttgcctccaacactatcagcagttc

SEQ ID NO: 73700 - DNA, 972 bp, Cannabis sativa
tttcaatgaatcacacaattaaagtcatgaagtgaatatttaaggaattaaagtaattttaaattactccaaaattttctatctagcttttaaattataattattataataaaatatttattaaaagtatttgaataaatttgaattgaaataaataatttttatgaaaaaaaatgtattcacttatatataaaattgaatttttatgataacttttaagagtggtggtattgataagtgattgatcttcataatagtaatacaaaggtacacgccacagttacttgctacacaatatagtttataattttactactactccttatgagagaaaagagaaaaaaagacaacataactaatattggtattttcttttctctctatgagaagttggctcgtccaatatcgacactgtgtctttgaatctgtttgattctttctctcgctgtctgctgttccttcggtagtttcgctccttggggttttgcatgatgggggataaaggaaagggtttgttggtgaatgaaaccattgaagagggggaggatttagtggaaatggttcagattgcgaaggtttctggagaatcgtctgggcctccaccccctgtgggtagtctggagacttttccagatcctatggctaatgagaatggtgtagtctcataaggaggtcagatagataagatgtagctactgagatagaagtttttggaggagtcttccatggaactggaaacttctctcgatatcttcgatgagatgggaagaagaggagcgttggcctgttgtttcagaaaacttcctcttccgagaaacagagttaaacaaatactttcaggaatctggagtctaaaaggaaaatggtggatgaagactttggagcatgggctttagggaatcttcttcgacatcgaagaggacttgaaaactgttttcgaaggaaggccttgggttctaggaggtcaagttc

SEQ ID NO: 73701 - DNA, 1114 bp, Cannabis sativa
gcttgcggcatacaataagagtgaatctatttatgtataagtcaattacttcatatttttgagacctatctatctaatgaatcttatctctaggtatggccctgtggactactaacaatctgcaaggattatttataccatgtataaaagtcttatgtgtttttatttttctactctatttatttttttagtttattctgcagttacagagttgtgttatgtagctacagaataattgtttggtttacaccaaaagtatccttgatgatatggaatacattatttgatgcgtgacaagaaagatgacatctcgaagttgcgtagtcccgagacatagcaagtcgacctgggatgggtccctagccctgtgcctaggttgacttcgggagctccgggatggaatgttcaaacttcaataacttgaatctaactcactaaatttcagttgtttgtaccatgaaggcatgtactttaaaaacttccaatggatgtactttaagatacctaagtgatattttggcattacttagtttgtttctatgttctggcaaagctggtcaccacttatcgaaaatgttgttgttttacagaaatgagatactcgaaactctttatttttcagtgagtttaccatattgaaaatgagaaatgaaaagttgtgaatttgacttctctgactccatggatcttggttattgtgaaaaattaaacagacggtcaaaatggaatcggaatcggattagcagaacccaatgcaccaagccatttgtcaacctgggcgatgggtaccccgattctgagctctcaggttatcgtattttgatacttccaaggttcttaaacttgagaacgaggtctctaaccctatttttgaccattctggatttaatggtcaaatgagatttaatttttgagtggtcgaaatcaacgaaccaagttgatactgttatttttaattgttctatttagtgttttacggttgttttataaaaagaatatttttgtaaaaaatttcaagtgacagtacaattataaatttttgttcaaaatttaatattttgtcaaaacaaaagacaacactcttggaaaaaaaaaaaacataccaatctttttt

SEQ ID NO: 73702 - DNA, 514 bp, Cannabis sativa
aatataatcttaattatatgttcaaaagtttatttcctgatttatcagttcactggatttagactaacatgataatcagcaataggtgaccttaaaaatacaatttaacatttttagttttctcaacaaaactaaaatatgaaactcacataaccatttacaaaataatgagagtatttgaagaggaaatacacaaaagtcatattttatatacactttatgctagaaatgtgggagtgagccacaaatttaaatgtgttgacacattgttgcttaatttatttgattttgaattcaaattctaaatcaagtttggctatgtgcatatgttaaaattttgaccatctaatgtcaatgtttagtgaaaataatttcaagaaagaaattaattaaaagagctatagagacaaagcggtctactatattttaaaagtaagatattatcttgatagtcaaatgtgaaggtgtgggggtgtatactctaacaagtaaagtttaagacatgtttggcgtc

SEQ ID NO: 73703 - DNA, 844 bp, Cannabis sativa
  modified_base (701)..(701): a, c, t, g, unknown or other
atttatttggatgaaaaataaaagtgaaacttaagaaaacaagaaaataaaacaaaacaaaggcaaacttagtcaaaaaaatcgtgtgcatggtgcacaagcgtccatgaatgcacaggtgcccagacacacacgaactgcacaagcaacaaaaattaacttgtgttttgtaagccatataggatttatttggatgaaaacgaaaagtgaaacttaagaaaacaagaaaacaaaacaaaacaaaggcaaacttagtcaaaaaaaaaatctcgtgcatggtgcgtaggtgcccatggtgcacagggtcatgtcatccaccaggtgcacaaacaatggaacccgtggtttgtaagaccatataggatttatttggatgaaaactaaaagtgaaacttaagaaataagaaaaaaaaaataagacaaaggcaaaattggttgaaaaaattcttgtgcatggtgtgtaggcatgcgtgggtgcacaagtgcccacgcacacaccaagtgcacaagcaacagaaacatgtggtttataaggccatataggatttattcagataaaagcattgttaaattgtactttaattcatttgttttcctttccaatagattttaaactccacgtttcaattattattgttgccacatagaatttaagaatttaattgttagtaattaactacagtccttgtgggatcgacctnactcttgtgagtctattacttgaatcgactatgtttacttgcgtactagaaaatccataacaacaacgttcaatctacaaaataggaatggcatagaggtaaaataccgaactgcacggaaagtgcttcctcaagaaaacact

SEQ ID NO: 73704 - DNA, 876 bp, Cannabis sativa
tatccctcaaaattcttataaaagaaaaaaagaaacctcattcggcacttttaactccttaaaaaactagagtgctcttttattctctttgaatcgtaagaacacgtttggagatttcaagcatctaacccattctcatccagccattttctcagtaagtgccgtgatttatgtacattctactctgctttcttgcatttgatattacatgtttttttttgcaaaaaatctaggttcatgccatggatgttcttcattgtttgaataaaagcttgaatttaatttgatgtttgttaataaagttgcttgcacggggtcaaattgttgaattgatgtacgaatatatgttttccttgagaaattttgttgaactgaggcttgcatagtactttaacttttctaggtttaagcttgttcttgatcagctccaaatcaggttcttcgtcattctgacaaaactatttcttttgatctatatattcctttggtcagaatatatggattgttttcaaaagaattttttttctattttttttggtatttacctccccttccttattttgtagataaatccatacgacttttagggacgtaataaccgaattgacaatgatcttttatagttactttttgaacacatgtcgagactctgggcattgccttcaccctctaccgacaattcctcttctacttttaaggagtgggaagtattgagcaaggaatccaaaccttcaattctgaccatccaaaatcacttctatctggaccaaatcgatggagacgtgtatggtaggtttattagacagtacaatttaggttggagaaaatacttgccttctagttggatgtacgttgtctgatcgaacgtcccaaata

SEQ ID NO: 73705 - DNA, 587 bp, Cannabis sativa
tttagattaattttataatattttatcaaattaatttagttttctattttataagtgttaatctcaatgttgtgtatttttgtagaatgtttaaatgcacagacttatcacaagggttttcaaaataatggtacaaagtaaccattatattggttgtgtctattgggccaatagcttattgtttaaagatgaccaacaaagcataagaaaatggaccacatgaggtttttagagaaaccaaaagtccatcatctttatacacatataaaatatgtgtatcaaaagcaggaggcgttaattgacgaaaagagaagcaggcggctgcttactccaaggacgccaacagccaagaaaaatgaagaaaaaaaaaaaagagagagagagagagagttttatttaagattttaatttagcatttttatttaaaagattggcaattttcaaaggaagaagaagaggattttgcaaagaaagctgtattgtgacaactccaacatgggtttttcttttcatctttctcttattttaaactttgtaatttttgcacaatttattatgagttgatttttcttttgctagaattattt

SEQ ID NO: 73706 - DNA, 781 bp, Cannabis sativa
tgtcgtgacataggacccaaaattatcgagcatcgttccactcagttcggctcacatacttgactttagacttgaggtaagaaaagtattaagctccgtatatggttactgttatgattgttattacagtctcgattatgattaagatcccggtatgtgtttattgggacttaatcttaatcaaggttaacgatatgtaattattgtacaaatgattatgaccgagggaaataataggaaacgattatcatcgttatgactcgattatgtttgagggaaatgataggaaatgattgtcattgttgtgactcgattatgatcgaggaaaatgatatgaaacgattattatcgttgtgactcgattatgatcgagtaaaagaaacggtcattaccattatgagtaattacacctgaaactacagataagtttcttacttatcgtttgttgtatcgggcaacgatagtgacatatgtagctcgtgattaatgagtgttaagggtactttatgaagtactgagattgtgtggttacgatgttgtgacatggatcaagcgtgttaatatgggatgagttataattgaatatatatattgttatagtatgactgaatgaatgttatattgcttatgaaattagtcactttccttgtagagcttcaatgactcacgggaagtatgagtaagcatttataggaatgtaagaatggagtgctttatgaagcactgagaatatatggttatgtattgattaaatattcatttagtataatgatgaagatgt

SEQ ID NO: 73707 - DNA, 700 bp, Cannabis sativa
agatattgtttgatacttgcctatgattttaatataattttagttttcccttcaacttttttatgtgaatctatttcatttgtatttaatgcttataattacttgatcaccaattatttattttatgaattcaatgcaaaatctaaaaagtgagtattaattataatatagtaaaatagacataaattttgatattggacgtaagtacctataatctgtgtagcaaatatgatttatttattatttaacgcgaattatatatgttatttaccacaaatgtgtaggactttttcatttgattttgaatttatatgtcttaataagaatatatgttaaattaataattcgccattgaaattgaagataactaatttgtattttgtcataggaagttgatgtaattaaaattaaatgctttaaatttctaatcattgttaattgcctctttgtttgtttgtttttgttagtaattaattacaatcactatttaattttcgtttgccaaatagaactagaatttcaattaattagcaattaactacaatttttgtaggatcgatctcactcttgtgagttattacttgtgaacgatacgtgcacttgcatgttgaatttccacaataatgatttattatattcccactacaagaaatatgttacttttgtcagcatatttttgtgctggtaaaaatttggtatt

SEQ ID NO: 73708 - DNA, 682 bp, Cannabis sativa
tggaacaggagccggtgtattaatgacggctcccaaaagacataagatgtattgtgctataagattccatttcgaggcctgaaataacaaagcagaatatgaagcaatactggcgagtttgagattggctaaagaattgaaaaattacccgactgagaatttttagtgactcacaattggtggttttgcaaatacgagaagagtgtcaagaaaaggggccaaggatggtggcatacttgaccaaagtcaaaaactaccaagagaggttataacactacacaattgagaaaatcccaagaaaaaggaatgcaaatgccgatgccttggccaaacttgcctccacttaggaaacagacattgtagagtccatactcgtggaatacttggcagagccagccattgagggtgatgtaatgtggcgaatggggaatattaggttatttttagtactaattttagattacatttagtatatttttaatttagtttaaatcgtgtttgaagcatttttacgcttgttatcttttatttttgtagatttaaaatagatgaagatttgaaaaatatcaacagaaaaagataaaagatcgcataaaaatatcaatgtggaaaaaaatcagaatcctcctcagaaaaagatatttcgcgtggaaaatggaggcacgtggagcacacgggcagc

SEQ ID NO: 73709 - DNA, 951 bp, Cannabis sativa
gagaaatatgaaggcataataattgagaaggttaaaagcaagatggagtatcctgcactttggcagaggcatctgcctgaacaagacccgatggggcattttcattcgacgaatcttcatgctcctccaagacggctttcccctttcctactacaggagtagatggccgagcaggtagaccagactccctgatctggatcaaatgttcaatgggcctatgcccggtcggaagtttcttcttcctcttgagcggtctttcctgctcttcctcggcctcatcctcctgctcgaaatattcttgagcatgttgttcggtcctagctcctcccttcaacttagcctcacttttaagttgaatgagctccttctcctgctcagaatgctcctgagcatactggttggctcccgcacctcccttcaacttagcctcacgcttcagttgaatcagctcattctcttgctcaactccctcagcctggccaaccctgaacttcctcttcttctccttcaccgactgaggtgcaaaatctattggataaagtccgtactccacaaagttggcctctgaagtcaacaaggtgatattccgagcgtcatccgatagctgaataatcctttgagctctatccctaagagcaagcgtgaggggtggacatcaatatatagggatctgctgaaaccaaggataagtggtgcccattccttccaccatgtagtactcgtcaacaaaattcccgatatttctcacaaccttgtctgtggtgctaatcaaccacttgaagtctggctaggagaagcaaaagtatcccaacctgccttacttaggggtagacttcaggtcaaaaaaccaactgaccttatgcggagaaggcacaccccacttttggatggtgtagaggacgaaaatggcagacatatacttaatgtcctttggagtaaactgggtcgggc

SEQ ID NO: 73710 - DNA, 543 bp, Cannabis sativa
ttttttttaaataaaactaaaaattcaattaattaattattaattacaatttttgtgagaaggatctcactcacgtgagtaattacttgaaaaatagtttgcatatttcacaacagcctaacattttcatatatgaattataatataataaaataataaaggtgatcctataataaattacatctaataatatatacacatcctataaataccactacatctcatcaagaaaaaatatagaaatataaatgtatatatatagaaaaatgatgatgatgaagagatctctcacattaccaaagatgacttgtatgttgagaatttcaaaagctatttctattcttatttttgaaaacaaaaaataaaaaaaaatcaaacatgcttttatattctcatttttagtacttgtgcttaattgatttggattaagggtcagtttagcataattttaaaaaaagttaaaagttacttttttcatagttctgcagtagttgttttttctcacagcacagctataattgttttttcccataacacaactgt

SEQ ID NO: 73711 - DNA, 743 bp, Cannabis sativa
  modified_base (51)..(52): a, c, t, g, unknown or other
ggatccctgggcttcgttataagttttatgcctcccctcctcctcctgacnnaactctttcttattttctctccccatcgggtggctagaatttagataggcttaactagcattttgactcctccacggtaactagtatccttaatgttccaatttctggtgcaagtggatctgataatctcatctggggtcaggaatcttcaggaattttgagtgttaagagtgcttatcaccttgccttgaccaatcgtagtatagcttcgggttcttcttttcataatagcaagcggttttggactaaagtttggtcttcaaatgtcccccctaaagttaaacacttgatctggagagtcttgtcccactgagttcctgttgcttcctctttattttttcgacacataattccatctcctgtctgcccgatctgtcatcaaaccacggagacagtgaaacatgccatcttggagtgtaagtatgctaggaaagcctggaaaaactcaagttttattggtttttatactaataatctatctagctctatggatactttttttgttgttgcctttgaaacttttgattctcctcagattgctatacttttttgttttgtttgggcaatttggaattataggaataaagtgtttcataaccacaaaaggtgtaataccctggaattaaggaaatagattagcaaagccctaattagttaatttagtattattgtagaattatattattatata

SEQ ID NO: 73712 - DNA, 882 bp, Cannabis sativa
gaagaggaataggcccttttgcacacactgcaacatccatggacacacaatagaaaagtgctataaaatccatggctaccccctggttttaacaagcagaataaaccaaaagaagcaggcgcaaaccaggtgcaaactggaaaagaagaagaaaacagcaccacagattcgcataccttacttccccaattgtctagtgtccaataccagcagctattgaacttacttgcttcacaacaaagtggtaacaatgtgaccgaacctggtacttcctctggaaactcaggtattatcttatctcatatatctatgcttcctttgcgcaactcttggattattgataccggagcaacaagacatatatgctccaatatcaaattattccaaagtatatgtaaggtccctccaactaaactcattcttccaaacaataattttttgatggtaaatcaaagtggaactatcgatcttggtaataacataattcttgacaatgttttatatgctccgactttcaaatataatatcatatcggttagctaccttaccaagaatgctcccatttcggttcaattcaattctaacaatttcattatgcaggacagtgccagcaagatgatgattagaagagggagtgcaatcaatgacctatacattcttgatgttgcacatgaagcccctcaagtcctctctgttgctgcagaaatctggccctcacggctgggccatctctctcataaacgattagatttactcaaggatggtcttaattgtaacacttctggtttacacaagattgaaccttgttacatatgtcctattgctaaacaaaagaaactccctttcaaaaataaagcaaaatttgctgataaaatttttgat

SEQ ID NO: 73713 - DNA, 1760 bp, Cannabis sativa
ttttagttatttgcaattattattatgagagtacttggcatacgtaaacttataagaatggagacaatttggtagatatgtatctatgatgatgggcagatataaatttattcaccaatttactctttttaaccaaaatctaatcaaacatattatttcaatttttggatcttattcttttctctaaatatttctttaaagaacaaatctatatattagatatttgaaaacgacttcttactacgtaattatttttagaaaggaatgaaaataaaaacttgatttaactatatttcctcaccaaacaaaaacataaatcaatgtgctgcatgcacttgtttttttcttttttttttcactcttaacttttatcaattaagaaaaaaaaatacttgttaaaatatacaaatttgtcttcttctttctttttttaagatgaacaaacgtacaaacttgtcatgagactcttgactgataacgtataaatatttattatgtatattacatgagaaagaaaagaaaaaaaacgcttatattatcatttttaaattttatcattatatcatctgttacaaaaataaaatatcatcaaataacgtttcattgagactaatttattttatattagagttaatattttggctcattctctttcagctcacttccttattgggcctataccttgtctatacataaaacctctcttgctttgtaagaacttaatgacctaataataataaggcattttgactgtcgtttatattcaaaatgagagtttccttctctgacatggtatcagagtaggagtttcgaacatgatgcttgcaccaatttcacgagacacaaattgaagaattcatgacatcacggtgttgttgtatcgatcctaagcaaatagagatggattgtcatgttgtctgagagaagatccaagaaagcacactaaagttaattcatgtcagcaccaaaaacaacattgtcgatattttcacaaacttctatttcctacttatttccatacacttgtaaccaagatgaacctgaaaaatttatacaattcatctcaaaaagggggtattagaattaatattttggcccattctcttttagtccactttcttattgagcctataccttgtgtatacatataacctctcatactttgtaacaacttaatgacctaataacactaaggcattttgactgctatttaattatattcaaaatgagagttttcttctctaatattttattttattttacttttttaaaaaacattaagtagagactatatagatagagaataactttgacataattaaatcaaacataaaaataagagtagtttgcagcataaatacctaagttttatgtcgagtagcagataaatacgtaagtcgtatttttggcggtaaaaataccttccgtcactggtgtggaacttccgtaggtacctggacgttatgtgccaagttagtatccacgtgtcattctttgattagtccacgtcatttaattttaaatttttatttgtaaatcaatttaaaaattaaaaataaaataaaaatagttttaaaataaaataaaataataaatatttaatattcatatttgtattttaattaaattaaaataaaataaatcattaattaaaactcaaagcctaaaactaattcacaaaacaccagtaatcttgcccttttcttcttcgtccccttcatcgtcctcttcttcttcctgcccttttcttcttgctgaaa

SEQ ID NO: 73714 - DNA, 1078 bp, Cannabis sativa
  modified_base (1044)..(1048): a, c, t, g, unknown or other
atgcaatactaaaaaaaaattatataacttaattttattattatatatttttttaaaaaataaaatatgtggttaatgtatttttataatttttatcacataatttattatatttggccattttcttaatttgtttaaaaaatggacatttactaacttagtttctaaatttagggtcatttttcatctcagcccattaagagaaattatttcacaaatacacaaaaataataaaaacaaaattataaaaatatggtttaaaggaattttaaatatttttacgatttattctattttatttacagaaaatacatttgttttatgttgtactcttgttaatttgttgttgattttttgttatcagtatattattttttgttgttgttttgatgttatttaaatgttattttcatgttacttttaagtagttttttgttgtttttatgaaaaactgtaaaaatataaaataaaaaaaaatctttaatcgtaaaaatataatttttttttaaaaaaataaattataccattatttattatatgttatttgaaaaattaattgttaaaaatagacaatattattagtttttttggaagaaaaaaattcaccaaaaatatattctggggaccattttaattatgggatgatctttttttatcattttttttaaaacagatagtctaaaatgaaatttccttataacagagagcacttttttttttttttttgtattatcccttttttttataaggacttattcctaagactttctcaatttgtattttgatatttttttgttaattctaatattttttagtttaaaaaagtcaatattattcttttttttaggaattattacatagaaaatctaaattgacactttatttacaaaaataccttcataaggtgtggacagcatttataccttttatgtaattttaattactaaaataccacgtacataatcacttacataatattcagacgatagttgcagggtggttgctgcgtggttgtgcggtggttgcatcagacgaaggtttcannnnnacgatggttgcagggtggttgctgggtggt

SEQ ID NO: 73715 - DNA, 740 bp, Cannabis sativa
  modified_base (291)..(313): a, c, t, g, unknown or other
gaagaagaaaagaaaaaggagaagattaggagagagaaagagagagccttcgccgtcgacctagtgcttcggctccagtggtgagacgagagagagaaagagggcctgggagaggtttgtagaaaaagaagaagagagaagaaagaagaagaagaagcagaaaaagaagaaaaagaaagaagaagaaaaagaaaaaaaaaagtaaaaaaaactaattttttaactttttttaattaaaaaaaaagtaaacaaaaaaaatctttctgatttttaatttttttttaaatattnnnnnnnnnnnnnnnnnnnnnnnattacgtggaccactaaaaattagccacgtgtgcaagtgtgtacatgtggacagtccaccgtggcacttaactgtgatttttggacggaggggtatagagcaaaacagaatggaagttcaataggttttgccaccaaaattttggtttttatggtcaactgttacaaaatgtagttcaggtggtttagccgccaatatcccttaaaaaaaattcaagtaattttgatgccaatttttttgttggggggaaatccaatatcttttcttttaaaaatgggttaattgcggcaaaaccctcaataatttcattttaattgcatttaacccctaaaagtcaaattttggcggtaaacccccaatactcgtgttctgttagcaatttagcacttgcatccaatttcgtctgttaactgccatgttagattat

SEQ ID NO: 73716 - DNA, 1367 bp, Cannabis sativa
cggtcggtcttaacccagaaccgaatccacgttattttcataacggtattagacaccactgatacctaacacgaacacacaaatacgtttcaacaattgagatacctaaaacccaccttttatttatttatttatttgttgtttgtgttgtttgaatctccatttccaaagttgaataacttaatatactttcctataaatacagcccatattttcattcctttacaccttttatctctgtggatcattttcaaacccaccaagggccaattttctctctctttctttctctacaaaaagtagtaactattcttcaaaatttcagacaatccaacttcattatctccaacaggtttgttcttatctttcttagatctgtatataatttttttctataattaattctttagatctgcagatttttattttttttcttttagtattttcttataaattatacttggcagtctgttcatatataataataataataataataaaaattcttcaattgtaaacccaaattgaagtttttagagtttgggctctttaatggactaagtttttattttattttattttatttatttaattgttctcctcatttggtctcactctacaattaaacactccatttatgtttattattgttatttaattttttttttgtaattattactcataattatttcatttttttgtatatatgtttacaagaaactataaacattttgcaggcataattgtattttttaaaataattaaataattatattttaaccattatactatatgatcatagttatagttttgtttcggcaattttagtaggttttaattatttttttgttcaaaaaaaaaatagtaagtatatatttcttttaaattaattggttgagtttagaattgaaaagtcacaaatatccttgcttttttttttttttttgctttttcaattaatttagtcacatcctttatatatactaaccgaaggaacttaggagaatgagtcttatgttacattcaattaaaattaattaaaattaatttgtaacataaatacttaaagttaaattagggttataaatgaatacttacgattaatttttaacagtaataatatacttaagttatatttttgaaacttatgtaaataattagctcttaagcatcaaattaatatctatgtattattttcttattgatatatttaaatatattattaaataaaaaataaaaatttaatgatttgtaccaatttaacgtttaagaaatacaaattagatattattaccattaaaatttaaacttaagcatttattttagctaaaaattaaaattaagtatttatgccacaaatgattctg

SEQ ID NO: 73717 - DNA, 801 bp, Cannabis sativa
tcatccaagtttatctgagcaaaaggtgaactgtcttatggcagtggatgacagaagttgggatcttaaggtgatatctgacttgtctaacaatcgtgacagagacttgatcttaagcattcctatctcctcctcaaattcgtgtgataactggtgttatccctcaaaaaattcaatataattgtgcatgaatttttgttttagatatggaagtccaaccaaaggagcactttggcacattccaccttttaccagtggagcactttggcacattgcaccaccaaccaaatgagcacattgacacattggcacattgcacctcctaccagtggagcacattgggcgtactaagctccctgctccgtcagttgctaaggcacaaagaactcctcaactaccaaattacctcaaggaccagattggcatgaaccattaagggaccagattggctctcctcgtgtgctcatgacgatctgggtccgctaaatgcgaaagacacgtgctcttaaagttatttcaaaaatatagtcaaaaaataacaagtgaagagatatttattttttgaatgattattttattattattattttgtatcttaaacctaatccgactatagttatgggaaggtgcacctatgattaagggattttaaatcctagatgaatatatatatatataaggggagtgaaatcacttgtaaatagatcctaaacttgatactcacgaaatcatactcttgagctcccactctcaaattctaaaaactcacatgaggattgaactgttgggctttgtgcccta

SEQ ID NO: 73718 - DNA, 860 bp, Cannabis sativa
aaaaaaatattttttagtaacttattaagttggttaacacattaaattttatttaaatttaaatgttgtttatttatttattaacaaaatataaaaaaaaaatgtttaacaaaaaaaaaaaagaagaagaagaaggagaatgtttaacaagtttatcatccttattaaaaaaaataactttactctatatgtcatgagtaaagacaaaataaaagtaatcagcaaaaaaaaagtataggcattgaagcttaaaagaaagtcagtaaagtatattgatatgtgtcaacctatttaaaaaaaaaccatcggttttcaaaacaaactaccagtatgtgtgtatgaaactattacataatacccagtattttaataaccaacaacaattcattaaataatttgatatttaggtgttgggatgtaattaattctaaaaaatatagagtaacttgtgatgttggttattgtattgaattttaagatactatgtcatttctatatatttattttagaaaaatatcaaaattgttacaaaataagctagatgtataaacttagtacttagtaacttataaaattggttgatatattaaatttgatttaagttgaaagtttgattatatttgttaactaaatataaagaaaacttaaaagttactctttcaggttatttatttttgtagcagtaaaaaaatatatgcttctcacatatcaaaatgatcatcataaaaaatagattacaataatacaatttttaagttaaaataataaatggtgtggctgaaaaaactttttaaacttttgaaaaagaaaaaaaaaagtataatacatgttctgccacatttattatacacacaagaaag

SEQ ID NO: 73719 - DNA, 935 bp, Cannabis sativa
aatactttaatgtttgtttgtttttttattttaaaaaattttactatatttattattgttaaactaacatgtattatattttaatcttatatcaaatgtgttaaaccaatatatagaatggaacaagaaagaactgagagtgggagttcgggtgaaaagaatagggttgtggaacctataatgggggtaatgtggaaacgaagcttgcatcaaagaaactatctcaattttcgatgaagtttcatgaaactagcagtagtgcagttagaagatatggaaagatgtttaacaactatattgcataccttgggcgagataacataccttcgactagtcttaattggaatgatgtagacaagaatgatatattggtcactcgtcaaaagttagtggtaaatttcattttttgagaagaaatgttaattaaaatttaaatatttgacattataatttatttttaaaacttaattgtaggataaatttatttatccaatagaagattcaatcattctcaataacgtgaatatgaatatgtaaggatatatgggtgaatggcgatgcagcatgaaagctcattgggttgagagtggaggaaagatagacaatgaaaaggcaaataaacatccttataaaaatattaatcctatatcgtgagctgtactctatgattattggaatatagaaaaaaaaaggtatacaaaattcttgattctttttactttatttttcttgaatattttacatatatgaattcttttttacttttaaaggtgatttctaagagaaataaagtggcacggtccaaaatgcctatattaagggtgcacggttcgaagaacatcgtgggacatatccatgataaagtaagaaaaggtttataaatcataatatgtatttcgtttaatcaattgtttttttttttgtagattaaccca

SEQ ID NO: 73720 - DNA, 1161 bp, Cannabis sativa
taccctttaccttcaattttctttgcaaatttgaaatatgttaaattttattgttaaatttgaggtatctgtgtaatctcaattagcgtttaataataaaatttaactaatactttaaatttgcaaagaatgtgaagttaaaatactgtcacaagaaaaaatagtgcatagaaattaaaatataaaaaaaattcaccgcaattacccacaaataaaatgaaaaccaaaaatatcattacattactgtagcgaccatggcagctgtggtatattgtatttttctttttaaaggatagtattattgtatttggtggaatgaacagaaagtgtttatgatttcttatttagataagaaaattaacattctcttaaagcttgataggatgaatatcttgacaaagctagttttgattttgtttgtaagatgtaactttggggtggggtgaggctgccggttgtgtagtgttgtttgttgtgctctttcgttagtttgattaatgaatcccttaagggctcgtttggtgtattgtgttggattatattatattatattagtattattaaatacaatactatgtttggtattgacttgtattaatatattatattgtattagtattatttaatccgggtccgagtcctgggtctgggtcccgatccaggtttgggtccgggtcggattctaggtctgggtccgagttcgggtccaagtccgggtcgggatccgggtctgggatccaagtcggggtccgagttcgggtttggttccgaagtccgagtacgagtccgtgttcgggtcccgagtcccggtccgaggtccgggtcgaagttcgggtccgggtttgggtcccaggtccgaattagagattagtgttgacctcaaattctttgtaaatgttataatacaagctaatacaaatcatttgttacgtattaaataatacaacatatattgtattaaaaattttagtcgtaataattaatataatacattgttttatccaaacatattgttatttattatttaatataatacgaccctgcgtaccaaacaagcccttaaagattttcattacatctattttcatgattcattatagtgttcagtagtttgtagaagttgtcactggtgattctaccctattcttttgacgtttcttg

SEQ ID NO: 73721 - DNA, 757 bp, Cannabis sativa
agacagcagctctagagggcccttcaattcaaattcctagcctccaacaatgaagcgaaacatgaagccatgatagtcggcctgcaattagcaaacgaagtaggggctcataatataaaagtgtactgtaagtccaaactagttgtgaaccagatatccagagagtatcagactaagggcaaaagaatggccacctatgtgtctcgatctagggaattgttgcaacatttcaaaaagtataacatttgtcaagtcctaagggatcagaattcattcgcgaatatgctagcaaagatggaatagattccaaaatcgtgcagtacagagtggtacccatcgatcacctggaagccccaaatattaatacataaggggtaaaagttattgatcactctaattcctagataggcccaacttttcaatttttgagttcttgggagcttccagctaataaggttgtggcccagaagattcaatatcaagctcctaaatatgtcattttagatggacgactttatcatagggggttttcttttctatacttgatatgcatagccagaacaaagatgagcagagtcaatcatgaagttcacgaaggttctgcagagaccacacattcggacctagcttggcaaaaaagcttaggcaagggtatttctggcaataaacaatagtgaagagaattgtatgttgtattccatagaaatggtatatattatatacaaagctaggagactaaatagaaaattactaaata

SEQ ID NO: 73722 - DNA, 860 bp, Cannabis sativa
  modified_base (617)..(636): a, c, t, g, unknown or other
tatgatatataatccaattcaatataatacaatataatacaatacgacttaatacgccgttccaaacgagcccataatgtgtaatatcgtacaatttaatattagctcctacttatttaaatttaataaaaattataaaaatcggtaactaattataaaacgtcatgttataaaggtacaagacactttagtactataaaataattgtatgagatttaatatttaattatagaattattagagtcttaagtaccactaatgttttagagaacaaaaaattgacaaaagtggtgtatagattattagattaataagtggaaatgaaataaagataaaacagagcataatttgctccccataatggcaacaaattgattatatttgcactaatgaactcgaacgcgctttacctagacacgggtatctcttttattggccttttgtccttttttgtactaccaaattaattattttctttaaataaaaaatcctttaagaaaacaaaaagaaaagaaaaacaattccatttttctctagcatgataaaaaatcagtccactcataattggagtgtttcattttaattattttcaccgaaaccaaaataataataataannnnnnnnnnnnnnnnnnnnataataataataataataatgacatttcactttattaatttcaccgtaccattttaatgataaattgaagctttttgctttcaagaattttaaattagtattgaggacgtttttttcaaaagaaatatagtagcatcaaattaggtaattctataaatcttcaaaagatactataatacaccttatatttatttaagaattttttagttcaattattttaatta

SEQ ID NO: 73723 - DNA, 958 bp, Cannabis sativa
aattggtggtgttaatctattgccaagagttctttgtctttcttggtgtatgaccatagaaaagactctgttaagtggggggcaaggatcgattaagagaatttgatcacgtgtagcatgataggtttcattcaatcctttgaggcattgtaaaacttggtcatggttgaggtaatcttgattttgtgctgcagctgcacaagaacagggaattcgtgggggaagttggttgatttcgtcccacattgctgtcaacttggtgaaataagcactcactgtgtcatcaccttgatgaaggtatgtcaaggttttgttcagctcgaatattcttggaccgtttccttgattaaacctgttgtttagaacagtccacatctcggcagcagtgtcgagatacatgatactgctcttaatctcaggtgaaacagagtgaagtatccatgacataactaattgattgcatcgtatccaagaactataaagattatcatggatagggggttgaggtaagataccttccaagaatggagttttatttttggctcctatggggatcttgaagtctcttttccatggctgaaaattgcggtctgtgagagttggagtagcaagaaccagccctggagggtctgcattactgaggtagtagggagaccgaatatcttcatagggaggtctcttgattggcgtggatcgaggaagaggattttgttcctgtgaggattgatcgacaggattggatcttgagacaggaatctggtgttgattgttctgttcgactggattaggtcgagaaacaggttcgagattgggatgtaaatcgtcagcgaattcgattgttggtggtggggcgttggtagtaggggtatccgcggtgtgggtggtgcagtttttaaccattttttcaaaccaacccgcacatgcagtttttcctattttccaaaccgcacccgcaccg

SEQ ID NO: 73724 - DNA, 616 bp, Cannabis sativa
ccccgttgcctgagcccaaaacactgtcttcttcatgtcgactgttgtcctatttccgtcctcaggccattccttagtgatcagcaacttcccgttgataatccagggcctcctctttagaatctccttacaatcttcttctgaatcgaagaagataccccaaagacctggtttaagggtcttgaacctccactggccttgtattctctgtttccatatgtttcctaggatgtccttcagttttgttctcgataagccattcccctcgaagaaacatgccaatattcctgtgtttatcagttcattacttatttcaaagtccggctctaagtccagagccattgactgaagaaaagtcgttcggagtttttccagttccccgtccccaccttctccttcattcttctccagtaaagggtcttgtccctcacattataaagcttatctagttatatctcatcacattctaaaatgtgttttcctctggattaataacctagaaatatatcgcccacctactaaaatgatttctaatactctattaaaccaaagtcagattttatatatagttctttgcattgttttataaaatagttgtgggacattaactattagt

SEQ ID NO: 73725 - DNA, 567 bp, Cannabis sativa
  modified_base (519)..(521): a, c, t, g, unknown or other
gatttttcttctcctccggttttaaagctttcgagcgtttggatcagctcactaaatgggccagggttccacccatgcaccgtacaccccccacctaactctttttaaacaatgcgaaagtatttgctggttataacaaggatgagttgaacgtgggggatctggtcacgacagccaactgtcggaggaccaagttgatctcggagagccaatcggtggatgaattcaatttgtccaaggttctttgccctcacgtctgaactcttgagactgagaaggcgctccgaggggacattatctcttatgcgaaagacaaataaaacaagtataaattcaagaaggaacaggagctggcctataccaatgcgcaggccgccttagggaggattctcctggaggaagctgggaaggagcaaacccctattcgtcctaagtttcttttcccgattcccaactctggggcccctggttccagcacttccggaacttgtaagtccccattgattattcatcacgtcnnntctgttcaagattatgctggcctaaggctagtggaatttgacagtc

SEQ ID NO: 73726 - DNA, 591 bp, Cannabis sativa
accaaaaccaggaaggatcacaaatatacctaaaatttcctaagtaatattgaataaagaacctatagttggtcccaattacattgaaaaagagaataatgatgcatatgaaatgacgattatgttgttaattagatccaaaaagatgtaaacatgtcatgagcaatataaacttacaatcgtaatttaaaccaacaactttattttacctaattgaaactggcctaaatgcttccaaacgccacgcaattccaatcttgactgttgaatcaacaaccagggattaaacaatattcacaacaaattcaaacaatattctcgttatttcttggaagacaattttccatctctttatgtacaccaaaaacaaatccaattttcgaaagaaaaaaaatccaatcacgatcaaacctttacaaaattcgaatccatataattgagaactaaaagtaaaatctctacaattgtcatccctaacatggtatctcgcattctatatatgctctctactaccattttgaacgactatttgtttcaaaaatcccaaatgaactcaataccaacagggaagccaatccaggttgaacccaa

SEQ ID NO: 73727 - DNA, 721 bp, Cannabis sativa
  modified_base (140)..(142): a, c, t, g, unknown or other
ttatatgaggatcttgatagtcttgaaatgttagatattcttgtgagctcattttgaatatgatagcgcatattaagaataagagcaattatagaattttttttaaaaaaaaatgtaatgtttaattgatttaataaatnnnttattttactaaattattttaaaattttattaggttattgttacgttcgttcgtatatttaattatatttttattttttattttttatgtgtattttaaaaatttataaattaaaaggaaatcacttattaattttttattttcttaaaaaaatattaaaatcttaaaaatttaaggaaaataaatataaagtttaaaaatattagagttgaatatacttctaatattaaaaataaaaatattacaaatgatatattaatatttatatatttgtaaaattaactctactgacatcgttaaatttaacggaatattcttatatttttaaaatatttttttaaaccaacaaaaattattaaataattttattttatatataaagattataaattaattattttaagttattaatataaataatataaaatacaaaattttttaagtaaaatttatttattatttggttggacttggtgtaatatttaaaacaaatcattatagttattgcaaagtaaaattaaagatagtcttataaattaattgtccagattcaaattttacgtttaaatttattattga

SEQ ID NO: 73728 - DNA, 944 bp, Cannabis sativa
tttatatacagaaaatatggtctttttatgttgtaatcttgttaagttattgttgattttttgttatatgtatgctatttcttgttgttatattttgatgttattttcatgttatttttatgtagttttcttgttgattttatgttatttttgtgttattttttgaaaaaccgtaaaaatgtaaaaaataatattctttaaacgtaaaaatgtaaatattttataaaaaatagtgtcttatgtaattatttctttatttttattgtaggacagaatttttttcagaaatattgtatttttttttcaaaaatattgtataagttttatattgtgtactgtgttaaatttttactgttattccacgattgctttttagttgttctactgttgtttttaattgttctgttttgttgttttatggttgttttataaaaagagtatttttataaaaaaattctatgtgacagtaaaattataaactttacccaaaatttaatatttttgtaaaaaacccaaaaaaaaataatatcaaaaataatctgcaacaaatatgaaatgataaatcgagtttgattgtttatttttcgaaattgaaaattattttcaatcaaaatgatgccctacctaaggattctatatgtcaatgtccatatatattgttgatttaatggttttttcttttattttttcattaaaatttataattacaactaacaccgataaatcaaacaattaattaataatgaccaaaatcttatcaatttgatgtgttaaagttgattaaattgatgtcgtgttatttattctcttttctctctaatctttttcgatatcctagattgtatactttactgatgtgctctatttgatgaactaaatttgattgatatttgacctaaaatttttgtatcatttcctgctcgaaccaacagagatagtaacaa

SEQ ID NO: 73729 - DNA, 968 bp, Cannabis sativa
atttagggcataaaacccgacaggtgaaacatcagtggtagctggtgatcctctccaaaatggtcaccaaccaaaggaacgtcatgatgaaaaccccatcagagaagataactgagaaggacattatgaaaacaaagaaggtgattccgatagggaagaggatgaatactatacaaaagaaactttcatagatccaaaagtcacatggttaaggaaactaatccaagacaaggaagcgaagttggcgtacaaccaagtaaagttggaagaacaaaagaaagttacacgccaaatacaagagactctcctacaactacaaagctaagcagcaatgaaaagcctcaatcctaaagttcctccttaaaaccaaggttttggagtggggatctaaattaatgacgaagttcttgttgtatttttatgctttaaataaaacttaatttttatacaattttaattttatttattaataaaagaaaataaattattttattactgtttcgtatattacttaatttacatgttactttcatgatcatatgtttgatatatatatatatatatataagttttattaaatccttatcatattattattcaaatttatagtattgtctacatagttgatgccacatcatctctcttttaaccatcctttatatatatatatacatcggtatataattttatggctgtagtataattatttcaatgatggtatttaattgtattagtatagtatatatatttttttgttaataatattattatatttttaattattgtgggcatatatatttttattgtatagtatatattttttgttgtatatagtatattatttacttaaaataatatttagtttctcttttatggaagaggtttcaatggttacatcaaatatgtaaccatcatggttacatttatttttagtcattagatcactattggatggttgtgattaattt

SEQ ID NO: 73730 - DNA, 1061 bp, Cannabis sativa
aaaaataaaaaaataaaaaagtgactgggttggtggacaggttcaagtttaacctgaaactcggtgaccataaaaaaccaacctgcgaacctgccctaaacatgatcctctgaaacagaacgagtttttaaaaaaatttgggttcagtgggttaggtccgagcgggttggtcgaatccgagtcaaatctggtcaaaatgttcagtcctaattttttccctaaggcacacacacaagcatatataacacataagggaaattttgtcatttccactcacatacaaatatcacataattcatattttctcatttaacacataaaagccataactaaattccataaatgtattttggaccccgaacccaatttggcccaaaatacccgtgtgtgactatattgtgctgacttgtcagaaatcacctgcagaatgatagaacatacatactatataataatatagtccataaacacaatataccgtaaaattatgatttttacctttattggatcaaaattacaaaaatacccctaacacacaaacggggtcttaaaatataatatattacaataatataatattaaatcatataataatataatttctcattaatactttaattaacttagttagggttgctaatccgattactaaattttagggtattacaatcattccatgagacttcttcctgaatagcaagaaagttgtctcaacaacctttggggaaatagataactatccataaaatgatttttgcagatctttttatttggaggaaccataccataatgtattttataattttgattacttttatatctttatctaacaatcgttatccataatcgtataaaaattaattataattattatattggtaataatactattattttaattgataaataaatatttatcatttttattattatcaaattatggaactttataatgtgttatgctttcaagctactctattcgtgcttacgtgttgtactttcaagcttgtcatgtcgtgttgtgcggatccatatttttcatgtcatattgtgtcgtgtct

SEQ ID NO: 73731 - DNA, 2041 bp, Cannabis sativa
  modified_base (31)..(40): a, c, t, g, unknown or other
tttcataattaaacataaacaactgctaatnnnnnnnnnnactaagcgggctttacagaaaagttattttaaacaccaataattcaatacacaatatatcaatatcatcacttcatgactattatgataagaatatacatgtacgagtacaaccttaattcactatgttcatcaatatattacaataaaatagaaagagaaaaaaaaattaccattaattgactgatattaagtttctattagggtggacaacatccaatccaatccaattgaactgaaccgatccaatccaatccaattacaaaaaaaaaaaaaaagatctccaattacaattggattggattggattggatgctaaaagttagattattctaattggattggatcggttattggatgtcaatctcaaaatctaattaaaaatcgatctaatccaattacatttatatatattaaaaatataatatatattaattatatttttattgaattatatttttgtgttaaatttgttacagttagttgttttgtgtatttattttcatgatattttgttctattttattacttagaaatgttgttattttaattatttgaaatttttaattgcattacattgtaatgatgatatgtttatggagtattaaacttaaataaaagataatttaatttttatgtattttttctcttcatatttttatgttaatagtaaagtttaggtgtgtaattggatatgcaattaaaaaaccgatccactctaattagtaattagattgaattcgattggattagattttgaggtctaattggattggatcggatgatgatttttcaaattcaattactaattggattggattggatgaggaaaaaaagttggattagatcagatgcccaccctaacttctatcaataaaccttttctatcaccatatttatcacttcaaccttatctatatcaagaattatgactctaccaatgtgttgatgccctctataatcaagaaacatttatatgagtgagagaaagaataaaaatatacatatgcatattattattaataagataattgataccccatatatagttgaataattattgattaggttggagtatttttttaagatatggtgctatatatattaatgttaaataggttatataaattcggttatttatatatatattttaaaataatatttttttatcatgtaaaataatatttttttttttttgaatatatatataaatagatatagatatagattttttaaaaatcttaataaaaaaagtaaaaaaaattatttaaagaaaatgtaaaaaatagatatttgaaaaatatatatatcaattatttaatttttagaattaataaatagatttgattttttttagaattttataagaatattttatttatttaattaattaattaatatttataaacttaataaaaaattaaaaaaaaaatgagagaattaaagaaaaaatagatactgctatttgaagtgattttagaccgtcacatcaccgcctcatacttctcctttatatatagattttttttttcattttactttaaatttatatattataccacatattaatttttttttaaaaaaataaatcactaaaatttcactttttttaaaaaaaataatttaatacatatatttatttcaatatactatcaatatatatgtacatattctcatctaaaaataaaattaaaactacaaataatattgaataaaaaatgtataaagtattgaatatgtaggattttcttgattttccaagaatgcccctacaccaactcagtattagtttcaaacgacagggtcaaatttgaccaagaagagttagaacacaattaaaccaaacgaccaagaaatctagtcgtttaaccctgcacgacaactcgtttaagtcaaaacgatttgtcgttctccctggaacaaaaccaaggcaagtgagctaaccctagctcagaacttgccaaaagaaccttcgagagtttgaatctctctctctctctct

SEQ ID NO: 73732 - DNA, 560 bp, Cannabis sativa
tttaattttagttttgggcgaaaggatattaattgtttgggtttgggtattaatatttaattttattcaatttaaaatattattaatgttttttcttaagtggtcaacttatttccattttatttttatctattttatttaattatgtttaaattttattgatacacgcattagacaattgaatgttatattttttctaattaatcttgttatgattaatttatagttttgttatataaatctgattaaatattttaatatttttattctatgtttgttttgatttgtttctttttattaattattcaaatagtattaatatttgtttaaaagtatatatgaaggcacacgggtttttatacaatattgtttatagttttgataacttttacgacttttgtgccttttatggcttttgtgctatttttatagtttgtccttatttgtttagaaatagttttgtggtttggtcaattgacaagagaagtgatcctgtttgtgctcatgatttctatttcaacgactttttctcttttgacagataagtatttcaagtttaa

SEQ ID NO: 73733 - DNA, 912 bp, Cannabis sativa
aaggccttacatgcactgcttaatgttgtctccacaaaccagttaaaggtcattgctaattgtgaaattgcaaaggaagcatgggagaagctaaaaataaaaaaaatgagggaacaaatgtagtaaataaatcaaggctgcgtgctttggccaaggcatttgagaatctgaccatggaggaaaatgaaacagttacagaatttcatgcaatgttgtgtgatatctctaatgagtcctataccctgagaaaaacctactccaattcaaaactggttcaaaaagtacttggagttctcctaagaagattcatgtctaaagtgacctccattgaagaaatgagaaacattgaggtatttaatctcgatgagctcattgggtcgttgcagaattatgagctgtcactgtccagatggaagaaaacaaagaaacagaaagatgcggacaaggataaatctgatgtgagtatagctctcattcatcaagaaaacaagaaaccgactagaggaaattaatggtattcctgacgagactgttgccctgttactgagatattatgccaagttcttgaaaaagaactacaagaagaattttcctgctgataaagaaaatgctctcaagaagaacaacggaggatacttccaacaaggacaaccatttgctgatcaaaagaatcgaggaatcaattaagtgcagagagtgtgacgaatatggccatatccaggcagagtgcgcaaacactctcaaaaagaagaaggcccttgtagcaacatgcactgacagtgaagaagaaaagaactccactgccagtgaaagcacgaatgaggataagcaagtgttagcgttcatggtccaaagctgtcactcaattgagtatggagatgaatggattttccactacatcagaagcagaca

SEQ ID NO: 73734 - DNA, 759 bp, Cannabis sativa
tgcagaatccctcccagctcacaagaacaaaaatacattaacaatctcaaatcttaaccttcccaaaacaaaaatggctctttcctccaaacccaagatcttctattccgtcagcccaaagcttgggcgaaagtgtacatagcctgtgagtccaagattattcgaccagtgcgtctctggagccaggatcgggtgcttgatcagcgcctccagcaagtgcaagccctcgtggtggctgaatctgacaggttttacgactttgggtttgaaggagagggagcaatgtgaagagcgtgagatgaacggctgtttggcgatgacaaaggagaagtgttttggcttccccaaagaacggtgcttgaagtagtttagggatgcgagggttgtggagaggggtaggggtttgaatacaaatcaggttcagaagttggttggcttggtaactatgggggataagtgtacgttggtttgtttgattagatttaatcaattggtttctcatcgagaatttgtgacaaggtattataaggccagtgagaatttgggtttctgcaggacccgcagccgccgtagatccacaagaggtgcatccgccattgatgacggagaagaaccccatcagttcctgatcatccacgaagaggtcctcgggatccctaaatgcaccgtgagcgcacacgatcgtcaccccaatgatcaccgccgatacgagtagcgacaccacgctcatgatcaagatcgccacaagagttgtcaaaa

SEQ ID NO: 73735 - DNA, 818 bp, Cannabis sativa
taacgaggctggacagacgacaccttaaaaatgtaaacggaacagtactttggaggattttcccaccaaaatatgaggtttgatggttttttgtaagtatattgatagttgaggtggttttacggtaaattactcatcatgatgttatagctactatatgtacagtagaactgaatttgtttggtaggagagaaaaatatagtaatgagaccctcaaaaaattttcctcctaaaattggagagaaattgaatatatgaacaaaaatagatatgtaaattactaattaccttcaccaataattattgaaattaaaattatacaaacaaaatagtaattttcacatttgaaatttttttttttgccttatttaccaaacaatagaaaaaaaatattttcttttttttccttcataatttttttcctttaaaatttttacatttcttttttttttaacatagtttaaaattatacatttttttttacttcattaataattatatcttctactttaaaatgttttaactttttgattataaattttgtaaaaaaaaaaaagttaaacttatgtcagtaggtaataataatataatcatcacttctctctatattctccaactaattactcacatgactggttctctcacactgagtcaaagtcaattattattaatcaactacatgtccacaattcatgtgtatttctatgaatattgttataagcactagtggtgcctaatactttttcgacatgtcgcgttacgattgactagcgatactctttataagctattacatataggacccaatacttagttgg

SEQ ID NO: 73736 - DNA, 661 bp, Cannabis sativa
tcctcacccatgcacactataaaaagttttatataaattttatttctatataatcaaaataatttcttaatgaaaaaattagtttcttgatgaaaaatctttggtgagtttcgctctgaccgatcgtccccggattggtaagaaacttaaaagctcttgtataaattttacttttatataatcaaaaccagtttcatgatgaaaaaataagtttcttgataaggggtctttattgagttccattatgaccgatcgtgctgaatgagtggattgccaattattgtttgctggatgtagagttggtgaatgaaggttgataggtggagttgttgaggggtgatggaggtggagtttgagagaggagaagaaatcaaattttttattttctaaaattgatttatctaagaataaatataagttttgaaaattaagggtgcgtttgaaaagccacaatataaatggatttgtgtgtaattagaggtaattatacaatttggcatatttatctgaattggaagtaatttaggagtttcaattacactctactctccaattgtcatgacccccatttgaattgaatgtaattacactgtgtaattattaaaaactttccatattaaacattagctactaaaaaaatattattttcccatgtaattac

SEQ ID NO: 73737 - DNA, 913 bp, Cannabis sativa
atattcctaatatgatttggatgaacaattaatttcctataaatagaatagcatattaccggtttaattcataataattcattaatgatcagtagtcattaaaaataaatataattaagttgaagtgatcgaatcaattaataagaatgggtggtggtgcaattattgatagtaataatgggaaagaatatcctggaaaactgacatggagagttgtatggagttgcacggttgctgcatcaggaggtttaatatttggttatgatcttggaatttcaggtggagtcacctccatggattcattcttaaaccaattctttccatccgtatatgcaaaacaaaattcaatcacaatctcagatgatcaatattgtaaattcgacagccaactcctaacactcttcacatcatcactatacgtagctgctttggtatcttccattggagcctccaaaataactagacttttgggaagaagagtcactatgctttggggtggaattctctttcttattggagcaattctcaatgcatctgcccaaaacatttggatgctcattcttggaagactcttcttgggatttggcattggctgtgctaatcagtctgtcccaatttatgtctctgagatggctccatacaagtaccgtggagctctcaacatgctattccagcttaccatcaccattggaatattggtagccaatttgttaaactactttttcgccaagattgaaggtggttgggggtggcgcctcagcttaggcggagctgccgtgcctgctctgctaatcatagctggaagcttaacccttcctgacactcctaactccttgattgagcgtggaaaacaggacgaggctaaggaccagctcaccaaaatcagaggagtggccaatgtagaggaagagtt

SEQ ID NO: 73738 - DNA, 1031 bp, Cannabis sativa
catctacgttgtagttatttactggaccttgcaaaattttgaaaaatttagaagaacttattacacagtaaatatgattgaaatggtatgttacacatgagattttttttattttatacgtgtgtgaaatagactgtttgaacattatttttgacgtgttaagtttttctcaatttttgaaaattttgtaggatgtctaaaataactataatgaagacgaccatgaaaaaaattaaactatttttttttttcagatgccaaaacagataaggaatacataagtagctcccttttaagggggtgtataataatttttttttaattatatatcttacttttattaattatgtttaaacaaaaatatagtatgatataggttggcttcatgatactaaaaccatctagcatcttatttaaatgtaagtctacttaaaaatacaataactaacaaaaattcataaaaatgcaataataagacaaaagagataacaagtcaaataattatatcttaaatcatttttactatttatatatattttattttaaaagttatattaaataatatacttttagtttaaccagccaaatattatatcataatgttataatttaattaaccataatcatatgtaacatttatattaactctaaccttatgtaattaaaaattatatatatgatatcaataatagactttcaagaaaatttaaatccaaagaaagatcgagttagagtcagaatgcaatgcctcatggaaatgatctcagaaatcacattaatgacaaagttcgtggtcgtgaattcccagacaacaatactaagcgtttgaaagatcaaatagctaagttaactaaggtcacggaacatcaagcttagaaaaaaagtagattcgtatttgatttgaaagaagaagattcagaaccacgtgtaagaagaataatagagacgcctttgtgggaacactttaaaatgccccacatggaattatatgaagccagaatagatcctagggttcatctgtccaaatatat

SEQ ID NO: 73739 - DNA, 876 bp, Cannabis sativa
taaaatcttaactatttggatcactttaaaatttataatttactaaacactcagcttaacttttttctactgttctgctacaactatttttctccacaacacaactataactacttttttccatcacacagttgtgccaaattgaccctaattaatgaaaaacttgtgtcaaaaaattactagttagtccctaattaatgaggtagtgcaacttgctaagaataatgaaaatcttcatactaatcacttacgtattatgcggaaggtggttgtgtcgattgggaaaagaccagtcgtccagaagtattcatctttaaaaggagttttatttggcaaaccttcaatgatcttacgatctcctatgtgagttccaagatagtaaaaaacccctactgcattcttcctcgcaggaacaaccttaacagagtaaagatactctatttccaggggagtggggcactcccagttcaagatttgtacagaaccttcaaacttgcaaggattctgtatgaaatgggattcaactggaatggggcaagcccgagatggttcaggaagttcttatggtagtctcatagggggataatggctctagccctgatgtgttcgacgctccaagcacctatccttgtccactcgtactagccttgccactggtctcctttgatgcttcgcaagtaaatcgttctggtggataacaactgaactcactaacagccaccgatctaacacgacattctcgcttatatttaataccacaagtcgttagggtattacctacgtaatcttcaatggatcgcaccttcgactctattagttcggccttgaaggtgacattatgatcctggggagcctttgatttttgaggcttggagg

SEQ ID NO: 73740 - DNA, 1456 bp, Cannabis sativa
cgactaaaataatttagtcactgaaagttagtttttacgactaatatttagtcgcagctattttttgtcataagacaatgtttaattggaaccaaaaattattaacgactaattgttagtcattgcttgttatttttagtgactaaatttgtactaagtcacaaaactttggcgccaaattaatacttgtgacaggagtactaattttcagcgactaaaattatttagttactaaaattctatattttgtgactaataaatagtcagcaaaagttaatgattttttaaccactaaacaattagtcgccaaaaagattgtagttgtaattattgatgatttatatttagaactatttgtttagtcacgataaatataatattaacctattatattttcaagatattttgtaacttataaaaatttagttggtatctcttaaaaaaaattagttggtaaaagaatattacacttgtgaaactatgacaaaaaatgtatgaaaataaattttaattattgacatagataaatataaatattttatatatattgagtaattttttttagatactgaattttattttattttattttatttaaagatatgataaacttaaaataataaaataatttaatatataacatttagatatttcataagataaaataaatcaatacttatttttttattaatttttaaagtattatttatattttttattaatttttttaaaatactgataattagttagctatatatgtaaatttattcatacttatgtatgaaatatatataaattagatattattcaatgatattgaattcaaacagaatagctatttaaacaaaattaacttaaatattataaatttaaattttaaaattaattattaatataatatttgaaaaaatttaattaagtaaaacacaaatagtttattgaaaaatatatttttatgtgttgcccaatttttgacaatagaaccgagaaattattagccgaagaagatcatgtctagtcaacaacaataaaatgataagagaaatgataagggacaccttttatggtctcaaatactaaaaagatgacatactgttattgatgcaaatttataagttttacatattttaatttattagtatttctagcatttccaatagcgacaacattaataattaccaaaatattgttattgtgataaatgtataaaaaatacaatttatttattattatactaaattcaaattaaaaatggttttgtgaatttttttaagagaaaagctaaaaaaactgagtgctcccgcacttatcttccctccttaggcataacttttctcacgttactccataaccattttttctaaaaaagtagtttcaggtaaattctatctcaaagaaggaacgaattcgatataggctatgagctttgcgataacggaaattgacaggatatacg

SEQ ID NO: 73741 - DNA, 1336 bp, Cannabis sativa
  modified_base (550)..(556): a, c, t, g, unknown or other
cgtagttattcgggtaattctatcccgagtaacattcttgatgtaatcgtgcttgaaatgatttaataaaattcatcttttattcaaaaaaaaaaaaatacattaaaaacgataaaattatccctactcgatgtagattatctatagaggatctttaattatttggattgaaacaatggataataaatagcgtatctttatttggtatacatagagtgttctatgtaatcaagagtgcaattttgagttggagtcaagaggaattaataaattaggaaatttacttggtaaatttcagatctacttattgggagcttggttgcataggcccatggtccccacactaactggtataatattgtttgtaaaataaattaaatgattttaattaagtaatgaggattctaaataaagactgtgtcttatttgtaaattttactaaagaaaggcacaattgagaagaaaagagaattcaaggttaatttattaattaagagaccttggaatgtctaattaataaatatatttaaatagcaattttatttgatannnnnnnataattattaaatagatagaattattatttaaataactagagcaaaaaaatggcattgctgaagaaaaacaagtttgtttcattaaggaagcataataatggcaaaattctaactaatgggcttcataagggattcggccataagggttcattctaagccattgtgtctttctaatcggcccatttagctctaatcctaaacctaaagaattcctacaaatagaacattaagggttttgattctgatgatgattctagactctcttttatttgacaaatcgaataaaaaagaagactattattttcgaattcctcttgagatttcttcatagaaatttatgctccttggtttgagaatatgtccacacatgtcaaagcaatacctattatagtgagaaagattgggtagaaaaatagtcaactaaaggagatccaagttcaaatcttgataatgctctgttacagataggaatcaagggctagagatttgaatggaatgagtcatattattccgctgccattaatgtaagattttttataactttatatgtatttacttcattattttaggaaatttatatttaggatattagattatagatttataatcaacatacatattagtaatctagatcctgataaaatatgttccaacagtgttgatacacaatctagatccaagtggatttgtcgttctctaaaacacatgattcaaagacaaaagcatcaccttcgtttgaattatttagaagcctgggacattgttcttatttatgtccc

SEQ ID NO: 73742 - DNA, 1127 bp, Cannabis sativa
  modified_base (1016)..(1028): a, c, t, g, unknown or other
agaataaagattgttgttataaattaagatgagaaatcatttacaaaaataatatttataggtggaggaatacaatccaatcaaaagcaagtctcatccacccctaaagcaaatttagccaaattaactctgggcaatcatattagctgttcgtttgatgtgagttacatttacattagagaaaaagaaaagaagactagaaacatctgaaattaaatcttggaaagaagaaaatttattagatggaagtttgcataaagcaatggacacacgtagagcatccattttcacatgagtaattggcgaattgagttgaagtgcctaatttcagctatgaaacattgattgccaaggcctccgtttcgtgagctgcgaaattgccaactactagtttgaaagggctgccttcacattgcctacattgtcacgaataacagctcatattcctattctttttttgttgaatcaactgtagcattcacatttagtttgaggttacctggtgttggaggtgtccatgggactggcggagccgtgctggtgtgaggctgtgctgaagtaccagtatcaggcctgaatttagcttgtgccactcaaaaattatgcagatagttttctgcaaaaaatgtaagattcttggcaggttttgcttggtgtccatgtatcacttgatttgaaacaccctaactagcataggcgtgttaacgtgattttagacgtagtgtgcagctcattgctaatcaacgaggtttataatgaaaatagtgattaaataaaattttgcttatttaattaaatacttataatattgcatacaaaatacttcgggatcccttttacaaatcactttacaaaaagtttgctagtcatttacaaaatatttgtcgcccagcgactaacaacaaaagtcctgatatcccgaggatcgtacgctctaggcctaaccgtcccgacatgtacaaccttcttctgctcgtcttcacggttcctcggccttagccttgcccttacctacnnnnnnnnnnnnnactgtgagtcgacagactcagtttgaaaagcataagtcatataacatacaaaaatcctgggttgtgatcagacgcccatacccctggccataaccctaa

SEQ ID NO: 73743 - DNA, 1457 bp, Cannabis sativa
  modified_base (985)..(987): a, c, t, g, unknown or other
gatatactattgtgcaaaataactataccaaacacttaattattcaaggttataattgtaattttattatcaaatttttaattgaacaaacattttgttaatttttttaaaaaatagacatttattaatttaattgttaaatttagggccattttacatgttagccctaatttctattggatatgcttaatatttaattataacactgcagtttaaatgactaaatattttttcaccaaatcatgccatctgcttgcaacaaacatcaaacaacaaatatatactaattaatgcaaacttaaactatatgctgcttgaaggacattctcattacggtagtgtctcagtctatgttctcatttctttttccactgccgtctttctagaaaaataaaattattgaatatatgaggtgtttttttttacaactagacattataatagtatagcactgtacacacctaccaaacttaccaataatagtatccttctgtgatatgtttgatgaggtgggtatagctagcactacataatacatatacaatatatctctatattaaaataaatgcgcaattcaatcagataataattgtgacctattattctgatctgatttatattttgtctgaacttgaaactgtttcttagttaattagtgtggaaacgataatgaacctaccttcattcaaatccactagttttagactatgtatacactaatttatattaaatttgccaccgtcatgtacaccttatattgtataatatattttacatatacagtatgggactgcagagaatactaaacaccaacaatattatttaacaatttatatatactatataatatctactagctcataggtttgtgagttcggtgtatatatggtagaatttgcgggttgaacagctaattataggcccaaacaaactttgatgtaaaagtaaaaaaatttaaagaattattttatttatttatttattnnntttttttttgaaaaagaagatctaaaccaaaagctagagcagggctaagatcttcaaggagaggaactgaaaaggttccgaattatctctttgtccgttccgagggctgatctggcaaggtcgtgagctgtggtgttggtagacctgggaatgtggtggacaacagcgcctggaaaagacgacaaagagaaaactatgagggctactagacccgagagcgctgagcgatctggagagaatttctggatacggtgcaccaaagtctggcagtcggaggtgatgacagcaattggaaaacggactgcttgacaccaaaggagcactcggtggagggcttcagcctcggcaaaaataggcggaagagctgtatgtgaagtagccataagagttgcaatcactgttcctttagaatcagttactaccgccccatacccgtgcttgttagttgattgagaaagagctgcatccac

SEQ ID NO: 73744 - DNA, 712 bp, Cannabis sativa
aaataaaaattaaaagttacccataaatttctcaaaaaccaaagaatttcagttatataagcacactttatatagaatagatatatttttttcaaagttcctctaaaaatttaataaataaccctttaaaatatttacttttacactttcgcccctcataataattttctacctccgtgatgtatctattattgaagaaccaattttcttcagtactcttgttacggacttcccggctagtttttcttgcaaaatttcttttccttttcctttattttttattaaaaaaaagttaaataaatagaagagagagaaggccatttgcaccgtgtaagacaacattataactgttaatgtatatattagcttggccttgttccaggttgctttgttcgcacccagtaatgtttatatatatccttaagtactattattttccatcaaaataaggcttaaaggtttcagctatataatctctttttggtgacagatattaaagtggaaaatgttgactgctgttcaattttctaatgcgcagtacttctatatagtactcctttaagctttatattatatgtaatataattgataatatatagctagactctgttttgcatgcgaaggagagaaagctttataaacttgaagcatacattgagtgatctcttcatttcttttctttgcggccaatcagccttgggagtattcctat

SEQ ID NO: 73745 - DNA, 639 bp, Cannabis sativa
  modified_base (33)..(41): a, c, t, g, unknown or other
ctttatgctttctttatgctttcttgattaatnnnnnnnnnagattgtgccttgtttggctctgataccactgtaggaaattattactattttacctagaccacagcagagagaaatcagaaaaaccaaggccaattaaaccttttacctcagtcaaagcaactgttgactcccacaaataaagccacaaaacgacagcccctcctatttactactacaggtcgtttttaattaatacaaaccctagacacacatcagaccatatatatttctttatctatatcttcataaccagccacctaaaattaaaccctagcagagacaatctccttcaacgacaacagcaagataaacctagcaaaactgatattttcttcaatgttcttctatgaagaacatgaataacaactcttagaaaaacccagaaattacactctctgcccagaaaaataaacccagaaaacaacccaaccgagatgaacaaaacccagaaaaataacccctaaaccgattcaatacccaggaaaaacaaatagaaaataaacaaacataatatcacaaacagagaaagtaaaagagagatagcaccagattttatagaggttctccaaagaatctgggtacgtcctcttgagctcg

SEQ ID NO: 73746 - DNA, 629 bp, Cannabis sativa
attgcattaaattttataccatcatagcatctctaatagtacataattttattaaatttttgtagaattttcactttcacttcattaatggtgttagattttaaatctacaccaacttagtttaaaatttttgttttttttcttttacattctaacatttttttttttattttagtttaataaataatcttacattttattctcaaattaaaatttatcacaaaaataattattaatttaaaatattaacatatttaaaaatataataacaaaaattaatattaatatttgttaattcagaatttagctaatattattaattaaggcttgataattaatattgtgaattattataagtgacaaagaaatatctatatatatattaaataataaacaagaaataaatattttttaacgtagtataaatttacatattacacaagttagtgttatttctgagatttttatgaaaatacaacttggcaaaattttcctaaattagaattttggtcctccttgttacatcacttctatttgtagggataggatagcaaatatctttgatctaatctatacaacacttataaaacgtgaacactccatttatttcatatatatatatatgggtg

SEQ ID NO: 73747 - DNA, 1158 bp, Cannabis sativa
tgaaatattatacaagtcatctctcttgagtcaacacaagaaaaggaaaaagctagctaatttcgtaagttataaggattgatttgttataattagaatactagccacaagctaaaccgaaacattagtcttaattataagttaatatctattttgtgatttgtgagaattatatgatgagtatttttgtagtggggtttatgttcatgctcttgttttctacaacttcaaaagttgtgaattcagatgagagtagtaatacacctcaatgcatacccaaagagagaggctctcctaaagtttaagaccactttaaatgattcgcgctaggttatggctccacatggtccaataatagcaccactcaaaactgttgtaaatggagctgcatcacttgtgcatgaagaccaaatcacacaataacactcttttaatactaacaaatctctctctgtttttctattaaatgaacacaccaataaaactcttttaagagctctctcaaactggatctcttgtgttctctgttgttgtctcggttaaatgagaagaaaaatatatccttttatagactgtgatttctgaacttagggcagagccctaaagatattttctgtaactgtttttatcttcattagtcttcatctttgttttgttgtaagttgtaagtgtgggtaaatctgtcattttggaatcttgtgaatagatttatgaaacttagggtatataagagaatctgtaccaacatttttcatatttctttttagtttttaaatattcatctatcaaaaacaagacttttcccagtgtatatttttgctgtaaaagttaagatttttcctagcacgttaatgtgctggtaaaagtaaattttttcccatcatatatttttgctgccaagttagactttttccatcgtgttaattaatatgctgggaaaagacttttgccaacacacatttataatggaaaaagtataacttttaccagtgtatttacatattgggaaaaattatttttgctaacgtttttcgttttatgctggtaataaaagttctaataccaatgtgaatttttcaacttcttttcccagtgcaaaaatatactgacaaaaaatatatttcttgcagtgatattaaccatacagtaaaatatttt

SEQ ID NO: 73748 - DNA, 928 bp, Cannabis sativa
acaacaagtattgtgacaaaaaatacatttagttacaataaattgtaaatctttgtaacgaatacctagtcacaacataggaataatgatttattattaattacaactttttcacttttggacacaaattttgttgtgtctaaaagtatatttttttgtagtgttatttggataataactgaagctataagagcttgtatatgcggatacacggagcgaggaattaatcatagaagaccaactattaaaaaaaaaattgctaaacttgatttaatattaaattcaaatatttcaaaatacattttacattgcaaattcataatagaataattggagcatatcttttttcacgtctccaaaatgtgtgtggatttatactaaattatttattagatttattctttactatacactcttaccagatataatcgtaaaaaaagctattataatgcatttttctttatattatatttatgtatttattattaacaaaatttgttgaatctatattatttttcatccaaaagaaaactatatggcttaattaaattgttaaataatttttaataaaattgcttactcaatctatttaaatataattagcaaaattaaataataatatacgatttctaaaaaaataacaatatgtaaatttaaagatagaaaatatatacatctgacgataaaatacaaaaaaatgttcatatagcataatcaaatgtttttcaaattaagagaagaaaaagcgaactttttttattaacaaaaaagaagtaagctttattaatggtatatatataatttttcttaattgtttttcatattattagtatttactattgaaatagtttgtagattaaaaaaaaatataatgtttattgatacatttatttttcaaaaaaaaatctaaagaattaactctataaaa

SEQ ID NO: 73749 - DNA, 1197 bp, Cannabis sativa
agggttttattgtccaaaagataaaagggggaaaaaagagagaatagggccaaaaattatacgatgataattataggttatttttatgaatttgttcataattaaattttttatatatatatttttatagtcgtattttttttttagttttattatttttttaaaaaaatataaattttataataaaaaatatatttactcagaaaaaaaaaagtgtaagactaagaacacaaaagtaactaaaaaaagggatttttttattggtttttaaagtacaagtttgctaatatatatttaaaaaagttattttatgggaaaaatttagaataaagttaaaaaaatgagagagatagaataaggtacctcgttacctcctcatggtaatttgttatccttacctgatttttatatattttttaggggagttctatttgcactccataagaaaaaatatataagttatataattttttaaaattactcttaatatttttttaatttttttcctcgtattattttatattaatttcaataattattttgattttatttttataattttttctaacttatggatatatattttttattttttttggaaaattttatataattttttattttaatctttttaatatttaaaatttatataatttatttttatttgataagtatattttttaagaatatgaattgaaagaagagttaaagaaatttagtacaattaaagacataaattttatataaaataaaaattattaaaatagggtgcctttagaaatttttggggtgtaaataaaattcccctatttttttttagctttttctacaattttcccataaataacctttttgaaaaaaaaaaccatatttttgcacaaaaagtataaaaacttataaaatttataatttcctcttaaaataacaaaacatcaactaaattacatcaaataaaaaagggaaaatataattttagatcatttattttgtgaaagttataaattcaactatttgttttgttaaataataattcaaactttgtattttttcaaatggtacaatataatacgctgagctaatttttcattaaaataaaacttaataataccttacctaaaggctaaaggtgttatgaccaaaatatttatattttttgatttgtttgtgctaagacttgggtttaggttggttatatca

SEQ ID NO: 73750 - DNA, 694 bp, Cannabis sativa
ataggaggtaagcattatatttttatattatttttctttaaatttttgtataaataaccatcattgataatttgatatgatatctatatatctttataattcttttgttgggaaggatgatgtggcatcttttatgaacttccttaatttctttgaactctcattttttttacctttttgttaattttttcatcattttttgtaatttattatttaatgactattcattttcataactcttattttaataatattttatttttacaatgtgacaattaaataataaaattaatgtatctcatttcattctaattccaacttttcatttccataactctcattttataatatttaatttttataatgtataataattgaaaaaaattaatgacttcttttttaatgtctccattctactttttatcttcttccaacacatccactcaaatctctctctctctctctctctctagcaataaattcatatatttgatctaactaatgggcttggttgtggcaccaacgaaaaagagcaagaaagtacttcaaatggtgttcaacaatgtcaagctcatccaacataatccaattcatccaatatatatatatatatataataagaggttaagcaagtgtcaagtggggagcttcttacaaaatctttgaattagatgaagaaaataggtatgtcatt

SEQ ID NO: 73751 - DNA, 1031 bp, Cannabis sativa
agctgagaaaacatcatcaatccttcattaacatgtagaataagagagtatcaatacaagcaccaatccaagagcaatcacagctctgcaacactcgagaaacacctttgagaaacaatcaaagtttctctaatcctacccgagtacaccctctgttcttgaccccttcaagaacatgactttacagcttagaacactaagcaatctctctctgaattctctcttttattcttactatcaatagtgaaaagagtagtctagatatagttgtaactcacaccaggaaaaataggtacataactggtaccaactaactaactaacataccagaaagttagttaagttagttggtgtaggtgagttagttcaaaagttagtttaaaggatcaacatccacaatctatatatatatatatcgtattttggaagaaaaaattacgaaaactaaaaaccctagagttacattttaattgaaataacaataacaaaatcatatgaaatatatcattgatacaatattttaaatatgaggagtgatactgtcaacttcttattacaacttctgtgcctgaaaatacatgttggatgaatatttctcttcaaattttttatggcgtcgttatacttacaacatgatccttataaatttttgaaatttgtttaatagtttacagtgccgaaataggaatatgaggaactttattttcggcattataaactatttagaatttttcaaaaatttatagggataatactgtaactaaaacgaataccactataaaaaaaatttaaaaaaatatttcagcatgtgatttcgggcgtggaggttaactaagagattttaattagcactcatctttaaatatatcattcaaagaaaatttaaagatataatcaatttgttggataaaagaaaaaagtaaggaaaattaaaaatctgaaagtttatgaaatcaaaataagtgttacaatttatttaattatttgtcaaaggtctttcacgcgatagattatagtaggactcggtagga

SEQ ID NO: 73752 - DNA, 678 bp, Cannabis sativa
catttaatcctggtgtcgagaggcgctcgaacgttttaaccgccctttctcctcattatacccgttcatcccatccgttggatcatagaatgcgaatcgataccaattcccaccatacgatggtgcctgatcacagctgccttgcacccttcctggcctataaaagccaacactttccttttgtcgggttacttttgccactgtcattttgactcaaataacccatttgaaaaaattccagaaattatccacttcttactgctattactccgccgctgccagtccaaaatctactgtcggatgacattaacttcttgctcatcaccattgtgtaagtttctgggtacactttatttttattgttcatttacatgttagggaaaaacttaggataatgtctttgttttaatcgtacttgatttctacggctttacagtcatggtgaagaccatcgtgtgccgtaatgctttgcatgtttactgttgttttcccttctggggttagagaaaaatttcttaacttagggaccgtcgagagtgtgaaatgactttcatacttttgtcccttttctctttgtctctttttccattgccttttggatatttgcacctgatgtttgcctaggagaaactctggatttcctatctttgccaaacatccagagggggcctccttcca

SEQ ID NO: 73753 - DNA, 909 bp, Cannabis sativa
aacaatctttgaatcactctccactaaaataaaaggatgatgcaatgagactgccgtctccaaggctaaaagacaggccgcagctttatattattccttcataaaaaaatttaaaattcttatttggtattttttatatattatataattaaatatgccatggatgaccacattagtacttaattaatattagcaaaaattttaaaaaatatatatttttttgtatattttatttataattttacagtctaaagtttttaattacaaaaatatatttgtaaggttttaaaattataaaaatacattttgctgaaaaaataacgagaaattaatctcgcgacaactataaattaactataaaaaaattttaaaaaataacatcataacaattataaatatactataaaacaaccaaaaaagaatttattgtttttattgaagagataaaaatatttaaagagtaaaaaataaataaaaattccacattaaaattttttttgtaatttttttaaaatgttttgtctattataaaaaaatttctaaggaaagaaattaaatttcaatatgtaattaatagaaggaatatcattgagatttgaaaccaaagaaagcaatggtaaagccaagtcattccaaatggtgacatttagataatagttaaggttttgttgaatatggccattctatttttctccattggtctcatttgttgactttgtaaattgctaaaggtcactctcagtacggccatacttcactaatataaatcttctctaaagtctaagctaccaacaaaaagtaatatgtttaaatctatttttctaaataaataatccttcaagcttccaaggggccatttatttgtttttaaaatgttaaagggtattaccgtaatttaatattttaaat

SEQ ID NO: 73754 - DNA, 657 bp, Cannabis sativa
cacacagattagattaatcaaatgaaaaacaatagaaacggagagaaaacaccagaattatttcagagttcaccccaaaaattagggctacatttctgtcaaagctcatctcagagatctagcttgatatccaccatcaacaatggcaatttacaatattttggagcttcctgtcacagaaaacgatcaggtaagactagattctttctttgtacaatttttgattttgttcttctctgtttttttctcgatctaactcagttttctatttttgtgcatgtacttccttccttctacctcctcaccacgagaacttgctttctcttctctggatcttggagtagaagtactctcaaactagggtttatactttaactcttctctcttttctgttctgtgtctatgtcttcttttgcctttgattttctgtttatatattatgtcgaagtcggttgatcaaagatctgggagatagttacaaaaacaattgtaactaactcctggttcttggtctagtagaggcaaagcgacctagggttgagtcaatctgtttttctgttgtaaataatgtgttgatatatgctgatgtggatattgtatgtaaaggattggttataagtggaatttactaatatatatatataatttgtgtaatgt

SEQ ID NO: 73755 - DNA, 803 bp, Cannabis sativa
aagatctataaattttgtagaaatatttatataataatttgaaagttttctaggtcaaaatttagccctaaaattacgaaatagagggattataattacaatttaaaaattagatacttgtctatttaatattattattattattgttattgttattattattgttataattattattattagtagtagttaacttaaacttattacaatatgatatctcatactcttcagtacatgattttttttatcaaaccctaaactataatagttttattttttttctctgcaaaccaattagtcaaagcttcattcttcttcatggttgctcctctcaacccttccatacttctttttatttttctaccttcattcttaaaattttagatttttattctaggcttgcgagcttgagacatcatattgaaagttgtgaagagttatgaaatattttcttgctcaataatgctaaatgttatctaggcttcatacttattatatttttcatttttagaaaaacaagtttcagtaaatttatgatatctctctcgatattgatctattttcagcgatttttatattgttggaaagcttattcgatgatctacaatttttataaagaaactattcaccaatttagtgttattctatgtcaaaaattatcatctttctgctgttgttataatttttttttcttcatattcccagaaaaagtacttccgcttaaaatataataactctctcaattctcatctatttttaattatctatatatggtcttcaagcttattcaattttccataagt

SEQ ID NO: 73756 - DNA, 1395 bp, Cannabis sativa
ggtacaccctaggttgagtttgctactatggagagtctgttcgaatgttttgcctacgggggataaatttccttctgtggaggtaaatttctgccctttgtgccatactgcccctgagtcacctttgcatctttttaccaaatgtagtcttgctttggctttatggttttctagcccctggcctatcagaatcgacagggtgatgggcactaatatgcaggaagttatacgcaatctctgtagttcagttgatcactctaatcgtcccaaattcatcaactgtattggagtaattctggattgcatttggaatactaggaacaaagtgctccacactgagaattatgtgtcgaatgtgaacatgctaagaggggaaatctccagcaggttggccgaatttcaactgatcgttggggagaatgatagtcggtctaccaactttgaaagggagccccagttgagaatcacaaccatcaagactgttatggtggatggttccttcaaggaaggaaagtacggttgtgctatggtggccatggatgtgtcttctatggagtggtggcacggtatctcttctggtgtgggggattccgctctagaggctgagatgcaggctgtccttttgagtttgcaatgggccgagatgcaacattgggataatttcaccattatctctgattcgaaggtgctggtggaggccatccgatcaaagaacaccccggattggaaatgttctgcccttttttctttgattttaggaaaactttctgttttttctgcttgttttgttgtttttgctaaaagagaacattttactgtagtggatgacttagccaagtcggctagagcatgtttggctgattgccagttttcaactggggagggatttccccctgtgaatcccagttctctagttttttcaatataatctgaactgaggttctttcaaaaaaaaaaaagactagctactataatgctctagctagctttgtagtatctccatttaattttctatagcacaatacttaatataaatataattttataaatataaatatgtaagactctatagctaagtgtggtgtgtgagaaagagtcattgatgagaagaaaagtgataagatcatgataaatataaaagttgagttatatttagtaaaaacaaaaaaattaaatttgtatatttttacattaaattttattattatactccaatacatagtttataaattttgatgcagaatttaatctatcattaaatgtttatttaataactaattaaaaatataataatataataataacacaaaataaataaaaaaaaattaatgatataatggtaaatataaaaatataacatttattgtgatgtaaattttacatcatgttatattg

SEQ ID NO: 73757 - DNA, 678 bp, Cannabis sativa
  modified_base (46)..(58): a, c, t, g, unknown or other
gaacgcatttttatttttcaaaaataaaatttttaaaaacaaaaannnnnnnnnnnnnttgtgattaaaaaattagaaaataaaatttaatgcaattcttaaaatacatctcttgaaatgggtacaccgattcatttttatctgtttcggtatccgagaaaaaattttagtctaaatttttttcatggtcgtgtacattgtagtgatttaagacattttgtaaaattttgagaaattcaaaaaaaattgaacacaccgaaaaatagagttcaaacaatctattgcacacataacttttttatttaatacgtgtaaaatagttgtttgaacactactttttatattgtaaattattttgattttttttttaaattttacatataaggagttagggattcgtagaagcaccctcatctttatacaaattatctttatacaaattattaaaggaaaaattacatactgatatttttataaaaacacaaaaaattatatgaaagtaacaggaaaacaacatcaaaataatatataaataacacaaaatcaataaaaatatcttttttatataaataaaatcttaaaatccgtaaaaatatttaaatttagtaaaataatatttttgtaatttatttgtttatttatttattttttggaaaataattataatcccattattaa

SEQ ID NO: 73758 - DNA, 580 bp, Cannabis sativa
  modified_base (414)..(414): a, c, t, g, unknown or other
tgtctagggcccacctagtctaggggtaaaaaaaaattatctccttttaaaattacacaattttttattatttttaaaaataacatatttttttatagacgactaaattttagggcctaccttgccaatactccctccttccttccaaacttttttccatctacataggaacgaactcatatagaagcgagacgggacaatcaccctcttaagaaaaaacaaaaaaatggatatacatattaaatagttatgatatatatttataataaaaaataatacctcgacataatattaagtttagaataataattaagttaaattatagtaatttttctctccgaacattgacatgtactaaatcatgtcccatgaactttttttgccgttaaaaattttccttgaactattaagatngttagatttaaggatttttgtctaattttagtaaaaaaaaaattctaatatggatgaaagttcccagggcatgatttagtacatattaaagtttgaggggtataatttggtagatatcaaagtttgagaagcatagtttagtacataaacaatcactgaaacagta

SEQ ID NO: 73759 - DNA, 865 bp, Cannabis sativa
taagtacattaccaaaaaaatataaaatttaatcataaaaattataatttgttataagtaattaaaatgtgattcttgtagtaagaattctattttttcttttccatcaatgtgctacttatcgtaagaagaaaaattgggtaaaaattcatcactatttttacggattgccttcgtcttgtccaagctattaatatgaaaaataagtgtccaactgaatttggtattattattcatgatattttatatgtttgacattcttcttctttcatttctctttctcattgtaaaatggctcaaaatgctatagcttattcacttgcacgtttggctttatcttttgaattatctcgtgttggcggcctagcttaccgccttgcctataatctttgattttgtattgatcttttgatctttttggctttgtgccttttaataaaaaaaatttctattcaaaaaataataaattgtgtgattcttgtagtaactaaaacaaattagcatgcaattatatctaaatattgatttttagtcacaactagtgactatcgtttggtaggttgtataagagtcttattgcattaaataacaagtaatactatatttagataaaatattatattgtattaattattaagaccataaaatttaatacaatgtcatattagattaaaaacagagaaaacagaggaaaaatagaaagaagataaaaagtcacacaatgattaaaagctcacctcattgaatcatagagcaagcgaatttattttatagaaagatattgggtacataatagagtaaaggaaaattaccaatagcaagagccacattctttctcctcttggtcttattatttcggattgta

SEQ ID NO: 73760 - DNA, 1063 bp, Cannabis sativa
aatatttatttgttctgatttattcatacttgaatatttattttttattttattttaaattattatgtaaatttatgtaaattataaatcaataaataataaaagaacatatctaatataattcataatttatgatatgaacaaataaatacgttatgcctgcaaatcggcttgattaaattcaataggaacataggatagcattttttttctaatgacaaaagaaatactaatttacagtaagccaaaagttagaatttaaacccatttagacaatgcctattattgataatagaagcaaaaaaagataaaggtctttacgatgataaagagctttggagatgccaatacaatacaatacaataatcaattgccacaccaaaaaaaaaaaaaaagaactcaacttacccagacattttgatgaagatgttcggattgggagctctgaaaaaattgaaataaacaaaacagaaagaaaaaaaatgtcaacaatattattttaaaaaaaaaatagtatagattgcagaacgtaataatgacaattatatgattcaacgccatatattaatataataagaacacaaacttataaatactcatcaaatggataaccaaagatcacatcaacagtactacagaagtgaaataagtacactatctgataacactttctttgcaatttttaaattcagagacagatttatcacaaataccttttctcaaggaaaatcgtttagggtgtcaaagtacaaaaattcacattaatttcctagcttactttctcataaactaaacgaaaaattagttagtttccaatatacatattttctttcttactttccataatcccacaaaacaactcaaacgtacaagagtcgtagtaaaactgaccttcaagagggcgaagatgtcaaaacaaatccagaagctgcaacgatatttagggtttcaaacggagaactgacccggcttaaaggattaacagaggacttattcgtaaaatctcaaatattttacggtttgttagagatatgtggctaagatgattttttttaatttaaaa

SEQ ID NO: 73761 - DNA, 2121 bp, Cannabis sativa
caataactcaaaccgattacaatttaaaaaaattgaaaatcagttcctaaaatactgaaacataaattaaaaataaaactagttccacaataaaatatttcataaaatcggttataatttttttttttaaaaaaaaagtgagaatcaattccaaaaaaatattgaggcataaatgtgaaaagaatgagttctataccgaaaaaagataaacacaaataataactcaaatataatataaagaattcggttttatttattaactagtttaaaatttgatacaaaaaactggttccgtaaaacaactaagatataaactcacacacaagaactagttaaataaaataacttaaagaaaaacactcattcaacatgctccaatccaccaaataattacacccataccatatctactccaaaaatgcccgattgccaaactcagtaccgagttagcccaaaaccattcccccaaaaacaacattaataattacaatatttttttgttcctttcctttttggaccgaaatagaaaatttacagagactaaacctaaaagaaagaaaaaaaaaaaaaaaaaactggaaaagaaaaataataataatattgaaaattaaaaaattattgaatttgcactgtgtaacatatgtatattccttccggcaccaccaacttggtaccttgacccagtgaatttgctgcgagagttaagcgcaacttcctagtcaccttcttcatcttccccttcatctctccctctcatcatttgcaacattctcttagccttctctctaatcctctcactccctctttactcaattttcctcaacacctccacagctctggcttccttagccaatcctctgaacctcatgcttccatggagcaaacagagctacaacacaattctctcgagtcgactcagagttcaacttgttcctcctaagtatatttttacaaggctctccaccttaaaatatgagatgatttagaattttgagctttgagaaaacttaaaacatgggatctctacttttttttttttttttacaaaaatatgacataaaaaattcatataaatgtaaaaaaataaaaaaaaatccataaccccatggtattatttatttatgtcataaaaaagtaaactcttagaaccggttatattttaattataaccggtttgcattattttgtattatttatttttattcattatattatagaactggttctatttttatctatatttgggacatttacttctgatgacttattatttatttatgccataaaaaagtaaactcttagaacaagttatatttcaattataaccgatttgaattattttgtgttatttatttttatttattatgttatagaatcggttctatttttatttatatctcagacatctatttttggtaaattttccagtgacttttatagcgacggtgatttttctaacgacttttccagtgacgataatttttccgacgactttttcggcaacaataactttttcggtgacttttctagcaccaacaacttttttggcgccaataactctttcggcaaaatttattattataagttttatcaaatttatttattgttttacaaatatgagatttccatattttttacaaaaatgtagcataaaaaaattcatataaatgtagaaaaaaaaaatctattactttttattcatactataaaaaagtaaatttttataatttttccatatgtgtaatttttacaatattttttgttcatttgaaaaacaaactatgactaatattatttaaaatctatcagaaagaagaaaaaattatgcctattttgccgtacatggctcatatgaatgttatttgtgagatttttattatttagcagctactaaattttaattctacgatagaatttttataatttaatacaagagatgctctccttttttaaataaaaaacttttccaaatttaaaagaagattttttgaggattccatctttgagctgtgaaatgctttatatagaaccattttgttcccgaaagtagggccttttgcattccacacataaaaaaaaagggctattttcaaaaatatgggaaaaattattaaggttatg

SEQ ID NO: 73762 - DNA, 513 bp, Cannabis sativa
tatgagaaaagatagagagaagataggaaaatcagagtatcttgtgtattattgcactgaactgattttacaattagtttgatagcttaaatagctcattacaattaagagtcggttaggagagtctaaccactgctgtaacagaaaatgtacagctgtaaataacaaactattaataacaaaactatccttaactaactaatccaaagctaattctgaaagcccccctcaagatggagtgtagatgttgatcaagcccatcttggagacaattttggagaagtgagtaggtaggagtgctttggtgaatatgtcagcaaggttgttttgtgaggagacatgaagtagcttgatcgagccttgttggaccttctctcggatgaagtgacagtcaatttccacatgctttgtgcgttcatgatagactggatttttactaatgtgaatggcggcggtgttgtcataataaagtagtgctggggtagtagaattgatgccgaaatctttgaggag

SEQ ID NO: 73763 - DNA, 962 bp, Cannabis sativa
tgcttaattaatgttctccaccccattaggcaactttactaaagcagatagatttcattgctatgttcatatcttcattcatggtatattgtaccacaatttcaattctttgcattccataattttaatttatgtcacaaattaaaattgtagttgaactcttattgtacatattgtaatcaatagaaaatattaatattattgttctaataagtcattttaaggatgaaccaacttccttaagagcaaatggttcaacatgcatgcatgttgtttagaaattgtgagaagttactaaataacatgacttattagaattttatcaatgacttattaattattaatgataagttatggattctcaataaccattaacttaaagattgttgtgaaacataatttatctaatacttggtgtagaagtttgtgaaaataaatgatcttttctaaaaaataggttctcagattgatcgctcctactgatcaagtcaattcttaattctaaaattctagtattgtgagatggataataaaatatgtaacccttagaccttataacttttatgatgaaatgctcatttatggtatttggactcagatcttttctttgataattatactctaactatatacgtgtatttctaaaatctatacatatcataaattcactttccaaccttatcatacctcaaaatatggttgagaaacaacattggctagaacacaattcgatatgtacactaccgttgaacagtgttaactgacaaagattttaggaaagtttagagttttttatgcagggtccacactatgtccaataatggttagtttcttaaacctgtcacacaccattatttgggtgtacgaggtatttttattgggcaatgaacctatactattttcaaaaactttacaaatggattaggagttttatccatcctcgcgatttttttagtattctc

SEQ ID NO: 73764 - DNA, 716 bp, Cannabis sativa
ctgtatagtaaacgtgccataaagtcattactatagagacctttcttttcatatatagatgtacacaattcttttaatacagaatagttgagcatatattgttgtttagttttatagtattttaggctatattattcaagcatttatattgtgattactcatcaaataaccaattaaccgtattgtctgtaaaggaaagatacgggcatgaccgaccttaaaacttagtaagtcataagaaaaaaaattattttgggtccttatttaaaaaaaatgtgatatttttcaaaattagtaaaagaattatgtaattttaaaagggaaagattttttttgggcccttggctaggtgggcccaaggaacaggcttaggccgcctatgcccggggccgggcctggatacgggtcccctgttttactttttatttttcacttaataatgaagttattaaaaggaacaaaaattcattcaaaacaaaaactaagcaacaattaaagggtcaatactcttgcaataaatatagctacattagaagttttacaaaaatacttatctttcttattattatttttacatttttactgtattaagttctcaaaaattttgtcttaaaattttaaaattataaaaatatattatattaataaaattttaaaaaaaaaactaaagcaactaaaaataattataaaacacataaacaacaacatgaaaataa

SEQ ID NO: 73765 - DNA, 1130 bp, Cannabis sativa
ataataaagataaactcccactgaatctagatatcctcataatctaaaacacccatacgagcagtgtgctcatgaaagaccttgggttggaaacccttagtaagggggtctgcaatcatggagtttgtacctaagtgttctatacaaatctgtccactttgtaccatttcttttacaacaagaaacttggtgtcaatgtgttttgactttgtcgagctcctattatggttggaatacaatatagctttattgtcacaatacaacttaagtggtctttcaattccatccacaatgcacatcctagtgacaaagttcctcagccatataccatggttggatgcctcataacacacaacacattctactgtcatggtggatgaaactatgagtgtttgttttgcactcctccatgatacagctccaccacttaacaaatatatgtagcccgaagtggatctcctgcaaagtcggagttagaatatccaatgatctcaaagtgatctgacctcctatatgtgagcatgtaatctcttgttctcttcaaatatctcataacctttttggctgctttccagtgatcaattcctagattgctgaagtatctacctaatactccaacaatgtacgctatatctggacgcgtacaaacttaagcatacattagactcccaacagctgaagcgtagggaatcttttgtgtttcttgaatttcaaggcttcttttaaggcattgttaaagacaaaatttgtctcctttaacgacaggggtatcacctagtctacaatcttgcatgccaaaccgtttgagtacttgatcaatctatctcttttgtgataatcatagaatatatatcctgagaacggtctcgatgtatttgaattcccaaaacaaaagaggcatcaccaagatctttcatctcaaaatgcttggatagaactttgttggtttcgtgcaataagcctatatcattagtggcaagcaatatgtcatcgacctataaaacaagaaatatgcacttactccaactaaaattatgatacacacaatcatcaacaacattcatctcaaaaccaaataagagaaccacttgatgaaatttgtggtaccattgacgggaagctttcttgag

SEQ ID NO: 73766 - DNA, 978 bp, Cannabis sativa
  modified_base (934)..(945): a, c, t, g, unknown or other
tacgtcctggcagttcctccgaggaggaggaagaggcaaaggttgaacccccaaactatgggcagtacaacgaggctggggagccagtcgatgctgacaaagacgtcctggtggaggacgtggactacgtctgtgaggaactgctgttgcggttcctcatagaaggcaaggtgccttgggtgccaggtgggtaagccctccgtccaaggttactgaggcgcgccttcggtctcttgaccaggacggatacctggacgacttggattactacattcccgcctacaacaatcgtgccacaaaccctgaaacgggaatgtgcgcctagtcgggtgcccatggtcaacaaggggcattgatgcctttgcatcaatacttcaaacatgtggcggacttcttcggcctctgcccggcccagttcactcctaagggcatcaagtatttgtttgcccacttcgttctctatgcctcccataaatggggtatgccctctccccacgaggttgcttggttctttgatttgaagtcaacccccgagcaaggcaggtcgaggtacttctacttctctcaaccagacttcaagtggttgacgggcacggacgatacggccatcaacaagatcaggcattttgctgatgagtacttcatggtggatggcacgtgcatcactcgcactcggttccagcagattctgacatatcactgccctcccctcactcttgctcttagggatatagctcaaaaacttgcccggctttcgggggaagaacggaatattatccagttgacctccaaggataactttgtgaggtatgggctctatcccaaggactttactcctatgtccgtgatggggaagaagagaaaatttggtgttggccggatcgaacgagctcatcaggagaatgaactcattcaacttaagcgcgaagctaannnnnnnnnnnntgcaagggccaagcagtatgctcaagagccctt

SEQ ID NO: 73767 - DNA, 1075 bp, Cannabis sativa
  modified_base (1028)..(1030): a, c, t, g, unknown or other
ctctctctctctctctctaaattattagaaacacataaatatatacaaacacacatatcatacacccatctcttatgcacatgttgtagaccaacaaacgttttcaaccaataataatattctttatcataatagattcattaaataagacatgaccaactaatatatatctagtcattctagtactatacatattatttgtagtgtcaactttggctgacaaaatctactaataaattaaaaaagaaaaaaggatttactattttggggtatagctatttgtgcatatgtaggtctgatctgtgtagcagaacatatatataataattaatgagtactaacacaaactaagtaaaatattaccgcacatacatttctcatatttaaaaatggcacggatcaacaaacctcaattatagaaagagaatcaaccaaaagttgaatcaatttattaactaatttgcttttgtgtatatgtatttttgcagattggacacctgaaaaaagggttgaatccactaacagtgtctgagctggcttttgggtcaccacatctgacattagccattaaaacaggaattgtcgttggcattattggtcttgcggtaataattactaattatattatttattccattaattatgtctcaatctcaaatctccaattacgcattagataataggcatagctcgccagttgccatatgctcccatttaactaagttaaccttaataatatgcacagaacaccaaagattaattaatggttgaaaatattcattatgatattggatattgtaatatgataaagtgaaagagaagagtaaatatgtgaagatgtaaatgtgcaggaaggagtagcagtaggaagaagctttgccacattcaagaattatcatattgatgggaacaaagaaatgatcgcttttgggatgatgaacattgcaggctcttgtacttcttgctacttaaccgctggtaccttttctttgatatatattagtattatactaatatatatatatatnnntatatatatatatataaatttagtgaatagaagaataatataatg

SEQ ID NO: 73768 - DNA, 1039 bp, Cannabis sativa
gtgattaaaaattacttttagtcaaaaaaataataataattatattttaactaaatattactttttatcgtgttgatacacatgcttggttgttgctaagtagagagacgcgcctcccctttttttctcataaaaaaataaaataaataataataataataataatataaataatttgaaagggtgattattatatcacttttaattaagtatatgaaattaattatttatataaataattttagtatatatgtgataattaatcattacttttataaatgtatatatatcatgtacgatcaagtgaaaaaaaagaagatatatttagtagtaataatggaatcttttttgttgtatttatatagtaattattaactgccgaatcagaataaggttattttcttattattattttaaccaaccccccttttattaccatttgatatattgactcttttatacctacttacgtactatatataaaaaataatattggtcacaattatttaaacgaatataaaaaataatgtaataattatattaacttctaaaataatttaacactaatctacgtagttttctttgttaacaattattacggtgtaacaccaacaatagataagttaaaacaatttaacgaagctcttatgtaatatattcaatatcaaattttagttttttaataatttatatcaattatacttaattttattccttttcatattctgccccttttaattaaaaagtcacaactctttatctccctctctttgatctctgttgctcaacaccactatcggaagcgccctaacctaagtggcgacgaaaccccgaaactcccataaacccagatgaaacccaaaggctcgggacctggacctccacagcactcgagcgctgacaaaacccaaaggccccgaacatccgttttcgtctgcgagcatcgtcaatactgagaaggcgacctcatctttgagcccgactcgaagcccaccaaattcagccttcgtcttcatatcttcgtgtttttttttttttt

SEQ ID NO: 73769 - DNA, 1493 bp, Cannabis sativa
ttttttttatttgttttttaaatgataccacatagttttactcaataataactttttatatgtaattataatttattaaatatagttaaagttaatatgaaaagttattaagaaagtaacataaatatatcttaaatgagtagttgctgatcatgggttaccaaaaagtttttgtctttttttttatttttaaatgttaccacatagtattttaaattagttatgttttttgtagagcaattttgatagatttttaaataaaaaaaatataagaaataaatcttatatcgaacatcataacatgagttacatttagaaaaaaaaaaataacaatactaattttattaataatctattttttatctttgatatttattataattcattatataatcgaaataagttacaaaaaaaattagttggtacataaattttgttcaatttaaagtttagatatttactttttaataaaatataaaagaaactaaaaagttattttttttttttggagatagtaaaagaaaaaaaatatattttttatatatccactttaaaaaataagtcataatgatacagttcttaaataaaaataattaatatgatctaaaaagtttttgagagatagaaaaggaaaattaataaaataatatgtatatattgttttgttagtttagatagcattatcaacaaaaagaaaagataaaaatagaatgataacttagcaaagataagaatagattaagacaaataattatttcattactttcggtagaagaatacgtattagtgcatattaaaattgcgttgtcattttcataattaattttaatattacgtatattactgaaaattcccctaaaaaaaatgtgtaaaataaagcacttatttatttttatttttttcacttttttttcactctataaaagaatacgtgtacgtgagtgcttttagctctatatccaatctaattaaaaagagtggtccctttacagcaataattgaatataattttgaccaattgaccaaggtgtaatttgattatttaattgaaagaaaatagtattgtacttttaatacattttatataatttaatataataatttttataaaatattactaattaactgtgaacttatattagttaaatactaataaaatttattagtactttataataatattatttcataggggtgtttattggatcacattcaatgaatttgtacccatccgatccaattcaattatttattggatatcatatttttctattcgatccaatccaattgaattgagtcatctgatccgatccgatcgaatagatgtattagattggatcggttccatccattagatgctttaattggttttttattagattagaatgtatccatccaatggatcaaatagatgaatccaatccattttagccactatatatttaattaggttgatttcattaaaatatatatatgtatatatatatgaaaaa

SEQ ID NO: 73770 - DNA, 687 bp, Cannabis sativa
ccttaaagtaaaatttaatcaatacaattttataaatttaaccaaatggttcttagttatatgtaatcaaataattaaatttgaatttagaattaataaaattttaaataatttgattatattgataaaattttatcaaaaaatttgaatttaggataccaaatatatatgattttaaaatacaaggtaccaaataagcattattaaaaacacagagtatctaacttgtatttagataaaatacagagtaccaaaatgtataaacaacccctaaataattataactttcgaatgtgtttggctcaagaaaaaatcaaaagatgtgtggatttcatacaagtgactatttatgtatcgccatccttgcttattcttaggaacagtagcaatattattgttagatcatcttcaatcatgctctctaaatacattctttagctaaaataggaaatataacttgaaaaaatgaggtcgaacaatataaaaattagttttctataatagaaaaaggataggtagctctctaaatgtaaggagctccataattttatgctaaatatttttaattgtattttaatcaaaagcatcaaatactaactatagtagagaatatagttagaataataataataataatgatgttataaatagtattaattatgtgaatgtccaaatcttttatttatt

SEQ ID NO: 73771 - DNA, 611 bp, Cannabis sativa
taataaggaccacaaccaatatgcatttatttaaagtggggaaattgaaaatgaaaactaaacatgcacaaaaaataaaagattatatatgcttttgtttgtcaacaatatttatgtaagaccctactcttttaagggatgaaaccccacttgtacaaagcacatacatatattatcattgtttattattatttaacaactggccaaatacagtgactactgctactttgcaccctctccactctctttaatttatattattttacacatttatgttttttttttttattattttatcaaattatatttatccaattgtattttgagatattcttctcgaaattggtatggtatgtattatcgacattaatatatatataccctcaaatgatatttaaacagttgggtagaattataggatgacggatgaaataaaaataatagttagctttgcatgacacgtaagtaacaatttgatgtcttcatcctcatctaacatatttacaatataagagacttcttaatttcaaataagaaatatatatccatttaatgaatgtacatgcacacataaaactcacattttatccctcattcctcattcccataac

SEQ ID NO: 73772 - DNA, 822 bp, Cannabis sativa
tttacaaatttgagactagatgactactgtgtaaaattttcaagttaatatagtaataatttagttgatatttaacggtaatatctaactgacactttaaatttgaaaaaaaaataaagataaaaatgttttgctaagcatgtatcattttcttaatggtatatttaaattattattttttttaaaaaataaaagttttaatgacttggaccaatcagaaattgccacttggcaatttacttaacacttaacagccaggtacttataaaagttcaagaagtgccaaaaattaaatttagttatttatttgtaactattgtggacattgtcccatatagaataaatagtagagtattgagccatatataagaacatagactactccactcatcaccaattggttttgagatggaacctcatgattctcaacagtaactaggtatagttaaacttaggtattctatatctttatggctaagatatttttttttctagtttataatattcaataatatttgtatgtatttgtaaagtctttttttggcaagttagatgccaaaatattttttattttatggtaagatatttttgcattcacacccgattgtcttaccttgtatattcggtttttattgctcttttctatgttaggaaagatgcattttacagctgatcttttcttgtatagaaacttcttgtaagagaagcaattctcttatgggaagttggttttttaagtaaactttgattattgtctttttcttattgaatttgattgtgtcttgatacaatcagaatatataaactgtttatggcaggaat

SEQ ID NO: 73773 - DNA, 1017 bp, Cannabis sativa
tctgctatatattttccctgagacaaaaacattccagtgtcatctctgcacacttcgattcccaaaaaataatgcagcaaaccgaggtctttcaaggcaaagactttgttgagtttgcttgtaaactgtttaagcttgtctgagttgttgcctgtaacaattatatcgtctacatagatgagaacaaacacaatatcagtagcatttctgtagaaaaacagagaggtatctgccttagaatttctgaatttccactcgagcagtgtgtgcttcagcttatcaaaccaagcccttggggcttgtctcagcccatacaaagatttggacagcttacagacataattgggatgatttttgtcttcaaaaccagcaggttgtgccatataaacatcctctgtgagactcccatttaggaaagcattgtttatgtcgagttgtctaacctcccatgactttgctacagcaatggttagaacaattctgattgtacaggcctttactacagggctaaacgtttccccatagtctataccaggtctttgactaaatcccttagccacaagtcttgctttgagtctttggagagaaccatcagcatttaacttgattctatgcacccatttgtttccaacaatgttcatattaggcaaccttggaaccaacacccatgttttattctttttcaaggcatgaacttcttctttcatagcattattccagccttcatgagctaaagcttcagcaagagacttaggcagtttgtattcatctgttgctgcaacttttcccatgtaggtttttggtttgaaaatcccagccttggctcttgttatcatgggatgaataggtgcaagtgaactgccagtatgttcaataatctgctcttcatcttgctgattgttattttcactgccttgaatatcagtaacagcaagattttcactttgaacttctctggtttcgacagcatagttgctgtcatgatcactgtgagtattttgctgagactgattattg

SEQ ID NO: 73774 - DNA, 1132 bp, Cannabis sativa
ttaagatttttcgtccccattttttttgtataatttgcccctatttatagtaatataggttagcaattaattacatttaagttcaaactccataataatattctccaaaattgtgggctttaattacgctccacttaaatacgtgcaattaatattagcaaaatcacacaactgtgatttaagccgtttgtaagcaagtcagtgctaacatggattaggacatgctaccaaatgtacctcgctgaggcgtctcacctagtacataagtgaatgacttagtttacttgcattctagcaatggcatgagcaccagtgtactaagaaatttaagagctgctctttgaccataagaccttctagactggacaatcatgtccttcaagttattacacatagttattataatgtatattcgctaagtgctctaagaattacttcacctcatcaatgcctctttacatacagcgaggtagatgcctcgctatgcgttgtctatgtctccctcgggattaggccttttgatgtaaaatagtttctcgtcaatacgtgaatcgatagtttgtacattctgatctcgcttacgactatgcagtcagcaagttataaatatactctattaatttatatttaatgagttgttccattttatatttaatgatataattaccattatatttgttgattcatattctctgagattgacacgtgtcactttctgaagtacaaccgaattttgggtataacaattgccccttaaaaattaattttttaataaaaagtactttttaaatgattactgtgggtatttaggttataatccaatttgaaaatatgcatgcctatgattttggtggtttttgtggtttcgaggcacatcattagcaataatgaacaatcttttccacttttctcccatttctatccattggatcttctacattttgatccgacggtaactaagttcgaagtataaaatggtaaggattccatttttccaccttttttaccttttcaaaaactcaagcttttctgagaaatactcatcccgatttcctgaaactttgcatgtcctccttgtctttgaaatactttttacgaattttctcggatttacttatcgaccttaagtgtt

SEQ ID NO: 73775 - DNA, 1021 bp, Cannabis sativa
  modified_base (616)..(624): a, c, t, g, unknown or other
  modified_base (946)..(975): a, c, t, g, unknown or other
agtatgaacacacaaggttttttatgtggttttgcagttaaaattctgcatagtcgacgagtcaatcttattcaaatttctgattgttttccagggccttttttgtatgatttttgccatccctttttttgatcatgtttggcactatttataattacatagtgggcagttaattacaaggttgactgtaatctttttgcaacgattatcccttaaaatcatgggatttgattacaaatcatgctaaataaaatacaatttttatttagaattcacattgctgtgattatcccgcttttattggggcgagaggaacgcacattaaagatatacggtaagccttatctcacggggatgcgtcactaagttaactttgtggcgagctggagctcatcatataactttgcgaggttgatattgcttttactttaattctgaaaactacagtttctggtgtcgagatgatctttcttgcgtgcatgccatctgacagcgagatagaagcctcgctatctgtcatcttgatccacccctgtgtttatacttagtttgtataacttatcatatacgctaagtatttctattgttattatatctcctccacgcgacgaggttnnnnnnnnntcatgcacacttgcatttacatggtttctcgtcgagacacaagtcgatagttagtacatttaattgtaacaccctaactaatataggcatgttagcgtgatttttaacatactgtggagctcgttgctaatcaatgagattattgaaaattgtgaataattaaaatttgcttatttaaatataacataaagtaatacatttatgaaatcttgggaccccgtttacaaaatacatttataaaagtttactacttatataaaaagttttgtcaccaagcgactatacagcaaagccctgatgtccctgttggaaattattttannnnnnnnnnnnnnnnnnnnnnnnnnnnnnttattaacatcctaaataagaacattctaaaacgataaattaaaca

SEQ ID NO: 73776 - DNA, 942 bp, Cannabis sativa
aaatatagtaattagtgaaaattagtaattaattcttgtaagttcgacaatctttttataattaaaattttgctataatactgtacgcttacaataaaaattatttatcattagcctataaaaagaaagtgcctaagtaggctgcgtactcgggttctttccgcaggtggtcctacttaagagtgtatggccctaaaactatttgttgcaactacttgagtactattcaagtagtgatatatgaccaaccaaaagctcgtctaaaaaagaaaggcgtccaaagtaattatatacgaccaacaaaatctgaaacatagtcaatgcccatcctaacaatactaatactacattagtattagtgatattgggctttgcattgcaaagaaaatagaaccaacaacacccttatcttgaagactaatggagcgtttgttatatggtttagattttataggaatgataatgtaaaatttaaattaaatttgaatgacaatagatttgtattttcaaataggtcttactttttaatttaaaatgatattaatgttaactctctcaaatacatgagtttcatattcctcctaagtctattctctctaactcaaactcacataacaaacactccattaagtggtgtttggttgaaatgaatgaaaacatagctaaaataaaaaaaaaactaattaggattttttttctctccgaactttgacatgtaccaaatcatgctccctgaactttttttgccgttaaaaattccccatgagctattgagattgttaaatttaaagacttttgactaattttaataaaaaaattctaacatggatgaaagttctgtgggtatgatttagtacatatcaaagtttgaggggcatgagttggtaaacaattaaagtctgaggagcatgatttagtacataaacaatcactgaaacagta

SEQ ID NO: 73777 - DNA, 606 bp, Cannabis sativa
  modified_base (162)..(166): a, c, t, g, unknown or other
  modified_base (225)..(228): a, c, t, g, unknown or other
tattttcgtgggttagttgggaaacttaacgttcttcttcctccacgtgtcaaccctaacattacactttaagatcaagctttattgtgagttggacattcgaatatgacttggacattcaatagggttttttttagcagggaagaagaagaagaagaagannnnnaagaagaagaagaagaagaatgggatgggggattagggttttttttatttttatttttnnnnaaaaaaaattatttaaaattttttaattttttgaagaaaaagaaatttttttatattttatattttttatttttaaaataattatatttttatttttaaaaataattttttacgtggaccaataaaattgttccacgtgtacactgtgcctaatccaacatggcacttaacacctaaaaatggacggaaatgttaaattgctaaaagaatatgagtattggggtttgcactgcccaaatttgagttttgggggttaagtgaaaccaaaataaaagttttgtgggttttgccgccatttaccttatatatattaaaaaaaacaaaaaaatgacccctgacagtcatgatcgagacccctcgtctctctctctctctctc

SEQ ID NO: 73778 - DNA, 842 bp, Cannabis sativa
aaccaaatgtctacaagagacgtcgattatagacttatgcaagataagataagagtatctttaatggtagcattttttgaagattctatatatctacacattatctaaatatataatattttattttatttttatttcacatcatttttggcacatttacttctaaaacactctaatggtataataccttataaaaatattataattatgatttcacacacattattatatataatttttttattaaactattatatatattacacatttaattttttattatataaaaaaacatagcatcaatgttattgtgtgccatcaatacaaatttcaaaaataatatttttttatctctaataatataacattcttatattttgccaccgaaactttttacctcatcaaacattccccaaaattttctccaagcatccttataagtgggcactgccgaatatgccaaacatttatctatatattatgcacactacatatacttttggaatttgcttgggtggagcttgaaaaatccgtctgtatatacagacaaataataattgtctacatgtcatcttattaaataatcaccattcaaattttctttacatattttatatttattacatttttattttattttaaagaaacatttatctttctctaccctcgatcaaaagtgcatttatatttaatccctaatatctttttcttgtattaagagagttttacattactcatagaatgttaaaaataaacctccacttacactgatattaagaccaaatacaactagatacaaaggacagaaaaggaaatacatacaaaatccctaagttggcctt

SEQ ID NO: 73779 - DNA, 893 bp, Cannabis sativa
catctaataatatttttataactatctagctactagattaatttcaccaataaatataataatgttaattaattgaataataattattattatctcatataaaagaaatattttttttcatttatttatttttaattcatttattgttatcagtatgtagataggtcatgtctgcaaaataattgaggtgatacttactaatatttttatacctaccctaattaacttgtctcctatgaatactactatatatacacttctcctatatacaatatatcatcaagaaaaaaccatagaaacacataaatatataaacatatatagctagaaaatgatgatgatgatgaagagtttaataatttttctatttgtggttaataatattgggtggtgctatggtattagagtagcacatagtgttacttttatcccaagtagtaatgatcgttgttatatagcaactgagtattgcagtgccttaccttggcaactgaaattttgttgtgaagggcttgtctgtagtggcagcaatacttgtgttaaggatgcactctgtaccccaaatgttggtgatggttgtgccctttttacaccttgttgttacccaaatatttgtagtggtactactaggggttcaatatgtatggcccctagaagttcttctaccactactactatttctacttctacaccatcaccaatattgtcactagatcatgttgatgaataattatgtatgtatgtataataagaaagtatctttagtacttatttacttggatatatgtactcaaaccatgttattataatgtggaaatataagatgtattgtatccaaattggtactttcacatgaataaatctatatgtgttatttctgatcattctgaatt

SEQ ID NO: 73780 - DNA, 836 bp, Cannabis sativa
tttgttaattaatatgatattaattttttttattttattaaaaattaatataataataaggaatattttttttagtgtaattttttgtgttgtgattggagtacaaatattttttgacaccaaatttaatgatagtgtaacactaaatttagtgtatccttgtagatgctctaataagtataaccaaagacagactttccgcgtgtagagctttgttttttattttttgtttggttaatattttaatatttttttatatatattttaatatcagggaagatataggtaattaacttacactttttctaagactaaaagcgattaatggaaatgttttacttccactttttattcttttttctcgttacggagatttaaaggctcactacaagaaatgagacttttacttgtgttggcaaaagttaaatattatattagtaaaacaacatttatttttgccagcatatttttgtgctggctaagggagttggcaaatccatgttggtattagaacttttgtcagcacaaaataaaaagcgcgtgcaagaataatgcgttggcaaaagtctaactttttccagcatattaacaagctgggaaatgtcttatttttaccaatgaaaatacgcgctgggaaaagtcacttttgatagatggatatttgacttttaccagtgcaataataaactggtaaaattttgtaatttattatttatttttatttaattttaattgttatcaattatttttatattaaaatatataaaacttaaaaaacatgaaagcttaagtataaataatcaagctataacacataaattttaattattctaatt

SEQ ID NO: 73781 - DNA, 729 bp, Cannabis sativa
  modified_base (586)..(598): a, c, t, g, unknown or other
taataaataactgtatgttgatggaaaaattaacctttcaaaaagttcatatatataaaaattgtctatatagagatatcttaacaatcttgagttctatatcatatgttaatattaatttatatcataattagatttaacatacaaatatctagtcttctcatataataatccatccaaaaaaaaataatttttaaggaaatgattatccaaactccaaagcaacaaaaatccagaagatagatacttgctaggcataactaatgttgcctaactttttatcattaagtcacaaaaagtaaggataaagtggtcatatacatgaacttatttttgaagtccttcccattattcaaactcataatcctatttttatttattgagtaaaacaagggttatgatgcagatattatcacaagaaataacctagctcatcaacttaataataataataataataatatgttgtgttttgttttatgtacataaaagacaaacaaatcaacaaatttttagactttgtatcaaattatgttccctattttttaggccgttaaaatttttttctgaactattgagattgttnnnnnnnnnnnnntttgtctaatttcattcaatttaactatttcaatgattatatatgtgctaaatcatgctctacagactttaatatcttccaaactatatccctcgaactttgacatgtactaaatcatgtcctctgaactt

SEQ ID NO: 73782 - DNA, 691 bp, Cannabis sativa
gatcccaagaatcacagatgcttaactcgattatgctgactggattgtttgtttcgatcgaaaggagcctccgagttgttagctaagcaacctacggtattggtcatcacttcctctagttgacctcctgtttctattgttatgctaattgctaaagaatgaaaaattggacatcgacctagtaagaatcaatctaagcttagtaataaatacttcatgatcaacttcctttcgtagtactcttaccccaagggaagtcaaatccctgctgtcttcttggatgagggatgtcctaaattgctagacaatgggggtagccattaggcgattaattatcgtaacttgaaacagatttaaaagaacaatcatttgttaaatattcacatagattatgagctatccaaacacacattaaacattattacttatgatcattaaatccaagatcaatactttatttagagcatcacaaaacacaaaatatgaaatacacatgcctcccatattggcattttccattgttgctatgacaccaaaatccttcaatgtattcccaagatggtagaagaggaactatgatagcaaaccctattccttatcaccacacacactcaccttatactaaacacatattagccccttttatatctaacacctaaccctaagaggttttattgggcttattgggcta

SEQ ID NO: 73783 - DNA, 556 bp, Cannabis sativa
aagatatgagtctggttctccttcaggtgttggattcttcacagtgtttcgcactatgattgagtacttgacttgctatgagtggaaatgaactgtttcactatagggctcaaaatttatggagaaaaagatagagggagatttgaattctataaaaggaggctctcaagtttctagttgtctaacaaagttagaaaactagaatattaggttggatgggaatgagagccatcttattccttatataggattttacctaaagttagatttaaattatatggaattaaaaaaagataaaaattggctaaaaaaactccttaagtggtcagccatacaatgagccccattagttagaattttttcattttattcaacaatttatcttttctttcactaatgtcatattttctaattataacaatttaaatttcaaaaatatttatataataattaaaattaattattaaataaaagttcgctttaacttatttattaattagacttaagaaagtctcttaattgacaaataaaccctaaaacgtcttttcttcacaat

SEQ ID NO: 73784 - DNA, 949 bp, Cannabis sativa
acccaccacacttcaacgcttacgtgattttattaacatttattgaatccgccattgccgtactcactggtatgtgttctttgaaatatcgactctgacctagcagcagtcaacaaaggcacaaactttaaaaacataatttgcgtttatgatttgagccgatactgtttgcctactgcatgctttaatacattgtacatacatttcaatgctttttctaagaataataataataataaaagaaaaaaattgtaggtttctttttctttctttatgacaaattctgggttacactagggagattcccctctgtaaaaccctctttttctttttcttttatatatatgttatttggttttgtctcttaaaaccctctaatgatattgttttctaccaaggacaactgatctaagtcacccttttgcttaaattcaaattgccttgtacacagtttacctgattttattgtcaatactagtatacagttgtacttgctcattgaatattatcactatatgatatgaaaaggaaaatagcctttatatacctagatatgttaaaacttaaatctgaatgatttttaaggattacatatgtctatatttttatcttttttagaaaaatgtatgaactctcttctcgtcaaagttgttaggcaaatcttgttggtgaagaaaaaaagtagagcttcttcttgactgatttggattttttatataaaaaaattatctatgtcttaacactcacaaaaagaaaattgtgttttgatttctcagtgtcaatttaaagacttagtctggttgttttgcattattttttcccccttgtttatgatctggtttccttttacttatattataatgcactgttttttggtgtttggttgtcaattctgcagtacagggaataatttgtttggattggctcatttgctgtaaactacttttgt

SEQ ID NO: 73785 - DNA, 947 bp, Cannabis sativa
gtatgaagaattgctttaataatctcattatactgcacaaccccatggatatgataatctatgatttctaattagagcttatctaatcatttctcagatgtcaaatcaaatacaaaattttgtaaaaatgttaactactcattcacatgcgttgtataattagatagtgaagaaaaaataagacaaattgattgcattcacattaaagatataatatctattatggactactaaagttcccctttcctgggtacctatgtagctactgctatagtttcttagtccccaaatattatagggttaggcggggatcctagtttcaaaataaaataacaagttttatttatgctcatgtgtatttgtgctatctgtcaccaggggtgcgctagtttaatgttttctgcagcttgacttgttttaactcaaacttttctctattttcatctatcttgttcaacatcataacaaccctgaataatacaaaaaacacataataatgaactaggaatataaatacaaccatgaaaaacatgtgataactacacctaaatactaacagtactaacgtattaagtataacaaaaacacctttcataaaaaaatagtataacaacaacaaaataatagtaactataatgacacttacggaagagaggaaaaattcaagggaaggtcaaaggccttataatagtccatttttcagtttgtatataagtacgtccatgtgaacctgctttgtatatctgcttgttgataacacttggttgttattttagtttctccaaattcagccataattagttacacatatataaatattttagtaaatagaaggaaatgcatcactgtaggaaagtaatccaaaatggtatgtgtgggtgactttgggaatggtagctaagggtgcttttgtggtggtggtggctgttttagttatttgtaaaaat

SEQ ID NO: 73786 - DNA, 1250 bp, Cannabis sativa
tggtctggaagattggcactggaactagtattcccttatctgctcctaattggattcccaacattaagcaccctattctcttgcactctcttcatcaatctcaagcttttgtctcttccttcattaatgatgactcaacttggaacacccgtaagcttaaacattacttcccttcgtaccaagttgatcgtatcctcacaacccccattgatcctctatcctcagattcgcttatttggggctatcactcctcaggtattttaacagtaaaatctgcttaccatcttgcctgcactcttcattctgttcaagttccatcctcttccaatcctaatccataccttcattggtggaaaaccctttggtccattcctgtcccttcaaagattaaacatttcatttggagagctttccatcatatattgccatgttctctcaatctctttcttaaaaggagtctccctaaccctttttgctcaatctgtgggttcgacaaggaatcagtctctcatgcccttattggttgcacaagagcaaagtctatatggaaatcttcaacatttaaacagttttacttgacttattatagaagtgacatcaaggaatttctgttacaggcttatcaagatttgcctaaacatgatttccaagtttttatcactctcgtttggcaaatttggaacacacgaaactctattctgtacaacaagcatcatactactaacaatgtggaagaatttgttgttaattatttgcaggagtacaaggatgcacaacattctcaacatcatgacactcagccatcagaaatttcaagcatcattcagtcctctcatcagcattggcttccttccttgtcacctgatactcctgctctgtttgtagatgcagcccttgaccatcatgcaggactaactggtgctggttttgtttttaaaaggggatatcagactgtgttggcttctcgattccggaggctgcctggtgttgtctcgcccattttctcagaaggccaggctctgttacaaagtctcaagtggtgcatcgattcccagtatactcctcaagttgttttctcggattgcctaaacttagtctcaaaagtaaatggagattggcaggacaattctgctctttctggtttagttgcttgcattcgtttgctcttctccaacttccgtggtgcttctttgcagttccttcctcggcaatttaatgtggaagctcataattgtgctcgtgaagctctc

SEQ ID NO: 73787 - DNA, 1097 bp, Cannabis sativa
aggcccactagaatctgaaggtccagaatgatgcaattgatgaccagatccaaaacgtatatttgaagaaccatcactagttctttgttgagaactagtagcacggcccaaatcacgatataagcttataaggtcaaaaaactgagattcaatattccaacctgatgttctccttcttagtaatggatcaaggatctgcctgaaagagttaaaacgttgctcttcactttcatatgtagtcaactctgattgttgtgactctgttgaagaattagcaccttcatcctccatctcaggcttggcatcctcaagaagagcaatctgccaaagaatttcacgatgtacactccctatatcttccaaaacatctttgccaccacctccaaattcagcaagtaatgcagtcacccaacgattgtcttttgatgcagaaataaacaaaagaaactcaacaaggaacagtgaagaaaatattccaccatcttgtgtcattcggggatccaacaaggaccctgaagcaacatcaaatccaatcaaagctttcttaaggtgatctctaagagaggaacaaaatgcatgcgcaagtgcagcagaatgatgttgagtaaacgccttaaagaccatggtgctatgtaaagcaacagacattccatcagatgactggacaatactaggtcgtaacaaaagcttcaataatgcttcaatgcctgacttctcaacaaacaacctacatgtttctgaattctccattgttctttgaaccaataccatcaaatggaagattgatagttgaataaactgctcatcgttgatcccctctgcaactgaatcaactgcattagccaaacaacaatgtccttcattttctttatcctcggaatccatttccattgcagtacttccaataacttttacagatgaccccataatatcgttgtccgcaaatgaagcaattttttcaacaatttcaataataatatcaacaccggtgcttcttagtgaagatacatggcgtaagagttcttccacggcattcgctaaaggaacaattgcttcatccattgctacaatgtacttcttgctagtgaaaatgtcaa

SEQ ID NO: 73788 - DNA, 655 bp, Cannabis sativa
gggtatttgttttgtgttgagaattataggatttcatctttaaaattaatcagtaataagtggagtagctcatatttttatatttggcttgactttgatattatgttgagaatcatgaggttttattttaaaattaattagtaataagtaaagtagctcatattcttatatatggctcaatactctaccatttattacatgtagaataatgtctacaatattttgagttttggatgtgagtggaatgtgaaaaattgtcaatcctattcccacatagtcaaaccattaaacagtgttgacaatcttaggtacagtcttcccatttgttttatggacacgatccacaagtcaagatttcaatcaatcacaaaagtatcatgaatggtagctttttcattgaaaaatttgttacgtccgaaccaaattctccaaagatacatgataaatttttgaaaagcaaaactaatcttttccataataaatagaaagaattcataaaaatcatacattagataaaaaggaacgcctataaatttagacatctcctcgcgaatttggcgtttgtgctcccaatgccaaagagcatgatgggcggtctcaggcccaaagagtaaaaagggtaatccaatatgatcttgatccttctaagattgag

SEQ ID NO: 73789 - DNA, 1049 bp, Cannabis sativa
caatccaatggaggtaatgtcatcaggttctcaatctggaagagatgagagggattttaagatgattatttatgtgaagggcctttacgctcttaacgatacatttggtgatctcgtctctcctgaaattgaggcaaagtttgatgcttggattggcgaaggcttgctaaaacatcctaggtgattgttttcttttatttttttttttgtatatttttatttgtttgaattctgtttttattattgcaattatttgaattcaatattgttttttgtcgtgtttttgttgttttagggcttacaattgttatgaggatggtgcgaagaaaatttcccctgtgtttagattaggtgttgattatgttgaagataaaacctggttttatcattcgacttgttgtgacatgtttatcaatgactcggtaaaatttcttttttcttttaaaactttttatagttgttttatcattagtttttagtttagttactgtaattaagttttttaaatattttttaacattctgttttgtgtttctttgctgttttgttacagcacatgaacactatcttctattaccttaggaaaaaaaagaaatattcttctgctaatacactgaatttcgcaacaaattactaccttctcgatgattccattcaatctttataccacaagttctgcaaagccaagttgataaaaacaaagatgtctcacatacatgttgctcacccaatagcgcattatataagaggactacaaattccgtgttctaagccttggtatgaagctgatcatgtcctatttatcataaatcttaggaaggaaatcattggattttcggccgtcttaatttgaatgaggggatgatatttctttatatttctttgaggactgccgaaatgaattctgcagctaggaatgcaatgaaggcttatttcttttactccctttgtttttttgatctgcttggattttggaagaataggtcccatgttcctgatttaggttctgaccctaaagctcctctaagagttgtggagattgctggtct

SEQ ID NO: 73790 - DNA, 1248 bp, Cannabis sativa
ctccagtatttctgaaagaaacccagagtcatgccatccggaccaggcgatttgtctggatgcatttggaaaagggctcttcgaacttcatcatcagtaattggttccagtagtaaagcattttgcatatcggaaacaacattaggaatagcatcagttacctcccgaatctccaatggagaagatgaaaaaagcttgctgaaataatcaaccatgaggcttgacaaattgttatcccaatcgatccacatcccctgatcgtttttcagccgctgaattgaattgtttcttcttcttgaagtggccatagcatgaaagtacttagagttctgatctccctcctttaaccacaattgtttcgatcgctgacgccaaaaaatttcctttttaatcagcacctcttggaaccgtgcctcagcatttttgtagtttagaacagaagcctcatctctgcctttcttccattttcgaattttagttttgcaagcttgtattcggtctttaaaattccctacatagtcctttccccacaccagcaacttatcaccacaatagctaatcttctccataacagagcaacccgaaagaagctcccaggtgtctttcactatttgcaaacaagcaggctccctgagccatatgttttcaaatctaaacatcctctgtacctcagtcctcttcagaacatcaagaagcaattgaatcggacaatggtccgatgttgaaacctctaagtttagcagatggaaaaaagtgaatccaacttggagagactaaagcccggtcaattcgcacttcaatccaggcattagtaccccgacccttctcccaagtataaggatatccacacaagtccatatcaaccaaattacactcttccaacatattaccaaagccatcaacaagccaattagggtatggattaccacccctcttggccgattgagaggttacattattgagatcaccaataatgaaccatggcaatgcatacatatccttaagagttcaaatttgatcccaggtgtcggaagacttcaatttggctcaccaaagagcccagtaagacgccaacgattcccatcattctcactaacttcaacatcaatatagttcaccccataaccaagtactttcatatcatcactatcatgccacaacaaagctacaccaccacttttccctctaacatcaactgaaaaaacccccccaaaacccagcgacacacgcaatctttccaacacctca

SEQ ID NO: 73791 - DNA, 547 bp, Cannabis sativa
ttcttttttttttttagaaaatggccttttggccaagacaatggtttgcccctggtagcacttttttgtaagacagatatgcaaagttggatggccaactttgcttcttaatgcctcatacttttaagtttaaactttaatatgtggatgtttgcttgcatttcattcacaatttaaacaatcacatgcataaagtttattaggggtttccattgctcgtattttcctctgacactaagtagttaataagctactttatgcgcgagcagcttatctgcccggtcctcaatttgggaacaatcattgattctgcctcgctatcatcaaaaatgatgttatttcaagcaaactcaaatatattgttaatgagcttgccattttatttatatctttattgcttacatgagtagttaaattttctacccacatgttaggtttaagtattttttcaagacactttgatgtctcgttttaatactttcctttagcgcgagccattagtattccgctttatgtgctagtagtaacttttgattttcctttctcg

SEQ ID NO: 73792 - DNA, 1497 bp, Cannabis sativa
tacgactgttgcaagggttagaaatctggatgctaatacacaacttacagcccttcaggcagggatttctactgatccataaactgctgggggcgaactgtgggacgacttacagggtcgtccagtaaagaacatcactgagttcaacgaaagggctgaggtgttcgtccgaaaagaggaagctcgaaaagagatgaatctattgaaaacaggctcgggaggcaaacccagcaatgtttcaacaagttctgtctctaccagagttgataactcaggggcctctagctcaaaaaagaaaagaaaattttaaggaatcatcaacggataaaaagaaatagaagaagcacgataagtacgtgccagtgtataatatttataccgagcttaatgaaactcgggaaaatatttacctcctgcatgagcataaggttgccttcaacaagcccaagcccatgaggcatgcaaggcacaaaagagatcctaccaggtattgcaaataccataaggacattgggcacacaaccgacgaatgtcgtcagttgaaggatgagatagaaagtctcatcgctcggggccacttcaagcagtatgtgaagagacagggcaatggacacaaccagcccagtctgcctaacaacgtaaacaacaaggggttacaacctcctcccgttgaaggagaggacatcctagatattttgagagggtcgcatatcgcagggtagagcaacaacacccaaaagagatatgtgaaagaaataaaaaacgatcagtcgacatttgccctggaacctttcaagaaggtaaaaattggagaacctccaaacatattcacggagcaagatgagaaaaatgtgagatatcctcacgtcgatccattggtgattactattcagctcgccagtaaaaggataaagagggtgttaatagataacggaagctcagtaaacatcttttataaggaaacgttgaggaagatggggctcgaaaaagccaaattgaggccttgtatggtaaatctgtgcgacttcacgtgacagtattgccagtctaggcttaatcgagctcacattgaccttgggcaaggcacccctatccgttacagttatgcaagactttttagttgttgacctgccatcggcttacaatatattgttaggtcatccagcactgatcggactaggggcagtgagttcaatcaagcacctatccctaaaatttcaaataccagagggtgtgggaatggtgcaaggtgatcaaatgctagctcgcgactactatcgcatagagctacaacatagaaaagccaatcatcagttaatggcggtcttgacagaagaaagcaaaaagaaggacgaggatcttgagccccgggttcaagatgaaagaaacttattaaaaccaattgaagaattggaagaagttgttctcgacccaggaaatcccacaaagtgtgtttacattgggaagaacattgacgagcagctaaaatagcagcta

SEQ ID NO: 73793 - DNA, 1154 bp, Cannabis sativa
  modified_base (442)..(444): a, c, t, g, unknown or other
agcgaagccaatttctaaagcaccttatagaatggctctgaaaaaacttaaataattaaagattcaacatcaggggatgcttgggatgcttgacttagggttttcttgacccagtgtgtcaccctggagagctccagtgttgtttgttaggaagaaagacagatgtctacgcatgtgcattgactatcgggaactaatcaaattgactatcaagaataagtatcctttacgtaggattgacaacttattcaattagcttcaagggaggatggtcttctctaagattgatctctgattgggctatcatcagttgagaatctgagaggaggacattccaaagacttcttttcctactaggtatgagcactattaatttttggttacctcttttggactaacaaatgctttagcagcttttatggatctgatgaatagggtattnnnggatttcctcgatatttgtgttatagtttttatcgatgatatccttgtgtactcccaatcaaatgcggagcatgaacaacacctccagatggttttacagtgattacaagaacacaagctttatgttaaatttcaaaagtgtgaattttttctgtctaaagtgtcttttctcgaacacattatcagtaaagatgggattatggttgatacggggaagattgaatctgttagggattgatcaatgcaaagagagttacagaagtcaaaagctttcttggtttaactggttattatcgttggtttgttaagggattttttaagatctcaacgcccttaacagaactaaccaaaaagaatcagcaatttttatatacacacaagtgtgaaacaagttttcaagaattgaaatagcttttgattacagctctggtgttagcactaccatcggataaagaaaagtttgtggtttactgtaatgcatccaaacagggtctgggatgtggtttgatgcaagttgatcgggtaatctcttatgcctcccattagttaaaggagtatgaacaacgatacctaacacacaatttagaaattgccacaggagatttttctttgaagatctggcggcattatctctatggagagaaatgtgagatttacaccaatcacaagagcctcaaatatttcaatactcagaaatatttgaatatgag

SEQ ID NO: 73794 - DNA, 795 bp, Cannabis sativa
attgttggagtttggtggatctagatgcctgaagtgatcggtctcacttcttgagtcgctatttaggtgtttccacccactctcggtcctcgtcgatcgaagattgatctctgtgtacctcgttcccctaggggaggaagtgttgtgccctggctgactataggtgctcctattgatggctggtcggtcggccagttgttacataatgggggtttctattgagccagagatccctggctgacccccaaactgctggttgtcgggatctggctattctcactgtttaaccttcgagtaaaggtctgtcttccctctagcaggggaagatccgtcctagttcctgaggaacatggcgccaatcgtccttgtagtggatccctaagaagatcctgtcagttctatgattgaaccatcttattagatcactggcgtcagggttacaacaatctaattctggttggtgagatcaaaggatgtaccctggtcatccatcaatattaggaattcgcgtctctgctgagcaaatacatcacaatttgtagcgcatggttctttagttaggcttgcacgacctacagcttccctgagtctggctaactcaatgtcttctcctaagtccaagtgaggctcgccaattgctggctcacccactcccgagtctatatttctagcttagaactagacttgaggtctagttattgttccaggaggttgtcgcccctgggtccttcctttagtggaaggcaccaatggtggatttgcttgtggaggcatgggccttccacttggatccac

SEQ ID NO: 73795 - DNA, 1000 bp, Cannabis sativa
cctattggaggtaaccgtggcctttacctgaagtcgtgggaccacctatgcctccctaaagcgagaggtggccttggattccgaaagactgcagaatttaatcaggctttcttggcaatatggggttgggcacttcttaccgaggatcagtcactttgctgcagggtgttgatagccaaatacctgaaaagtaaaccttttttggatgctacctataataatgctgattcttggttttgaaaaaatgtggtcaagactaaagctatactcagaaaaggcgcttgcaaactcatgtcaaatgggggaaacacgaacgtttggttggatccctgggtggttcatgggatggatttctactcgaaacccatctcctcctatcctaggagagtagagaaggtttctgagttgttattgagtaatggagactgggacatctccttgttaaggtctatgttcgactctgccacgattacgaacatcctgaaagggggtagacctagcggccaggggagagataagtggatttggactaaagagggttgtggtaaattcactaccaagtctgcttatctgatacatgcgtatgatagagcccctgcctgtgtggttgctccggccttatggaacaaactttggaattctaaagttatggagagacacaaaatcctttggtggagtatcctctccaatactcttccggtcagacgtaccctggctaggagaatccatattgatgacgagacctgcccgctgtgtggggaggagacggagtccattgaccaccttctcctctattgcaattttgcctaccacatctggaggtcctccccttgggggtatacccggtttacggatctggtggtagggtctgggattgggtcaaattccattggaacttaaagttaattggggatgatgcggaaaagctttttctgtatgcttcaatcgccgtggacatgatttggaaaacccgcaatgataagatacataactcgaccca

SEQ ID NO: 73796 - DNA, 1942 bp, Cannabis sativa
tgatttcttgcaagaagcgcctgtggcgactagcattgtcttcctgataggctctcattaaatgttccctaaccctagcatcgtttaactctaattttgatgtgggttttgaagggttgggtttataagggacgaatgattctgtaggaaattcaatttccaaatcttttggacgataaatttttgaactagattgggacattgctgcaagaagaaagcaatcccaatccctggaaagaatatttatcaaacctgaaggtggtgagttgaaggttccgaaaaaacttacgtattgcctgaaccctaatgttgacccaaatacagttcaaccctaaaaattactaaaatcaaatgagatggcgacgatacaaacaaatgatgcagcaattaacaccaaaaatgcaacgtgataagcatgtaagatatcaagaagaaaagctacttactgtttgaagttaggatttggagcaatagacagctcttcggcatgcgaatctttgaatgcagtgaggatgtctttcagaatgtgaagtcggaggaaactcgctgaaaaaatgtcaagaatagggatggcatgcaaattctcgggcaaactcgatgttgtttcttagcaaataagcttaagagttcctcagaatttctaaaacgaaggaaataatgcaaatgtggttcttttttcttactttatacccttgaaatcagtttcgtcggatcaaagagacgtttgatcctacggacagaattcaaagtagaagtggaaaagatagtcatttaatgctgatgtacctcgaaaccgcaaaactgccaaaattagaagatatgcgttttttcaaaagaaattatgacaaatataccctttgtaataattaaaaagcactttttattaaaaagaaccttttaaggggcaattgttatacccgaaattcggctagcacattagaagaaaacacgtgtcaagctgggaaaaatacaaaccaaggcacttaattataatcacatttgaggtggaataactcgttaaaagcataattgacagagtatatttacaactctgatgactgaaaagtcttatgcgagataaagatatacaaactgttgccttgcgcatcaacgagaaaccatgtaacttcaggtgtataagacaaggcactaacctcgattacgtggatgagatatatgaatgtgaagacacgcagcgtataatatacagtatacaaactaagtataacagacgggtgaaccaaagcaagtgatagtgagtcgtccacctcgccataggaagacatgcacacgaaaaagattacctcgtcaccaaaaattgcgattgtcacatagggtgttatgttcccagagtaaaagtgacgagatttacattatcaactttggaaagaaataggaaaagctccagctcgctaccaaggttataatagtgaaaacttaacacagtacacagtatgaaacttacacaatatttttaaaaaaattccaccccacaataaaaagaaaaaaattaaaaatttaaattataatgtaaaaaccacttatacatgtatataacatcataattaataagtccaaatgggaaatgtaaatcttgatgattttttttttttgaaaaatgcataccaagtattacagtcccacattttaatttaataattatctatttatctctatatctataaatatgatattttgagaggaatgaagtaattcttgtttctcaaacaaaatccaataagctcatcatcgttaggggaaaaatctcactcagagaactcatctccattaattgacactcaagtcatatattttttcaaattaaataaaaaatcaattaacaaattttaaaaatgttaaaaattaatttcaactattaataagtaggagtagcttttaaaaatgtttgtactactagaaacaataatatagagtgatttaa

SEQ ID NO: 73797 - DNA, 826 bp, Cannabis sativa
ttttaaattagaacagggcctccaaaatgtttaagacgaccctggtcttgggttcgagtcccaggtaaaacatggttgtaatatataaacgcttaaataaaaaaaaaatcgtagtgctatctaaagatgtattttataggtcttttatctaaagatgtatttttggcatataggttagctaatttattatattttatttttctagaattgtgtatacttaggataatatgtaaatttttagaaaaatcgaaatagacagtaacaaaaataaagttcaaaaattgcttaccatgtgtataagaaaaaaaaaatagtaacacatgcaacacaataatttaaccttattttaaacattataaactatttcaatattttttaaaagtttacaagtgtaactatataaataactacaccatagaattattaaaaaaaaaaaaaaactaataaaatgtatcttaaaacaaagagtatttggcagtaaaatctttaaaattactaaactgttactaaatttatggtgtcattcgattagagctactatatattgcttatgtgtacactcttatatacatgatatctttgtattgatacacctaatattattattttaaaattaaataaaactacaaaataaaaaataaaatatttaaaatatatatattataaattttgaatttttttttaataataatattaggtgtactaagatgtatacaagagtatacacataagcagtttatgttacatttaaatgtaaaaaaataaatgatactttaaaagagtttttttatttttacacttcaaaatattttttttttttttgtat

SEQ ID NO: 73798 - DNA, 766 bp, Cannabis sativa
taaactcttaataattattgggtcttatatcaagtccacacactatttggtggggtgcactacaggaaatattttttgtatttaaaacatgtacaaatcctataattatgtgtttgttatatttttaaacacattctgttatatcactaacccacccctctctattaaaaaaagagacgaccaatcttctttacaaaataaaaaaaatgagttgaatctcatataaaacaagggagagatatatttttgctgctactgttctttgttttaattttttaatttataatatttcccattcttttactccatttctaaataaacaaaacaaaacaatacaatatatttgtaactgatcagttgcagttatacatgcaatcgtggccccaccctaatcatcctccatcctttgctacacgttaccatcgctagtctttcaatctctatgaatatctctcttcttacaaaaattcattcacatagttgtcaaaatgacagatcaagatcaagaataaatttctttttgttttcttgaaatatttttttagagatatatgtgttctgaaatgatattaaaactttgaatatattgaaataagaatcaatcaaaaatgaaattacaaaaaaacggtctgggagcgatgaagagaatgacttctagttttcccagaactaattttccattttaatcatttataattattttttttaatactttatgtttagccaggtggaccaatgaaataataattaagagtatatatgaatg

SEQ ID NO: 73799 - DNA, 1072 bp, Cannabis sativa
aaattcaaggggcatgatttggtacatgttaatgtttagggagcaaaaattctaattaactttttttttttaattttgtttttgaaaaataaatatgtattctataatcacaataatgaaagtgaaatttttatttttgaaaaacaaaaatgtgttctataattacttttatctctcaaatttaaaaacagaaaataaaagtgttctgtatattttatttttatttgttgattttatgtcagattcgagttcgagtttaggtccaggtcggggtttgggtgttagattctagttttcgttatttttgagttatgttgttaggtttatttttatgcattttttaaattctattttagtttatgttttagtaatttttatttatttttgttcatgtttatgcttgttttctttttgtttcgggtttttaatagtcaaatatatcatgtgggttaaaatgagagaaaatatgctaaataatataaattttatgaatttaacatgaattttggagttgtaagatacaatgggtgaaaaacgtgctgtttgtgatcgaaaataaagtatgaaactttaagccaatttttaactattatccattcacttttaggaaaaacttttcaaataaaagttatagatctctctttcacctttctagaatatattgaatcgttcaattctgagttttatcgagagagttataagctgaatactatcgatcatcgctggaagaaattgaaaacgaaaaactgccaaaatcaacaaagttttgaaaaaaggaaatcacttgtaaggccacggccttgcaagcaaggccacgaccttgtaggttttgggaaaacttgaaattttgtattataaaaaaggggctgatggcaagctttgtacaccattaaaaattttagaaaattgttagtgtagattgagggcaaggagcaaaaggcatcattggacgattggaggactccaaagagtgttctatcttatctatctctatcttttatgtttttaattgaatttctattattttagaatgtcttctagtatctaattctttttaaggattattatgtga

SEQ ID NO: 73800 - DNA, 1133 bp, Cannabis sativa
  modified_base (1088)..(1092): a, c, t, g, unknown or other
atccggctatgatccgacctgatccagatcatgtatggatcatccccgccccgccctgctagatcagatactgggatcggattagatccggcccgccttatacggatcggatttaatccgacccaacttttttttttaaaaaaaaaaaataaaaatattttatatttaaatttatatattttttttccaaaaattatattttaactaataatgcatcattttatacatttatttaatatagtataaaaaaataatacaaaaacataaatatggtactttaaatttttttaacaaaaatatgacataaaagtagtataaaaaagtaacaaaaataaaattctataactccaaatattattcttaaatttttaatttcaaccaaagaaatatacaatttaaaattttaaaatagtcaatctaggatctacttaaagaatattcttaatgtttacgtgtctctatctctggtcgtatgagattactctctttaaaacaaaaacaactaatatatataaaattgatttaacaaaccagatcagccaggagaccaaaatacaggagacaactcaatctaacataactaactccatggcctttcctcaatgtaagctccataatctcatcttaattatctttcttaattttcatggtattagatttttcgtttttatataaataaaactaagtttaatttaagcattttatcgagcacatatatcctgtttagctgtattctacttttattcacaaagctaaaaactacaatttactagttacccaacatagcagaagtgagtacaaaagtagcttagccatagtgtaattcagtaaatttgataagagtgtaaagaatctaagctcacctgtttgaaacccaagcaggaatatggccataatatgaaatgtaaaaatatttgtttaaaaagtaaaaaagttttttttttatatatttaaaacggatcgggtcagatctgatccgtaaaaaaattaagcgagacggagcggatctgatccaagatccaataagtatccgaatgatttggatccgtaatgatccgtcggatcggatcactgacccgatccaaatnnnnngatctttttgccatgcctagttttcacaatttttatttcta

SEQ ID NO: 73801 - DNA, 1804 bp, Cannabis sativa
  modified_base (26)..(33): a, c, t, g, unknown or other
  modified_base (98)..(99): a, c, t, g, unknown or other
  modified_base (653)..(655): a, c, t, g, unknown or other
ataaaatggattacattgaaatggannnnnnnntagggcataaaacccaacatgaaaagcctcatggtactctggcatgtttggctcttgaggactgnnaaaggacaatcacaatgggtgattataacttgcaatactatgaaggggaagaagtagcgtgtatctctaacatagtggctacaccaatgctacttcaacaagttaagcaatgttagtggcaagataaaaagttaagaattatctagaagcgaatctaggatggtgagcaactagatgggtggacagttagtggtgaagggtacctataccatatgagaagactagttgttgcagatattcctgatcttaaggagtccattttgattgaggcccatagatccaagtttgttatacatcgtggaagtacaaagatgtacctagatttgaagagaaaatattggtgggaaggtatgaaaagagatgtggctagctttgtagctaagtgtatagtttgtcagtaagttaaggctaagcatcaaagactttcaagtttacttcaacctttgcctataccagaatggaagtgggacaatattacaatggactttgtaactgggttgccattgacacctttaaagcatgacgctgcttgggtgattgttgatcgtttgacnnngtctgctcattttattccaataaaaaaggattacaagcttaccaagctagcttgacttttgcagacaatatagttcgactacatggagtaccttcaagcattgtttttgatagagatcctcgatttacatcaaggttttggaaggccttgcaacaatccttaggaactgattttcacttgagtactgcccatcacccacagacagatggacagtctaagaggaccatattgactttggaagacatgcttcgctcttgtgttttggattttggaggtagttggggagaacactttttactggtggaattcacatacaacaatagctaccaagccagtataggcatggctccttatgaggccttatatgggagaccatgcagatcgccattatgttgggtagaatcagataagcatgtcactattggactccagattatcactagtaccactaaaaagattaaggaaatttaagaaatacttaaggttgtttagagtcgtcagaaaagctatgccaatctccatcgacaggaagttgagtttggtgttggtgattgtgtctttttgaaagttactcttatgcgtggcgtaatgagatttgggggctaatggtaagctaggcccgaggtatattggaccttttgacgttcttgagaggattaaaaaggtcgcttactgattaaacttaccaggacagttgggacatgttcataatgtgtctatgttgaggatgtatactccagatctatcacatgtattgattatgaggctatccctcttcaggaagatgtgacttatgaagaacaacctatcaaaatcttagcgagagagctaaaagtgttaaggaatagagagattctagtagtcaaggtcttatgaaaaaaccacatagaagacgaggctacttgggagttagagtctgagatgtatatgaagtatcctcagttgtttaattttcaacttgaggttgtactttgaaatttcgagacgaaattcttttaagagggaaagaatgttgaccctcggtttgaccaaatcaaaaggagaaagaatatatatatgtataataataaataaatatgtatatagatgtatataaaaaaataaaaacaaatagttacccccttcgtatcctctctctctctctctctc

SEQ ID NO: 73802 - DNA, 773 bp, Cannabis sativa
tctcctcttgcctgaggtattcaactgttctggccaacttcttcaaccatgggtgccggtggctcttttctggaggcgatcagttgagtgtcatctaggtaaatctcgacgtcctgaagacggcaaagaatgtctagagatcttgtagcaacggtaagtaaggaaacaacaaagcttgagcttgtcgttctcacaaacggtgccaagctgttgatggtaaaaactcatcaacaaacttaaagccaaaaattaaaactcaaatacaagacttaaaacaagaatgaaaatatgaaaactttgagaagtgtcagagaaacaaaaaaatggagatgagatgcttgtatttcttaaggtgaaatattacaatgattttccaatcccccttcaaatttgagaatagggtatctataggctctaatggcctgagatacacttgtgatccccaagggacaagccgaccttaaggggctgcggattgcaggtgcatgaggtggtcttgtgccttgtaccattatcggtgtcaggtggtcctgagttgcaggggtagtggttgtagagtacacgttgttgggatgtcagaagctgcagatgaagtgccttcactacttgtaccctctcatcaccaggccacgctgaaggcgtggccgtactctgttttgaacctttccacgtgcacaccttgtcatttaattcctcacttaacggtcttttatccacagttagaaatttttttccttcatttctctacagcaccatctctctctctctctctc

SEQ ID NO: 73803 - DNA, 756 bp, Cannabis sativa
attataaatcacatctagcgactcaattcaataaaaaattcaaaacaaagacaaaagataaaagcagccatacattgataaaacaatttagtatagccttaattagtatataacagttgtattattctctcaccatatggctagataattattcataacaaataaataagtacaagagagagacaaatgtataaatacatacacacataatagagagagcataacaattaagggaaaaagaaataaaaacttactttgattttggtgtctgcattttctacatctccctcaacctctcagtttgaataaaatgtattgtacaaagattgactgagatgtctcaaaatcccacctgatccaccaaaacctatgtcagtttcagagaaatctttgggtgagaaagaaatagaaaatagaataggttatatatgtacaaataaatgagtaaatgactctatatttttcattattaacaatttttacatttgtttcaagaacgagggtatgattttattttccttaaaactataaatatatattcactaccataatcttccaaaagtgttctgaatcattttttattattcaccagatcctaaaaatgaaattatccaaatcattggtaaaaattaaaactttaaagctattgcagaacagagaaattcaatattatcataaaacttaaaaaagaaaaacaccacatttaaaaaaaaaaatcttaactttatcacaaaaatgattcaaatgacaaacaca

SEQ ID NO: 73804 - DNA, 664 bp, Cannabis sativa
  modified_base (593)..(595): a, c, t, g, unknown or other
actttgaaacttatgtatttatttttagattatattaaataattttttattttaaatacttttacgttacttttttattttactcttataaaaatatttatgttacttagactatttaataaagtaataagttacaataaagttgaaaaaaggcactataacttattggtaaaattactaaatatttaaactactaattagttattttaaaattatttttttagttatcttttaagtttataataaaaactaactagttttcatatagtgtaacaaataagcatggatatgaaataattttatttagtatattttatagtaatatttaaattaattataattttaatcatataccaattggttactttcataaaatgatcaactttaaataaaaatatctcctgtagaaatataatctaatggtaactaattagtatatgattggtagcatgtgtaagtgtaactcaaatatttcttttatttttaaaaaatgataaattatatgctttccacgtattaaactgaccacgttgaatagtaaataatgattgtaatttttttaaacttaattgagcagtataaatttttaaatnnnatataaaatagagataaaggaaaaatataatatgtatcaatatatataaaagggggagaatggctaaaa

SEQ ID NO: 73805 - DNA, 1110 bp, Cannabis sativa
ctcttataattgagacattagcaaacatcttttctcgacaagtttggtattctccaaatacttggttaacaaacaattgggagtcgatgtacatctccaccttcttggctcctaccgctttggccagcctcagtcctgctagcaaggcttcatactccgcatcattattagaggccagaaatatgaacctcaaggcagcatggagtctcagtccgtcaggggatatcattgctacttcggctctggatccattctcatttgatggccattaacataaaatttccatgcaggggtatccaggtctggctcattagcattggcttctgtttcattgcactcaataatgaaatctgtgagaacctagcctttgatcgagatgcggggtatgtactgtatgtcaaactaactaagtttcattgcctacttgaggagtcttctagaggcttctggcatctgtaggacctgccggagcaggtggtttgtgaaaactttgatataatgtgcttggaaattggcctcaattttctttacgtaattaggaggcagaaggctaattttttgatcaaagtgtatagaatttatgcacttatcatgtgttcgctgacgtagtacaccgagtcctgaatcttttcctcttctcggaccaatgatgcgctaacggcattcttgaagatggcaagatataagtacaaatcttccccgtgaatgggtttggacaacactagtggtttggccatgtgctcttttagtttcttgaatgcttcctcacactcttctgtccactaaaacttttggcctttcttcaggatattgaagaatagaatgcactttgcagtggaacaggagatgaagcgactcagggcagttaccttcccagtcaggctttgcatgtctttatgtctttttggggaaggcatatctaataaggctttattttttggatttacctctattcctcgcagacttactataaatcccataaacttccctgatttgatgtcaaaagtgcacttctcgggactaagctttatcccatactttttgaccactttaaaacattctttgagatctttcgtaggatccacaattgtcttagatttaaccagcatg

SEQ ID NO: 73806 - DNA, 566 bp, Cannabis sativa
cattgtaataaaatctctaacaatgtctactacaaaatttattttattttatgtacttggattaatcagatttaatgtactatgtagttagtttgatgtgaagcaaatgaatgaaattctttagaaaaaaaaaatatattcattagtttgatgtgaagcaagtgatctctttaagtttaataaatatgcaacgctgtattttttgacttttttcttattatgaggattttttcacacattttattatttagaaattgatagtgatcacttattcgtactcatatattcatttttaaaataatcgatcgaattagttgtattgaaaatttattggtagaataaccgattactactatcaaattacgtctatatatatcaataatcgtaaaagaaaatatattttggtaggaaaattatttattaatcttttatttaaattattaatcactttttaacttggtcactcttgataattatgtttttattttaaaaccaattaatatagtatctcacaatagacattatcccacaatatgcaagaaatatagctttaatattatatatat

SEQ ID NO: 73807 - DNA, 866 bp, Cannabis sativa
agacttgttgtgatagactatctagggactagttacgttgctgaagcacctggttacaacgaccagtctttcaaccctttttcttttagtcttgattatctccaggttgatccacaaactgcctttagtataaccctcactttcctaggggcgcgatgcttttttggttcgccactcaaaaggttatttgcttggccaaaagatggcccttctccgcgaaacaaggtcctttgcaatttcttgtatcctcttcgggttttagttccgtcacaaggttgagtcccgagggtgatgtttgcaactgccttagacttatacatttttttttcactttggtccttgccagcctttcatttcagcttgccatgcaacttgataggctactcttttgtgaagtttgtggagacgtgtaagaagggatttagacgcgtctttctttttcaataagattttggccgaacgtgcttcttatttccgggttcacatcttaagcttagtttttgagggaagaactcaagcgtatttctctcagagagattttggttgagaaaatttctctttcttgttgcatgtatactcttgggctggatgactttggcaaaaggacgtaagatgttgtagccgctagtaatcgggcatatcgtactccccaattgagctggtaatttcagaccaaaattcttggtcatttgctcagagtttaacttgtgcccctatctctgaggagttgggcgtaactttgccatgtttcaagaggtaagttgtccttctgggttaattttgcaaaagttcatagccactttcaagctctgggaaaggaaacatggggttctgggcgagaacctggttgtatgccccagtaatct

SEQ ID NO: 73808 - DNA, 841 bp, Cannabis sativa
tgccacgtattttgataaaaaaaaaagtatagataatatttaccctccaagttctggctcacaattttgtgagttgggacttgcaatggttccaactcttttgttccctcccggagggtttgcaatatgacatcgtgcatgtgcagagcacacctatattaattttgtggtactaaatcaggtatgcagcagaataatagtttatgattatcatcgtactacagtccacgtcctcaggatcaccatgtgtatatatagattaagtctaaaataaatagacaaaaaaaaattacctcttaaagcctattagggtattcttatttcttttcgtatgttgtatccttggatggcgaataactcataccgtagtcttccgaatctttgttgtgataaatccaacacgcgagtatatgtattgtttacaagtaatagactcacaagagtgaggttgattccacaaagactgtagttaattaccaaacacttaaattcctagttctattaggtgacaataaaaataagaaaagattttaatttctacttaaagaaaaacaaagaaaacaaataattaatgtgaaatttaacaatgattaaagcttatggtgattaatttcaattccatctactttatatggtttaacataatttaattttcgaattctaattttcatgtgatagcgaatttatcaaagaaacttatatccagacttggacatataaatctcaatctatatgcaaattttaaactctcgtgataaatttaaatacatacaaggcattaagcataaaaatcctaaatgccttaaggaaataccctagtgaaaggaaaatttcagaatga

SEQ ID NO: 73809 - DNA, 921 bp, Cannabis sativa
atctcaatgtgcttagttcgctcgtggaacacatgatttggagcaatatgaagagcaacttgattatcacaccacacttttgctggaactgaaattttaaactcaaatttagtcaaaagctaataaatacatactatctcgctcacagacaatgccatttttctatattttaattctgcactggatctagatacaacattttgctttttactcttctaagagatcagattgcccccaataaatataaataacctgaagtcgattgtctatctaccttggagcctgcccaatttgcatcagagaaatactcaatcttggtgtatccatgatccttgtaaacaatacattgtcttgatgctccttttaagcaacacaaaatttgctctaatgctgcccaatgatgaattgttggagaagaccataaactgactaacaacactaattaagaatgcaatatttggatgagtcacaattaggtaattcaactttccaaccaatttgtgatatttctcaggatcttcaaatgattccccatcacgtgtaagatgcacaactggattcattggagtactacaaggttttgctctaaatttttctatcttagttatcaaatcaagtatatacttcatttgagacataaaaataccttgtttacttcgagtaatttcaactctcaagaaatacttgagcacccctaaacctttcatgtgaaattagttatgaatgaaagacttaagggatgagatgcctccaatatcatttctagtaataatgatgtcatccacatacacaactaacaaaatgataccaacagttaatctttcatagaacaccaagtgatctaacttatttttcaacaaattaaatttctcagcagcctgactaaatttaccaaacgaagcacgaggactttgtttcaat

SEQ ID NO: 73810 - DNA, 615 bp, Cannabis sativa
aaaagtctatactctttcaatggagaggtaacataagtaaaaagtttgaggagtcctaagtggcaaaatgctacctctaagaaataatgacacctcatagaagaggttgagaaatcttaacaagctgacaatccttcattacgataagtaccctcaaaaaagggaggtcgagatagctaataaagcctacactcccctataaagggtaacccaaaaaaaaaagtcgtaaatgtccacaacactagcctagggactaagagatggagacaaagctcaccaaaattaatttacaagaacacttgaaagaattcttatagactaggggagaagtagtgttaacccccaaaaattgctaagtgtaattttttgaatcattggtgtcatactcgaaaattcaccaagtataatttctaaaatatgcttaaggaggtgtgttggcacgatgaggccaatacacataaggggaggtgctggcacgaggaggagcaaaggcatgggtcgagctccttatgcccatgctccccgctacccaaccgctcctccttcctggcacacccaagctccccgctgtagatcgccatgtgcccaaaagagctccccgctccccatcacacg

SEQ ID NO: 73811 - DNA, 1070 bp, Cannabis sativa
taactaatacatgaggaaaaatatgaagtaaatcaactccgaatggatgtgcccaaaatatatctctaactgtattagtatctttttcatatctatgccactccatatagttatactcacttagctttctcatcaattgttgcatttgggatctacctgccttttctcgaattctgtatttttgtcttgcattgtatattgtccttatcgttgagacattacatttattttttttctttgatcacagctagaatttctcttggcatgatattacactttgacaatatcaactaatatctttgtctcttctagaatcaacctcccagcgaaagaatgtccttcaagatgttttgcaattgaatggttatgaaatccacacacgatggtgagtatccaatcatcagctgttgctaatttttatgcactcaataaaaatggacaaccacatttctttgtcgatgttctcctatcaatttttctcttttttccttcaattgtctttatgtgttgtcgatagctgccactccttttacaagcaaatttattcttgcttttcgactttcacgtgaatcagatctcttaattactataataattccatgttgctttcctttatctttggtccattcaataagagatttttccgaatgaaaaatatacataaaagtaataaatggaaataattaaaacataagcatatcttaaaacttgtgagcaaaatataagaaataaatattttatagtaccaaatttgttgaaaaaatgtactagaatcaaattctgaagaagtattattgcttacttcaacttcttcttcctgcaaaatataatttcaattccataaatatcaatatcttatttattttcattcaaacaaatattgatattaaatttaatgatctgaatgttaataatgactttagcacaaaaatagtctgtataattagacttgatgaactatgtgaaagtaagcgaaatgacagctatgcccatcaaagctcaacgttgagtatgctatttctcaaatttgagagtaaatttgcaatacacagacttttttataactttgc

SEQ ID NO: 73812 - DNA, 892 bp, Cannabis sativa
aaaaaagataattaaatcccttaaatataggactaatatcttgagagaatatctctatcttcatgggctattggacaatgtcatgtaattgtaggttagcttgttaggagttgtttgcacgttatagctggccagctatgctgaaggttatttagcttagcctgccagccttgctgaaggctgtctagcttggccggtcagccttgttgaaggatgtctagcttggccagccagccttgctgaaggttgtccagcctggccagttaaccttgctaaaggttgtccagtgtatggacgctggcactcctggccgaccagctataggtccggccaaggctttgctggcaggtatgtggatctgtctttgcttgtgtccaccgtgcagctatgtgatcttacaggttgaaagctacacgcactagcttggtaggttgaaggatgcactcactaacttggcaggttgaaggctgcacgcactaacctagtaggttgtaagcactagcttagtaggttggcaggttgtaggcactaacctggcaggttagcaggctacaaacactaacatggcaagttagtgacgaactgttctccgtgtgtcttctgcttttgactatgtagacatgccaggtcaagtggacaaaatttgggataacatttgccctccaagttcctattcgaacgtttgtatggatagggacttttcagatcttactttgcccgtaggaacctttaccaaatagctttgtcaggccaagtattggactttttggatgacgtacttttaaacctttgatcttctctctcccgtgtatgccttttactttcctcatcttctcttcttcgacattttcctctttctttaaatctactattgatgagtttcaagctattt

SEQ ID NO: 73813 - DNA, 889 bp, Cannabis sativa
tgttgtaggttagagttatagattagagaaaaagcaaaaaggtaaagtgaagagattttttttatttataaaagtttactgtctatggtaagatcatgttaaactaatctatgagctacaatattaactttacaacttttttacatcctttggaaaactagattcaaggtacaaaataagtctcaaaattacacgcaatcaaactactagattcaaggtacaaaataatcttcaataggcatcaaatagaattaaaccacaaatggcgatggaatcttctcgaaccaagatagctcatcatctaactgcaagacatattttaccaaaccatgaactacaaaattcttatcatgagccacatgggacacaactgtccttaaaaatttagacaataaaactataacgtcttcaaataataccccatcacattaaaaaaacacattcacattattataattgttgccagagctagcgaaactaaaaaaatatcgcaacaccaaactaaaaaatatagttatattagaatgacaatcttcaaaataaaaataatgtacaaatttagaattaaacacacaacacatatgactagcttgacattactaacaaactaaaaaatcaacaaaatttctaagaataactagccaaaggtattattctttagctagtaacaacatacaagcatcttaatttaaaactgttcaaagtcaatatcaaacagattatattaaaattaaacttatcggtaaattctctgtaattgtaggccctccacaaaataacctacaaaataacaaaaataaaactctattaccatacaatataatgaaaaaaaaaaattaatgtgaaagaacaatggaattggtcagccctaccatgcgatctgtcagga

SEQ ID NO: 73814 - DNA, 751 bp, Cannabis sativa
  modified_base (478)..(479): a, c, t, g, unknown or other
tattgagctactttttgttgatgggccatcaactttaagtttgcagtggctcatttctctttgatttcatcaagtgattcggctaggagtatgtgatttgtgtcttgattatacatcaatcttatgtgggaaggtggctcgagttctacaggcatcatagcttcatatccgtacgccattgcgaatggtgtctgtccggttgccgttttctcagttgtgcgatatgaccatagagcttcaagaagttcttctggccaatttcctttcgcatcttcgagttttatcttcggtgtatccttcaaggtcttgttgattgcttcaacttgaccattcgcttgaggatgcgccactgcagagaaacttttgatgataccatggttcgcacaaaaattagtgaaggattggctgtcaaactgcttgccattatctgaaactatcttgtgtagcagtccgaaccaacagattatgttcttcacannaaagtcttgaactttctttgatgttatggttgcgaatggttcgacttcaggccacttagtaaagtaatcaaacactaccactggatactgcactcctcctttacctttgggtaattgtccgatcaggtcaatccctcaaatggcaaagggccacagactttgcatctatgttaactcgttacgtggagctcgtggtatgtttgaaaatctttggcatttgtcacacttcttaacatatgcttttgaatcttcaatcatcgttggccagaagt

SEQ ID NO: 73815 - DNA, 843 bp, Cannabis sativa
ttctttttcttattttatattaggaatttttgtcatctaaattttgacatgtactaaattaaattctctgaatttttctcaccgttaaaaatttctaccgaactactgagattatcgaatttaaagactttgtctaattttcttcatttttactaatttagtgattgtttacatattaaattatgctcctcaaactttaatatctatcaaatcatgtcctctgaactttcattcatgttggactttctttactaaaattagacaaaagttcttaaatccaacaatctcaatagttcaaaagaaatttttaacgatcagttcaagaaacatgatttattacatataatttgaggggacaaaaatactaattaacctttgtattattcacttttccataattttatttttgtaacacactaacaattaataggcctctttatctatacatgatttgattctctaatagtgataagataaacatcatctgtttaatataattaaataaacccatataattaagagttacacgtggttagtagtagttgttacataataaatgtcttcaataagcatattttattccaaaggaaaacaaaataatcaattctaataaataatcctaacatgaagaagagaagaggaaagtaacccataaattaagattttgaaaatatagcaatgctattaggtatagcctaatattatcatgaaatgtataataatattcaacaataattgttaaattaaataatgtaaaattcaatatttaattctattaatagctatataatactttagtagctatataatactttagtgtattttaacatggaagttatcaat

SEQ ID NO: 73816 - DNA, 1044 bp, Cannabis sativa
  modified_base (773)..(776): a, c, t, g, unknown or other
tgtattgaatataacttttcaaatcctattacagagataatactacatactacacttgatcttgatatcaagatgttaagattaattgaaatgcacttttccatttatattagtggaagtgggagtttgttgggtttttctgccctaaataaaacccattttaatataattagatttactaattaataaaagattagaaatcattttatgttgcatggttcacatgctttatttcatgatatatatttaatgtataaattctattaagtccagaacatatatattattatcctaatttttgcactctgacgtggcatcacacgctggtgacacatggattaactccacatatctgcccgaaagagatgttccgagcagaacaccacatataccttcacggacaaagtcctcctagccgagtagtggacaattcgaatagcatgccaacacttagcaacttcagcatttgcatcatgaagcacaaaagcaatccctataaatttgggatcgtatcacagagatatcgcaagttgtccaaatccctcaatcagtgtattctatatatgtaatgtgtaatcttgccaattatagacattgtaaacaaaagggaaatcttccctcaagcacatagccctataaatagtgatctattctcactgggcaaagggtcgacaaaaattatctaagagagcatactctgagatgtcgttgtaagagctttaagagaagaatctctgtattctttgttcttaagtcaatacaaatcaaggggnnnnggctattaccgaactgctcgaggccgaacctctttaaaaactctttgttttttatttatcttttcacattatatctaaattatttcatttatcgcttacgattaagactcattgtcattggctaaagcgaggtcaacattttggtgctttcattgagagccaaaatcataaattcgctctttacttcaaatttaatcttaaacacgatggtggtacaaactcgtagaggcgtgatcaatctggcaaatccaccggcagtggatcccgc

SEQ ID NO: 73817 - DNA, 1222 bp, Cannabis sativa
tatatgtcatttaattgctattatatatgaaatcgtaaattagggttaataccttaagtacgtactatgataaatatacgataatttgtagacgtgtaggcgtaacacataggtctatgctatatagacattaattataatgatattattatatatgaaatataatgtgatatatagtgcggtgacacaattttatatgcaaaggcgtaatgtatgaaatataaatattataattactcataatgtattattattttgtcttgttgtgccttggcatcgctggtgctttattgtgcagccaagagtaaagcaatatcgggttagctatgagttcgaggattttgaagatgacttgtacatgttccggccaaactagaccacgagagttgggtctaacgaaaaattgtatagatattccattttgttgcttaggttgatctgtaagaaataatttgtaatattttaaaaataattttacgcgatcttggatatgtaactttaaacattttggtttaaagtaaagcgtgtattattgcatgttatttatttaatcaataagtttaatatttattttaatcacttagcttatataaatcgcgattaacgagattagtatattgtaatcacgatacgtagcattcttctgagtaggttacacatcgatcatgccaccatcggacgtaacaaaaaaattaatttttgcccaaaactcagatctgaccattttcgaccctaaatataacatcaactcacagataatagacattaatcatgtaatttattcttacatcaataaacctataaataaaatcatacatttcaaccctaaatcacacagaatacaataaaatgaaatagaaaatttacattcatggtgcggtggtcgtggttctaagatcctgggtcttgagttagtagtcgtcgcgcggtgggttgatggtgttcagttggaggcacagtagttggcaggcgtgggttgctagggtcttcatgtgtgtgcgagagagagaataaaggaagagagaggggtgagttatgagaattatatttttaaatttaatggaaaagtgacatatcttactaattttaatataattagatttaatgttccaataatttacccaaatacatgaatattaatctaaatttatgttctccctagcaatttcattaatctaaatggcatcatgatatgaagacgtacaataataaatattaatta

SEQ ID NO: 73818 - DNA, 1040 bp, Cannabis sativa
  modified_base (40)..(61): a, c, t, g, unknown or other
tcattttagaagttcatgtttagggtgttaatcaacatannnnnnnnnnnnnnnnnnnnnntggtaaaataatatccaacagtctaaacctggatcttcctaactaatacccagatgggtactcgaaaggccaattgcaaacactgtccgcccaagagtgtcacagatctctacctttggtgtaatctggatcgcccagcaaaggttatgctttttctgacatataatcagattttgtcccccgtatcaagacatggtagtgtgcccgcatcatccacctttttatcagacctctacttttaaaggtcaaacatttagaggaaatgtgccctctacttttccagattaaaccttttgatgacacgtgcccataacgtacaacattccccaattgtccagctccagcacgcacgatcacaattgtttccaaggggtccaatagtcagctctcttttgcatgtaatttatcccatttttgagattttggcataaacttaggcgggccatgggcatgtgcatacacacccttagcctataaataaccttctatttatatacaatgggaggattacaacctaaatagctaaagctctgccaatattgttctaagtcttcttcttcttcaagagaaactaagaacatagagttaaggtttcctacaaaatattgtaaacacatcaaatacgcccttagaggctaataagctgactcatggactaaggttgattaacacctgaaacatgaaaaaatcttcatctcattaattttcgcattttattatatctttagttctcaaatatttactttctgaaaatttcagtaaatattttagtactttcattgagagttgaaggaagacgtaaacctacggtgttactgctaccgtgatttttacacaaaaatcggttcctaagaagacttcacgaagtgacctcgacactgttgtaacgccttaagatttaggcacgctacccaatatgattaagaaaccctaatcccctaaacgggattggttttaaaataagcgcagaaattaaact

SEQ ID NO: 73819 - DNA, 552 bp, Cannabis sativa
aatacagggtaccaaataagtatattccctatttaatacataacaaatggtatgtattagcttgtattataatatttactaaagatttggcatcaacaccaatctccaacccggatctggacatgggaccgggactcaggacccggacccggacctggacctgagacctggacccgagactgggacccatacccagacccgcacccggactcgcgacacggaccaggacgcacccgcacccgcacccgaactgagacccgcacccgaacccagacccggacccgaacccagacccggacccagactcggaaccatagttggtgttggggtcaagtgtattgaaaatatactacaattttacacaatctattaatacaagtcagtaccaaacattctattgtataaaataatactaatacaatacaatacaatacaatacaatccaacacaatacaatataatacaatacgacgtaccaaacgagcccgtggtggatgagatttgaattcaattttctttttatatatgaaagggtaaatattattttggacc

SEQ ID NO: 73820 - DNA, 550 bp, Cannabis sativa
aattacaaaaataccctttcggggttagcggatattacattctctctctaacttcttcatctttgaaaccctagcccccaaaatcagccccatcaaaccccagtcgactcccaattccagctccacgcacagccaaccaatctcatccccagctccctaaaaaatctcactcaggtctctcctctctccttctatcgcgcctccctcttctcaaatcgcagccttccctctccgtcagtccactgaagcctttcctctctgaagcgactctctttcccgtcgatcctctggtgtggcgctgcacacatctatttacagagtggcgaaggaggagacttcaataactcatcttgaaacgcctgaactccaagtgaaaccctgttgatacccaattccatgagctgctttaattttaaagcatcaaaagttccagggtccatttccatagacatctcaacatctgaactcaacccaaattgcaatctcaaaatctccaaaaccgacgaaacaagcctcggcggcaccagagaaggagtaccccctccaaaaa

SEQ ID NO: 73821 - DNA, 1508 bp, Cannabis sativa
agaagatgggataggtttttgcgaactggagaggaatgcaatatacatgcataaatatggatgaaaaaaaaaatatgtggtattttaaatatgaagaagtgaggtgatacctagagggttagtataataaaggaagcaatcattgaacatatatgtcagcattacagatttaaacttcaccactatatcgatgcaataccaaagtagacaaaagttagcgtgggaaactagctaacctcataatcaagtcaatctgattgaaagaagtaatagaagaccaagcaccatgggagagattagcaaagaaaatacaagagagtgatacaagaaagagattacaaaagaaaccaacagcggttacctagaaaaatgggaaggcgtgacaggtgcaatgaatacatggataaaagatatcaagaagtgaatgttagacaaaaatgtggtcgaaatggatcattaaatatttatatatagaagaccttttaaagagtttccatgtttgttttcaagtgtcgtggaataagtatctattgatgagtgagtcaatactgcgaaactgaaagagtgacactatagctttacagtgtaaaattaagtagaatagtaagatttttgtatgtaataacattcaacgaaagaatgggaataattaaagagaaggttgcataaggtcttttaccgcactctttgttgtttgatattcttgtatggtataatattttctcaagtgacatgtaaggatgttcataagagaataaatgattttactcttaatggcatgtaaggatgttcataagagaatgaaaacttttataatatcatgagcatgcaattgcaaaacttgtgtatttgaagtgtatgtgtaagttattattatgaagtatgttttgttattaaataaagtatggtaggataacaattcttatattaagaagtacataataaatgtgttatgattttactgataaggcaaatgttaaatacatgtatgttgggctaatgaaataaaaaaaaaatgtagtaggtggaaaagggcatgaagagacagtactctgagtatttgaaaagtgaaatttcgaggacgaaattcttttaaggagggtagaatgtcatacccggttttaaaaaaatagtatttaaagatttattgataaatttattatatgaaaaaaataattgtctatttatttatatgaatagtgagtagggataattattagagttttgatggctacttattttaaaataagtaaaattgtattagttgtcaaaataaaagattttggtattcttaggggttgagtaaaaatcatttagggagacttaatataagagttcaaagtattggacattatttaatcattaataattaaaaagaatttatagatagttcttttgttgattataattgtgagtaaatttaagcaaaaatattaaatagtttaggaacttttaaatttgctaagtggtggccgcattattataatgagtaagtggttgatattttt

SEQ ID NO: 73822 - DNA, 716 bp, Cannabis sativa
tcttctctctatttttctctacctctatcataatgttcaacaacatggtatcaaattgatatttcccaccattaatagcaaatgtagtcatcggaattcaaagaaacaataacaaagaaaatgtagaatcgtcaatcgttgattttagccaaaatctctccatcaagctcaacgatcataactacttgttgtggaaactacaagtgttagttgtaatcaaacaaaatcgataaatagattttatctcaggagctgcacaaccaccatagtaccttaatgatctagatcaagctttgaaaaacttaatcctaccttcatcaattgggatgtttaagaccagcttgttgtgtcatggcttctctcatcaatgtcaaaaaatttgctcacttggatggtcagatttgaaacctcaagcaagatctggcatactcttgagcagtacttcgctttgcaagtgtccgtaaagatcttagaattcagaactaagcttcaaaatctcaagaaagaaaatttgtcacttaatgattgtttgcttaaggtgaaacaacatgtgtatcttcttgcttcagttggagaagttctcagcactcgagatcgtgttgcagcgatgtttaaaggcctattacctagtgtatatgacctttttttgcatatccacaaacacactaactgaaggatatacaattgcaaaaaaattgaagctctgcttcttgcct

SEQ ID NO: 73823 - DNA, 628 bp, Cannabis sativa
tacatacacacatatatttatatgaatcattttttttttgtgtacacactaggttaaattatttattattaaatattaaaatctaaaatattcatctcaatccaataaattcaactcaaccccctgtataattgtactaagtagggttaggttgtataacagaaaaaaaaaattgaatggtttataacttttttaaacttcaataattgggttagcccattaaaatacctctaatccgaccaacctaacttatgtgcactcctaccaccaacaatcaaaccagcattattcctgttatccttattatttttgtccttacatttacccgtgttgttctcgttcctcaaaatataacatttatctttgagatgactctcccttgaacaataattgcagaatttttcaaacttgaacttagatttggattgactagagctattgttgttgttgttgtgatttctgatttccattgttcttgtcaccactattatggtgcagtggtaaaaaaatttaaaactcttaaagagccaataattctaaaaaaaaattgtaaaaatagaagttgggaattgattcatttatctctttgcttaaaaacactttctaacactataataaatattacttt

SEQ ID NO: 73824 - DNA, 869 bp, Cannabis sativa
atttttttattgttactttttaaccttttttcacattaaaggttaaaaaaaaatgataagaggcccttaaggtgccaatcactataaaaaaatttagaggtgttcattggatcacatttaatatttttagatctatccatatccgatctaattatatattagatgtaaaaatttactaatccgatccactcaaaataatttcagttatccaatcgatccaacatggatgaatgggttaaattagttctatccgatatatttcatatatatatatatttattggtttaatttaaatttattcaatattttagacctaatattttttaaatcaaatcgaatccatccaatattttaagtccagtatgtattggattagattcgatctatccaatccaaaaaaataaaaagagtaaaattttaatgttaatttttatgtatacatatattttacaaataacaatataaaatttaattacttattcaaattaaatgaaaatactaattagtttaattggatgttagatatattggacttttggacacatccaacatccgatccaatccaattagatatttaaaaataacatccaatccgatctgatcacaattggatatccaatatttggcaatcggttgtaattgaatcggtgagttgtcattagattggatgatttatgtacacccctacaagaaatgatataccactattatttatttcaatgtcgagtcccacacattttaatttaataaataatataaaaaactgctagccaaatacaacatgccaaatattataaatacactttttttttttttgctggaatacaaaaatattgtaaatatacttattagataaaatcatatgccaa

SEQ ID NO: 73825 - DNA, 1680 bp, Cannabis sativa
  modified_base (362)..(363): a, c, t, g, unknown or other
  modified_base (906)..(908): a, c, t, g, unknown or other
aagctccacaggtagtgcagttctacaattattctctccacatcccaaaagataagctgcaagacattcatcccctcgtaaaataagtggcgtcatattttctccaagtgttacggataagtaacttatttttaattcgatgtcattttgattggctccaatcttcttatacaatttatccaataacatctcaaatgtagtgcttgaatcatcgacaattatagatataccttccttattttttggtgaccacttatatgacccatgttcatccttccactccccattgtactgaacatagattactattcgagtcattcctgtctgaaaaatagatggttgatattaaaaaatagttaaannatattgatgttaaaattataattaacaagttcaattttcaattaaattcaattaagtgttatcaatgtgtccatcaaagagtttaacaacaattgagtattaacactatcttgaccatgtttggtcgagctagttgagctctattagaatgatcatatctattgaatgtcactcttttagcaaacatcgatgaaaaaagtttaacaattaaaaatattaatagggatcaaatctagttgagctctaccattatgtctatcatctcgactgacaacagtcgagctctactaaaattgtaatctcaactaacatagtcgagctctactagaatcaccatctcaattgacatagtcgagctcaaccattaacagtcgagccttctgcgatttatcttcaatcttgggttcactttgcaaagacgggattttcaactcaaaaactacaaaatagtaataatatggctagtatgatatttttattgttgtttctatcatatatacatgaaaaaataagaatcaagctaaaaaaatacaatttttattnnnttttttacattcaaaataaaaaatcaaaaaattagggttcattcacttacctcttgaatgtaattgctctcttgacaacaatgttgatcttacctatagatttgaagagatttcatgagattcttaaaaaaataaaagaagagcatgaaaacaccatgtgtggggagagagtttttttatttattattttttttatttttttttatttatgatatgggttttctatttttaattaaaaataaatataaaataataaaaggtattattgagatataaaagtttcattaaaagagaaggttagtgtagctaaatttttaaaaatgaagtttacttagctaataaaaaaactttttaaggtgggtatattagtaatttactttattagttaataaaaaaattaaaaaattaaaataattttataaaaaagttatttagcaatatttattatatttttatcttttttattgtttaaataatgataatatggtaaataaagtatataaaattttgtaaaaatgaatgaaccataatagtcagcgacacaatgttatatctcgttctaaatttagtacaactttagcatgttgcaaattttacatatttttttagaacaccattaaaatttggattgatattgttttttgtttttggattaaaagctccttccattaaccaacaaagaagctcacaaacggtgccaaatggaacaaagtcttagatggcaacaagaggtggcaactcctcatagcagaaacaacaaaaaacataaggt

SEQ ID NO: 73826 - DNA, 844 bp, Cannabis sativa
ataataaataataattaattacaagaataattaattaaaaaaataaaaaaaataaaaaaaaaagcttcgggtctgatgggtccgattggtccgatatggtacccatcggacccaaatggaggagaatcggacccacgattcaaaaaattaaaaaaaaaagtagtgggtctgatgggtccgaccattggacccacatggaggaccatcggacccacggttcaaaaaattaaaaataaatacaaaaaccaatcgggtccgattgggtccgattggtccgaccatcggaccccatcgggtcttcacccctgccaacaaattttccactacatcgggcccccatcgggccagcatcggaccccatcgggcccgacgaaaaaaaatgtaaaaaaccagaaaaaatccagttttcacaggcagcaaacattttaacagaaaaaacaacaaaataacagcaacaatccacagatcaagcaacaaacacaacattcttaatttatataacaacaaaaaacaagatttaaaaaaaaaatataaaattacttacccattgatgccatgtgggagcttgtagtgttttagcttctaatgtggtggcttgtagtgtataaatgagtgaagagaagaaataaaaattttggtggtggtggaatggttcgggtgtgaagatgatgggaagagagggttggagagggttgatgtaattggggagggtattatggggaaaacaataaaaatgtcatacacaattaattttgttaagtataagtttaggagaacaattttaagatgatgtaagcatattaattcaaatttctctttaaaaactcaaaagatcggaagagcg

SEQ ID NO: 73827 - DNA, 982 bp, Cannabis sativa
gacatccttccagatcaggtaactaagactcaatttaaactataatattttttttaatttatatatataatgataatattctaactcttttgaaaagtttttgtatgtgatgaaaaaaaaaatatatttttctaaatattttgaatctctttgattgggagacataagtctaaacttgaacactactactaagccatgtttggaactccggataagaactttggatttgataaaataatcctaagccatgtttggtaattttttgagttagatcaaattaaatcccaaaagcttgactattttaacccaccaagataatggtttaatttagtccaattgtgctctttttatttttattgtttaagcttattttaaaatatataatatttatttatttaatttttgaaaatatgttatatttactatcaaaaaattcaaatattttttatttacttaatttattttgaatatattcttattttcattacatacaattatttaatctaaaatagtattttttatttcttaaaaaattataaacttatttaaaaatattttataatttattcaatcttacattacaccaaacatattaaatgagaccttaggtgacgtttggttgggaagaataataacatatcgaaataaaaataaaataaaataaaatttaaaatgcatagaaaaattattaaattttttcttatcatgcattagaatgatttttctttccatttcaaaatagaatagtcattccactaaaatagtagaaagaccattctattggaataacgtttcaatactttaaaatacaaccaaataaaagaatgaaatgaaaattatttaatttctatttcattcaatttcattacttccaactaaacagtaaacaccaccttatccactatcgaaatgacaccacatcattattttttttactttttgcggaaattaataatgaaattaattacagatccaaagacag

SEQ ID NO: 73828 - DNA, 540 bp, Cannabis sativa
gagagagagagagagagaactgggtgggttgaagtggaggtgggtgttggtcatcaaagagaacaagagagaaaaaagagggcaggaactggattttgtttactttagcagcgagggcagaaaatgaagatgataggtcaaggctttataatcgtcagggaatacctaaagattttaaattattaggtattccccatttgaaaaattaaatttaaacacttaaaactgtcgctgattaccctcacgagtgttctaaactgtcgagaatatctatttttttacggtttaaagcactcatttcattttattagtggcactccctgaaaaaagttttttaaggactgatgtgaatgtctagttttgtaatagtgcgatcattttcttcatcttcatccaaaatgaggaaacatgtgctttcggggaagaaacaaaacaacctggaggctagaagggggacctagtgcccaggttgacattttatcaaccttagccattttcaaggagttttttcgataattttttcgagaagtcttccaggca

SEQ ID NO: 73829 - DNA, 2019 bp, Cannabis sativa
cccgacacttagcctataaataccatcacaatttacatagcataacttttccaagattactctaggtcttattcttcttcaagagaaacttagggtaaagagttaggggtttttactcaaatattgtaaatacatcaaactcgtcctaagagatgaataggctgactcatggtctaaggttttttaacacctgaaccacgtaaaaacatcatcatctcttcatttctgcaatttataatttcattagttcttaaatatttagtttctaaaaatatcggtaaatagagcacaaacatttgaaagcacaatataaatgtcatgcatgttgagaagaatgtgtatgatagtctccttggcaccatcttagataatgataaatctaaggacaccatcaatggaagacatgaatcaaaaagatgggtatcaaggaattgttgtggatttatgaagaagggaacgataggttgatgaaactacatgctccttatgttttgactaaaaaaagacagctattttgtcaatttgttgaaggaatcaagtttttcgatggcttttgttcaaatttaaagagcaaagtttctacagataagtctaatattcttaggttaaaatttcatgattgtcatgtcatcatgcagggagttcattctgtcgatgttcataaatttctaccaagtgatactacaactactattactcaactatgtaatttcatcagacaattatgtttgagaactttaaaggtaaaagatatggatgatgctcaaaaggatttaattctgatattgtgcaaggtggaattgattttttctcctgctttttttgacaataatgatacattttggtttacatttgcctgaagaagctatcctgggtggctcgatatttatgagttggatgtatccttttaatagatacatgtataaagttgaagattattggaaaacaaggcacgtcctaaagtgtccatcgccaaattttatgtcgcagttgaggcggtaacattaaagggtgtgaaacaaaatttagtcgtcttgatcaaaatgaacatgcacctgttgactctcgcactcttacaattttcaattcgcaatgtcatctcttgactaagggaattataaagcctcttgatcattacattcgtgaaaaaaccgagcggtacatacttcaaaattctcaaaacttacaagcttatttagagtaagtttgttacatctcaatgataatctatcttaaatattaagtttttctttactctttttctctatcacacattgatattgtcacatttaacagtgaacatttggagaagatcagacaagaaaatcctaatggtaaccacaatgttttgcatagaaaaactttttgcctgtggtttcataagaaggtaaaatgagagtattttaaacttttttcgataatatattttttgtcatattaatatattttatgtatttatatatatgagttgcacaagcatgacttcttacaaaatagtgataaattgctcgctttaattctaacttggattatttagcaaccttctataaaggttgtatagtgaacggtgttgaatttagtagggttgagcataaaatctagaaaatcgaaaaaaaccattcaaaccgacctaccaaacaccgctggaaccgaaactgacaaaaccgaaaactgaaaaaactgccaacagtttaaactgccaatggtcgctcaattttttttggatagtaaaccgaccaataaaagcgaaaccgaccgaaatcttatacatatataattttttaatttttttactttgtttattcatgctctgatctgtgaatcacattccaatcatgacttccccgcagaaccaaccggtgaatgtggatctattcgatgcgtattttcagcgagttgatttaggccgcgatggccggattcgtggccaagaagctgtccctttcttccagggctctggtttgtccaaacaggtccttgctcaggtgatattactgttaaattttgtatgtgtatttg

SEQ ID NO: 73830 - DNA, 523 bp, Cannabis sativa
cctcaaatttgttgttagacaattccaagtgttgaagggagctaatggaacccaaacatgggagaatctcaccattgaagttgttattggacaaatctagatatcttagactagtaatgttgcagaacaatggattaattttccccctgatgttgttattcgaaatgtacaacccaattataagaattggcagaacagttggtaatgggtctcgaaatttgttgtagcttaaatcgagagtccacaacactttccacgaaagcactttcggcacttgttcccaaccgatgatgaaatttgtagatatatttaatgtaaacatgttctctgcccctatggtaaagaaccatttggggagctttcctttaattttgttgttggaaagatctaaatgttccagctcattttgggtttttagaaactttggaaattctgtaatgttgcatgaagccaaatgcaaatagttaagtttgaagattagagtggaatttatacttgggtttgtcattacagatagattgtt

SEQ ID NO: 73831 - DNA, 702 bp, Cannabis sativa
cttaaacaaaagcaaccatattttccagaattataatttggggtattcttaagataaccctcaacctaaaagcattcgaaaaaacatgcaatagaattcactatggatgggcaatgcttgagttcataaaacctaaacttcctcaaatcttgctacagttgctactacttctaaaaattaaccataaaaaaccaaaatcaagctttaaaacagtttataacaaaattcagcgcaaaagaaaaaaaaaaaaaaaaactaaactcccaaactctcaaaattaccaaatcaaatttaaacttaaaccttgaaattcaaagaggaagagaactataattacctttgattcttctaagcaattccttccttaattcgcactgaaatccttgaagaaatgggattgaaagactttgaaaagagagcgatatgtgaggagagagaaagtctctttgattttttttttttttttttttgagtaataataacccaatcctcacttctaagctatatcttttagcttccaaaacaacatagaaatttctagtaaatccactatcttcctcacttaaaaaaaaggaacaaaactcaagaaaaaatactaagttattttgttatgtgtcccataactaaaaaaaagtgcttaaacatgagtatgtgacgctaatggccaacccgtcgctattccactattgccggacacaattc

SEQ ID NO: 73832 - DNA, 894 bp, Cannabis sativa
gagagagagagagagagtgaaaggctgctgctcttgaaggttatgaaccatggtattcatggtattctaaccagtcgatcatggagatttgagagtagataactctcagtttgttactctgattgaagaaccaggaattggtgtttgtaaacaacttgttgatagtggaaatactccttggggagagctggaataggactcacattgagatccgaaccaggataaaatccttgtctcatctttctattttctctgtttttctgcattaattcttgtctggtttatgttcaattcttttctgattttgtatctggtttatgagcattattgtgcatgtgtgtgtgttgagtttgtgttgtaggaatttacaactgatccgaagctgggatcggattggtccagttttgggtggggccaggattcaggttctatggtttaagttagagttagagtccaaaatattgattaagaaaaaaatttgtttaaaaaatttttaaaagtgactttttttttttgttttcaaaatttttaaaattttgattctcaattaaaaaaattgaaaactcaaaaaagttttatatataaaacatgattttagaaaatatttttactttttttttttaattttaaaaacaaagaattgattaaaaaagtgttatcaaacagatgcaatggttacaacttaatgcattacaccgctccaaaaagccacacaaaatctcagaaatattgaagaataattaatggcaatttatgaagataagaacactagattgtaatgaagatctaccttgaacaagatcaaaaatctcatacaattagacacatatcctaatgccattcacacactacaagaaatgtcacttttaccagcacaattcgctactgcgctgg

SEQ ID NO: 73833 - DNA, 741 bp, Cannabis sativa
gggcattgggtatggtcgatataaatagagttatctacttttataaccaatcaaatgcggtcaagtgcaatttaatttcgtgaggaagtgcgttttgattggcttttagaattttgatcgctataattgcatttctatggagattttatgtttgtcgtcgtacaattgaaaccacgagattaatacctgtttgggttccccactataaggttttttttttttttttttttttcaggcggtgcgggttgtgactatttttttttaaactaaactgtatatgcgtgtaatttctcaaaccgcaatcgcgagatcttaaaacagtaaaaatcatatctcaaaaaatatagtgtagtgcggtacaatttgagcggtttacattatcatcattatcgaacattataataaaaatttaaaaatcaatctataaatttttaacaattcaaaaaaaaaattattaaaattttaatatggtaacatatgtactaattatcaagtaattatattaaattgtctctatgaaaaataatttaagaaatttttacatcaaaaatataaaatgaaatctttattacataaatacttattaaagcaacatttttacttataatttttattttattacacatataacacatccacactcccccatgcatcaaacatgtgcatctcacctatcactcatcaatcaactatcaatcacttccctctttttttttcttctttttccttttatttttcatt

SEQ ID NO: 73834 - DNA, 1381 bp, Cannabis sativa
  modified_base (103)..(111): a, c, t, g, unknown or other
  modified_base (1321)..(1326): a, c, t, g, unknown or other
attattattattattatttgtgcatctaccatgcatcctaaataataatacagtgactgttttagcatataaaaataaattttagtttattattattattatnnnnnnnnntattattattattatagttatttaagatattttgtaaaatattaaaaatttagaataatttacaatatagaaagcactgctcaaatagtttattttacacgtgtatacaatagactgttaaaaactctatttttcggcgtgttaaacttttctgaattttttgaaattttgcaggatatcttaaataactacaacgtatgtgaccattaaaaaatagactaaaaaaattctcttgaatactaaaacaaataagaaatatattgctgaaccaaattatgggtgcactataaatttttttttaataatacaataacaaaaagaatactttatttttttctatttaaaaaataataataaagaatattttttagtgtattttttagtattatggttagaacaaaaagagaatataatattatattgaggtttttttttttatttttacactttaaagcagattttttggtatttgtattgaaatctatatagcaactcacataacaatttaaatcgcaactaaaatttacatagcaactcacataaaaactaccggagtaaccactaaaataacccaacccgtaaatttgaaaaaaaaaatttaaattggcatatgaaataattctcttattttaatgttagtgttggtgcaacactaaatttgatattggagttcaccactttctccactgtacaccaaaatctatcacaccaaactcatacataatgtgataaaaggattttaaataaagtaatagaattaatcctatacacctgctctaactaaatatatatacacttcttttctttttaattataattggatgaataagcttccctatagcatgagggataaactacatgttttaccgtaaaaattctctataattttatattatgaatcgcaaaaatatagttatatattatattcaggactactacaaaaaccatctttagagacatttttttagggctttcagtgtcggttttggtaaaatttgctatcgatgctaatcagagcggcgctgtagggtttaatttaaccgacgccatatatacccctatggcatcggttatcagctaggaaccgacgccataggagtatatatggcgtcggttcctagctactaaccgacgctatatatagcgtaaaaactgacgccatatatacccaaatttctatttttgtaattttatttaatttatttaaatnnnnnntttattaatttatatattattttatttaatttaaatttaaattacatatttattt

SEQ ID NO: 73835 - DNA, 938 bp, Cannabis sativa
aaaatagattacattgaaatggagttttatttaggacataaaacccaacagatacgccattgctattgttttggttgttcaaaatagttttcagattttgaatttcagattctagatcatctacttttgccgccggagcatttacatatttattttaatttcttttccaagttgatttatatttccacacatctgatggacatactctaaatccatgcttttctctgcccataacttcagaaaaagtatcattcatagtcttctcttttgatgcatcttcattcaattgttgtttttcttgtattcgtagctaatattaatttaaccaaacatctcaattaagattaaattaaactagctaacaagagataacacattattttaaaataattgtctcatgacatagcctcttttgtcttctcacttataatactcttttttttttctttgcataacaaattttgaacataattgcacgtgttggggtacttgcaccatctagtttctacaaaaaagatattgttttgattaaaatgcaataaaaacctaattttaaacaacattcaacttttgatgttagatacttcttcattttatttgtaatgttctaagttgtgcaaaactctttctgccaattgtatgattgtattctttttttgcacaactactcttatttttagcacttttactctagaacaacatcaaagagtgcaattgagttaatgaaatttgttcaaaataaagtaaatacatggcaagtttgaacgaaaatacctttgcattatctgttgcccaatatttgatcaactcttcccattgatccctatatactcgtttgtccacactactagaaaaacaagttttagtgacacacattgagtaactctaaaactgtttagtgacacttcaccgcgtgtcactaatgagggtgactggaa

SEQ ID NO: 73836 - DNA, 791 bp, Cannabis sativa
ggcgcatgtttttaatttccaaataagcgacattagtaagtttttctttgatcatgtttgaccagactaggtcttagttacgcaggctgttcaaattagtatggatgccaggcgaaacatcaggagtcagggcaattcggttggatcaagtggtggtcagagagctcagattcccctaaatattcgtggtcgtggtagaggtcttagaggcagggcacgtggtcgaggtgatggtaactcaccacaggctgcccaagctacccgagtttctcaagagtgggaaaacaggtttgtagaaatgcaagctaggataaatgaacaagatgatgagattcggcggttgcgacagcagggtgctcctgcaatccctgctccagaaataccagtatttcctgcccctgctgtgccgaccgaacctgtagttgcagtgaaccagatggaacccctgtatgaaagtttccgtaagcaggcacctccagttttcctaggaggtcccgatgtcatgaaagccaagcaatgactaactgtgatcaccaggatcttgaattttatgggcgtcaccggtaatgatagggtggcctgtgccactttccaatttcaagaagaggctccggtttagtgggacatggtgtccataattcatgatgttaccataatgacctgggagaacttcacggagcttttcaatgccaagtattacaacgaggcggtcagaagtgctaaaagaaaagaattcactcagttgactcagaaagaaaacatgagttttactaaatacacgactcaatttg

SEQ ID NO: 73837 - DNA, 674 bp, Cannabis sativa
ttttacttcacttcataactaattgaaaattagcaatattatttgcttttatcaagcgaagcaaaaaccttttttgcatcgtaactaaaatgaagcaaaaaatataattatttgtgtttacagttatagtgtcggttactccaatcgacacaaattatttatgtgtcactttaaaactaaagtaaaaattcatttttgtaatagtggagggtcaaaagagacaaattaagaaaactagggtatttttattataatttttttttttatttagttaaaaaaacatggaagagaaagaattaaagaaaaaaaataaattattaatttattttgttatcttttaatattgtaatttttttaattttaaaatgtttaatttcagaattatttttttgtataatttttcgataataatattaggtttactaatatgaatgtgacacatgtataagagtgtacacgtaagtagtccatgttaacagttaactatggtaaatgaatgacaccttaaatttggtaacgatttagtagttcagatttaccaccaaaatttaagcttggaagattaattaagtataagtgaaataatacttggagagtttagtcgctaaaagctcttaaaaataattggtatacaatagtgttgtaaaaataaatgagatgtttaaggtgcactt

SEQ ID NO: 73838 - DNA, 518 bp, Cannabis sativa
ctaagtacattgcatggcaagaaaaggtaaatttcttactttgatgtgttatgaggtaaatttatcttcggtaccaagaaacacttggtggttagattctggtgctactactaacatcagtgttaaaatgtagagttgcctgagttaccaaaagccaagtgatgctaaaagaagcatttatgtgggagatgacaaatcgatgaatgtggaagcaatagggcattttaggttgttgttaagtagtggttgctatttggacttaatagatacttttgttgtaccgtcgtttagacagaatttggtttctattttttgtttggacaaattggattattgttgttcatttggaagcaactgctttagtttatctattaattcaaatactattggaatctcttatggtttatgaaaacttatattttcttgacaccgttgcttcttataatgcaaccttaaatgtggaatcatgtgatactagcataaaattgataataaaaaatcaagttccttttggcaaa

SEQ ID NO: 73839 - DNA, 1474 bp, Cannabis sativa
gacatagtctatacagtcttttttaatggttggccagtagtatccttatctcaatatcttctttgagagactcgggcctcctatatgatctccgcagaatccctcgtggacctctaggataatttgcttagcttcagggtccgatacacaccttaggtatggcatgctgagtcctcttccgtagagaatgtaatttatcatcacataacggtgcgcttgatactgtatccttctagacaatgctctttcttgggacaactcgcctttggttatgtattcgatgatgggaatcatccaattgggctcttgatcaactgctgccacaatattttttgttttaatgcttggttcctaaaggcgttcaacgggtaccaccccagtttctctatctcgctatctgatgctaatttagccagacagtctgcgtgtgctttcttttctctaggattttttccactttataatccgtgaactcgtggactagctcccggacaattgctacatacgcaaccattttttctccacgcgtttaatattctcccgacacttggtttacaatcaactgtgaatcactgaacacttctactattgtggcacccacgacttttgctaacctcagtcctgcaatcagggcttcgtattcagcctcattgttggaagctgtaaattcgaaacgtagggctgcctggagtcagagtccgttcgatgatatcatttctactccagctccggatctgttttcgttggaggcaccgtccacgaaaactttccacgctggggtttgtggtgttggtatgtttgcgctagcttctgcttcattgcactttgttatgaagtccgctagcgcttgtacctttatagaagtgcgcggtatgtagtgtatgtctaactggcttaactccatagcccatttgaggagtcttccagacgcctcaagcttctgcagaacttgcaggagcggatggtttgttaatcactggaggccatcaagaggcagaaaactagtttttcaatcactggatatcgcgtctccgcccctatcatgcgcttgctgacatagtacacagggtgatgagttttttcctcttctcggactagggctgcactgactgcattctcggagactgctaagtatagtaataagtcctctccaagatcgggttttgacaggattggaggcttggccatgggatctcttaattttctgaatgcctcctcgcatttttcggtccactcaaatttttggcatttcttcaaaatgttgaagaagggaatgcacttgtctgtggatcgagaaataaattggctcagggcagcaactttcctggttaggctttgtacgtctttgtgcttcttgggagaaggcatgttccggagggcttgaatttttttcgggtttgcctctatcccccgttgacttacgataaatcccagaaactttcatgatttaatcccgaaagtgcacttcttcggg

SEQ ID NO: 73840 - DNA, 797 bp, Cannabis sativa
cagcctcctggctgaccagagtcacgtcagcatctctttgagcgggattttgagcacgagctctaggctgagcgattggcgcgtcatgctgctcctctaaccctctccttctattcaggtcatctctgagatcatgaaccattcccaatcgattgaatatgaaaacacccggctgtcttagtgactgttttgtctgactaattagctggccggaattattaacttgggcggagttgttgggtatgacttctcctgacgaattactagacaaggtctgtctgcctactgcttggcccataggcggaacctgtgactggggattggacggctgaccatacaggggtttgagaagtgttcacggctggatcttcgtctgtcttgcccaggggaatgacggttgcaggctgttgactggtagcctgataggcttttcgtattaccacggtggcctatctggttcggtcgtcaatggttgcttgctgagccctcaacgtttccatctctttatccatccattcagcgaacatgcgcctttgctcttcgaatgcgagattcactacagcacgaagttccttctgatcatgatgcagggtgttggtatgaccttgcatgattctaagagcagcacagaggttctagatctcgatgtcatatcaaatggttatcgaacatttgtaacaggtggaacgacagtgttgggaatgccctgattagctgctgaactagtatttctagtctcttgcacaccaggcacaattccactcaaaggaattgtcacatcttgacctacagttgtc

SEQ ID NO: 73841 - DNA, 854 bp, Cannabis sativa
ggagtggctgctggcgcgagtgggtctcatcttcagccgaaaatctgattcctttttaaggaaattgctctcttttcttcaatttttcaattctcttcaaaacacccaataattttaattcctacaataaaaaagataataaattaaatccaaattaaatattttcaacataaaaatatatcttattaatttcatgaaaatattaatttatatttaatttatattaaactttaagcttattaaatgtatatttttcactattaatcagtcacgctcacacgtcttatcacaataaggccttataatggtttatctcagttctaattaccgagtctaaccaaattatgccttgaacgcataattctttacttcaacatatacaacatggcattgcatttaaaatcattaatcactagggtaataaccctaggccatataacaactcactttaatgtaataaccctaatcctagttctcaataaatcaccactataatattaaacatgagcgtcaccgcgcttaactctacgtgctaactactgtcttacctgatgtcccaaatacgtggagattccaaatcactaggtgttcctgaacaagtgccgactatcgatagtcctagtcaccattcctaggattcacaaatagggttaatccctaaattcacttccatataatcataaaattggcattcaaatacaaataaacatatagagctcgaaacgagctttccaacgatatatggaacaccccaaacggagtctggagcgaaaagttatgaacaatcaaaaataacattcaaaactgcccagaaatccctaggcgggtcgcgacactccccaagcatgccgcaa

SEQ ID NO: 73842 - DNA, 725 bp, Cannabis sativa
gacatccacatgcttcgtttggaggcatatatatgttaatacctctaaatattttttaaaaaataaaataaatttcttgaaggaaatatataatttatagaaactaattataaattaagcacaaactaatatctagttgttttttttaaaaaaatttattacgttactaatgataataacaactattttttggtatgattatttaacaatatgaaaaaaagaaggtataaatgtaaagaaaaaaatatacgttataattataattatttacaaaaatatgtatctagatgtaattttttcttccataaatcaaccagcaaacatcttcacaaaaccattacctgtctgtttatttttttgagaaataagttgtcacttgatgtccatccgtgtcacttaagagggggatattgtaagactagaaaactaaaaaaaataaccatgagactaactttgttaaggtagttagttagagctacagctgtaaaaaaaaattgttatgattttcagttgtaaggtcgcttatcattttacaagatataaataagaaggtctaacctcaataaagttagttgagcaattcatttttctttcttctttttctccatcgtttttgctctctcttttttggtctagtcaaaaactctgttctgttaaattcttgcaattacaaatatacggtgtaatctacaaagcaatttaaatcgcaacccaaattaatttag

SEQ ID NO: 73843 - DNA, 1198 bp, Cannabis sativa
tccaaagagaaagtactgaggcaacagccaccacacacccataggaatcatcacgtccggcctatcaactagcccatattcttcagcagttttgagccttttgatctcaacgagggctgcaactaccatagacaaaacatggaagaaaaatccaactcctattctctgcagcattgtgattccagatggtactgttctagtgaaagctctagtcgtcggaatgaaaatgcaatcatagattggtaagaggataataagggtaagatagatgaagcattgaagtgaggcagctggtattttggagcctgatacaattgctctgtccatggtggcaccttgctttgtaaagaaagttgatgattgtgcaaacaccataccatatatgcagcatgtcacccatattggaacaagtctaagtacagcctttgcttcttcaacatcagcaatggagcaagcactatcatcagcatcaccttccttccagttagttggtgtaatcaaggctttgttgagaaatctacaaagaaagattatagaaaccaaagcagcaaggctttcaattagtgttagaatttgagacaaggtgaataaggttccatctcaaaactaattggcaatggaaagagtagccaattccttttatatattctattatctttccaaatattaacaatgtgagactttctgatattccccttaagatggaagctattttatttgctcaccatcttgaacaactcgatcataagcgacttttttttggcacactattcctaatcacaagtgactttttttgctctatgttttgaatcggtatttttggtggctctttttatttggctctactttgatttgtttattttttgttgggattggatagtcattaaaggtttttttttttttggctctgataccatgttagatttggaataaggtgaacagagttccatctcaaaactaattggtaatgggaggattagctcatttctcttatatattctattatctttctacatattatgctaaatacaaaaagaatttatatacacattctacacacaatggtaggtaagtaattataactatatactatttgaaaattttgttataaccaataatccaaatgtaccggactgaagtttcttttatcatttttgtttaataaatctactcataaagtcaagtcccttacctgaat

SEQ ID NO: 73844 - DNA, 1453 bp, Cannabis sativa
  modified_base (965)..(965): a, c, t, g, unknown or other
tattgtttatctaaatgttattggttggcttagtttataagacagaagagaggtggtaaatgactggattgaataacacatgagcccaagagtatgagataagaatcacaccatcaacaatatgcgtggtgagtacaattttattgcattgaatcatccaagtaaaggcaaagataaaaataagtttgggggttattgcttcaaattagtttgaacgtgatagttttaataactctgtgtagactatatttttggtgtagttcttatcatgctggcctgtggtcacaggtcggattaatacgcgcaccgtagaagatgtttttgcccttgacagtgccacatataactgaccgtgtggaaaaacgagttgtggcaaataaactccaacataatctaacgtttggccttgcgatttgtttattgtcatagcaaaacttaatcttatagggaattgtgttcgtttaaatggaaagctgctactttcatccacattgggtaagaatggtattcttggtataaagactctttttcctctgtggtgtcctacaacaatttcagcatccatcacatttggttcgaatgctcgacaaatcaaatgggttccattgcagagtccatctgaaggattagtgtttctaagcaacattattggacaattcctctttaacaactacaacaattcatgtggaggaaggtcgtttggtgtaagagtgtttaggaagtcttccataactgattgctcggtgctatctatagccttatctcaactgtagtagtgatgtgcttctcccggaaaacgtgcaattaacatggaattaatttcattaacaaaagagttctttggtgttaatatagctcgattcatcacggtagacacattttctgggtagcgatggatgttgtggaagacattttctatcaggaggtttaaagaagtgttgtcgtcgtgataaggaatgagcatnttacttgggatttgtaaggtgtcattgacggtgattggtggcattccattgcccactgccaatacgtaataagagaatattaggtccagtcttgctctcatattatcaattaggtggaacttggtgaaggtgggccacaagtatgagtgaaccaagctagaatttacctgctcctgtcttgttcctttcggacaacaagtaatacctgtctaaaatctcctccaaaataattacctttccaccaaaaggtgtgtctgaatcatttatgtctcgtagcatttcttgtcattggagccacatcccatattattaatttcgatgctcgtagaaggtttgcaagggaactttgtttgctaacggaacacgaggttgtttcgttggcatcaagtggaagcttaaaacgtgagtatgttgtacgaccctctgggagaatggaagcgactgttgggttttatgccctaaataaaaactctttacaatctgattag

SEQ ID NO: 73845 - DNA, 1297 bp, Cannabis sativa
ctattccaattcccattcccatttacgtttctattcccattcccattcccattcccattcacattccctagcccattcccattcccattctcattcctattcacattcccattccctggcccattcccattcccattcctattccaattcccattcccattcccatccccattcacaatcccattcccataagcattgccattcccattccccgacccattcccattcccattcctgacccattcccattctcattctcattctcattcctatttgtattcgcattcccattccccaacccattcccattcctattcccattcccattcctatttccattcccattctgattctccaactgatttccattcccattctgattcctcagccgattcccatttccatttccattctcgttcccattcccattccctggcccattcctattcctattcccattccctatccccattcccattcccattcctcgacccatccccattgccattccaattcccattcctattcccaatccccattcccattcccattccccgacccatgcccattgccattccaattcccattcctactcccattccccagcccattaccatagcgattcctaaaaccctaaaaccccaaatgccaaaactgcaaaaaccccaaaacctaaaacccaaatcccataccccaacccccaaaccccaaaacccctaaaccgtaaaacctcaaaaccccaaaccccaaaaccccaaacatcaaaccctaaaccccaaaccctaatcccaaaaacagctaacctaaaaaccccaaacacaaaaacaccaaactccaattcccaaaccccaaacccaaaccctaaaaccccaaacccaaaaacccccaaaccctaaaaccaaacaccaaacccaagacttaaaacctcaaaccccaaatactaggtccaagatcctaaactctagaccgtagtcataaaaccgtatatactcgatgtgacaggtcgcagatccttctcatgcaaccccatttgtttgaaggcttggaagttcaagagattcaaagaacttccattgtctacaagtatgcggtggacattatctcttccaatattggcgacgataaccagcgcatcagaatgtgggtggtggacccatctcgcatcactttccatgaatgtgacgtcatcacactcccttttgaacagcttctctactcgctcgctcaagttgttcacattggtgagcggcttttctttggcttctctcgcatatcgctcctgcgacttcctggaatc

SEQ ID NO: 73846 - DNA, 887 bp, Cannabis sativa
  modified_base (607)..(609): a, c, t, g, unknown or other
aggatgaactaggttgatcctctttctttgggaagtttgacctccaaggtgttgtatttggattgtgtggacttggccttggctttgagctcgaactacccttcgtgagttttctttcaactttgattgccatgtgcaccaaatcttccaattccacataatggtgtagttcaacgttattagcaatctctcgtagccttgacgaagaccttgcatcttgaggtacaagtctcgataatagtgagatggtacaaaacgcagcctcattaccctattcatagcctcccaagcgtcaatatctcgttctccattcctcctcctattgatgcacaactgatcccaccaaacaatagcatattcaataaatgcaatggcagcaagttttacctttttcgtttcagaatagttgtgacaatcaaacaccaattccatcttcttctcccactccaggtatgcttcaggaccactcttcccttaagaatagggaattttcatctctatatttcccaaataattatctacctggttcttagcttctctatcccgaccacctcctatggttacctgttggtatcccatcaaactcttcatcagaaattatcccttnnncatctaattcattatcatccctttggtgaaccctattcctctgttgcctctgctgggttccctcttccattctatctaaccttagatgtatttgttcacattcctctcgcatcatcctcctcaaatcccctatcgaagcttgaagttataaatttgcaaccgtaggtggtgtagtttcattaccagtattttcttctggagcttttgacatgattgaattctacaaaaataagttagaacagataaagaaagatctcaccacactccctcacgtgttt

SEQ ID NO: 73847 - DNA, 734 bp, Cannabis sativa
agaaactatcaaagcaattcaaatcgtaaattctttttttaaaaaaataaaaaattagtatataaagtaattctccgaaaataagtaaatgaagaaaattgctaaaaaaaagttaagggcacgattaagtacatgtaaatgttcgggaaaaaaattattaattagccaaatatttaacaaataataaaaaataattctcagaaaaaaaaatgaattaattattattttttttccttttaatttttttaaaaaatattattgtattctcatctctcccgattccttttcccaccattattccatgcttaaatgtttcagaatatatagtccaatcccatcccaaccactacctttcttcttgcacccacaacaattaaaattcacaagaataaattggataatcttaaaaagcaaaataaatagggaaatttgcagcataaataccatatgttttcaattttatacacttaaatattatatctctttttttggcggatttaataccaaacgttgtattttaggcctctccattactactattctgttagttttaattaggtgtacacgtgtaaggtccagattaaatcccatttttttaaaatatttaattaaaattaaaaacttaactttttaaactaatatatttaacttaaatttaattttcataaaaatattttaatgaattaaaataacaaaaaaattaaaaaagaaatgggaatactaaagggttgaaa

SEQ ID NO: 73848 - DNA, 814 bp, Cannabis sativa
gcaatgatcttagtgggtcatttcccagatctcttttaatgctgccacatttggaaatgctgtaagttttttctactacataaagttagtgaagtcccatattaatttatatcaacttatggcgtatgcaaatgacaataatcaagtgtgtagcaactaaaaacctgcttgattctagatatattggctgtaaccaaaagattgtccaaggaaatacatctggcttcaacaactcaaaacttgacacatggtatgaaacattgtcacaagcacttatcaaataatcacatacatacatacatacatacttacatatatatataacataaaccaaaatttaaaatatcaggtctagaatttgcatctctaccagtaaagaagaagcagcagcaaactgaagtatcatcataggctctgttgcaagtggaactattctattgactgttgcagctgctgttatcttcttttgctattacaagaaaaaattgatacctcaggaagtattcaatggcaaacgatttaaaggaccaacatcaaagagtgagtgcactaaatcaatttaaagcttgataatgctgctaaatctatatgtttgtgtttgttcaaatacgacttgagggctttgtgtttcaacccacgatgtgactcagtatttgcgggagcaacttctggaaatatgtcatgttgtgaaatctttgaaccaatttttctttctctgttacattctgcatcctgtatttagtggaataagtgttgttgtttcttttccagtactgaaatgaccaaggatgagatggttgtggatcttgctttc

SEQ ID NO: 73849 - DNA, 1316 bp, Cannabis sativa
taaaaatataaaaaaatattttttgaacgtaaaaatataaatattttacaaaaaatggtgccttatgtaattattccttgtttttatatgataatataaaattgtaactaaaaaataaaaaatcttaaaattgatttttttttgtaatataatctcaaagaaaagttgggttgactgtataaatgttaaaattatgtcaaaagtgtattttgtgtaaaaagaaaaactctaataaaattttaggtagcgtttggttagaggtaataaaataaaattgaatggaaagaaaataatgttcattctatttctttgtttagttgtatattaaagtactagaatgtattttgaatggaataacctttcttctattttgctggaatgactattctattttaaattttcttatatcaatttcttttacccattttaaattttattacattccattcaatttcattcctaatcttattcttattcttgtttctattcatatattttcatttctcctaactaatcgcgagttcactaccaatgacattaatgtgtgcagaaagagtgacctatattaaattccttttaaaacaaattcactaacttatagaaatttcttaatcatgaagctgactagggttcttgttagatactattcgtgtttaataacattagtacaagatttgttatacttaaatattttattgacctatatttttaatcacccatataatcttgtgtaattaaaaattgtaagtattctatactcaaatttaatcattaaagttttactaatattcataaaatttgggttaaattttaactcaaactaccaaattatattagatttaaaattatgaagtatcaaatagctattatcaaaaatatatgatataagtcttagccttttatactgactcaaagggttaaattttaactcaaactaccaaattatattagatttaaaattatgaagtatcaattagctattattaaaaatatatgatataataagtcttagccttttatactaactcaaaggaactagaaaattgcataccaaaaaaattgcataaattctttcaaaaaaaaaaaaaaaaaaaaagattgcataaattctttcaaaaaaaaaaaaaaattgcataaatacactacataaatattagaaactcaacaaatatgaaatattagtttctttattgaatctaagataagtagagtgcccgctcaagtattgggcagcttggaccattacaaaaggctcccatttttttaaggcctattttttttttttttaaaagggcctatttttttttctttttttt

SEQ ID NO: 73850 - DNA, 655 bp, Cannabis sativa
  modified_base (27)..(27): a, c, t, g, unknown or other
ttatagttttacaaacattgggtactnatgccgctaaaaataaacattgagattatgccacttacaaacttaaaactttgagtacttatgtcactacttaccctttcttttatatcaaaaatatgtatcgaatacttcgtatttacatttgagttagtctcatttaattaaatttttacttaaagtattataagtataaattttaattttttttaactctttgtataacaattatataaatatatattttttttaatgaaaagtactttttaaagtatttgaatatcattaaaaaagatcttttatgagtaaattagaaatgatgtaaaaatttttaattttaaaaatagtttctcgaaaattctttcaggagaaaccacaaattctaacttcttataaaaaaaatgaaaaaaaaaaaaaaagactttttcattttttatccaaacacccttagaaagacttttataattttaaaaactaaaaaagagtttatagaagaagctaagccaaacaagacaatatcaggtgtaaaataaatctgcttcttattcctacgagcaaaattgttccattattactaaactaaaaaatattcttactaaaataatagaacaaatatgaattctttcctcgagataatccactaaaatagaaa

SEQ ID NO: 73851 - DNA, 1674 bp, Cannabis sativa
  modified_base (75)..(87): a, c, t, g, unknown or other
gaacgcatttttgtttttcaaaattaaattttttaaaaacaaaaattttgctttcattttgtgattaaaaaattnnnnnnnnnnnnngttaccaaacggcaccttaatgtattaattttttaataatattgttaacattgctacctttatgtggtgttagatactacaaatactataattggatccatatacactagaagcaagcggagcaatccctaaataattaagaaaaaaatatctatatattttaattaattatgatatatatatttataataaaagataatattagtaagtttataatattaactctcatataattattaagttaaatagtttataagatagaggttaatatagtttaaactctacgattatttttttctttttaagtttcgttttggcccttaccttacaaaaaattaaaattacacccctcactttaaattttaaatacgtcattaattatctaatagcaatgttgacatatatatcttaatctaaaataaactacatattttctctggaaattaatgaatgataataaaaatataattatttatttaggcatgggccatatgaaaaggtgtccgaccatgcatgcctgtcttttgttagatagaatgtatttattagtatctgaatttgtgtttaactataataaagtcgatgtttttcaagaatcatcaaataaagaaagaaaaaaattagaaaaaatgctaaacagaaactcagtagtagttcatcatcattctcatcaataaaacttcttatagctagtttgttagaattgtggaaatgtatatggtatatattgaaaaagtagaatatggtaaagacatgagtaataatttatgaattatatatatatatattgttatattttcacttagtaatatgatcagattttttaaaattccctttaaaatagtagttataattttacttactaattttggacagtttgatcataagtgatatttttgacttatagtagctcttttcggctcagacatgtgcctagtatctacctaatccaaaaatccaaaataaattttcttcttttaaaattacatattttttttttttactaattttacaaaataccatatatatatatatatatattttttttaaaataagacccttgaattatttttttcttatgaccattatattttaaggttagctcactatccccgattacaaataatttttttggttcttcctttttagaccaattattagatttggatcaaataatgtatgattgaaaaagaagaatatggtgtggtaagacgcgggttacgtcttaaaattaattaacaattagagaaataatttatgcatcttatacatgacattatcttgaaataatgctctaatatcagtgatccataatgtatactaaattcgatacaattaaaagttgtgccaagatttcacatgaaatatataggttaaatactattttagattttatactttgtaaaaattatcgattgaattctctgttttgttaaatgacaattttaattttatatttctcaacatagtctaaatagggcctaaactcaattttcgtctttttttttttaaatatatatggaggcaatttaaagcccatttctaacatgaatgaatgcaaaaaaaaaaaaaaaaaaatttaaccaa

SEQ ID NO: 73852 - DNA, 848 bp, Cannabis sativa
tgattatgattatgaagccaatgagttgagagaggaattcataaacttaaaacaaattcagatattgatcaacagagaacaagctcattagatgttggagagtgataccgctgctgtgtcgcagagaacaatggagattgaagccggcacttgagtcgacggtgatgattattttgagaaagaataaagtgatgtagacagtctagggtttcgtgaaaagtatataatgcaattagaaaatcttatataggtaactaaaataaatgaaaagactaaaataacctaaaatagaaaccaatttcataatcaagttagcaaataatattttatgtaacgaggaggtgtaatttttattttgattactaaaaaaaataatcaagttaccacaaaatgttaactttatttttcaataaattattatgggtgtgaaatactaattctaatcaattgtttactgaacaacttattttagttgataaaaattgagataaaatattaccaaaaacaaaaacaataccaataaaactactaagtaataactctctcatggttttacattgagctcaaaacacacgtatttagaaaagatattgacggcaaaatcacctatactatatattttttaacaattaaccacttaaattgattttttggtgacaaaactactcaaactctctttctgttagctagtgaccccttccgtccaaaaatttcagttaactggcccggtagactctctacgtttttagtgtccacataatattaataaaaaatataatttaaaaattataaaaaacaatttataaaaatttaaaaaaaaaaactttcttttctttctccttctcttt

SEQ ID NO: 73853 - DNA, 1148 bp, Cannabis sativa
ggaaacaaagagccagagtctcttggctcaaggatggagataagtgttctaagtttttcttcctctctgctgctattaaaggcagaagaaacgccatagagagtatcctgaacaagaacaatgtctggatttcgggtcgtggcccaatcgggtgtgaattcttggactatttgaagggcatttttgcgggggctgacaatggaattgagtataattgtgctcagttatttcaagagcgaatctctcctgaagactctgagggcctggttagttgccctaatcctgatgaaatcaaaagagttctttttgctatgaataaccataaggcccctggcccagatgggatgtctgtcctgttctataagcactattgggattcagttggagctgatttctgtgatgctgtctcagatttctttgtcactggtaatatgcataaaggaatcaatgccacaaacgttgtgcttattcctaaggtccaaaacccgatccgaactaaccagtttagacctatttctctgtgtaatgtggtatacaaagtcatttccaaaattttagcaaacaggataaaaccgttacttccctctctcatttgcccgactcaagctgcctttgtcccgggtaggaacatccatgacaacaatgttattgtccaagaaattattcactcgttcaatcggaagaaaggcaaggagggattctttgcaataaaaatcgatctggtcaaagcttatgacaaattaagctggagtttcgttgaccatgttttggagtgctctggaatcccccagaaattccgtctgtggatttctcagtgtatctccactacttcgctaaatatatgtcttaatgggggcaaggtgggaagtttcaatccttcttgcgggcttcggcagggtgaccctctttcaccttatctgttcatctgggctgcggaagttttatcaagattatttcatgtggctcttgatcagggttccattcagggtattaaacttagtagaagtggtccgactctctctcacattttctttgcggatgacttaattctagtcggacgcgcaaatttaattgaggtgaatagctactggagatgcctagagaatttctgctcttggtcgggtcaacaggtcaacaagctcaaaact

SEQ ID NO: 73854 - DNA, 1981 bp, Cannabis sativa
gtaaaataatttccaacagctgcctgtgacaagtatgtcatcgacatacactaacactaaggtagtgtgagtggatgtgtgtcgtatgaagagagaatgatctgattttgatggaacaaagccaagttggagtagacaatggtgaagcttgtcaaaccaagcacgtggtgcttgttttaaaccatataaagctttatgcaacttgcatacaaggttgggatgagaggtaatctcaaaactcagggattgtagcatgtagacttcttcattcaatgtgccatttaaaaaggcattattgacgtcaagttgtttgattttccaaccattggagatagcaagagagagcacaattcttattgtcacagtttgacaaccgggctaaaagtttcagtaaagtcaaatctcggttgttgatgaaagcccttggcaacagacgagctttgtatctattatgagttccatctgagttctctttttctctaaaaacccatttgcagcctatgggggttctgtcctcgggtagaggaaccaaagagtaagtttcatttctggttaaagccaacatctcatctgtcatggcttggttccattgttcttgctgcatagcctctttgactgtccaaggaattttggaaattagatatgctttaggcttgtgaatgcctgactttccccttgtttacatagcatgcttgttggtagttacttgttgtgatgctactgatttggaagcagtgacaacagtaacagcagtaacatcagtggcaggtgtagttccagcaatggtagtatttggtgcaactggttcaacagcaacaaattgtgttgtctcatggatatcagcatttggagagagtggaggattagaactgatattgttgctgtgtaaagaaggagtccccagaatattggtttcttgttgaatgatagcagcagtggtatccctaacatgtgcatcaggtcttgattcctgtataggacatgaaaagcttgccacagatggcacaacattagtagtaacagcagtaggaacatcaagacaagatgagttaaatgtatgagacaaaggaatttgtgcaggtgtagcaaatacagaatacatgtaagaatcattggccacttggggaatggaagagaagggaaaagatgtttcatcaaatatgacatctcttgagatgtataatcggccagaggagtttaaacacttatatcccttatgatttaagctgtaccctaagaaagtgcatggagatgacctaaactcaagcttgtgtttgttatatggtattatattaggaaaacacttgcacccaaatgtttttagggtagtgtaatcaggagaaatatggaatagcttctctattggagattggttttggagaacaggtgtgggaagtctattggagagatagacagaagttctaaaggcctcatcccaatatttgagaggcatagaagcttgagcaagtaaggttagaccattttcaaccacatgtctacgctttctttcaagtaaaccattttgttcatgtgtggtaggacatagatgcctatgagtgatgccaaattgttttaaatgatcagtaaaagatctgaattcccctccccaatctgtttgaatgcatttgatctttttgccaagttgtaactcagcctcagttttaaattgcaaaaaggttttcaatgcttcaaacttgtttttgagcatgtaaatccatgtaaatctagaataggcatctatgaaatgaatgtaatatttgtagccattaatcgaggtggttttggcaggtccccatagatcagcaactatcagttgcaaaggttcattgtaaacagtttatgatgcttttgggaatggaatttgtgtatttttccaaggcaacaggcagagcaaacagacatgggatttttattgctaattctgatattacaagtatgaagaacagatttcacaatcttttctgatggatggccaagacga

SEQ ID NO: 73855 - DNA, 969 bp, Cannabis sativa
gtggtaaaagggccctaattttattgggctttcctattttaaggtggccaagttattttctccccatagtaataagtatttcaagtaagaacaaaaaaaaaaaataagggcatttaacataactatacacctttatctatttaattacaaaaaaaaaaaattataaaaagtattatgacataatgatatgattttttttatcaaaataccggataggaaagatttgtaactgacatatctaattaattactatatctatttatagaataattataaataataataataattatcattattattcattatataagatacaaaataaaaggcaaataacactatcaatcttcaaattttaaattagcatacaaagttcagtatataccttgaggtatttatttatgttttttatatgctctaataaaataatatttaccaattagtataaatatgtgtaagtttaaaataaaaatataaagtatatatacccattagtataaaaacataataacaaaaaaaatcttaaaattattgcattgtatttatatcagctagtacttatattaaaaaaaatgggatgatattatactaataagtgctttttatggtcatatttatatacaatatggtatattttttgccctcttaaatttagctcatatagttctcacaaaaataattatttcttcatgaaactttatgagtatgactactataatagtgtattataatgaaaatggaaggatcaacaaaactatattattttttaagtggttagtattttaattcctaatatataaaaaaataaataataataataataatactaagcagtatataaatactttaattatgcgaaaatttatattaattatgatcatttatatattaagtagtatataaacaaaatttatactaattattttaagggatattggcggttaaaccacctgaactttacggtttgta

SEQ ID NO: 73856 - DNA, 841 bp, Cannabis sativa
acgataaatttgtccctattcgatttagatcatctatagagaatctttgaatatttggattagaatgatgaataattcatagtgtatctatattttggtatataaagagcattctatataattattcttagatctatagtggcgcaaggaggaattaataagttagaaaattaataagcttgaagatccatgttctacacttatttgaaaccttacgacaaaaaagaatcaaagttttgagtgttagaacggaagatgatattatattctactgcaactcaatgtgagaaatcttatcttctacatgtttaaatttacatagttttgttttgcatatttatgatgttagcttataatgtaataatcaacatacttgtttagtaaataagatcttggtaaaataagatccaacactacttttagtacatatatggtcctagagtccgctaatgctgaggccttgacaatttattctggcatgggtttgtgtttcaagcttggatatcatgcggtggtcattgaatttgattgtgttaatgtggtccttgctattaataatcgtcatgttgattagtcttatttggaatgtattcagagccaactaaagagtgggacaactgaggcttaggccccgagccccactattttagaggccctcaaaatttaaaattagtatacatatagagagaaaataatactatataaatatatgattctataatcttaataaaattgtggcagcacaattggcaagtgtgtattgtttataatgcaaactcaactttgccactttttggttgtttttaattatcaaagatcgtggtttattatatatatatat

SEQ ID NO: 73857 - DNA, 1016 bp, Cannabis sativa
tttttaacattgttaaaaattcatacaatttttcaaacattttaattttttttacataaggtaaaatctagagtgatcattttatgaataaacgaaaactcatatccacccctgaatgtacatccatattcaaatatagatgatcttactttcaagtggatacaggcatattgacacttacagagagtggatcttgtcaaaaccactataacaagaaaaaaccagaaggaaaccaagcttttcatcttcatttttctagaattcagctaggaattcaggtgttgttggagctaaggtaaccctagaacctatggttttgtattttgaagcttttactttgatttcaagtagtgattttgagttatagggtctgttagggttaggttatgttgtaattcgaattctaagcttaatttgagttgactttagcttctagctgctagttttggtgtatgggattggttatgtgcaagtttgagcttagaaacctaaactttgatctttaatggcatatttgaatatagtggctttttttaggatttttttgtgggattatgttgtgtatacaatgtttagatactctggaagtttggttgcatttggtggagttgtgagcaagaaatgagatatttggggaggactggtataaaccagtttaccggttttatagcagtttaccagtttaccaatacctgtaaaaccggtaaaccggttttggcagggttccccgaatgtcccattttctcaattctcgtccattttagtgccttatttgggtgtttccctatttcctaagttagtgtaatcccttgtgattataacagagcctagagttataggtttgggttttccggattcgggtttcgaacatgtgatttaccttgttttaatatgtgattagggcatgcatccagcgcgagactttccattcaagtcggccagcacacttgaatcttgaacgaaggtgagaaatgtatataatgtgtgatatcaatatgcgagtgtatgtatatgtt

SEQ ID NO: 73858 - DNA, 583 bp, Cannabis sativa
taaagcctacgatcgaatagaatgaccctttttgcaaagagttttggaaaaccatggtttcaatgatgtagttgtgaagttgattatgcaatgtgtaagtactgtctcttattcagttttgctcaatggtaaatctcaaaagaagacctatcctgggagaggattgaggcaaggggaccccatatctccctatttgtttgttctatgtaatgatgtgctctcaaggatgcttgatcgatcccaagataggggtgacattcatggaatcaagatctcaagggaagccccggcggtgactcatttaatgtttgcggatgacaccttgctcttttctagggccaataccatggaagcaagcatcattggagactgtataaaaaagttcgagggatggtcgggacaaatgtgtagcaaacaaaaatcgggcattctcttctcttctaactgtgtaaagtcaatgaaagagaacattgaagcgcaactggggattagtactatcaatgatgaggaaaaatacttgggaaacccctttgtcttctcgcgtcgaaggaagaaggactttgatttcatccgaagcaagcta

SEQ ID NO: 73859 - DNA, 1620 bp, Cannabis sativa
ggacaaatacaaatcacggttggttgctaaagggtatcttcaaactctgggaattgattatgaggacaccttcagtccggttgtcaaaccaaccaccgttcgcattgtcttaagcattgctgtctcctccaattagccagtgaaacaactagatgttagcaatgcttttctctatggaaatcttgaagaaactgtgtttatgaaacaacctcaaggttttgaggattctgcccatcccactcacgtttgccatcttcacaaggcattatatggactgaaacaagcccctcgggcatggaatggccgactcaaaaccacactacttcaatggggttttcaagcttcaaggtctgataatagcttattcatctatggctcgggcaactcattggtttacctattggtgtacgttgatgatatattaatcacgggaccgaattcttccttaatctccaaactcatctctgatctgaacagggagttttccctcaaagacatgggatcggtccattattttttgggggtagagatatatagagatcatacaggtatgtatcttactcaaagcaaatatatcacggatattctcactcgactacacatggaaggagccaagtcatgtcctaatcctacaagctctacaaccaagcttagtcttactgatggagaacctttcgaagatatcactttgtaccgaagtactatgggggctttacaatacctcagccttacaagaccggatgttgcatacattgttaataaactaagtcaatttcttcatgctcccaccaccaagcattgggaagcatgtaagcggctgttacggtatctcaaagggacgataactgatggtttatggctctcaccatccgattcaatgacacttcatggctatagtgacgctgattgggcgagttgcttggatgatcgtcgttccacaagaggctatgtcatgttcttgcgcaataatctaatatcctggtctgccaaaaagcaacaggtggttgctcgatcttctactgaaagtgaattccgcgccttagccaatgcagctgctgaaataaagtggattacttccttgctgtccgagctacaggtttccattatcccaccaccggttctatgggttgataatcaaagtgcaacatcacttgccgcgaatcttgtgtttcatgctcgtagcaaacacattgaaattgacttgcatttcgtccgagatcaaatccttgcacgacaactttcagttcgttatgtcccttcattagatcaagttgtcgatgctttgactaaaccattgtctacagatcgattcctgtacttaaagaacaaacttcacttagctacttccaagtttcgtttgaggggggatataaacccattaactaactagttagttaaaacggttatagtcagtagttaaatgtagtttgttataaattctgttaggcattttcttgtgtatctgaatgtattcttcactataaataaagagttcaaagccaactgttttggttgagcttttcttggcattttacatttctgtttctccttcttttcttcttctctggtttgtaccactggtgtgtaccaattcttcaatctgccattacaagctttaca

SEQ ID NO: 73860 - DNA, 857 bp, Cannabis sativa
ccaccaaaatatgaggttggatggttttttgcaaataaattgatagttgagggagttttgccgcaaattactcttatcttgaaacaaatttacagtcaataacatcgttgccatgtaaggataatgtcgaattttaaattaggcttttcgaaaaaaaataaagtaactttttgttaattataatattaccattaatatatattatttagttgtgacatatttttaaaatatgaataaaaatattacattaaggtggcgtttggtaatatttttttaatcagttttctgtttttaaaaataaaaaagtgatcatttatgatattagttgggtgatttggagaatttttttttttttttttttttgagaaaagacggcctcattaaaacctcaagagtaaacccaaagagagaaacctcaagagaaaaaaaagtgctagacaataacattaatcataaaagtctgtctgcaaagccattgcaatacaatcagggtggccaggccaccaaacataatgatcctcatagataaagctaattttgccaaagtgtgagccacaccattagcaatcttaagacagtacataaaagaaatattactaaaatttttacaaaataagcaaggatatctctaataatataacctaggtaagttttgagtcgttgaaaagacttccaatattaaaaaaaaaaacgcgtgcaattatatgctgaaaaaaaaagtaatttctcgaaagtgttctaaactactcacacttgattttgaaccatttatacactttagaaatgaatatatcaagtctcaacaacaatattttcaatggctctcattcattcacattcataaaaaaaaaaaaaaa

SEQ ID NO: 73861 - DNA, 737 bp, Cannabis sativa
acataaatatatatatgtattttttaaaaaatttatcaaaaaaaaaaaacaattaataatttttaaaaaattcaactaaaattaaggtaaaaatttaaattaattatacacgtgatgtttccacatcatcattctgtttgtcacatatataacaatatctgacagaataacactatggatagtttgagaactatttttaacgggttaaaaaattttgggggcagaattatgtatagatgataattcagtgggcaaaaatgttaactttcttaataaatattcaatccttaaaataattacaaaaagaaaacagctcacaccaataatgaagcctcatttttgccaatgtagtctttgtgtgtgtggagttgtaaccttttttatctaagatttcatcatctatgtctctataaacccaactttacaactatgaaagtggcaacaaattttgtgatctgggttttctcatttttttttcgtttttcaaaactaacatccccgcctaaccctacaggtatcgggtattataacaattgttacataagtactcaaaaaagactcgaacctcagactttatggacctgggtttttatgcttagggaagagctttagaagcttgattagctcgtaagtgcgcctgtcaccacccgaacacaggcatatatcaagaggggtcaatccattctgcaccaaacaacaaattctaaccattaatcttatgtttggtatgaaagaaa

SEQ ID NO: 73862 - DNA, 720 bp, Cannabis sativa
ttaggatgttaaacaacgtacatggtagtaaatctggatccagtgaaaataatccccaacaatgtttgtgttgatttggatgtgttcatgttcgtttgagtgcatatttgatgattgtatagaaatcgcaatttagattgataaatatttttagttttgttctgaaaatattttttcctgtaaagtagatgaaaaattaattaatttagggttttacagaactaaatttggattttttatgaattagttatgttttttggaatttggatgaaaatatctgaaaccgagcaacacgcatgcgcgcgcagacaagggcttgacgcggctttagacaagaccatgttcaagtttactcggacaaggtttgtcctaagcccctcctgaccgagattttcccctcaagcaggctactagcagcctttcccttacccatttgtagcctcgtgtgcgcaggaggagtatgcaatctgcaatcttttttttgtgatatttttgattcaaaatcatttttcattgaaacaaaatttaaattttggtagaattttgtgtagaatccaaattttcaaataaaaatctaattaatagaataaaattaatttttaattaataaaaattagttttagatattagtagcctttgaatttaaaattttgatttttccacaaactagccttatggttaatttagaaattttttgattatttttttattttatttatt

SEQ ID NO: 73863 - DNA, 687 bp, Cannabis sativa
gggatattagtggcaaaattacttataaattatcttcacatcataaccagaataaatataaaatttatgatttattaatttaagtatgttgtcaagtacattattatgtaataaaaatatcgtaatacataaaaaaatttactagtcttatattgaaaacatgtcgcatattcatatatttgttatataaaaaggataattattgagttttaaatagtaaattaatttaaatactaactaagtgagtgaatgttagaatattttatttacattaataaattaataatttgctttatttgtttataaaatgtaattaattaagaatattttaattatggtcaccatttaattaataaatattttagttacccaatttaatttctaaaataaattgttaaaatattctgacaattaatgtgacacaaatactgatggaagtatcctaactataggtaccggtcctaagttcactactcattctgtaaaaacagtaaatccatctaggaaaattagataaagcttagaagtccgaatacccacactaactcaaacttgtttttcttttatagattctaagctcgtgtggaaactcaaagaatcaataagtgaaggtacttcaatctttttcattatactgtgtatatgttcgattacagtttattctactttcatataatcattcatata

SEQ ID NO: 73864 - DNA, 793 bp, Cannabis sativa
ttaattattttgttacaattagataatttaagtatgaagcctcaagctagtcaatccataacaaaatttgtatatctatctatctatggatctatatatcgatataattttaattttttaacatttctttttttctccttttgaacttaatacatacattcattgcatagtttatcattcactataaaaaatattacttttagtcacaacaaaatttgtgactaaatagtttatctcaacatgatttgaggaagtagccactagagttttctttgttgactgccaggatatagcagtgtcaccgcaagtgaacaaatagccagtttgagatctggctttcggtggatcagataaatatcctgcatctgcgtagccaataagttgtgacccacaattattagaatagaacaatcatttaaagtaccctgaagatagcggagtatgtaacgctctaatgctaaggcacgctacagtgctttttcaactacagtgttatctttgccaatcaaagatttttctcgaaaaaacatgtcaaattaaaacttttataataaatattaaactttataattcacataataatttacatacagcaggatcccaattctaaacttttatacaaaatatggcaaaaacacaatatccaggtcgcacagcgactacaaaataaaatccctagatgtcccgagaccaaacactctaggtcacgctgccaagacatgtacaatctcatcctagctcaagctcactcctgctcagcttttgcctgtcctttacctacacatggaagcag

SEQ ID NO: 73865 - DNA, 833 bp, Cannabis sativa
ggttggaaaagaaattggaaaatgtgagatgtcttatccagggtgtgaaagaatatacaccatacatacaatacatacataagaaaagcaactaaaaaagctgagacagaacgatgccagtgtggttgattgtggtgtagtgtgtgtgtggggttttaaattttgttaaacatttctctatatatgtagccaaattaagatactgcattcaaaaaccactaccccccaagctgcttgtactactactactactacagcagacaaccagttaccacttgcttcataatctatacccaccaccacttgttcttaaaaattgtccaacatgacatacttgactttattagattttgtctcaaaatgatactatgacagtcagtacttttgtgatctataagaaaataccagataagctgtgcaatcctatatcacttaagaaaggtcaagtgtgatgattctaaggctgtgtaggtataggactacataattgaagatgacttagataagttgattgatactacttataatatcaacaaggtatatcttgttttctagtagatcatcacaaaagacattcacagttaagcgtgcttgacttgagataatttcaggatgggtgatctcttgggaatttctcaagaagtgtgcgagtgaggacaaagcacgctaggaacactcgtgttcgtctgaagggtcagtcgtcaatccaagaagcagccagagtgacatacttgtttataagagctataaaactaggaggaaggcccaatgaaaacttgaagcggggacgttacgattggtatcaaagccgatcgtcggttagcccgaaggat

SEQ ID NO: 73866 - DNA, 1122 bp, Cannabis sativa
ttttcctcttcttcttttgttgactaattcaaccaaaaccttatctcttcccaaaaaaaaccttccatgaactgattgttcttcccaaaaaaaaaaaccttccataaactttatctcttcctcttcttctctccttctctttctctgtaactacgtttcatcttcacattacgttggtgatgatgatttgggtgattcaaccacaacctctatctacacttactgttattatttttgttctgtgaagtttatatatgtatttggaatggatttgaatggtgtggtgtggtaaatcttcagcttcgacatgcacattactggattgatttagatgttaataccaggtatgttcattgatttcaaaatccctaattcttttaccattctttctctctatctgtatataaaaatgtaaaatccctaattttttttatttgtttttctcaatttttttttttcaaatccctaatttttttacctctttttctctccatctgtatatataaatgtgacatccctaatttatttctattttttcaattttttttcataaataaaatttacagccacttactattttgatgaaatttatctacctttacacatatttcaatttaagttttttacttttgaatttcttggactgatgcatgtatgataatttttcccaaaaagaaaaagcgaaaaaaatatagataatttttggtgttttttttttaaaaaaaaaaattaaaaaatatacaactacttgttaatttatctatatttagtttactcattaaatacgtgttacaatactaaatttttgatttttcatattatcaatttttttataatttctaaatatctattagtagagtttttaaagtatttgaagataaatgtttgattttatctcatattttgctacgtgttgagctaatcagtatattagtgatgcgtcattatatatacgtgttatataatttgtcagattgagagttatcctctcttaataggttagtataagtatactaacatgatcaaacttatcaaataaactgttttaagaaatggaactttgcttcttcaaactctcaggtttggtttactgagtcattatgtagacttgttttgatgtat

SEQ ID NO: 73867 - DNA, 509 bp, Cannabis sativa
gtcaatttggtgatggcatctaccgcgtgcataccggctaccttcttcgtttggcttctttcaattggcaatggttggttattcatggccatttcttcgagcagatcatacgcctcatttacactttttctcataaatgccccaccaactgcggcatctacaattgttctggtgttaccaatgagcctgttgtagaaattatgaaccaacatccacttttcgatcccatgatgtgaacatttcttaatgagatccttgaacctctcccaagcctcatagagagattcattctccaattgacaaaaattattaatttctcctcgcaacttggtagcttttgctagaggaaaaaacttggacaagaactttgtcgccaaatcaatccatttagcaatgaagttgggtggtaaggagatcaaccaacttttggctcgctccctcagtgagaatgggagtagtatcatcgctgaccccgtttactttgaaagtctgacataactccatgaaat

SEQ ID NO: 73868 - DNA, 1160 bp, Cannabis sativa
tagttttggatatgtgtgttttggatctgaatatagtggcagaaatttgaggacaatctaattttaggaattttgagattgtgatttgtggaacaaattggaacatatttgtaaataataataactcaattcttaaaaaaaaaaaaaacagaaggcaaactcaacctatacataagaaatttaataataaaatactttttcattataattattatttgatattggatttataaattaaatattttaaagtataaaatgtatatgtaaaagttatcaactaaaaatatgattagtctttaactctacaccaactataaatatagcacattagtctattataattgtattttggtattttgatttatataaatcaattggtgttaaatttttttttatcatctttttatttatattttatcatatttttaatacttatttcttttttagttaaggtgtagtttaatactataattgtggtgtctagcactactcaatgtgtcatatgactattagtgcaattaagtataatattccatatattttaataaaataatttatataaaatattactaacaattcataatgtgcaaccttgcggtaactgatgcgtaatagtaatactcaattatttgtattaaccaattagtccaaatcttttttttgaatgactccccaaataatttctttttttttttttttgatgaaatgagaacttcattaaatttagcattctgaatacataatatccagcagacatgccggagcgttagacacacaggagctacgttcagataaagatcgagacaacctaacaacagcatgtgctagacagtttgctgaacgttttacaaaatgaattgtgaaaaaagaaatagaagataaaagaacttggcaatcatgaacaagaacaccaaaaaccgaattaagaggaacactgcttcgaatagcctgaacagaaagtagactatcagtctctagctcaacaatgtgccaattatgacttttaatccagcttaaggcttccttgatgccaatgaattccgcaactttaggagtaaaggtcccagtattacagccaactttgccgtcaataatgatgcccaagtcatttcttgcaaccattccataaccatatttgttcttactagcaaacgtagcag

SEQ ID NO: 73869 - DNA, 804 bp, Cannabis sativa
gaaaaaagtgaagtctgcttacctgggacaaaattggaattgatgctccagatagaatagctgatcaaggacacagaaaatacgataaataaacaattagtattgactcatataatagaacttgattatctgtttagccagaacaccagcatgaggtaacagtaagcagaacatttttcatacatttaaacacatgagtaacggatttactaaaactcaaactaaagtttggaataaaaacaaaataagatcttcatgcatattgaatagtatcacagagctatcaactaagaggaacaagattcagcaaaacacaagtattggctagaacctaaactggtaattatgaagcaaaatgaaggaaaagaaagaatataagatggttacctccagctgccattccagtagcagcaccaagtgcttctaacaggcctactgcaagaaatggagctttcggcatggaaagcatctcatcagtaacaatgccagcatgataccgtatatacaagatagagaagtatacaattacgtatctgtaatgcaaattgcaaggggaaaacagagcaagtaagtttaacatcattaaatcaagaccaaaactaattcccataatttattatagtgtttgaaataagagagaaagagaagaacaacatgtatatctatagattaatttgggactccattaaatgataaatatgcgcaatgttactatgcaaaggtggtattttcagtcgaaaaaacatatatatattttttttggagaaacatgaaaagagtaataatttacaaatttacagtatt

SEQ ID NO: 73870 - DNA, 1538 bp, Cannabis sativa
cgaatgtatgtgttctgcgttatttacaaagaattcttctgacttctagggttgtaaacctcgctccctttagctggatgaagctatgggaagtcttccaatagcgagatggtcacctctcttatttattctttgagttgatccgtcttttacacttagtttgttcattgcacgctaaggacattcacggttgatacatgtcgctttctctgctgcctcgctttttgcatttagcgatatatggcttctcactaatatactaagcgccagcttgtatattgattccttgcctacgacgttactgtcagcaggttacaaatatactctgtctcttatgtaattaatgagttattcaataagagcaatttcattgatttacatttccttcattctgacacgtgcccttcattgaggtggcagtcgaatttcgggtataacaccaggtgatgtggattttgaaattatgcctcccaagacacatacatcaaagactcctcaggaccccaatatcacctttgcgactgagttgatagaatcgaaggtgcggtctatctcaggctacacgggcgagatgctaaagactttcggaatcgaacatgggaaatcatgccaggttagataagtacaagagggtgagttcagctgtcatccccctgcgcgttttgcaagcagtaactcagggacaagtggtgagactagtaccagtggtgagactagtatgggcgcctggagccttgagcacatcagtgcagcggccacctttcctctttgaaactatttcaaagaatacataaacaacattggagtttccccattccagatgactcacatctcctataggattctcgctagtttgaaagtcttatacaaaattctgaactgggggtgtcccacaccagtggagattgagtatctttactcagttaaggtcattctgtcaaggaagaacgccgcagggggatttttctatatcgatactcatccttgcgagcctaaaattattgtagacttgccaaacaaagtgtctttcaagaacaacttgttctggattctggtctttcccccatcggcacaaccacgtttcgcgaactttgtaagtgattgttcccttcttgcttatttacatcaatcttcctttttcaagtttatgactaatgttttgtttgttctaacatcgattttgaagagacctactcctacgcccgagatggttagtaggcacaggtgcttattaactctcccgacggtcttcggtcatgtaatttccttttgaccgaggttaacctgtgatcgttgagctttcttactgataaggaatatacttatgattataaaattcccaagtattcttcttggcaacaaattactgttccgcttgaggatcaggcctgagatcgcttgcctcaagcacaataccttcaaagcaccgcccctcaagaatctggtgaaggtgcatcccgaggtaatcaatgtggttggtctcctactgctgccgaagtggttcctcccaagaggcaaaggaaaaccaccgcccataa

SEQ ID NO: 73871 - DNA, 722 bp, Cannabis sativa
ttttttttatatatttttacagtattctataaaaatacaatgaaacaacaaaaaattcacattaaagtaacaagaaaataacataacaaattaaaattatatacaaaataatgaaaaattaacaataaaataacaagagtacaatataaaaatacatcaaaagaccgtattttatataaataaaatcgtaaaagccgtaaaaaatatttaaaattccgtacaaccatattttataatttttgttgtttttgtatttttttttaaataattctttgttttttgttgtgttatagcccatattgttagtgattaatagttaatagatttagcatctatgtgtgtaaacaacatgaataaaaattcgtgattacttaggattttggtcgatctaccattaatcattattatgatatgaattaggtatctatagtaaacgaaatgttaataaaagatggtttaattacatatcggacattgcaatatataatatttattatatacacaacaccttcacttagatgttatgctacatcagtaatctaaatcgagattacttgcaccaaataacaggtatcagtgaacagcactagcacctttgattaaagattcctaaactttaatatgttattgactattttatttatagctaaatgatcttgattctccctataatataagtcacagcctcatgtataaataaagaattttttgatatttatata

SEQ ID NO: 73872 - DNA, 1560 bp, Cannabis sativa
aaaaaaaaaaaaaaagatttgtaggtgtatatatatttaacagaactgttaagtttaatgaaagaaaaaaaataccgttagactaaaatttatcgtcaaatagttacttttaatttaggaaaattcttcaatagacactccttttagaggcgcaccaatatgtctaatatcaaaaaatataattggtgacaactattaaatgaagaatttttatagtagaggtactataggggatcaaaacttaatgaaattggggcgcacttatagaacctttaaattattatttgattgggcctaaaaataacaatccctctctatatctgtctctcttcatcttcttcactccaagccgccgacggttccctctccccttctccctcagttccggcaccaccgacgactctctctccctcagccccagtccaacgggaaattccgtctccaaatccctcaaataaaagtatacattcaaagattaaagttcgatcttgaatcaaggtatgcattcaagatagaaattcgagatgatcaacacaaaaggaaagaaaaaacaagattaatttcgacaaagaaacaccacttgctaatgccatttgagtttcttttagtcccatgaatccacttataataaaaactctttgtttaataaatcatgattgatggaataaagtattaaaatataaatatatattttttaccgaatcgaatataaataagttcttactttctctgtctcggtattcataaattaatataaataaatcatgaatattttgtttaatcccgctattcataatatctcaaatatttatcccgctaagaaatatgttgtaaatttatctatgtgactctaatgaccatccattgcattttttgtcatcgtcgaaaaaaaaatcataaaaattacataattcatatttaatataaataatacttttagagtttgataaaatctctaaaattgagaaattataactctaatgcttatttctaaaaatgagacccacaacataataaaattataaataattataaaattatcattaattaatattaattacctttactaatctatattttaacatgcaattctgcaataggtgccagatggtttttaaagataagaaagtttagcaatacacaaatccacccaattatattcttgtcaagaggtggtaaagaatgaacattaaacaaattaaattaatattctttaaataattaaattagttaatttctttttgtgaggaaattataagtgactaacgaatttatagatgagaataaagtaaaatatgttatttttaaacaatgtggaacttttcttttttaatactcacgtcctaattgtgggatgtactgagaaataccattctgccttgcctgacctccttgcccatgaattcctcagagagggctgggcagatgaggaaggtcgaagaagtgttctcgtagcctccattcctacggtggtagtgctgaaaattgaaatactctttgttattatcaaagagtataaaactaaaaattaaaattactttgattaaaaaaaaaaaaaaa

SEQ ID NO: 73873 - DNA, 897 bp, Cannabis sativa
cactatcgtacaaactaagcattagcatgcgaccagaatgcacaacaacatgcgccaccacttgaccaccacttggccaacatgtgggcatcacgtagcttgtaacgtgccatcttggcatgcacgttacaccaggcgactcaaagtaacagttcgagaacccaagagaaaattacctgaacaagatttaagcgaaaatcaagttcattcggagtcctaacaactccaaataggcgtatagaagacagctaggcctaaaagttcattttgcctggttcaaaccctaatttaggaaccctaagtgcttgtaaaagtccgtacagtttagatggccataccctaactatccagacaatatcagcacttccctggctaaaaaattttcaacatgatatgtcctagaaatgtaaattctacatacaccattttaccattcacttatatcagatatcctagacctggcttgaactgagcatttctttattagatattaaatagcaagattcaacaaagcgttgaatacttacttggtatatgagcagaaaatgataggttgttgtgaaaatcttcctgggagttgtgtacccagccaatcacgacatcaaagccgacttgtgcgttaaagtcctcgtcgggttggggtggagtagtttggggtttattggctctgcgtctggaaattgggctaagcaaaggttcaagaaatactgaatcagacaatcaaaaacttcttgcactcaccactcgaaacagtcaaaagatttaaggttttttttggaataagaggctccagtttgaaggctatacataaatttttataaatcgcccaaatcaaaccaaataacccaacaaaaaatactaaccaaaaagcttgataaaaatataactcgcccaatc

SEQ ID NO: 73874 - DNA, 998 bp, Cannabis sativa
gcgcacatgtccaatttctggtttttatgtatggattttctatataatttattaggatttgggccactcttgtatatatatataaatattagacagatttgattaattgaattatatattacatagtcatttctggaaaacagtattatcaaaacaagaaaatctggaaagtagtttttttttttttttttggttaattggaaagtagtacttattacatgatctattggcattgtgatctttcttttcgatcgaatatcttccaaccctaacttctttcacatactatattctgtctatctcgcatataaatattaaataatatatgattttcttttgaaagggttaataatatatgattaagaatgactaaattaaattatgattaaaataattaagttaacatgcatgtaaattgtctatattaacaaatatattaatttcaattttttccctgaagcaatttaattacaattgtcaattaaatatacggattgtaattaattaatattttaatttgatcaattttagtgatagagaattgctaaaagtcattgtctctagcactttcctcaatcctcaatgtcattatcatattatataatttaaaaaaataatttttaaaaaatattttgctaactaattatagaaagtcacttatatagagggtgctggacaacatatatacttatactcaataataatgctcttactgataatattagagcattgacgttagctattgggcacccgtagacatctcacgattaattagctatatattctataaaaattattttcttaaattatatgagatttgatgtttaattatttacaccaataacagtatcatatctaattaaaaagtgtgctataaagaccaaagatattttttagcaattctcataatattatagtaaggaaagaaaaaacatatatatagataaaaattgaataattaacagcgtacgtagtaataattaaacaatgtattaatt

SEQ ID NO: 73875 - DNA, 896 bp, Cannabis sativa
ggttgtttttttacttggaacaataagcagaatcctgaagacagaacgtactctaaaatagatagagctatggtgaactctaggtggacggatgcatatctaaattcagaagcggtgtttctacctgaaggggagtttgatcattgtcccatactaatatccttttataaggaagcgtgctctggcaagaaaccattcaggtattttagtatgtggaaatcggctctagattacaagaataaagttcgggattgttggcagcaagctactacaagcacaaaaatgtttcaggtggtccagaagttaaaaaagctcaaagggatattcaaggtaatcaaccgagaagggtataatgaggtacaaaaaatagcagccacaacaaagcaagaattgatggaaatacaggaggctttacatcaagatccaaccaatggagatcttatagccaaagagcaatcgactagggagaagcattctcatttcaacaaggctcatcttcaatttttagctcaaaaggccaaactcaattgggctaaaagtggagatgaaaacactagcttctttcatgctgcactgaaaagtagaagagctcaaaacagaattaatgcaattaaaaatgaagaaggcacctgggtagaagatccgagagaagttcaaaaagcttttctccagtattatgagaagctattggggagcactgccttccactttccgcaacagttcattgagcttatcatggtatgtgtcaaaaccccaaaattctccttactgattaatggtgaactgcatggattttttgaatctaaaaggggattgagacagggagatccgatgtctcctctcttatttgttcttggcatggaatatatgtcgagaatcatgagagttgtgagcac

SEQ ID NO: 73876 - DNA, 1089 bp, Cannabis sativa
  modified_base (499)..(501): a, c, t, g, unknown or other
agtaaagcctaaatggaagtgagatttcagattttgttttatctcgacaacctttaccggcgcatttgacgaactgcgccggtaaaaatgccttttcttgtagtgcttgtacatgtcgatgacaaaaatattgtaatgctaaggctcaaaaccttattatattatgtaatatcttattaattaacaaaaggaatcggaaatgaaaaagaagaagcaaaataagaagctaataaaatgccttttgtgataagagaagtttgggccatatgtgtttgagaaatcctaaatggcactcattgtgtctaatatccccatgtaatgtcattagtccaatttaatatcaaccaattataagaacccatctctaagcttaacaatgatatgtaagcattatatattatatatcttttaaagttttttttttaggaaaaatctggtattataataaattcaaagagtcatttacaataacagagtgaatagtgggaggaaaaccttnnnaccacatacaatcattatccaacgctaaagcttgcttagccaagccatgggcggcttgatagcatcccgacgaacatgagatacacaaacattagggaaatagaattcacaaccacgacagagtcagtttctacataactcatttgaagctgcaaattccgagcccattgaagatcatgacacagggctttagcctccatttcgtgtgacttttaagttttcagcaattgattttgaaattgtagccacaactgaactagatgaatcacgaactattgctccaatccctgttcgattttgtgttgtgtctactgcagcatccacgttcatctttagctgtccacaaggaggaaatctccatggctgatgagctgaaatagaggaagcaattggaggagccttgtcagttgaagatacttgctgaaagtagttgagatatgctaaagatttagaataaatagctgctagttgttgagggaatttattgtgaatgatgttatttctgtccgaccaaattgaccacatagtgcatataattttttccatatccgacttggtgtgaatatttgacagaaacatcaaaaaatc

SEQ ID NO: 73877 - DNA, 972 bp, Cannabis sativa
  modified_base (298)..(307): a, c, t, g, unknown or other
  modified_base (660)..(667): a, c, t, g, unknown or other
tttttttttttttttaaattaactctactacaaaagtcttctttagcttcggttatttgggtggtacgtttagatttggttttaagaaagttcgatatcgtaagcatttcatgcaaattggaaagggtcgaagaaaatcaaaggcaaaataactccttatgactttgattatttgctaatatagtcgaggccataagggctcgcagggccggctctagacataggcgggttaggcctgctttaagactcacggggtccaaataaagaaaaatgtattttaaaaaatatacatattttnnnnnnnnnntttaaaaatactatttatttttatcccaatttttttccctatggcccagagggcccgtataaggtaaaccaaatcctcttcggcttcagatattagcaaataacgaaattataagtttattttttttaaaaaaaaaattgtttcaacccggaagaatgatgaatatggagagaatctgaaatggatgagagaacaaatttaaaaataatacaagccaccacatatctgaaattatattatatccggtagcggccttcagaatttatgggcctaagccaaatttgattttgggatcctctaaaatatatataatcttttttttttttaaataagactatattgagtgatttttnnnnnnnnatagatctatagatagataaattttttaattttttattttttttaaaacttagttgttagacatttataaaattttttaaagaaatttactctattttttatttaaaaaattagaaaaataaaaaatatataattaaaaatctataaaaaaaataaataaatagattttaaataattagaaaaaaattgaaaaatagataaatagattttaaataataagaaaaaaaattagaaaatagataaataaattttaagttattttagagcgctacgtcatcgttttatacttcttttatatatatata

SEQ ID NO: 73878 - DNA, 791 bp, Cannabis sativa
  modified_base (745)..(749): a, c, t, g, unknown or other
caaagaaaacatacagaagaaaaaagagacggtaatggctgtaaatttgtaaaaaaattcaagtaacctcgaaagaatggaattgttcaaagcatttcttttctcgctgtgtaacacactgagatcggcgaatgttatcttgacgtcttttgtaaacaaatcctccgatccaaccaaacaaaaggctgcaactgcgattactccaaacgcaacaccgactttctttccaccgctcatttggtctttagaagagtcgttcgattcgcctaattcttctttcatgtcatggttaatgtcgttgatatccactgccggagacggagaaggagaagccaattcatgtattttgacacacattgtatatttgattcactggaaattttaaaaactaactccaaaatctgaaggcaaaaaagaacatggtacaatctatatattcagatttcacctttacaaaacatgggacaatgtataaaaaaaaacataaataatcaagggaaattctataatgcacccccttaaaatggatacaccgatatatctctatctgttttagtatccgaaataattttttcgttaatttttttctcatagtcatgaaaattatacttatttaagacatgctgtaaaattttaagaaattcggaaaagtttaacacgtcgaaaattgcgttcaagtagtgtgttacacgtgtgactgttttattttatacgcgtgtgaaatagactgtttgaacattatttnnnnnattgtaaattattccgaatttcttaaaattttgtaggatatc

SEQ ID NO: 73879 - DNA, 709 bp, Cannabis sativa
attaattaattaattttgcagcagtatctttctaccttttttttttcaggctcgactgatatgggtggatcatcatagcaaccttcgttatcacaacatgctcagacagtcttctcatatccataaatgatggggccaccgacatcacaaccgcgacagctaccgccattacaactgctacaaccaccgtagacatcacaacgtcagccactgctaattcctctagagttcaatgagagcgagagatcagatgagtttatatgtctcaattatagaaccaagaactaatatttaatttgtcttagtaactaatattatatttgtaaaactatttacttttattgtgttattgggctatttgttaacatgaaaaaaaattatatttcatattgatatttattttatttattattataattatattttataaattgaatattaatatttttaatattacaaaaaatttatatatatttttaattaaaaacctttagggcgaccatatagtcgcccctaaaagtcaaaagtagaattctgacacacctttctaggggcgacttttaggggtgtcgctcctaatttcaggcaactttttatcgcccctaatactatttttaggcgcgaatttctatagtgccctatttgttgtagtggcttagaaaaacaaaacttgcaattagaacccgcaacacttttttttttcttttaa

SEQ ID NO: 73880 - DNA, 1031 bp, Cannabis sativa
tattaaaatatcacccttagcaacatacgtatagttcctcttcttgatcttaagattttcttaattgtcttccaatgctctttttctagattaatctcatacctactcattactcccactcaacagcaggttattgtctaatgcattgcaaaacataccttagacctctcactgctgatcctaagaaatttgtttcatggcttttatcttttttagaatagttataacttttccatagataaataaaatctaagtctagcaaccaaaaggcttcctttagaattagccattagaaaaattctctagtatcttactaaagtaagttgtttgcatttgagtaagtaaattaccaagtataccataagccataggtttagataatctcaaacctactataatacaaggattaggaagttttgttaagtccattgaatagactaatttttaaaaattcctttcttgtccttgtaatagaaaacttatggtttctccatatgaatggttttaaccatagttctcttgtctttgcttcttagttccttactctgagtatcaatgacttgtttaacctaacaatagatttttaatcacaattgtcttccatgtcataacaggatgagttccttgaaacactcccactatgacaaggtaccatgactatttgtttaggaacaataaatggtagtaacctcatcggttgtatcaagacaacagaggtagtgggaccatcttataaagaataagatgatagaacactatggaatcaaaaaagaaatatctcctctactttgatactttctttttagacatactcatattcttagaaaagtagtatttattgaaacaaatactttcttatcttaatgaccataggatgctccacccctaatcactttagaatagctatcaaacatgcaaaccttagttaacaattctagattttcttaattttacgatcagcacatccacgaatctagtaatggtgtacactaagtacacaaccattttatcattctgaaattttcctatca

SEQ ID NO: 73881 - DNA, 618 bp, Cannabis sativa
aaatgaattaaatgcgaaattaaagaatatacttaatgacagatttttcaaatttttttaatttaaacaatatattacataaatatggtaataaataattaaatttataattatacaaattgtacaattattacatgactaaataaatcatgtaataaattaccaaattaaaataaattttcactttcaatttatactaaataacatattaattctaaatatatgtattaaataaaaatggaaattgaataaatgcaaattattgattaaattataacacaaaataggaaaataatcaatattccaaataaataaaaaatattaaaattcggaattttttccaactttttttttaaaaaactacactgccagaaacgacatatcatttttacaaagggcaaaatgacacatcatttttcaacctgaagggctgatcgcagacgggaaaacgacacgtcatttttatggagagaaggctgcccacaacgatgaaaaatgacacgtcgtttggagcaatgaaggctacgacaaaccattaaaaatgacatgtcagtttctacactgtgaaaaacgacatgttgtttggttgcttcttcaacctccagctgggtaaatttt

SEQ ID NO: 73882 - DNA, 1393 bp, Cannabis sativa
gagacaacccgtccagagagaaggcaccagccgaagcagttattgatctttctgaggagcccaccatcgtggacccttctgccccgaaaataactaagtccaaagactcttaaggagggagctcgaacaggcccgagtagtcaaagggcagatccgagctggtcaagagcagatctgagcagatccaggctcctgccccacctccagtacggcatccagagactaagagaggcaaagatatgctcacccactacatgactcggtaggtccatgaggtgaatgagcagctggctggagctgataatgacctttctctagagttggttatgggaggagtcttgaaggagtttacgagggtaagtcttccctgacagtttccttttatccttctttacttagcttagattttaatgttttttctctgtgcagaccggtctgaagatggctcatgcttattcttgagctaagtcggctgcctccaagaacgttgccatgtccaacaccatgagggcggaagtggacttggccaggaaggatgccgatgaagccaaggttcaacttggagccatccgaatggaattgggtgaagtcaacaaaaaacttcttgctaccgaaaagaaagtggctgagctaactagagacctctaggctttcgatcaacttgaagctactattgcctccttatcaaaagaagtgaacaatctccaagaagaaagggaggttctttgaactgtcttctgcaggttagaagcagagaagaagtctaaggaggaggaccttgtagctgaagttgagaagtacaaggctgaggccgagcagcagagagctgaggttgataagcacaaggtagaggccgagcagtagagagctgaggtggcgaggcttggagggaaggtaaatgccttagagacagcaggtcttgagattttttatgacttttggaaagctaatcccaatgtaaactttgattacttgggcgattccaaagacatgtttctcaagtattgcgcttctcatgtggcgtatggagaatccgaggcaaccgcttctacctctggccagaacgttgacatgccccccgctcaaatagcagatcctccacctcctaccggcccagaagaccagtacaaagagcctgggactccagccgtctgaatacttctttttttatatatatctgtcaagccataatgccttttttaagacaaagtgacctgccaagcggtctttaaactggaattatttttcatttttcaaacaacgggctgactgggcagcctttaatcccgattttacgtgcttttgtaatctttaatgaatttcatcctctatttataatcatcgtgcaactgtacttgttttagttttaccaaatgctttgtacaggtatagg

SEQ ID NO: 73883 - DNA, 737 bp, Cannabis sativa
gggcatttgtatagcagttgttgtggtatttctgtccccaaatattgtagggttagggaaggcctagtttcgggtaaaaacatttgagtgatgattgctaattctttgtaaccatgaaatttgtcagattgttttggtcctggaaatcaaacatcaatgtaaatgtaagttttcttcttaagcaagaattacaaaactataaagattgtgtttggtttcccatgattgcttttactttgtgattatctgcttggactaacatttaggactctggttggcttggcttttaaaagctgtttttaggcttctgaagcttctgttattggttagataatcaatgaattttaactttttcgctctaaaaagtaggattgttcatcgaaaccgaaaaatcgcggtctaagtttggactgcgacaatttgaaccactgtagaccgtaattggggaaatcgtttttagtggtctggttaatctggaccatttaccgcgtaatcgttcaattgcagttcgtaataaataattaatgattaaactggaccggaccatttataataaataattgatttatatatattttatatgactgtaagtataattttgaacttttttgtgtgtcaagtttttttattctatgaattttagatttgtatattatgtttgatttttgagaatatttttacattgttatttatatattataaatttattacttaaatatatattttgaaaaataaaa

SEQ ID NO: 73884 - DNA, 2557 bp, Cannabis sativa
ttttttttttttttttggtaaaagttgtgttacatatatccaatatataattaagaaataacaaaatatcctataatacattatggagatatatacacacattaaattaagacatacggtctagctaataatgcatatgtttatataatatatatataaattaatttaattaaatatagttaacatcaacgaaaaagctgaatgaagaaagagtgtaaaagtgataattatccttatatggttgagtggaatttcatgttgaatggcgcagtagctcaaagatctcaacaaaaaaaaaaaaagtaaccctatatataacttgatagttgaggatggtgatcataattcagggttcatgaccctgaaatcactatccacgaagatacgacctaggatttcatttctacacgtgtcagacaaacaacggttctgtaattaatataataaaataattttatataatattaattaattcatgaagacaatatacatccatgattaaaaatacaagaacttctttcacctgaaaatagtaagattaagcatgcatgattaattaaaacgatgcttaagaaaatgacagctaactctaaaaacaaaagaatacatgaaatatgcttccagctagttatattcatcaattatacaccatcaatatgaatattatacgtatatatttgtatatgtatatatttaggaaaatgtacacatgtacacgcttaaatataaaacgatgaccatcttagttaaggtgcgtgtacagatattacactcttccatttaatatataataataattacaatgataagccatcttcttaatcatcaagttaagtatttatgtagatatttgctaattaagtgaaggacattaatacatatatatttatattaagaaaagcaaatatataaaggattaatatgaagtaaatgactctatatatgcaagttgagtagtcatatatatatataataaatatatatatgtagttgccatattgttttgcttggttttgagtatatggtgagaaaatggtggcaaggggagtgggatattataagtaccgtgaagcagaagctaaatagttttctttttttgacaaaatcacggacgccgctgctggatttcctaacaaaactcccgcatatgtagtaaccttgtatgctactcctccatctacttaattacgtcatcacctattttatttatttactaatttcttgatttaaattaatgttatagaacaaataaataggtatcatctaattaatctgtcgttcaatttaaaaccaaatccaggtccggcttaattaaaaagagctatactcaaactgcctggtgaccaccactcctgttcgagcctaacacacacacacatgtataaatcttatttttatttttggactaataattcttttcatataaaaaaataaaaattcttgaacacctgaaccagtgcaaagcatagtcaaggttaatttccatctagctagtttgaaagagatatctactttaattctttgtttgtatctattttttaaattttataatgtactttttttttggttattttctttttaaaatatatttatactttgtttaaaactttattaaatttaaccgtcacttaaaatttattcaaggatacaaataaaaaaaaaataaagttttacctttttttttctctcaccaaaatccttccgaacttaataccctaagaagtacttatttaattaataatcaaattaacatgaaactaatatgcatgacataaaagttttataaaaatatatatgcatgacattaaaataacctaaagtaattcataagttttagcatatataaccattaatattcattcatatataataatttgggtttttttatttttacaatttaaagtaacttttttttttttttttgcatttttacataaattgacatgacaaattgacatgacaacccacgtaacaacttaaatcgcaatcaaaatctacacaacaacccaaattaaacaaaactaaatagtccttaaaaaaactaaacagtaataatactattatatatgtgcccgcactgttcaatactcgctctataaatgtatatatttcaccagatatctccatatcatgatatcatatattaattaagctatttaatatatcctaaaccacatctagttatgccagaagatgatagcaacttagctaaggagccaaaatatttttgcgttgttactggtaattatatcatggatgataaagcaatccagtcactgcaatatatagaagaagtcaccactaacgccgatgaagttcaaagacgagttctctctgaaatcctttcccgtagtgccaacgttgagtacttgcaaagacaaggccttaagggccacactgatagagaaactttcaggaaggtcattccagtagttacttatgaagatttgaagcctgatattgatcgcatcgctaatggtgacacctctcctattctttgctcccaacccatttccgagttcttaactaggtaagtatatatgtatcgtacgtaata

SEQ ID NO: 73885 - DNA, 940 bp, Cannabis sativa
ttttggttactttttttggccatatacatgtaattctttttttcactatgtttttcacttttacaattacaatctctacatttgtattggagttctgccaaaaaacattatttcttgtacgtcatatttcgtaaacaagagctgctatgacaacaactaaaattgacttctttaccttgctaatctttgccctccttagccaccttattattctttccaatgtagtagctgtcattccccaattcagccaagatttcaccttttccaagcattctaaagagaaggaacactcaaaaaataagtgaggcacagtcttatcttcagtgttgcaaagtaagcatttagagttctcaagctccatatactgcaacatgtcttttgttttgattctattgagcatagataaccatagaatgaaactatgcttgggaatgtttaacctgctccaaacaaatgaatcccaatcacctgtgttagcaataggccgaatagccttatatccctctgccactttgtatctgccattctgtacctgggatacatcaaaattacttactaccttatcttttatgattaccagcttgtgccaataccaactggctgttggagtggccctataggaccaccaattttcatccttaatgtacacattgtgtacccatttcactcataagttgtcttctttttttgcaatggcccaaacatatttgaacatggctgctagattccaatctgagatactcctgaagcctagacctcaagccgatttaggtagacaaacagagcaccaagcaacaattggtgaacccgagagagtatggcttccattccacaaaaaacttttacaaatagattctatctcattcacaactttctttggaagaatcatgatttgacactaataagaatggatagacatcaatacagaattgatgagaac

SEQ ID NO: 73886 - DNA, 923 bp, Cannabis sativa
ttgtcttttcaggtgtgttctgacaggttggcgcagtatagttacatccgggtatttcgggccgaacggggttttggcccgaaatgcaatttgggattaaatgttggcatgatattttatatttgataatctaaaattaatttggaaattaaataggtatgaaatgacaatattgtccttggaagtgtgaaagcatgttaattggccctaggggcaaaatggtcttttgaccttatatgatttactttgacaaaatggaattttgtgagaaattaaagaaaattctgccttttcttcccctttcacccgaaccctctctctctctcaacctttgttttcaattttgattttgggagaaaattggtgtgattttctagcttggttgaagctttgaaattgaagaactttaagcttgggaaattgaggtagttctttactgaatttgatggatttctagttgattatattttatgaaaaagcatgttttagggttgtattgttcttgaatgtatgctataagaattgatgcttaactttgttgagtttgagtgtgagtagcatgatattgttgtgatatatgttggattgtgtttgggtaagctttgattgcaattctaggtcatttttccatgtttgaaactagttttatttgatattgagctgttgaagagattgttgatatgtgggtttgaagctcaagtttgggagcttgatgttgtgagttttaagcatgttttgaattgattttgcaatctgattttttggggtttgatattgagagttgatgcttgaattaggtttatttgagaatctagtaattgctaacaactctatttgttaatttgtggatttgatcaagttttaggttgatttagaagtggttggttgctgaaatttcgtgaaaatgcatgttggtttctggg

SEQ ID NO: 73887 - DNA, 881 bp, Cannabis sativa
ttttcaccatctattggcttagataggatatgagggatatgaggcctagctagatgatgtttgagagcttggaaggcttgctcacactcatcagtccattcaaactctttgtcgttttctttaagtaaattaaagaagggaacacacttttcggttgacttggagatgaatctgctaagtgtagcaattcgtctagttagttaggctttacacgtcttttatctatctgtgacagtgacttcatgtcttgtaaggccttaatcttttctggattcgcttaaattcctcttgagttgacaatgaatccaagaaactttcctaactggacgtcgaaggcacattttagagggttaagcttcatttgatattcctgtaggatgttgacgctttcctctaaatctttgatgtggtcttcagatctcttcgacttaactagcctatcatcaacatagacttccatattgttctcgatttggttgtgaaacatatggttgactagtctttgataagtagcagctgcattcttaaatttaagggcattactttgtatcgtgcctcgtcatttcattagttttgctactcttatcaaaatgaaattatttttatacctcttagattattttatctcttacaacaatatttttaaaatcaaacaaaacaataaaattgtaatggtaatacgattatgccaaaccacacataagagcatctctaaatagatagatattagtgatctattactaaaatataacccatattctaaagagtttgctccaatgatgctctaaaagttgatccaaatttagatcacaatatggttagatgtaaaatttatatcacaataaatacactgctttgtatttacttttatgttattttta

SEQ ID NO: 73888 - DNA, 971 bp, Cannabis sativa
ttgaagaaggttagacttttgaaaaaaaaatgagagaggagtgaatagtggtgatcgtgggaatgtgggtggttgagaatatataatatttgaaaataattacccaaaaatcagaaaataaaataaaaaaggaaagtaacttccttaccttggtcaccacgtgaggagaggaaaaatgaaaccgaaaagatgtttcaaaaattggtcaaaggttactacaaatggaaaaaagaaacaacataatcccacaaaatctaaaaaataaaaatcccaaccaaatccaaaaataccaccaaaaaggaaaccaacaaaataattaatcaaataaaaataagtttcctaaaacaccactaaaaaataaaagcaaattcccaacaaaaataaaggaaacataataggtaaaatgcaataaaaacatgtttctataaatgaaaataataaaagaaaaaaatgaagcccaaaaaatcgaaatcgaaattatgccccccatttttatttgcaaagaaacgaacaagacctcacaaaaaaaatacaaaaggcactaatcaacactgtagaggaaaaagtatttaagaagataatgaaacataacaagaaaaatagcaagaaattctaagaaagctcaattgacaatgtcggtcacacatattttttattttttattattattttttaaaaaaaaataaaataagcttgatatttttgccaacaaaaagtacagaatgtccgcttgtccttgtccctgatgaaaaaatcaaactcataagaatagtcaaaaattattttatcaaactaatgaattagtggaatgaagtcataccggttacgcaagaaaaaagttggctcagtcaccaagaatattaaaggcaaatcaaattgtatgtaacagttttataacaccattttcgaagatatgaaaatttttaccacaaactttgtcaagcataagtgtgtgaaagtgtaagcaggga

SEQ ID NO: 73889 - DNA, 851 bp, Cannabis sativa
tatataaaaggatataaaaaaaatgggcctttttaattttggggccttgtgcaatggcccaagctgctcaatgcttgggccggccctgcctatagcataggtgtaatatactaagctctaaagtagaaataccctatatatataaaaaaaattaatgtaaatatatatataaaatgccaaacaaattaaattgagtaataaaaagtaaattaaatagtattaattgtgagataaagatatgaaaagagaaagatacatacatatatatatatatatacgcagctgattttgtactttttttgtgaatcacgaattgatctctccgtaccgtagcaatgatccctatgtactttattaatattatattaagttattaatcggttgttcaaagtttataagaccggctaataaataatttttttttatttattttattatatttttgtaataataatttatttatttaagatacaattctttggtaaagttgacaggagcaaggacagaagtacaacagttgatggtcctcttttgtcagttccaagagtaaagttgtcttctcaaacgtagtttttggtggactttgtgaaataatatcatattacaaaatttggcatacgtagaacggggtttagtgtattgtagtatatcagatagatgttttagtacattaaaaacttgattgacctatcagaaatgcttaagacatgcaaatgtaaatatttttgctgcacttattttaagttgtattcttatgatatttttggaatgggttaatgttagcaaggtaatggtaatgttaaacattaccttagttgtttggagtatttaatcttgaaatgttattccct

SEQ ID NO: 73890 - DNA, 989 bp, Cannabis sativa
gagtcttaattgtgaatattatgaatgtaattttttggggattaaccctagtttgtaaaacccaaaaactgtgactaggattactgactcttggttagaatcaccagtggatcaagatttatccacatactttgaaaattaggtaagacatcaaactaagcacataacatatagtgtgatggtgcaattatatgatatttgattgttattgagaagtcgcgacccagggttattaccctaagtgcatattatataaatgtgcaataatctgttaattgaatatctgtgtagagttatgtatgtaaggcataactgggttaaactcagtgattataaccgagacaaactctagtaaggccttaaatataaaaaagacttgtgagcgtaacacgtaggtctatgctacatagacacttattatagtgacattactatatagaataatgtaatataaagtgtagtggcacaatatatacgcagtggcgtactgtatgaaatataattatcatactgtattattttctgtctcgttgggacttggctcacgagtgcttgaatgtgcaggtaagggtaaagtagtgtagggtcagccatgagatcgaggactttgaggatgacttgtacatattccggccaagctagaccacgagggttgggtccaacatgaattgtatagaaatcctattttttacttaggttgacttccacaaaataacttataatattttgaaaataattttacaggatcctggttatgtaaatttaaattattttagtttaaagttaaatgtgtatgtttattgcaagttatttatttaattaagtttattatttacttatttcaaatcacttggcttataggtcccgattaacgggattagtagattgtaatcacgacatgtggcatttctacgagtaaaatattacattataagcacttttcctcataaatgccccatcagtggcaacatttataagtgtgcaggtat

SEQ ID NO: 73891 - DNA, 1754 bp, Cannabis sativa
  modified_base (1605)..(1610): a, c, t, g, unknown or other
  modified_base (1688)..(1692): a, c, t, g, unknown or other
cttaggtacaaattctaacttcaagttttcattctactcgccaaagttgtatgcacctttattgttatcttgtaacatagtgcagacctttttagtttggtccaaaaatgcttactgcaggggttttgttgtcaaggaatattcttcagagagtaattctcttggcgaagtatatcattccttgttctttttgttgatgggcctggtaactctttatgtgcagccatgctgccttgagttggcttggtctcttcttctttcccttttgtcaagggatgctgctagcaagatgttgtgtacctcttggtcattgtagactagatgtatgagagcaaactgctggtggatcggactggctagggcaagaccaggtggccagccacgttgagagagcattacttaggcaattggatgaggccatggtcggccagcatgtggaggaaatggccgaccagattgtaaattctatggtcgggcagcttgctgaggacatggtcggtcagccttctaaaggcccagttaatgctttggttggatcccgtctgcattcgattggctttgcccccgccgtaaatgtcgtagatttctttgtccacttttgtcaatagctatacatcttctttcttggaaattctcctttatggtattgggataccacttctattgtgttatgtttgtgtaggattggacaccttgtaccccattctcctaatccttgctctttggcaaggtctttgtttggaggtatgttgttgtaggtgtatccatattggttgtctagcatgtcttttccttttgaaatagaaggacttagttcgttgaagagctgagcaggtaccaagtttgccttggttgtcaaggcgcagctagctagttgagtgagtgtgttggccactgtgccgtctttgggggcttgccttctagtatagcctttgagctatcttaacagcattggtaggccatcatcttcttgtattaagttgtatattaacctaggacataacgtacgactagctaagagtcgtggggcaagtttaggtggttagcccatgctttgtgtgctagcctggggccagcattcggagcttcatgtttagcctcattgttagaagctttgaaactgaccttgtttccttgtgcatcagttgcccctaggtgccttgggggccaggcctgcaacaggcaagtggtcaatgcacctcccagattcttgctctcgcttcttctctggctcctacttttctcttgaactctgagagatttggggagatatgcctctatgattaaccatatagttgttgacggaacctcaatgctgggagtggaatgatcagctgtcgaactggcgtttcaagttttttgtacgcgtggtgtgatcccatctagaagggaagtcactttgtggcctaccgtaggaggtggtgtagtaaccttctcggggtttatccttaatggtcctctcgtgtttctaggagtttgcacgttggtatctatcaccattgggttgccataatcagccaggcctccccttcgagtttgtacaacaatcctattgacctgtcaaaactaagacaaagacttgtattttgttgggttttatgcccnnnnnnaaactccatttcaatgtaatccgtattattcaatatcaataaaagaaacagttatatttttcattcatttgtgtatgnnnnngttcaccttatcaattatttgtctgtttgatttataaattcatccaaacccttttcacttac

SEQ ID NO: 73892 - DNA, 1256 bp, Cannabis sativa
aaagtctgggaatatgtagatgtatttgatgattatcattcaattggatgtaaatggatctacaagaagaaaagaggtgctagtggagaagtcgaaactttctaagctagacttgtagaaaagcgttatacccaagagaaggtgtggtctatgaggatacttttagtccagttgccctgctcaaatccattagaatacttgtctccatagcagccgcttttgattatgaaatatgacattggatgtcaagacagatttcctcaacaaaatttttgtcgagacaatctatatggagcaatcagaaggttataaacttccagaacaagaaaagaaagtttgcaagataaataggtcgatttatcgacttaagtgggcttcactctcttggaacaaaaggtttgatgaaataagcaaaacctaccactttcaccaaaatgaagatgaaccttgtgtttaccaactcaaggataatcaaatggtaatattcctggtcctttatgttgatgacattttaatcattggcaacaatatcaagaaaatgattgacagaaaagaattgttaaacactcaattcaaaatgaaagacttgggtgaagctaattatgttcttggtattcaaattattagaaacttgaagaacagaccacttgttctctcgcaaacagctcacattgataaggtgctagagctcttctcaatgaccaatgccaaaagggctattattctttctagacatggcttgcaactatctaaggaactgtgtcccactaatccccaagagatagaagatatgaggaaatttccttatgcttcagcagttggaagtctaatgtatgttatgctatgcactagactagacattcgctatgtagtgggcattatgagcaggtatcaatcaaacccaagaaaggaacattggactgcagttaagcatattctgaaatacttatagaggataagggattatgtgttagtctacaagggtgtttctttaagtcctaggctatactgactcagatttcaaagcttgtcttgatgacaagaattctacatctaggatggtattcactcttgggggtggagcagttgttttgagaagtgtcaagcaatcggcaatatctgactctaccatggaggctgaatacatagctattactgaggctgctatggaactgttctcgctaagaaagttcttgaaagagcttagtgttgttctagatatggaaaaaccactagtgttactttgtgataacact

SEQ ID NO: 73893 - DNA, 1212 bp, Cannabis sativa
tggtaaaataaatttccaacagtcgtgctagtgggtaacaactaaactcgctagcagctactgatctaatccagcagtttctcttgtattcgataccacaggtctttaagattctacctatgtagtctccaatggcttgaaccttcgactcgattagttctacctcaaaggtgatgttaggatcgtagggagtctttgatttatgtggtttggaagtcatgatttcaaattctaggtcacctggttcaaaagtaatcgtgactctgggtaaaaataaaggcctagccaaaggaatagatgataaaccgaggggttcaggccaagcagcatctcacaagaaatgacatttgccttctgtaatttcttgcaagaagcctctgtggtgactagcaatatcatcctggtgggtttttactaagttgtcccaagttttgcatcatttatctctaatttggacttggatttggaaatattaggtttatacaggatgacaagttcactggagcactctgtttctaaaatttctggacgaaaaacttctgaaccagattgggacattgttacaaaaagaaagcaatcccgattccaggaggaaattcatcaaactagaaacttgtaaatttgagaaacccaaaagtctacggtctgcctaaactctaaaatttatccagaaacaattcaaccttaaatcactaaaaccagataaggagataaaaactgcaaactaagaagttagtgatcaaacccaaaaatgtgcaataaaaagcatataagaaaatagagagagatgaatcacttactgtgtgaagacgagttttggtgcaatgaatggttccacaatcgacgatgtaacggacgacgtggtgatctttctgagttcttgaggtcgaaaagcaaatttgacaaaactcgcaagaagaatgtcaaagataaagatggcatgcaaggttgtgaagaaatctgggtgaagttttttgtagaaagatttccagagtttttgaaatggcaaagatgatgaaaaggtggttccctttttcattttataccattgggtggatctccgtcagattaaggagataattgattcgacgactggtagaaataaggaagaagtagaaaagatggttaattaatgctcatgatgtgcctcgaaaccataaaactgccaaaattagaggacaagcattcttttcaaaatggattatgacaaaa

SEQ ID NO: 73894 - DNA, 1119 bp, Cannabis sativa
gtgggtggagatcgatggacgaaagagacaagaagaaagagagatcgagagagggaggaagacggcgagagaggagggcgatggtacataggcgtggatatggttttggagagttaagattttggttttagggtgtgggaaatggagaagaaataggtgcgaatgtgggaaatagaaaagaagtagttgggcacgtgggaaatatggcgaaaagtaggtaacgattttttattgggcccttaaaccgtcaggtataagggcgcaataaatttatgaattccaattaaaaccgtcgcctattcttgtaattactgttataaaccttcggaatagtaatttttcctcacaatttttagcagttacttaattttttttagtgacggttccccaaaaaaggcgtttttaggaccgtcgcgaattccgacttttgtagtagcggttgcatgtaatttatcccagtagtggaattttagcagagaccttaggcaggtcatgagtctatccatactcgccacataacttataaataccctaaattcacatatgaaagggaatgtccaacatagctaaaactttgctgatattatttttggttttcttcttcttgaaaaagaagctaaggataaagagttcgggtttcttgcttaaatattatatataaacacatcaaattcgctctaagaagctaatagaattgatcatagactaaggtttattaatacccaaactacataaaaaaaaaccttcatctctttatttcaggaatttataatttctttagttcttaaatatttacttttcgaaaatctcagtaaacattttggtgctttcatttagagctgaagaatgacataaaccactgtctctgccatacttttcacatgaaagacggttcctaagaagactcttcaaggtagcctcgagacggtcatggaggaagtaaatcccctctcgtcggagcacgccaagccgagcgatgcgagaggtggggatacgtccaacatcaatgattgagaggacgatccacgttgctgatgatagagatactgaaatgaacgaagaagagtaagacaatgacggttacgtcaaagacgagtattacaaagacgactatcatta

SEQ ID NO: 73895 - DNA, 847 bp, Cannabis sativa
tttatttagggcataaaacccaacacaggtttcttccagttcaagtgctcttgcatatccggttgagagtaattgccggcagacctcgtcttactcacagatcgcgtcctactcatagactttgtctttgagtgactcgcggatttattggttcccatactttctcgatcattacctcgttgagtactttctcctcttcgagttgatcaactgtgggttcttgaccacctcgaggtcacacttactttttcacgctctcctctttccccctaagagcagtttgtcgtatttcccccattagtgtctgtacgaatcctcgctctatgggtttgggaagaacgctggtgatttctaacaggtgacctccgttctcttggttgagtcccaagatcctcctcattatcgcgagggatatctcgttcatcagtttatggttgtctcccatctagctgttcattctaattttcagggggtatctcattttccctaggttattcttcccgggcattttcctgtctcctaggttgtgagccacgaggtctgcctcgtggtcttctcactccaggttcaggttgattttgagcattcatttcctatgcccccttggtcaaggctgcatcacgctctaactcagtgtttcgacgctacgactcttccagatagcgtctcaggcagtagttttccatttcataagttccttctcccatagattgggcacctccacgattgagctcttcatccctcgtcccggggttctggccactcccacacttagttctcctcgagcgtgttatccgcgtactaggaccaatatcgggttgggctctctgggaacgtgtggtccgtg

SEQ ID NO: 73896 - DNA, 576 bp, Cannabis sativa
aaaaaaaaaaaactataattttttataaaatttttttcataagaaagaaacagaaaaaatggaaagaaagaaaataaaagaaaaagaaagaaaaataatatattattgtttagaattagatttttttttcttaaatttatgttttcatacaaaaaaagttaaaaaaaattatatatatttgagtttcagatgaattcaagtgtaattcgatttttttttaagtttcagattaatgaaacttgagcctaaccatgtagttaactgggtgtaatccgaacttgacctctaacttttgattttttttttttaaagtttcgggctaagtaaatttgtcaaataggtgagtttttgaatcaaaatattcagcctttaacttaaaagtacaaaataacaatacacttggtcttgtacacttgcttttgtaattatcatttcaacttttataaatatacacaattcaataaaaatattattattaattgtttttatcgcaaaagtgatttattttataaaaaaaaactgttacatgaaagggtaaagggactaattaggaattgttagtattgtctagttagt

SEQ ID NO: 73897 - DNA, 1047 bp, Cannabis sativa
  modified_base (343)..(354): a, c, t, g, unknown or other
attcagccctaagccgtagttgaaacactataaaaggaacatgatgctctcactcatccacttttgacaatttaactattgcgttcaacctagatgagagagttccttccatagttattttacctcccttcaccatattcgaacccttagtgaaaaagtgtccacacatagcaagtcaagtactactcaatcataatgagtaagacggtggtaacaaaacccgaaagagagaaagaaatctaggttcaaatcttgataatgctctgggacagaaaggaattaagggctagagatcttgaacagaaggagtcattatattacactgcaaccaatgtaaggtttnnnnnnnnnnnntgtgtttaatttcattgttttatagatattcatatttaggatgttaatgaacatatttgttaataaatttaaatcctagtaaaatattcctaacatctagaatctttatgatgctttgaataatataatctaattgtttagagagctttgatatattgtaagagatatttttttgttcttcaatacattgggaagatatagacgccttaaggtgctaagaaaatattttgggttatttctgttggaatctcgattaatttcaataagtgagattgtttattagcgattctttgttgttgtttttgtttttttctgggtgtgataatttttcaaattttgaactcgtatttcatgtttgatgatacttattataggtagactcattgtgatgatcttcctctaaactccaagttagatttggaattcgacagatcatacgtagtctctatgttctaagttattgacatttttactagagtataattaagtgtatttttattagcttgtaagtgccaatttccacctcgttgaagtacaagaaattaagattttatctttccaaaaacttcagtcatgtatataatataccttatatagtatagcatatattataccttatgtagtatagcaggttgatctcttaaattaacagtaatcaagtgaatttttaaggttgattaaatatgtctgcct

SEQ ID NO: 73898 - DNA, 708 bp, Cannabis sativa
gttaccaacaacacacaaagtaattttcaataaataataataataataacaataaagtcattaagtaactcatacaaaaagaaaataaattataaaataataaacgtataaaaattattaatagcaaataatagagtaaatataaccatcttagttttagtttaaaacctttttaaggaagcaatgcttacactttgtctatatatttctacgtgagtaatctacttaaactgttctctctctcttctgagtcttcgcgagattatttgctgtaaggacgttttctgtgatgttcatcatttcttggtatttcatcttttactttgtaaacttcatctgataataattttttctacatgatgtttcttcggatcgcttagtctaatcggccagtacttccagtcttgaagagattattgattaattctgtacgtaagatatctgatcttttaggtaattttttgactttcttgggaacattttagaaatcaatataaagttctttctgctatttgatcatacgattcttctgataatgattttatttacatgatgtttcttttggattgcttagtctaattggccagtacttgtagtcttgaagtgattgttgctcaatacattttctgatcttgtaggtaactttgttggaaacattttagaaattaatatagagttctttcttgctatttgatcctaaattcttct

SEQ ID NO: 73899 - DNA, 769 bp, Cannabis sativa
  modified_base (84)..(87): a, c, t, g, unknown or other
  modified_base (738)..(743): a, c, t, g, unknown or other
aatatggattgtcgttctttgatcatttccttatgagatttgtatgattttatttcagcagttttttttctttttttctttttnnnnttttaaaaaaaaaaaattaaacatttatatattataatgcataatttgagactagagccgaaccttcaacacacacctatcctgttctttgaaataaattcattcttttaaaaaataaatgtacatttaaatatagagaaatttgcggccaaactcctttaagttttaattagtatacacttaaccccctgttctttttttttggtggtaaaacccccttaacttaacttctgtttgcaaatctattgtatcagttaaatttcagtgttaaatgccaactaggacaccaacttgtattgtcaatgtgtacatagacacagatggcatgtttttattggtctaaacaattttaattattttaataacttttattattttagtaattttcaaattattttaaaattacaaaactaatattattaattgaaaaaatatataatatcagatttttttgtttccttcttcactattaacgacagacacaccaccatcaccattaacggccaccatcccattacaacccatcaccaactattaacggcgccaccatcaccattaacggcaccaccatcgaccgccataacaaccaccgcaatttatttcgaacaatatcaaactcaacttcaaaccagggccggccctaggcatagnnnnnntaggcccgtgcctagggcccacactt

SEQ ID NO: 73900 - DNA, 699 bp, Cannabis sativa
actgaatctaacaaacttaacaatacatgttatcaggattatacttttttttttttttttgttatgctaatatatgtatgtatggtttgtgtttgtgtgagtacaggttctctattcgtttagctaaagtgattaagctcatgaagttggtgtctcttctctcaacatgttcaactaagatttatgtattgtgattacttttggtataattttagtgcatgaataattgtggttgatatatttttctatatgattttgaataatgtaattatagttatagtataggagacctcgtgtattattattctcctccaaccattcataaaaataaataataataatctccttcaacccaaaatttggttttgaatcagctatgtacataattaaattttaacatatttggtgtcaaaatttagtaaaaataattttaagttaaaaattaaaagtattatagagacaaagtgatatatttaaaaacaaaatatattaatgaaatgtaaaagtgtgagggtgatactctaatgtgagtagtacttttatgtatgtttggtgtctataactaaaaatgtgtatatttgagacatgtttagtgtctatattagtgtttcattttgatatgcttgatatcaaaattagtaaaatttgagttgtgtgaaaattaatcttttatgttttaagtttcaaagtttaagattt

SEQ ID NO: 73901 - DNA, 872 bp, Cannabis sativa
tttatgtagcgggcgagcatctccttgcctttcttagcttgtggaagcccttgcaaaggaggagtaggagcccgcatctgctcgaatccacccttgatcagctcggatccaccttttggttgctcaaacctgcccgaacttcctcctcgagaatccttggacttagcaagttttgtagtggaggggtttgcaatagttagttcctcagaaaggtcgataacctcctcccccccgacaggcgccttcttttccttagaaggggtcccctcactgcctctcgatttcttggccggaggagatgtgctggagcttccaccaattatcttcttcagagcatcaggcatcttttgagacatgtctgcatgaaacaaaaacaacatggttagagaaaacagacatcagaagcataaagcataatagtcaagaagattaaaaacaaaacggagtagtctgcaaaacgattgcccaagcaagacttgaaagtctgtcatcacctgacaagcctcttatctcagacataacagctttcccttttccgagcacgggagaaggcagtcaagcaggcgctgggctccctaatgcaaattgcctgttcaataggcctaggctgggccggaagtttcttcctccttttgagcggagtcacctgctctttctcagcctcatcttcaggattcaagggctcctgagtatattgcttggccgttgcacctcctttcaacttagcctcgtgcttcagttgaatcagctcatcctcctgataagctcgttcagcctgtctagcaccagatttcctcttcctccccttcactagcttaggaatgaaatccttcggataaagcctgtacttcacaaagttgtcctcggaggtc

SEQ ID NO: 73902 - DNA, 803 bp, Cannabis sativa
  modified_base (712)..(712): a, c, t, g, unknown or other
ttttttttttttgaatggtaaaagaaagattaataactaaagaatatgctaatccaaattaaggaccgcagaagaaattgcgagccaacatttgacaaaaataatccctcatctatgtgtaccatgaacggtccaatcacatagacataaaactatcttggattagagacaagatcaaataaggagctagagctagagaaggttcatacagaagaaaatcttgataatgcagccaccaaagtacttactcaaaataagtttacgcattgcttgaaacttatgagtattgaagctggatagttacttggtgagatccttcttgatgtgtttagagtcggtacttatgtgagaattagcatagaatttgtggtacttgtaattcccacaaaactgacaaaaacaatgctgaaaaaaaaataaaaaactgtgagaaacattttaggtacatgtttgaaaataacataatttgagataatgaagagggacttaaaagtcacatgaagcataaaaacaaaaagagaaaattatataatacattattttttatatttttacgtctaattttttttttaatatttttacgattttttataaaaacaaaaagaaaattatataaaattaatctaaaaataacatcaaaacaacaataaaaaataacatataaataataaaaaatcaacaataaattaacaagagtacaacataaaagtanatcaaaagaccatattttctgtaaataaaatcataaaatttgtaaaaaataatttaaattacatacaaacaattgtatttttataattttt

SEQ ID NO: 73903 - DNA, 1231 bp, Cannabis sativa
  modified_base (127)..(133): a, c, t, g, unknown or other
atgttgctaaaccatcattccactcaaatttaattagttatttattattttgaattatattaaatgtataactaaacttaccctaaaatttaatcatgtccgctattattatcattattattattannnnnnntattattattattattatcaagtagtagtacatgtacatatattttgttggggaagacactagactcacgggcaccttgggccaaatgcatatttgccttcattggagtgctcatctcaccacatcacacatgtaaattgatgcacacctttcagtatcaccaaaaggcaaaataaggatgatccacgcagaaatcttgaccgctcatttgattggaaaacagaactatatgtggcaggaggacccattcattcatataattgatgtcggtcataagttatataaagaatttggaaataaaatttgaagaagtcaacctaacactgctctttgcagctattctctaatcatctctctcattatcttgattcctctattttttaattcaaatgattgtaagattatttagaaaatttgtatcgaaaaatgataatgctcggacagtgatcggtcggttaatgatatctaattttaatttgtatttattgtaatcttgactaacacagaataaattgtggcctcaattatccctcatctttaaataaaagtaaaagatgagataagatacataaaaataagaagttcctatgtgattgataaatttgtgttagttcaccgttgttttttatatataaatatacctattaatggttagtgtatatatttataaggttaattaataaatttttcttcccgaattttgacatataccaaatcatactccttgaattttttttgctgttaaaaattccccctgaactaattagcctatttataaatatgagtaaactcttaatgggtattacctatgaatatattattagtcattagatcaaatctaatggttgatatttataactattaattaaatttttaaatttaatatttcttattttaacctattacctgatgatatggaagtcattttttatccactctttttattttatcctcattccatatatatgtatggagaattatatttacaccataaaattatagggacacgattttgtctcgtaatatacttttacggaatgtattccgtggtacattagatgagtcttagggtacgtacattaaatgagtgtcagagta

SEQ ID NO: 73904 - DNA, 738 bp, Cannabis sativa
aaaaaaatatgtcttaaacataatttagtaaaatatagtcaaatgactatttttcccctagggtctaaaaattagcataacaactagtaagggcatttatgtcctttcacaaattcacacacacatatataatcatacatatcacataagattaccatgtccatataattcactaaactagaccctgaacccggacaaacgcatttcgacttggagacttttttttgacttcagatcttctaaattgagatatgagtatgagaattgcatagaaaaatcttgaaaagcgatttcaaacgaaactagattcgcatcgatcaaagtaatattgagtaagttttggccattttactaaaggctgttcagaaaccgatttgtgaaaaatttgccgatgttcaactttggcaaaaaggtgaatattaagttatgaatttgacttgtcacaagtgatagtgttgtggtattctcaacacgcaagcatacgtatcgttagcaagtaatagactcacaaagagtgaggtcgatctcacaaggattgtagttaagtacttatatcaaaattaagagaaaattaaaattagaaagtaaataaagaaacaatgcaaataagaagcaagtaaatcaataagaaaattgaagataattaaaagttaaggttttcgatttcaattgtatctattgattatggtttaacatgattctattcctattaccaaattctatgcaatagcatgttta

SEQ ID NO: 73905 - DNA, 856 bp, Cannabis sativa
accgactctatactcgtgttggtatagggccaaccactgtaccatatgcactagagtatcgactcttcgtactcgtgttggtaaggccaaattgtactctcaggagttaccgagtgttgtaccacatgcattagagtgcctattctgtacccgtgttatagtaacaccgtaactactctaaaatcctacactgtactaacacacttaaactatatcattattagtgttaacagtgtaaacaaataataacatgcattcattcacatatatatactttatgctatcttacctcaattctgtattcaggtgtgccggtcagcttgagtgaaattgtagctcgacactttacagggccctaaaccacaatattcgaaattccgatgagagacacattaaaacacttctcagggactttaaagtcaaactagaaataaccctatcgataaaagacgtgacaataccctaaatatcaataattcagagaaaactagggttcctggaaaaaccccaattcgtaaaccaaattcccagccggttaactggttcactggggtttcctgagggacaaaccgctaaaccaatttctcaggacccactgaactgattaccggttcagtgcagggaaacccaagaatcaatctcctaaatacaaatcaatcctaaactttccaattatctccagaatacctgtatacactataatgaaccggattcaagcatcaaaacacaataaacaacccagaaaataaaatcgccattagagttcaaagcttgagctctcaaactccaacctcacctatacttcatagctaccaaccaaatcagctctaatcaacgtaaataatctcaacctaac

SEQ ID NO: 73906 - DNA, 687 bp, Cannabis sativa
atcaaaacacaagacctggactcggacctagacatagacccaaacctataatcagactcaaagctagagctgcacccagaccgaaactcgaaccaagaccggtatcgaaacacaggacttagacccagaacaaaacctggactcatatcgagatcagaacttgggacacggaccttgacctagacctagacccaggactcaaacccacactcggagcatgatccaaacatagactaaaatctagactagaacccaaactcaaacaaggacttgaatccccacccgaactcgaaacctaactcaaactcagaatcacaactggaactagaactgtaataggactaggaccaggacaaggacctaaacccgaacccgaaccaagattaaaacccagaccaagaaccaaacttgaactgagactaggactcaaacttgaacctagagcgggacccaaacctagaccacaatcaagacttgcacctagaatcgagatagggacctaggcaacggaactaggatcaagacctagtacccgacgcaagacccagacttgaacgtaggacctagctcgtgaccgagcacccaaaatggaaccagatcgggacccaagattgggatctggatcttgacccggggcatggatcgatcccgtagtcagtgtcaggatctaggacccagccccggacc

SEQ ID NO: 73907 - DNA, 727 bp, Cannabis sativa
gctttggaccaagatgttggcgaagatcagattttttctgattcaagtgctctcgcagatccggctgggagtaattactagtagaccttgttctactcatagattgtgtcttacttacggacctcgtcttgctcatggacttaattctcatactttcttgttcattagcgcgtcgagcactctctcctcttcgagttgatcgacagtgggtccttgagtgccccgaggtcaaacttgcttcttcacaccctattcttcccccgtgagcatggtttgttgtatttccccccactgggtttgtacgagacctctctctatgggttcgggaagaacgctggtgacctacgttccccgggttgtatcccagggtcttccttatttccatgaggaatttcctattcattggtttctggtttcctcccattctcatttctatgacagggtttaggctgatcatttggatttttaggggcaacctcattatccctaggttgttcttcctgagcggtttcccgtctcctggtttgtgagcaacgaggtttgcctcgtggtcttctcactatagggccaggttgattttgagtgttattcccctgtgccgccctagctgtggctgcatcacattctaattcagcgttccgctagtttgcctcctccaggcggggcctaagatggcggtataccatttcataattaccctcacttatgggctgagcacctccacgat

SEQ ID NO: 73908 - DNA, 786 bp, Cannabis sativa
atttgtatggtatatgttaagcaatggctgtcttagatgttatgatttcattttcataataaatcctgtttggtgtatgaaacagataattttgcctgaaaaatggatattagggtgaagcaagaaatgttgctctctcgtctcgttattcacaaagttatattatcataattacaaagttactaattttgttataatacatgagtaacaagttttatgattgttgttaacttttgcattatgttattagtttataattagtttttaccgtacatggaataaaagttttagactcgcttctattaatgtaatcagttaatgagatcgattttttttaacagaatgtttgtcctaaatgtgagagtttgttctttagactcgtttatagtttatagttagtttttaccatacatggaatataagttttagactcatttctattatttttcccattcaaatttctggcacaatcgtttgacgaaattttttttttatcagaatgtttgccctaaatgtgagtgtttgttcattttttcttttttttttttttttttttgaaacagatgagtgtttgctcttacaggggagatttgaagataaaatttgatttatttttggtttttattcatttccaattaatttctttatttttcacattttgttatttaaaaaaataaataaataattatacaaaaaaaaatgaagcccgtcattttaggaaattttatttacacctcaaaaatttctaaagacaccctattttaataatttttattttatttaaaa

SEQ ID NO: 73909 - DNA, 1001 bp, Cannabis sativa
ccagccactccaaaacatttacaaacttcatccttctccaccgtctttgtgctcgtcttcatccttctttaaattttcttttacaatgcttcaaattgcttttcacttgacgatccttgaaactttttttagattgcaagcttcgaatttcattcgcacacatacagatcaagatcaacaaaccaaattatgactaataaaaatttaaacaataaataagagattattatgcttaccattgtagtgccaaccttccaagagagagcagaggagaaggatggattgagagagagtggaggcgaggcatggcacgactcgtggtcacaaaggaaagagagctagaaaatgaaataaaaattacaaataactttaaaaaaatgagatctgatttttttaggggagttatatcttaagaggtgagaaataaaatttaagatgcgggaaataaaattttaaatctaaaacgcgttaagtttaaacatgggataattccaatttaaaaattgacagaatcttttaaggcaagtttaaaaactgtcgcctataccttcgaatagtttaaaaccatcgcgaataccttatttttcttgacggttttaaacactcgcttaatttttttagtgatggttagtatttttaggactatcgtaaacacccctttttgtagtagtgcaaataaatcactttgtcttcctctttgattttaacctccaaactactaagatcaaatctcattttttaaaattcattcatattgtcatcaagagatttaccttagcccatctagaagccatagaatttctacttcaagtaaatacgacctgacatactcttagtcatgaacatttgcttaagcctaatccaaattgtagacgtcgtggttttcttaaccacagttttaaggatcacatcttcgagacataaggtgaatgcattccaattccagtctttttattcaattccactaggtttcttgccatccattgatagagcttcaacca

SEQ ID NO: 73910 - DNA, 1152 bp, Cannabis sativa
aagagacaaaaagaccataatgtccttgcctacactaacagtcatacaaatcacttaggggtattttcgtcaatttcaaaatctcaactaatcccgacattttcaatgtctaactatattgccccgctataccaaaaatactaagatgtgattctaatagctaaacgccgcgttccaatgttgccaggcacaaaacatgcaaaaatatgaaattccatatatgactaataaaatacattctgaattcaaataaatctccgtaaactgataatttataactaatatgcaagtttcataattaaatcccatttatctgctaattcccaaattaaagttaagcaatccttacagaccatcttgcctcggaaagtataatcacgaggaaactatgggtagtatatagcgagacatccacctcgctacatataaggaaatattgacgagacaaatcagttgttggaacacttagcgtataattcacgttataatagctaagtgtaacaacttggaaacatggaggacatgattgtccagtctgcaaggccttatggtcaaagacctgttcttaagtttgctcaatacactagtgctcatgccattactggaaggcatatgaataaaccaagtcattattggtcatcaatgtacaaagcgagatgcctctagcaagatgcttctacccacgtcaagattaactccattgaagataggaatgataagcggatatgcagttatcgattgttatctacacgtgtttaatagaacgtgatcaacgcccacattttatgaaaaatagttatgtagttcaaatttaaatgtaaataactactaacctatattcctataaataggggcagattctacagaaaaagggacagaaaaatctttgggagaaacagatcacaaactgtaattctgtatccagaaatgtcttgaataagatggactcgtggaatatgcagagttaactgtaaaagcacattataacttggtgtcattattattattatttttctcaattttcttataaacatctatgtttaatttaatacgaaaaaaggcttattatttgttaacgaaaatatgcgttaacagtttggtgttttcattcagagcctatgtagtgatcgcttagcttaaatttggaaatta

SEQ ID NO: 73911 - DNA, 807 bp, Cannabis sativa
tatttttttatttttttattgttgaccaaaaaaaaaaaaaaatcaataacaggagtgactgcataatcaatttaaggtaattaatttcttatctcaatttggtgtaattctttattttttagatacatattctttactctttaaacactactgtcatatagtattaggtaggtcctaaaagttattatatatgtatatatacattatatatataaaaaaaacttgttttcaaattgtattgatcaagatctcaattgttatttttcctttcctgctataatttatgaaacaatttccataaaaaaatagtgaacctaaacattattattaaaaaaactttttatcggaatattgtatatatatcataaaaataatatgttatgatatatatatttatgtacatattttttaaaattattgttaaaaagatgtatattgtatatatattataattttaatattattattagaaaaattcttagattagatttgctctctaattatattaagtcttatatcataacatttctatgtatttattttgtggagggacaatgagcaattacacaagcagccatgtttgcattgcaaatcgatagtaatgcttaacttgatttaatatttacatcatgaaccaaatctcctaatattgagtgtgtggtggaacttttaagaatatagaacaattctttcacattcagtttaacaaaatattttaagtatcaaaatacttctttaattgagggcaactatataattttgataagaaagtttctctcgaagaattactaattttttttttttttt

SEQ ID NO: 73912 - DNA, 691 bp, Cannabis sativa
taaatgacattgtttttattttcgaaaataaatagttaaattgagaatgaaaaaaatttatttatttgatttttttttttcacttgaaattctcttaattcaatgaatgaataaacatgttatgattctccatgaaaattgattcacgagactcatactttttctgtatagaatatttcgaatcttgatacataagatgacattgcatgaggataataataatattcctagttagacttggcaatgatgagggtcaaaaaggtagattgataccctttcagaaagaaaagaaaagaaaaagattaatgagtgaaaaaaaaaaaaaaactctttaggggctgtttgttttaatggtttgggtacgtggggataggatgtttagtcttttctgtgtttgacacagtttttaaagtgagaaagtttggttattttgtgagacctatatgtttttacactatataagtttgtttatttatgacaaagattatggagttatatcacaaaattaattgatgatgagtaaaaatgtgtcaatataaatttaatttttacatatacaaagatatgaggacatacaaataaatacattttgggtagagctaacatcatgttttaaatgtagaagaaaaaaatgtacactttataatatatatgtacgtgtgtatacttaagtttatatgttatacaaatt

SEQ ID NO: 73913 - DNA, 821 bp, Cannabis sativa
ggcagccattatgcctaatacccttgtgagttataatattacttaatattgggttattttttactttaataaatattataaaaaattactgactaattataaagcgacactttatcgtagtattcagcacgtgaatgtctcatagcaatgctcattttaaaaagtaataaattagtattttggtctcttaaacttataacactactaaattatacctctaaaacatatatcatcttaaaaaaaaaaattaatctaacccttctatttatataaatataatatttttgttagcattcattcttttttattctttaaaaattgatatgatattattaattagtatggcttttgtctcgacattatctacttttaaatcatactttctcttaaaagagaaaataaaaattaattaatttttataattttttatcttttttaaaaaaagtagctttgtattattagtcaattaatatatttattgttgatttagatgagaaattttacatcttcattctttatgtttcattgaaaaattttgtaaatagaagaagaatgtttaagcaaacaaaaattcttacaactttttttagaaattaaggttatttggatattcaataataataaaaaataattgttaggattaaactcactcaatctctcaagtcagtatgtctatctatttgctcatcagatgaatacgaagaaaactgctgcaatatataacagttggttttaataccaacttaaaggggacccaccagcaactatatataggggttcctttattctaaaaagagaggtctgaggagagagttctgatc

SEQ ID NO: 73914 - DNA, 1239 bp, Cannabis sativa
  modified_base (1071)..(1087): a, c, t, g, unknown or other
agctggtagatagtacaacgactccttagcagcatttccaaggagaaagggaaagcccacaacttgatttgttctttagttattgatgtacgtttcatactagagcagacaatataaaactccttcagatgcttgttggggtcttcactagtcaatccatgaaaatggtagcaagtggatgaggttgaatttgagttcaaagttgacatccaaaggtggataatggatgcacagtggttgttggtccaaatttggcgcgtccaactccttcaacgtcttattttgagccatggtcttgtgagaagtaaccgagttgtcagaatctgactcgtgatcagttgatagtggttgtttgacaggaccaagaggttgaaagagtgggttgtcgatgatcgtctttgacgattgagaagcagacgatgactaaagatattgttaacccttaaaagtctctcttgagtatttcttgtactaaacacgtacacttgagattatgaaagtaaaaaaaaaaataggttaataaagcaaaaattaaatatgaacattaaaataaaaaaatagtccccaacaacggtgctaaaaatttaatgcgtgttgtaagtcacaataaatttactaatattcatttccaatacctccaattattttagcataattgtaagtaagggtcgatcccacaaggactatttttatttaataatcaaatattaatgacaaaagtttaaaaagggaggtgttatgtttagaaaaaacataaataaaaacaaatttaaagtgagactatgatatgagaaactagttaaaggttatttgccaccctcaacagtcattcctaattcctattaatgaatgcaattttagtttccaagtaaactattaatcccgtagataaagctgaagcagtcaattatcttaatccccctattacatgtaatcaagggaaaacagtcaataattaactcttttacctaagcagtaaatctacgaagcatgcaatttatttaacttagataaagctttaagatttatagagatacactaatctaggcaataaatcaatgaagcatatannnnnnnnnnnnnnnnntctattcttcatcacaattaaaatacctatgacaatattaaaaaatgtaatttatcacaaatacttaaaatcctagactattaggtgaatagtaatcctaagatgacaatagattaaagtaaaacctaatttagtgatcatctaaacaagat

SEQ ID NO: 73915 - DNA, 2019 bp, Cannabis sativa
ctatttaataaataatacaattttcttgtgtgataatattttaatttcattttttctctattgtattattttcatcaaaattttgacagcacaataacttaaaaatcataaactcaaaatttttaaaacctactaaaaacttaaacaaacattccaaaagagtatatgcaccaaaaaaaaattcatacatccaaagttaatcacagaacatacttcactatgaatgaatatttaagatatttaaactctactataacatgcataaacatattaaataatgatataaaatataaaatttctaatatggaaataaaatactaacctttcaaaagcaacaacaacacaagtccggtggcaggtagcaatgatacggggcagtaaaacaaatactaatttaaaaaaaaatcagataaaaaataaataaaaaggcaatcaatattatatatacaaatatacatacacatatacatatatatacatacacatacacatcaacatacacataattttacacatacatatacataattttacaagtacatatatattttacatacatatatataattttacacacatatatatataattttacacatacacatatatatacataatttacacaaatacatatatattcatacacatatttacacatatacacatatataaatagattaaaaattttaaaaaataaaatttaatttatatatatacatatgtgtacacatatatacctaatattatacccacatttatataaaaaatacaaatatttaatattataaaaaaaaaaaaaatacatggaatcatagaggtggtggatggtggtggtgcggtagtgtacggtggtggtcgacggtggtggatggtggtggtccgataatgaaaatagagagaaaaaaggagagatatttttgtgtgtgagagaatggtgtagtggatggtagtgatgtggtggtgcggtggtggtggtggcgtggtgtcgtggtggtggtgcggtggttgttgggaaaaaatttagaagaagaggaaggaagaagaagaataaatggtgaagggggacgtcccccctgttttatatatatatatggcacatttcgttacgctgacaaaagtaaatgttgggtcggcatagcatttaaaattaacctaaattgaaatggtgtgttttttgtaacacttttgttagagcgcatttgtgccggaaaaagtattcacacctaccaacctctcacgtagaaattttcctaccttgaaaaagttaaatttccccgctaaaaacaaatttcttttctcgggcacacttttgccagcgcaaatatgcgccggcaaaagttttccccccaaaagtttagttaggcggtgaaaatcccccaaaatatttttactttttgtcagcgcatgattgcaccgacaaaagttaatgaaccattgggaaatattcgcgccatgaggcggttcatttcacttgttttgctagcccaactcatgaattacgccagtattaagaacttttaccgacacattattacgctggtaaaagtgcaagatgaattttttcaattttaaggtaagcagctttccccggcaatttttaccggcacatttggccaaatgcgccagcaaaagtgcaatttattgtagtgaaaacttatttaaagttttaataagtaaaaaaaaaataaaaaggaaaaaaattaagtagggaaagtataaatgtaaaaatttccttgtcaaagtataaatgtaaaatttgaaaaaaaaaaaaaaaaaaaagttagtatttagtataaatttccttaggttaatattatgggtgcacatgagctgagttagctaggttaaaagtattttaatgggtcaacctaatgattttgcagtttgaataaggctataaattatattcaatttttttattgtacaacccaactctattagtataataatataaggggtgagttgtcctcatcaattcagtattgatggctatccattcttattggtgtcaaatcatga

SEQ ID NO: 73916 - DNA, 790 bp, Cannabis sativa
gcttcttatgggacaatggcggagtttagcaaaggagacaatggcggagcttcttcttcatcttactcagattctctcaccatattttcttcttcttgcaggtcgttatcgaatctaggagatgcgttcaaatctggcttcttgagtccggtcagatctgggaaaagtcgaatataggctgggttcccttgcccttcttctcggcttcaatgacaaactcactccacaaaatcgagatctcagtcgttatccgtagagatcttaatcgtcctccatcgatttttttttccagatcacaacttggtgtggatgggtttttccaagttttttttttttatgcttttgggtataaatctggttaggagttgggtgggggtggcttcgatatggtgtattgatggtggtgtggttatgggagagaggaattaaggttgtgtttgttgtggtggtggtggtggttatgggagagtggaagttactgtagagagagaagtggtttttgggaagagagaaatggtggttatggtgggagtggttttgggagagagagggagttacgaggagggagaagaaaaaattaattatgtaatttttttttaatttttaattatatatattatttatttttatttttttcattttaaaatattatttttattttttttaataacgtaatcacgcgggccaataaaattgtgccacgtgtatattgtatacacgtggacaatccagcatggcagttaacagctaaatttggacggaagtagtaaactgctaacagaatagtggt

SEQ ID NO: 73917 - DNA, 1025 bp, Cannabis sativa
  modified_base (998)..(999): a, c, t, g, unknown or other
ggtgatgctaacccgctacaggctgcccaagttgcccaaaaatgagaaaacaggtttgcagaaatgcaagctagaattaatgaacaagatgaagagattcggcggttgagacaacagggtgttcctgcgatcccttctccaaaaataccagtacctcctgcccctgctttgcaggccaaacctgtagttgtggtgaaccggatggaacccctgtatgaaaggtttcgtaagcaggcaccttcagttttcctgggaggtcccaatgtaatgaaagtcgagcaatggctaaatgtgatcaccagaatcttgaattttatgggcgtcaccgataatgatagagtgctctgtgcaacttttcaatttcaagaagatgctttagtttggtgggatatggtgtccatgattcacgatgttacgacaatgacctaggaaaagttccaggaactgttcaatgccaagtattacaacgaggcagtcaaacgtgctaaaagaaaagaattcacacagttgacttagaaggagaacatgagtgttactgaatacacgactcagtttgatcgcttggcgaggttggcctcgcgaattgtgccaaccgttttcaacaagaaagagaaatacctggatgggttgaatgcaaagatcagacacgacttaatgatcactactgatgacagtaccacctatgctgatatggtggataaggcacttcgagttgagggtgcaatgcagtgcaccttagagtctcgagggagtccggttgttagcggggctcttactcctcctacatcaagctttattaggggaggtagtggctcggccactaataagaaaagaaaggcacctactacattcagtggctcaggtcagaacaaaaggtttcgagggaatcagggtcgaggcagtcggcagggtaggtcggagacccgatacacttacccagagtgccccagttgtaaagagcaccatctaggggagtgtatgttgggttttatgccctnnataaaactctttacaatctgattagt

SEQ ID NO: 73918 - DNA, 723 bp, Cannabis sativa
ttttttacatttatatgggtttttctatgccataaattgtaaaaaaaaaagtgaatctcatatttttaaaacaacaataagttttgtcgaaaaagtcttaggcgcccgaaaagttagtgtctgtcgtcggaaaagtcactggaaaaattatcgtcaccggaaaagtcgtcagaaaagtcaccgtcgccgaaaaagtcatcggaaaagttaacgtcgctggaaaagtcaccagaagtaaatgtctctaatataactaaaaatataaccagttctatgaataaaaactaacaactcaaaccggttataattaaaatataaccggttcagtaacataataaataaatataaataaaataaaataactcaaaccaattataattaaaatatatagaatcggatctataatagtgttataatgaataaaaacaaataacacgaaataactcaaaccggctatataacataatgaaatacaaacaagtaacacgtaacaactcaaactgattacaataaaaaataaagaagaaatcagtttcaaaaatattaatatataaattaaaaacaaaactagtttcacaataaaatacttcataacacataatacctcataaaatcggttataattttttttttcaaaaaaaaaaagtggggatcaaattaatgtctcggatataataaataaagaattggttctatataactactacaaaaattacaattagc

SEQ ID NO: 73919 - DNA, 949 bp, Cannabis sativa
aattcctccagctgcacccaaacaggtaccttttgaacatcttctttcttatagttttcatttgggtcccaaggtttcataatcaccggccttcttttaaagaatatgtacccgccatttaagatctgatccctgtcctcaagagagtgaaatcgaatgataaaaatgccataagacaacattttcacccgatctactttcccctgccaaatcctgtgcacaaatccatccaaaatatggagtgggggattcactcttaacacatagcatactatggatggtttccaaaaatgaattttcatcttcaatgtcatccattgtaatcctcactttttttacattctgattaacatgcttaaaagaattctcaaggtttcgaactacagaatttgacctcgaaataggggggatcgaattcttaccagctgcaatttcactgttgcattggttgtttgcttggataaagtgtgcaaagtcattacaaaaatcctcttgtttgttaatcgcaaccagagatgatcttggcgagagaggttggaatacatcgttcagagcaggatcatcgtctctcgtcgcatcctcatcagataactccagggcttcaattccagctaccctttccatcgaaccagcctgtaccgcctcagttacctccttccttccttccttctttgagagtttcattgcagatttaggttttccatgattcttggatcttgttttagccatggcatcggctgaaccagctggaagagcagaaaccgtgaaaaacctacgtattttgaaaatttaagaaccatgcaccacattaccatattcatctctcttagttttaaatatccatttacaaacaattggttttatacattctggtgggacaactttcaaaattttattgtcttgcatagacttattttctttattcatggcatcattccacttttgagag

SEQ ID NO: 73920 - DNA, 1253 bp, Cannabis sativa
agagtggctcccatgcttgcggcgcggtcctgttcgtgagatgctagtggaatgaattggtggctggaggaaatggttttgtgggcttctttgattaatgaaagggtttttttcaatattatacataaaattaattttatttacaaaaataccattaagagaattatttgcacaaatatcgttgtgccacgtcagcgtacataccgaatttcaaaacaattatcgaaaatgaaaaaaactggaaaaatctcgtttccagaaattttcgctttttgggaattttgaaaaaagtaactatttagttgctttagatgtgaataagatatcaattagttacttttccattaaataatttatttcaaaattttatacatatataaataataaaataattattttaatatgtgaaaaatatatatttttctttctccaaaaaagacgactaatagtaaaagaatttttttttcttttttatattttgaggctatattatgttattttattatttaaaatacctcgagattactttttttctttttaatgtaactcatatgatgttacatatactacttaatttatttacaaattattttataaacctattaaaatagttttataaaaataagttttttttatttaatcttgtaatgtctaaatataaaaataaaaaatacatattttttagtaatttattaagttatttgatacattaaaatttatttaaatttaagtattgtttatttatttattaataaaatataaagaaatatatatattttttagtaatttatggagttatttgatatacacggattaaaacattgtttattttttaattaaaaaaataaaataaaaaaatctttaaaaattaaatgttttttaataaatattaaatattctattatatgtgtcgaaaaaaaaagaaaaaattcaacaacataacaaaataaaagtataaatatatatatatgatattatgatgatatgtctcatagagaagaaaaaaaaagtagacagactcatcattataatatgaatggaaagagagagaaataaaatgttagaaaaaaaaaaaaactagagagaagggtctaatgtgtaagaatatatatgttttactggtatgcttataaacggtatatttgccaaataattgaccaacaatattgtaacaattaattttaaattttagtccgttgatgcaattaattctaattgaaaagaggtacaaaagcccacttttgtcttcacac

SEQ ID NO: 73921 - DNA, 867 bp, Cannabis sativa
taagaacgactatgttgcaagagagattgagtggattagctatgttgtcaattgaaaataatttgctagataaacttgaatacaatgatttgattaacaaatttgcatcccaaaaagcaagaaagatagatgaatcatatctgtgttattttttctaataattttgaataaactaatgttattattaagttttatagattggagattgttcgatgtgataaacttgaagaaggaagacatacttttgggatagatcgatcaacaaatttgaataatattttgattgtacttttatttagaatatttaaatttactaaataaatgtaaaggaagttatgaggtattgtttttttttttttagttaaatttatgaagaattgattaatgattttacttttaataaaagatccaattttaattttcgcacaaggcccccaaattggttgggccgaccctggtgacagttataaccgttagtttgttatcatgaatctgttaccgttagttatcctcgctgtaactaattctctttctcttctagctcgtattctgtcactatataaatcatgtacgatcatttgcctattgaataagattgctctttgtttcaacaatcttcctttgttttcctttcagcttttctttctgtctttacctctgttcttcttcttgctctgtttttttgttctgagtttgatcatggccaagagattcaacactccacaattggaaaatgaaagaagcaagatggagcttgaggtgtctccagacatctcacatctcctttatctctaaacacccacaaaaacatcactatgttttctcatacatgacacatgataaaattacgagggggggggggggggg

SEQ ID NO: 73922 - DNA, 785 bp, Cannabis sativa
aatatttctaaccatattttaactttcttattatttattttatattttcaaatgaaatgattgtaataagaaattgattgctttctattttaattatggtgaatcgatttacacaccatgtttttcgtaaagtataagaatcaaaaccctttatatcaaatttacaaatccaacctatatatagacacactcaaatttaactatgtgagttttggttaagaatataatatacgttatctaattaagaaaattttaaaaatacgtgtatatatataattatatccaaatgacacaccaatgtagtattagctaaattttttttcttaaagatcaaaatctcaaatcccatttaaaaactaaaaaaatgcattacttaattaaaaaaaattaaacatacatgtattatacttaacatcaactaattgaaactaattaaaaaaaactaatgatacgtggattgcacgtaatatcaaccttatatatatatatttatatatttataatctttccaaacattgatagtaatggaatattgacgataaaagttatagaatgcagatagtaaacttcaattttctattattttttttagggtaaatggcggcaaaacctctaaaacttttattttggtttcacttaaccctcaaaacccaaatttggacggtaaaacctccaatactcgtcttctgttagcaatttaacatttccgtccattttaggtgttaagtgccatgttggattgaacacagtgtacacgtggcagaattttattagtccacgtaaaa

SEQ ID NO: 73923 - DNA, 564 bp, Cannabis sativa
ataaccaacttaaaataatttttagcatgaacataatcagaaaatgtatttagttttattataatattaacgctagatcgagttagttactattattttgacaaaaaataagctcagaactattttatactatttttaaaaatacaggttcaaatttataatttaacaaaataaatggtcaaatcgataatttttgcaaaatacagagttcaaaatagtgttcacctttcaaaaattacattgtaattaaaattagatgtatatgagtttatttaacaagataattgtacattaatttcaaaaaaaaaaaaaaaacataggcatgtttagtaaccattttgtttttaatttttcctaattttacttaacaaaagttgttttttttctccttattagtttttttttttatttttttcggattaaatcacacaaaatatagtatttatctaattactaaaactttattatggaattaagatttggtatataaacaccacaaattactcacacatgagtaatatgggacaaacccctcaattttaaatttttgggtattcacctttt

SEQ ID NO: 73924 - DNA, 775 bp, Cannabis sativa
ttcatcttcatcaaaaatggggaacttttggggaagaaacaacacttcatgggtgccaaaaacaaggcccagcacccaggttgacacctagggctagcccaatgctcaagctgacattttgtcaacatgggccaatttcgatgatgttttcctagagatcattcgagcatcttctctgtttttcagaaaagattgagattcaactatttttagggaccaaacaaaacttttgaagggccataagggggacctaacgccaggttaactttgggagctccgagatagaagtttggacttcaataacttgaatccaactcactatctttcagtattatgtaccatgaatacatggagcaacctaatccaagccctcaaagctaaaattacacgaacctacagcccggaagctaacctgggcacatagggtttcacccaacccccaggttgacattcccatctagggtttcaatttctgggaccgtcttagtacaaatgggtcaaacttgacatggggacataaactagacataccgaaaacatacttgaggcattagaatcaattcgaagcaagtttatttttgagtatccggggcctgagcaccctagtgtcctggttaataatttgtcaatctaagtgccttgcaagtatcagattgacgatccgacttttgcatcttccccgtcttcataaaaaatgaggaaataggtacttttagggaagaaacaacacttcctaggtggcagaagtgtaacgtccccgcttcaagcctctatt

SEQ ID NO: 73925 - DNA, 722 bp, Cannabis sativa
gtgagttgtactgccacgtggcacggatgttggccacataaacatgctatgtcaggtgggaaaaaattgggataatattcaccccctaagtccctgtacggacatctgtgcggataaggaatttccagcttagttgggattgatgtagccttaactgggtaaatcttccaacatatttagccttgaaataattgctcttgactgtttgatctcacttgttgcagtaagttaactgcactgctcttctgcatgctttttagttgaacactacatggcaagtaaaaatgtggtcccacagaagctatataagcttatgtgggaaaccacacttcaatttccacatttcattctctctctagaaaaaaaacttttgaaagctcctcgttctcactagaggctgacgccccacattgcttcaactctagagaatttcgtgccaatttgacgatcaaagcttcccattcctttcaccaaaggtttcttgtagtgggtaagctttgtattcccattatttacttgttttagtttatttttctatggttgcatgaagcttttcttcactttgaatatttttttattcccacgttagattgtaatttttttggtatttttatccgtataatagtcttaggatgtataatatgtgatttcttgacaaaaaagatatgattttgacctttattgtgattcctggctctttaagtcacgaagaataggaagaa

SEQ ID NO: 73926 - DNA, 690 bp, Cannabis sativa
gaactagagtgtggaggaattgaggtagtttttcatttttaattgaattctcttgctgaattttatgttggaaaaaaaagcttggatttgtgattttgatcttgtaaatgcatgtttgtgttcttgagttaatttgagcatgttattgcataaatttttgtttgtttgatgcttagaattttaattaagctttagttgggaatttggaggtgatttttaacttgagccaatgtgtttttgagatgttttcatggctggaatttatttgagttgttgagaggaagctcttgttcaagagcttaaagtgccattgttatgcatgatctttgtgttgtttgagaagtttaaagttttaagtttatggcttgaattaatgtttggagcatgaatttaaattccttgttgattgctagcaactatatttgttaatttgtgggtttggttgagaaattggagtgaaagattgagttttcttgctgaaattcgtggaagggctgctggttttctgggttctagcatgccgcggcccgccccttttggtggaacctgggttttgtcccaggtgtcgcggcatggtttgggcatgtcacggcccgcccacgtgatttttgggcagtttgtgttgaaactttgaaaatgcataacttttgattccgaactctgatttgggagttctttatatcgttggaa

SEQ ID NO: 73927 - DNA, 734 bp, Cannabis sativa
  modified_base (649)..(651): a, c, t, g, unknown or other
gtagctgtcaaattaatgttgattataaaagtaaaaatatactaaaagtgtacaggatccaatctaattcaattaaaccgaattaatctaatctaatttaattataaaaaagttagatatttaattacaattaaattggattggatgttaaaagttgaatttcatttaaatttggttagtttgaaccgatccaatccaattacatctaatacatattcaaaaaattatatatatttatttatatataataaaaaaatatttttattagtttttcttggttgaatttgtaataattagttgttttatgtatttattttcatgatgttttgttctattttattagttggtagtattattgttttagttatttcaaatttttagaaggatgatatatttatatttattaaacttaaatgaaggtttatattcagtttttaggtatttttttttcattttttaagttaatattaaaaattaggtgtgtaattaaatatccaattaaaaaaaccgatccaatccaattagtagtatccaaatcaaatgatgattttctaaatttaattactgattagattggaccggattaaaaaaatgtcagattggatcagatgtctaacctaaaatataccatatacagtagaacctctannnaagaatacacttgggaccaaaaaaattatattctaattgagaggttataactaaatagaactacacactagacaaaaaaaaaa

SEQ ID NO: 73928 - DNA, 1308 bp, Cannabis sativa
gtatattgctaggtagatgtagatgcatatatttagtttattcatttgaaacgtttttgtaaaatgcaatgataagtttttttgtttctttagtttactagtagacgggtacatattaaaattatattgttatctagttaattttttattttttaattatatattacccacactactacaatttagccttttagtgatactatttagtgacatgcagttttgtgtgggtcactaaagagttagaagtgattttaagtgacacacacaactagactgtaaacttacgatgttagtctcttgtaatgtgtgtcactaaaaatatgaagcgtcactaaagaataatacccatcattttctatttttttatttaaaatgttgacctatagagtcacgctaagcgtgttgggacatgtgtatttagtcacgccaagcgtgtcactatatgttaaaaaatttaaattattttaaataaatttaattatgataaagtgacgcgctaagcgtgttgggacatgtgtatgcagtcacgccaggcatgtcaccatatgtaaaaaaaaaaggtagaccatattttttttattaaaaggcagaccaaatttttaatttattacctagcaaatttttaatttattttttttaattttatttatttaggtttggtataaaaggaaaaggatgaaaccttaaagcccaaagtcacttttcatcttctaagtcacgagctctctgttctctattccctcaccggcgacagccttcattagacgttatccagccgtccatgcccaagaaaaaccttgaggttgctttctctttctcgtccctctcccctaatttatctctctctctctctctctcgcccgttgctctcgactccatcacaataagacactttcgacgacttttggccatctccacctcccgcgatcctcttctatttctcttgttctctctcgatagttcaagggggcgcccaagttatttttttctctttttgttttgtgtatttctctgtttctttatacctctctctctctctctctctcatttatgcaagtggcgacgttaaagcaagtgggtcttggttgttttgcgtttgacggatttggtatttgaaagggagttctgggttcgaatcttggttggcgggggttgggccttcggtgtttgatgagaaaaattgattggaagttttttttggttttttttaaggatttactttgtatctatttcgaattttggatcttattttgaattgttatgacttagaattaatgttcatacctgtaaatattgaatgattgttgt

SEQ ID NO: 73929 - DNA, 1092 bp, Cannabis sativa
ttggatatccaactttttgtaattggattggattggatggatgatgcccacccctaatgtagatgactaggaatacgatcacaataatggaatcttgactttcctaacatatcgaatgttggttccttttaagtgttaattctggaactgaaaaattgtgcataaatttagattagatctaaattatactttcactagtgaattaatgatactaaaggataaagaactaattagaaaaataaaatagtaatttgactaaaaataattacgaaccgacacagggagagctaattactgaaattgattatatcaatggacactacagtaaaactcaataaatataatttcataattactaagagttcaattctatatttatagtagagtaatcgtggaattaataaacatgattatttagttgatgagactcaataaataatcttgcttattggagcttagaattataggtccatagtccccgaattgccacatcaaaatactgtcaagggtaggggtaaaatgttgtataatattgtttagaaaaatttatttttaatttacaaaataataattatttatttttgtaataaataatttattttttcaaattaattaaataggaaaaaagaaaaaaattgtcagtacaaaagacacatttcttatcttaaacaagacagaagaggcactacgtgcacttaatacaattcgataaatgtttgaatttaaaaagtagttaaaaatattttcagttggttgagatattattccctcaaaatagttgagatattctcttaaagttagttaagatattctctcatgtagttgtcctcatcaattatatatttttttgaataattaaatataatttaattaattgaatgttaactactataaatataagcctaatttgaaaaatcggaacacttattttttctatgctatttccaaatacagagaagagaaattatttttatctcaagaacggttatttctcatgtgttgagaattcaataagaacaaattatacactttgtcctagtagcccacactactccttgtgtgtggtggatcgaatcggaagattggattcaa

SEQ ID NO: 73930 - DNA, 1047 bp, Cannabis sativa
aatatattttacttgaaaaatctcttattttatattatttacttaataacctaaaataactaatttatgatataattatatcatggctactagctattagtaagaatttaaaatcttaaaataatttagtaaaataaaatatatattaaatcaattaaacattacacattttttttcttacaaaaattattaaaattctatacttgatgttaatatactcgaccatttttaaaatgagctcacaacaatattaagcatctcaagaatatcaaaattcacaaaatactttaagtccatagagctaatattttaatattcttcaaggctaagatccttaagtaatcaatttgactattaaattattattttatttaatgtttatttttatttatgttgttctttttagttttataacttagtgttatgttatttttattttatttaatatagtatttttgttattgttattttgtatttttaaatatattatataaattttaatttatgtactacaatgtaagattatttttaaaaataaaataaaataagagttagaataaaaaaaaagttttacgctaaattagtaaatttaaaatccaacatcatttatagtgtaaattttagtacataatttaatattatcattaaagtaaaataaagtaaaaatttcatacgaatttagtaaaatagttcacatttgagatgtagggatcgctaccttttatcttaaatattgtattcgtgcacaaaatatataagatataccccttttagttttgagttttgaccatgttttaccttcaatataaatgtgcttgaattgcaaatgtatatattaatatagtattatagtttccattttaatatatatagtgttaaggagtatgtttgaaattgttgttttttatttttaaaaatgtgttatcaaaattaagaacaaaaaataatttttaaagttttcaaaacagaagtcacgtttggttaatgtttttaaagaagaatttttatttttaacaaaaaatagtttttaaagttttcaaaacacaa

SEQ ID NO: 73931 - DNA, 734 bp, Cannabis sativa
tttgaataagttaatcatcaagttgctaattctggtagccacctttgtatatattcttgattgtatataacccgaactttgggattctcatcaataagactgatttcttcttcttcaattcctttatcttcctctctttctcttaaactctttattgattttataatggtctagaagaactaataattagtaactaatgaactatttctcaacttccagcaaaaaaagaaaattaactatttgtcaacaacggagattgacaagttatcccatgaattgtttaatattttgtcataacaaagctaattatgtaaaccaattgatcactccaattctccaaacatgtttatgaattgtatactttatgtacaaactctttcaaacacaagcagagagttcctcgttcaaaagttatcgtaagaaaataaataaataaattaatctgtttggattttacaggtacctgaatgttcttcatgttagcatttgttatcctgggaatcaaatttctaagtggttcaactaccgacgcaacgggtcttctatacacgttaagcttccacatcaatggaggaactccaacttcttgggattttctctgtgttgttgcagtgcctttttcagaggacaatttccaccagcaaatgtggaagaaagattacccccatttttgtatacgtttatcggtaatggaggaagaaagataggtatttttgaatggggataatatattt

SEQ ID NO: 73932 - DNA, 981 bp, Cannabis sativa
acattattgttaaaaatttctttacaagtttttgttcaaaaaaaaaattctttacgagtttgtacatgtgagtttatttaaattttattaattaatttgttgtttatttttagtaaaattaatatgaacacttcttgcaatattaacacatggtccgatgaatataacataaactatttttctcttttctctctaattctcttatttttaatattttattagagtataaatctacaaattgatattttactattattttaataacttttccataaaaatatctaacataaactaattattttctgaaaaaaaaaaaacactatatacataataccatcccacgtttgacactctaaaatcttttcaaaactatttttctcttttctccctaattctctcatttgtaatattttattagagtataaatttacgaattgatattttactatgattttaataaattttccaaaaaaataccacacataaactaattattttcataaaaaaaccactatatatataatataccaccacacgttttcttattattattattattattattattattattatataagacagtgagatgacgctctaaaatcgtacattattgttgttgttattgttgttgttattattattattacataagacggtgacatgaagctctaaaattgtaagttattgttattattattattattaccttgaaactgaaagtctattgtgtgttcaatctatctataaatgccattcttccctctaaatttggcttgattgtgaatagctgtcgtgtgttactttcctctactagtaatgtatttacgttttgttaaacgatctacaaataagacaactcattgtattgcgagaaactcttgtttaaccatacatgtcgtgttattattcagtgtgttgatagttcattctcttgtaattgatgaaatttctttgtaatgaaattttaaattttattca

SEQ ID NO: 73933 - DNA, 724 bp, Cannabis sativa
tctctctctctctctctctataggatactcacaacagatacacacacattgtaccaatcgggcgtcccactggagctagtgttcggccgccttacgtagaagaaacttgaaaccaaccaaactctaagaaagacactcctttagaaaataatgggtatgtaatttctttagtaattattgtttgatttagttgtatttatgttgatattaatagatctacacatatccttgtttttatgtaccatttttgtcaatgaaacacgaaatgcaacaagtttgcatttttctggttttttgcaattttagcgatattttacgatttgattagtgacatctagcgattaaagggctagcgtaaggttagggatgaaatttatcgatatgtatcgatatgtcgcgacacattgcattcttgtgctatgttgacgatattttttcaattttctcgataattttgcgacgtttgtcgatatatgctgttattgatcatttccacgataatttgctattactttcgcgatattttgcgacatataagtttgtcataatttttggtaatttttgtttgcagattcaaatgtgtttgtagttgtactgtatgatggggcttgggcagctgaaggtttcaactggatattcaataacccaaaaagtaattagatgttaatgttgaggttgacacaactttacaaaagatgaatgaaattttgtatgaagagttgga

SEQ ID NO: 73934 - DNA, 749 bp, Cannabis sativa
aaaaaaaaaaaaataatttattgatataacattatgttgcattttgtagagttttgtagtttctttaactttttcattaaaagatttgtcagaactaaaaagaaaatttattgatataacactgcctactaagagtctccaaaaatacatgctcaatttcatgtggaaattctgccaagattttagtatcgtcgaaaatttaatatagtttcacaatgaaaggacttccaatagtagtttaaaaaatagaatatatattaaaaaaaaaaataccattttggattctatgtttagcaaaagttataaattggatcctctgttttattaaatgataaaatagattatatcttatattttctaaaatggtaaaaataggactctaagcttaatttttgacaattttttttaatataaccaacttgaagatagttcctaatatgaatagatacaaaaaatataaatagttttatcataacacattacgatcagatttttattaaattttattttgacaaaaaatcaattcagggtcctagtactattttgaaaaatacagagtttattttatcatttaacaaaacagatggttcaattgataatttttgcaaaatatagggtctaaagtaggatttaccctatatatatatatatatatgtacactcttagtaggtattacccatgaacgggtaatattagaaaaatttgagtttttataattaatttttctatttaattagatttttttttt

SEQ ID NO: 73935 - DNA, 893 bp, Cannabis sativa
aaccagaacgtgaccaggaccctggaacaggaccgggaccgtgaccaggacttggacctagactgggacccgaaactcaaccagaaccaagcctcgaaactcaggctcggacccagtcccaaacccagactaggacggagactcgacctgaatccgaacccaaactcaagactcaatcccaaacccagaccaggtccctaacataaactgggattcagacctggacatggacacgaaccagacctggactcaaataccgacccatacccagactggcatcgcagcacgggacctggacccagacgtagacccagacccaaacctgggaaccaaacctatacatggactcagacctagacccagaccaagatcaaaaaaacccgtactcagactcgaactaagactcggaccctaacccaacctggacccagacccgaacttggaaccgaactcggacacggaatcagaactagaactgtgactaggacccaaagctaagacaagaaccgaacacgaacaagaacccaaacttagactgagaccttgactaggacagagacccgagacctgggacccgaaccttcaccgggacccagaccgggacctagacctaacctcgtcctaaaccctcgtcacgacctgagacccgcaacccacaccaggatccagaccctgacaaggacctgaacctgaactcggaccaagaccaagacctggacctaaatccaaaccgagacctggactaaaaccaagacttacaacccaaacccgaacttggacctagaccaagacctaagaactagacttggataggggacctagaccacgcacctaggccccggaacccagacccaaatctaaatccaggactcgaacccaacccaggacttgac

SEQ ID NO: 73936 - DNA, 694 bp, Cannabis sativa
aatatatatatatttataatatttgcttttcttcatatttttgtcacttttatttttgcggtgatcaaataatcaaaacgcaataaacactttcaatttctcatgagatatatgtgatgcaataacttgaataattactgtctgagatgttatatggtcacctactcatgaccttaatttgtcttagtttgtatattaccgaaaagaaagaaagaaagaaaaatcagtaatttgtatgtttttatatatataatgagatcaacatgcaatgaaaaggtaaacaagaagaacaaaaaataaaaatgtgaatcatattgcaaatattgtgtaaaatgtataagtaattgtgtattttggtgtatttattgtgtaatactagttcatcatgatcttctatgtatatgctgaatatgaaagcctatccatatggtggaactttacacatcttgaacttttcaatctatatatatatataggatttttataagatagagaattttgaaaatgtcttatttgtgaggatttattataaattgggtcccattatggtatatggccactacaatgttacaatgtggtgtagtgtaggaaattagtattacactacaagaaaagacctttttaccggtgcagttcgtcaaatgcgccggtaaaagttgtcgacgtaaaagaaaaactgaaaacccatttacat

SEQ ID NO: 73937 - DNA, 1485 bp, Cannabis sativa
  modified_base (907)..(915): a, c, t, g, unknown or other
  modified_base (1177)..(1177): a, c, t, g, unknown or other
  modified_base (1402)..(1416): a, c, t, g, unknown or other
gccaacaagaagctgtttgctgcccagaagaagataactgagctgagtaaggatcttgaggtttcttaccgtcttgaggagaccatggagaccttatctgcggaagtgaactttgtttaggatgagaggacttctcatcgaacagttcttcatcgagtgaaggaggagaaggaagctaaggaggaggagctttcgactgaggtggcgaggttgaaagagaaggttaatgctgtagagatagtcagtcttgagcttttctttgacttttgtcaggctaatcctcaggccaactttgactacttaggtgatgctaaggacatgtaccttgaaatctgtgcgtcccaagtggcttatggtgaaactgaggcagatacttcaacctccggttagactgcttatgtacctcctaatcaaacaacaaatcctccaactccaattggcccagaagacccgaaccaagagcctgggactccaactgtttaaacacttctccttttatctctttactctttatatatcttattcggccacaaggccttttctaagacatgatgatcagtcaagcggtcttttaactgggaattatttttatttttcagacaacaggctgaccagccagctttttatcccggtattacatgcttttgttatccttaatgactttcattctctgtttataattgtcgtgcaattgtgattgttttatttttaccaagtgctttgtacaggtataggtgccccctaagtgaccgagcagacttatgactcttggtcacttgtcttttacaagtatattattattatttcggtattttgggtttgacagaaccttttgtacgcactgtatggtaaattaaaaacatgctgatgatgtcgactcaatctgaattttgaaataactatcttnnnnnnnnnattgatcgaaaagtgtatttgttatcgtagtaacttacatcagagttatttgatccaatatgatcttttatcttaacatgagataaaacaaattgcagacataagaaactgtactttaaaattgtcacccaacctaagtactttttttttttatcgaaacctttgagcgtagtccgcccagcaggccattcacttaaaagtaaatgttcattcagtacttaaagtggtcatccgacatggtactttattggtagtattttcntaaatgttccccattccaataccgtggtactaggatgagttgcatttttttctcatacttacctaatttgtatgctccggagttgagaacttcaaccacttcatatggtccttccgagttaggtccgagtacacctgccgtactatctttggtgtttaggaatacccttctgaggaccatatctcccacgattaattttttagctttcacttgtttgttgaaatnnnnnnnnnnnnnnngttgatgggccatcaactttaagtttacagtggctcgtctttcttcgatttcatcaagtgattctgcta

SEQ ID NO: 73938 - DNA, 812 bp, Cannabis sativa
tgcttccacttgtccattgtcttgtggataggtaaccgctgagaaactcttaatgattccatgtctaatgcagaaaccactaaagaggtcgctgtcaaactgtatgttgttgtctaacactgtcttttgtggaagtccaaatcaaaaaaataatattcttaaccacaaaatcaagaactttgtttgatgtgatggtggctaagggctctgcctcgacccatttggtgaagtagtcaactgaaaccactgcatattgaacatcgcctttccccttaggtagtgaacctatgaggtcaattttctagacacaaaatagccaaggtatttgcatactcttgagttcgttttgggtagctctgggtattttggagaacctctgacatttgtcacactttttgacataatccatagagtcttcttccattgtcggtcaaaagtacaattgtctcaagatcttctttgagaggctttgcccccatcatggttgccacaaaagccctcatgtacctcgaccatgaggagtttggattcttcttttgtgacacacctcaaaagaggcattgagaagcttcttctgttcattactccgtccacgatgataaaagcgagctgcttttctcatcagtctcttagcttcgttctgattagttagaagaataccttgttctaagtattgtgtaatcggggtcatccacgatggagtgttgtcaattatcaggatagactcttagtctttgttaatgctctatttggagagatattcgatgggaactacattgagagtgttagaatctattgtactagctagttta

SEQ ID NO: 73939 - DNA, 915 bp, Cannabis sativa
ataggcccttgaaaagagttccctcgcaaaaccctgtatcaacacaaacaagtagctaactattgtgaatatacagatatagacattgcaaactaactattcagttcaacttttcttacaagtcagtaagatttgaccaacttcctatgaaatgaggtatcttgcctgtgagttcattatccgatgcaaaactggtaaataaaagatcctcatgtcataattagacaacaaactttttaaacgtattttaaattatatcatatcatcataagagggtacatagaagaaaagtttacaatctttttatgcttcggagattttcaaatgttgaaggaatctcgccactaactccacaactggaaaaactactataaaataaacaaggaaaagcaaagtaatcaggatagatattgggaccaatttacaactccattactcattaagttgaataggaaatctcaaaggataaattgttaccaccaacttacaaaatttctaatttggtcaaattccctagttctggcggcagcggaccagagaaattattcgatagaatgtacctatattcaaaattatttccaaaaattaatgtgaataataatgtgattgagttggtcaatggaaatttcataaagaataacttacaaagtagatagctgagtaagtagtcccaattcctttgggacctctcctgacaatgcattcatacctaagtaccttgtagtaatcccaaaaagaaaaggataagtaaagagaaatattttgaacatatatcatactaagttttgttagttagttccaagctcaaattttaagtttgtaggcttacaagtattgcaagttagtgaggtttccaattgatggagaaagagaacccgtcaagaaattgcggcccaaattcctacaaaaaatgat

SEQ ID NO: 73940 - DNA, 917 bp, Cannabis sativa
agccactctgggcatacattagcaaattcatgacgaaagcaaccaaggtgtcgcgggtaaccgaggatggaaagttatccgcgatactgggggacattgaagtccttcgtgaactatggaacgatataaggaaaaacggaccggtcgactcaatgagtgatttcctcgaccgagccgaaggcttcatcaagctcgaagaagccattcaaagagcagaaggtgagaaaaagctgggcaaaacgaaggctccttccactagaacatccgcccaacttcgaaattattccagcaattcaagtggcaagcgttcaggcaacaaccacaagcaaggaaacgggaagaaaggaaaattcactgagaagtccggacagactccccgtgatcatgccaaatacactgcattcactattctaagtgaagatatagagagtgtgtatatggaaactcagtcgttaatttcgtacaagaagcccgtgcttatgaagaaagataccaataaaagggacaagacgaaattttgtcggttccacggagactacggccacgataccaacgaatgctacaacttgaagcgggaaatagaatacttgatgaaaaaaaacaacccgcacttacagaagtatgtcaaggccaaccaaggtcagaacaaccaggatctgttacctccacagataggtggacacttgcaagtcattattggaggcccacacatcgttggagatacgagccaagctcgagagagatatgcccgaacagctcagtatgagcaagaagaagtcatcctgaccgtggaagagaggaagccccaagttccacgcgtaaaagagccaactataactttcaacgatgaagatgctgtccagatcagattcctgcacaacgacccgctggtcctggaagtccagatagcaaacaaa

SEQ ID NO: 73941 - DNA, 906 bp, Cannabis sativa
taatttgacacgttttttgggaaaattctttgattagcaaagattgcactataattgaaaaagcattgtaatgtgccttagcattagggcattacatcatgtgtgaagatttaatcaataacttcatatacactattatcctattagcccatactagtccttgtatgtggtggaaggtctggaagatcaagatgtgagttttgtcatcaccgttccaaggatacaacaaatgaaaagaatcaaggataccctaataggcttcaagaggtaaatattattttcaactattcacttttcgtttaatatatatatatatacatatggtgatcttaggcatattgtacaatgataatcaaaaacaactcttctattgtgtacctaatttagtaccataaaactaacagtaaggtaataaacaagttaaagaactcaaatagcacaattagcttaaagcttaatcatgtcaggattcagatcaaattaaatgatgatcaacaaagtgatattgacttagaatatatataatggtaaatctgtaatatcttttgtgctgtcaatatcggtccagtctaatgtaaatttatacattagatacaagtttattttaccaagacactgaaaaagatatactttttgtcatagtgtaagtagaccacatcattgattatcatgtcagtataaattcagtgcactgataaatctcaagactaaataagtttgaagcatataatcgcaattatttttccactgtgatgatgtcactataattatgaataacaatatgttcaggatttaataaggattatgtattaaacgtataataacgtaaataaacatgttaactaaataatagataaagtcaaaatatgatttctgaactttattgattaaaaataatattaactt

SEQ ID NO: 73942 - DNA, 844 bp, Cannabis sativa
ttttttttttttgaatttattttttaatgaatggtttggtttggatgaatgttgggttattagatagatggtgtgatatgatgaggcaacccatcaccgagtgaatttctaaagtatgctcaatattttttctttgaagaaattaatactttaattcaaattagtgcctaccattactgttgctgtttttactattcgaattgattatttcactatttacaattgatgtttccatggtgagtgaaattaagctttgtctctgtttaaattttattattaaataaggcttatttttgttggcaacttccaacaattatcactactatgatgaagggattaattaccttaatcctttgtatgtatatgtattcacaaaataaatttattataaaattaataatatgccttatatattaatacaaacaaatatttataaccatatataagctatatttataattatatataagttatatataaatacataagttattgatggtgtgtgactagagacaaagaaggtggaggcgcctaatagttatataaatatattgcctactaataatatgacattattaattgtcaaaattaagatttttttttatggtacttaacatttttaggttgcatcttatgattagttagtaatatttattaaaaattatttttttaaactatatagtacttgatacttaatatataacactgaggatgatactaggtaccaatactttttaacatttctcattatatataccataagtttgattgcatatttacatgtgtttcacgtgcaatgcacgtgcattgcacgtgaggttgcggctagtatatatatatatat

SEQ ID NO: 73943 - DNA, 983 bp, Cannabis sativa
aggcttacagccccgatgcttctctgcctccggctgcctcccagttggttactcccgggaggtcctcctccaactccccttcaggcacgatcatcttggtggacgaggaggaggaagttgaagaaggtaaagtggcagacgcgaccgccctggagcgtaagcgaaagggcaaaatggtagaggcggaaccttctaagcggactcagaggggggacactccggcgccaagcaacgactccgggataccttccgaggcggaggaatacactgtgccatacgacatagtgttgaccccggttcctgcagatgaggagaggtagaatctctgagtggccaaacacaactacgcccttggcgagtacagtcgggggcatgctgaggtggaggccttgaagagaattttgtgggaggagcagcagaacactcttaacgaggatcccttccggaatccgtgggacctaaacatggatccgctgacggactggttcaaccgcttcgtcgggcccaccttggctccctttgcctcggagatgactagccagttcgtctcccacatgacgcaattcccgcctaagagatatgctgcttgcgcctctctgaactctatctaccaggtccaacacattagctctgccatggccgcggtgagtactttgtaatttattccatcccttgatatttcgtctaaggcatctgatctcatccttgtctctttttcagattactgctgagactggccacctttccaagactcttattgaccatggcttcgtcatgtccgaatttggggccatagacgaggccgtgaggatccttcgagacttgtctaccgaaaggggagcattccaggaggaggctcaatggagggaggcccttgcagaggtaaagcttcgagaggaggccaagcagagggaggctgaagtggaggcgaggcaccaggaggtgctcaaggtggagggcgaggtcgtggctatggctagatg

SEQ ID NO: 73944 - DNA, 748 bp, Cannabis sativa
caataaagttttctttgggtttcatcattctcactatactgtcaaagattaggaatccaagaaggccttgctggttgggaagcttgacaatagtctatacaaatttgattccatctagtggattgcttccctttcactcagacgtgttcttcatcaagtcataccattgagtctgttcagtccagttcaaaataatgtaataatcaccagttaccactcaatcctcaatatgccttatggcacaatatgccttatggcagtatactgctgtaacaattaattttgtgggtaatcattcaccacaatatatttagaaaatagtcatttattttgtacccaaatatttgaaatcaatcttaggctcaaattgatcggtatgatcaaataaaattttaatgattgtataatatatttgagtttagatttagaaaaccaatcatgtacgatgtcaaattaattagggtgtaccaatctgtaattttgataaaatattgagtaccaaataattatttactaacctaaattaagggtcaaacaaaattttcttgtcaaaaaaaaaaatttgagggtcgaacaaaacaatctatattatgtagcacacttgattaaatgaacaaaactctaatcacataaaaaaaaaatggaggtttttacaaaaaaaatattaggttttaaataaaaatttacaattttactgtcacacgaaatttcttacaaaaacacggtctttttataaaacaaccgtaaa

SEQ ID NO: 73945 - DNA, 555 bp, Cannabis sativa
tgcggtgtatggaagcaattgccccgctgagaggaagttgttatttgagaagttggctgcgctgggtatgttaaataggccttggctaattcttggagattttaatgcgatgtttaatttccaagataggaatggtggcaaacaaatcttgaccaaagacattgaggatgctcaaaagtggctttctttaggccaagtggaagaagtttcttgctccggggccttctacacttggactaacaagcatgacatgggaaccagaattttttccaaattggaccgtgtccttattaatgaagattggttagatcaattccccaacaccgaagcctgcttcaagtgggattgtatctcggatcatagttattgcatcgtcaagagcaacaaaatcggtaacgtgggcatcaaacctttcaggtattgtaaccattggtccttccatagttgctttcgtgagcgggttttatgctgctggaacaaattttctgatgctaatacagttggtgaattagtgaagaagctgttgagagtgaaacatgttttaaagaagtttaa

SEQ ID NO: 73946 - DNA, 1300 bp, Cannabis sativa
actaagtgttagatactacaaattatgctaatcaagagaagatgaagactcaaagatacaaaaatttcggtgtatactatattgaagaagcaaaagaagatgaaattgctaaatcttcattttaaattataaattacatataactaatattttaaaaattagaataacaatcttatgtaaaattttaaaataattaaccaccttttttaaagaaatagaacttaaaacttactcatatctaatataatattttatgaaaataattaattcaataaaacttataatattttaattattatatcacttattttaaatagaaaaaataaatctacaattgataaatccatttagtggaacaataaatggtcaaataaataacaacactaccaacttatataatttatttctcaagaaaatactaaatatattgaaagtgtttctaaattgttatcaaagtgttggatactataaacttaagttgatcaagggaaaatgaaaattgaaatgtacaagaactttaattcatactctattgaagaatcaaaagaaaagattgttaaattttcttctttgagtataaattacatataagtaataatttaaaaactataataaaaaacttatgtaattttttaatatgaaaaaaaaattccaaaagaaaaatacaaaaagaacagacaacgtgccttgcacgtagttgtcggttagtttatatactagatagatgttacgtgacaagtcacgtatactaagttttattttaggttttaattatggttatattttttttttttcaattttcatatgtaattttaaaacaaataatgataatgcttttcatcaaaatataattgatggcattgaatttattaattgcaatagacatcatcaatggagtttaatcattaattggatgagaacactggtttgaagagacaaagctatgagaatgtacaactttaaagttcttattttacttaaaacattgttgctcataagtgtgttcttccctgtaagtcatacataaaaatccatcttcatccttgtgatcctaataaagaggagacattaataaagctgtaaaaaaaaggaatgaaaattacaaaaatataacttttgaatgatgaatagtatttcttaataagaatggtttcttgtagtttacagattgtgtccatattggcaagttcaagcttaaacttacaacaatatcaatatcatatataatatttctaagaaaccactataagcccaaataccaagaccaataataaacattagaatgattttagttttctgt

SEQ ID NO: 73947 - DNA, 1006 bp, Cannabis sativa
gatttatcactaaaatttgaacttagagggtaaagtgcaagtgaaatgataattgagagggtttaaccgcaaaaagctcaaattaaaataggtatttaagtacagcaaaatgaaatacatgtaaatttttggcacaaatttccctaataatatattaatataataatatttccaaacgagtccacaacactcccaatagctcctttaaaatacgtacttttttaaaaatttaaaggacatagagcaaaatcaccttccaacaaatgatgcaaatttattctctattttaaagcatatctattttgttcaaatgtttttctacctatagagatgcactatttatcttttaaacatattttaataatatttcaactatgttttattttatttttaataatatgcattttatatattaaaaggtatattatttaaaatatatgaagaagatagataaaaataaagaagttgatatatatagggacacgattttatttgatcttagggttggggttgatctaggggtaattagggttaaaaaatggtaatgtatcctgagacccatttaatgtaccctgagactcatctaatgtactacagaatacattccgtgaaagtacatcacgggacaaaatcgtttctatatatatatatatatatggtgtggtgtaaaagtgtgtgatgaaaaacaagaaaatgtcattttaataatgtattttaaaacatagagtagagaagttggattttagattatttgttgatgtttacaatctctgccacaattcatcaacaataaataaaattttaaaaattttacataacagactaaaaatttaaaaataattacaaaaaatatcaatacagaattttttttttatttttattctttaaatctttaaatttctcaacatacattttcagtaaaaaaaataaaccgtttttttttttttttgttattttatagttatattatagttcttatgagattttttttttattatttttggtt

SEQ ID NO: 73948 - DNA, 957 bp, Cannabis sativa
gaagtttccctctcttttttttgggacttttaccggcgcatagatgcaccgataaaagtatataagcgccaaaataaatgaaataaaaggcggcaaacttttcgcgcctgttggcacttcatttccttacttttaccggcgcatattcattattgcgccggcaaaacgtataaataccggcacattattgcaccggcaaaagtaaagcataaatgcaagtgggatttcagtttttgctttatgtcgacaacttttaccagcgcatttgacgaattgctccggtaaaaaggccttttcttgtacctagaatatgcatctataaaatatatatagtacttgtaaccacttgatgaatgaaggggaatgaaccccaaacatcagtgtgaatgagttgtaaaggggcagtgtaaacagttttagaccttaagaagggaaatttgtgaatttcgcctttgcaccaggcttcacagaaatcatggactgttttattaggatcagaaatgttacaagtttgcattattctttttacaattttagcagagcgatgccccaacctactatgctacaaagaaaaattggaacagctagatacattgtggagactgttggtgacattattaacagagtacaaagctgtatttttattcagagaagtaactgatggagtttgatgagaaagatgcatttgagaaggatgaatgacatataaaccttgattaagatgtccctgcagaaggacttccttagaaacctggtctttgacaaagcaatgatcaggaaagaactcaaaatatgcattgttatcagttgaaaattttgaaatagagataagctttttggttatttggggaacatggagaataagattaagaaataatggtttagaagagtaaggcatggtgaaagaagtcttaccaacatttgaaatggaaatttcagcaccatcgcccatatgaa

SEQ ID NO: 73949 - DNA, 931 bp, Cannabis sativa
agtcgatcagaagaggagaaagtactcaacgaggtaatgatcgagaaaatatgggaagtagtaaattcgcgagccactgaaagacaaactctatgagtgggacacgatttgtgagtaagactaggtgtgccagcaattactcccaaccggttctacgggagcacttgaatcgaaagaaacctgaccttccccaacagcttggtccaaagtaagaggatccaatccaattgcggataaacaagctggaggacaagttcaggagatgtgaagtgggggaattagggaaaccatcacgaggagcttgagctatatcatctagatataattaataccccttttccttcgggattcaaaaacccgcatgtctcgtcatatgacggaaccactgatctggtctcgcatttgaataactttaacacaataatgcgagcgagtaatgtgacaaataatttacgctgtattttgtgctggactttgtgccctaaataaaactctatttcaatgtaatcttggaataattctgggaattattcaacgccaaatattataatgaagctgcccgcagtgctaagcgaaaagagttcaccgaattggtgcaaaccgaggggatgtcggttattgagtataatacaaagttcgatcgtttggccaaaatcgtcgtgggtatcgtgccaactgacttcagtaagaaagaaagtacctggccggtttgaatgtaaagattaggcatgatatggtgatcactacaaatgaagcaaccacttatgtagaaatggttgagaaaaccctccgagccgagggtactgtaaaattccttcaggagccccgagtgagtctgagtgttggcggacccccacccttcctactcctgcttatgttagggatggtggtgattccaccactgatcagaagaggaaagttaccccagcat

SEQ ID NO: 73950 - DNA, 712 bp, Cannabis sativa
aaaaaaaaaaaagttaatttttcttaaactactatgattgataataaatagcattgagaggagaattgaaaaaaatatatgaatggataggtcattgctgtaaaagttattagtattaagtacagtattagtatgatatatatatatatatgatttttggtctacatatagagggttacaaaattagtaaaaaaaatttaaaaaataagtattagagataataagaatcatgcgacatcaactccttaaaatcttcatatatatatatattgattgattaatttgtatttatgttttatgtattgttttgtaagatttgtttccttatgataataattttgtgtactctaatatagcctcttttctttttttagctttctaatataaaatttgaagaatttttaatggatagcaataaaataaaattaatataacacaaatagattaattaaaaaaaattattattttgaattaatattcttaaaaggaagtaattttttttcttgaataattatgttaaaaataaaaaaaatgatataaatttataaacaatgttttgtatctaattattaataatatatgaattttgttaaaaatgattggagcataaagaaatttatatattgtactaaaattatatataacttatggcataaaaataattataaaaaaattgatgtatacatgtttttaaataaaatagaaaaataaa

SEQ ID NO: 73951 - DNA, 801 bp, Cannabis sativa
cactcaaagagttaattgcaattaagatggaaatcataaaatttgagttccacctcataggccatcatttgttggtggaaatcaattttcttgcatcaaaaggcactacaaaaaaaagtacttttgtcggcgagttttgagacaggcaacatggtatgatcattactcttttgaaataaaacaccttcctagaaaagaaaacattttggtcgaccttttatctaaacctacatctataaatatggtatcttcacatcttctgcaaaccatccccttaattatctacaactcttctcataccattccatatatatatataatgacatcatcatcatcatcgcaaaataattactcatttccccaagaggcaaagctcatcctttccaaatcaaaaaagacagcaaaagaaagggcctctcacaggaatatttatactcacaaccaaattctctctaaacttggaccctattttcaacatgattttctaatttacccaaagtatcatttttccaattttgtccccctccggactgcactattcactccaaaatctatagcccatcttttttggtacctaacatgcatctgtacgatcgatgtcaaagtccaaactatatggcttttcacattgctatacagtctttccttgaacaagaaaaaattaagccagcctaccaaatccaaatagaccttttatcttggtacgctcctctagaggagtggaaaaaaatattttggggtggatggaaaaaggttcgcaacaataggcacatctgtatttatccatcaggaccgcatgta

SEQ ID NO: 73952 - DNA, 1083 bp, Cannabis sativa
tggtgcagtaagtgttgtgagtaaatgcttaactacctttgtgattacttatttactgctttccgttttaggcagtatgtgagcatctagaaatgaatgtgatatggaaagcatgtttaatgtttaaatcaataaattttattttaataagagaaatagtaagtttaagttagggttaaggcaataagtgcgtaagtgtggtattggtgcctgacttgtcggggttgttaatttcggggctatttgaaaaagaatgaaccctccataatcatctagaccacagggcgagcatgtagatcctggtaatgaccaacccaatccatcggcaccgcttgtgcctccgtagaatctgggggataatgcaggggtgaataatgcaaatccacctgccgattggcaacaaatgatccttgaaatgcaaagtatcatacttcgtcaagaagatgaattgtgtcagtctaagcaactagcaccggtagctccaacagaacaactgttaccaccaactcctgtgctagtggtggtaacccgggatttattttgccacatcaagattcagtgtttgagcgttttgtgaagctggaacctctaacgtttttgggaggtattgatattatcaaggctgacagtggatgagcactattttccgcatcctagataacatggtggtgatggggatggaataagttaaatgtgctgcattcatgttacaagatcattcccacttttggtgggatattgtgggtcagacccgagacgttagcaaccatatcttgggaagagtttaaaaccttgtttgaagaaaatttttataacattgctgtaagaacttcaaatatggaagattttgtgaagttgactcaagggaagatgaccgtggctgagtataccctggaattcgattggttgtccaagtttgctagtgatctggtaccaacggatgtcactcgaaaacaaaaatacctaaggggacggaatgccacaatcagttaggactttaaaattaccaccaatcatgacacattatacaagaaagtggttgagttagccttgattgcagaagaggcagaacaacatgtaatc

SEQ ID NO: 73953 - DNA, 753 bp, Cannabis sativa
gagagagagttggggtgttagttatgtgagggttatttttggggtttttcataaaagtgtcatatttttttaattttgaaatgtattgatttaagtataaaatattagattttttaaagtatagtttttcaaattttcctttatttatttggtattgttattgaaaattataaaaatttactttccgagataagaaatatttttattttttttttgttagacgatcaaccaatttagttgttcatcactttgctcgagctttcattttttatcctgatgtgtttttaatttagaaatatcccaattaatttgttaggtgtttggtagtagaaattaatggtgaatagagttggtttttttccattaaaaaaaaataccaccgagcatttggcctaatggtgggcattctttgctttgtactatgaggtggacactgggcactagacaagaacggagccaagagcaacaaagaggggccttctatttttttttttaaataaaattcatatagttatacataatattttaaaaaacaaatatatattttggcccctctttaatttgtttatgacattttggccacccactttctatcctcaactctttcagtttaatatcaatttcaaaaaccaccaaggagtcaattaaagcttatacactgtccctaagatagttgtcaatcaagaccctctcacacgtaaataccatgacctactcaataaggtacacaaacacctgttactctcaaaggag

SEQ ID NO: 73954 - DNA, 708 bp, Cannabis sativa
taaccttataattaaataatacataaaaattaaagaaattaacaaaatttttaaaatctgatcataaataaaaataaaataatgaatttctaaatttaaacctcaaaatatcaaaaactattaataatatattaaaattgaatattattaatttaaaattttgatattaaagttaaaatattaaaaataataaattaaaatgaattgttagtgtttgaaattgggaaaatttgaaatttgtggaaaaaatctacaaaaatcaaattttcggtcacctgcagccttggaccttggcggatgtagcctcatgcgtgttagaaaggtgcacgcgaagcattcagacagggtgtgtccccttcatgcgcatgcacacgactttctttttcgaagcctggtgcgtgcgattaaggaccatgtgcatccatcaaacccgaaactttaaaaattcatcactttttcgatttttatcagaatggagttcgataacaaccaaaatttcttaatttttcacaaggcatccaaataaaatattttcagaataaaaaataaattgttttcatggaaaaaatttgttaatcacataaattcatcaaataacacataaaccaacatgaacacatcaaaattaaaacaataaacaaattcattgttttaaatccctattacatgaaagtaaatcattatcatggctctgagacgagttgttgg

SEQ ID NO: 73955 - DNA, 850 bp, Cannabis sativa
ttacttggagtttttttattctggcaaagacaacatatctcacatacatgatgtttgtaaagccttttatcgtgcggataaacaagataagtctcttatgagttactttatggtatttaagaaagcatatgtagagcttaatgtgttattgccatttagttttgatgtaagagttcaacagctctaacgagagaagatgactattatgagttttcttgcaggactctcatctgaatttgactctgcaaagtcacaagttctctctggttctgatgtctcctctttacaagatgtttttactcatgttcttcacacaaaaactacctcttcaactcctcttaatagtgccttggtgagtcgtaataattctacattggaaaaaaactctactctaagtggatataaaggaggtaattcacaaggacctgataatcgaacaccaaattctgtaagcatcatgtgcaactattgtaaaaaactagatcacaccaagtttgagcgtacgaagttacagttcaaaaatcgacaacaacactctgctaatattgcaagcactagtgatgcatctgacaaaatgacccttatttctgctgatgaatttgccaagtcctcaaggtatcaggaaacacttaagtcttcatccttttctagcactgagattgctgattcaggtaactctaatgcatgtcttctttccaaatcctcaaatttggtcattgattctggtgccatatatgacacgtaattccagtctcttttccacttttcagtcttatagtctcacttctattgttaccttagctgatggatcaacatcttttgttcttggatgtggcactattgttcctac

SEQ ID NO: 73956 - DNA, 923 bp, Cannabis sativa
tctattacagtagtctcagctcaagagagcaaccaatacaacagaattataacagaattcctaacagactaaccgactaaacaactaactctctaaagtctaatacggttcgagcaggtatataagaaaatttagtaaactaaaatattaacaaataaaaaattacaaacataaataaaattcttataaaattgaaattataaataaatatataagctagatggattctaatgtatttttttgaataagaggatataatcatgtattaaaattattttacagattaatcaataaatatgtataaattaataatatatatgtatgatttatatacaatgtatagtgggataattaattaaaaaaatgaagatacttattagattacatttatcttaattattactattacttcaaactatatatttatcttcaatgaaatcctattctaatattcattcacttctaactacaaatagagaaacatttactatcactttttgtgccactacaaagcctctcccgtcctttatcttagcaaactaatcgagtaattttcatgcaagtaaatttgataaacatactacttgacatgcctaacttatattatttatatgtaatgagttgattgggaaaattacataaattatttatataatctatatagattatgtaatgagttcttcaatatatttgtgtttctagattatattaatattaagaatattattaattgtgaataccataaatattattatatatgcaaacatacttgtaattgttttgattttagataaatttttttacattattgaaacttttaatattgaaaattaaaatatatatatatggaacacttcttaaggggtattacccatgaatggttactaaacaaatttaactataaatattaattttataaatat

SEQ ID NO: 73957 - DNA, 815 bp, Cannabis sativa
tctagtttggtagtcaactctcttatcttgcaaatcttgtactaatttagtaagcgcgatggcctattgagacgttgtcataaagcggctagctacattttttttcgccccataaagttgcctctaatacctaaaagtcgcccctactgtgagcgggaaatttctcgcctaacacgtacaataggttttcaacttattaggggcgatatttgttgcccctaattagtttttgtcgcctctaatagttttaggggcgacatgtgtggcctctaaagctgaacagatttaaaaaaaataaaaaactttttctttactctaatactcttactattagaggtgactttttgtcgcctcaaatgttatatatcggccctaaaagttatatttgttgtagtattttccgatcttatgcaccgcacacaccaaaaaaagataccattattgatttgttgatataaagcgaaaagtagttcaattatatgacattaataaatgcatttcaaaagatcatataaaaacaaatgagttggtcctactaatgctataatactagttggtcttggagggagattatgaaatcgaagaacaatattaaaactgttttggtcatgcatgatcttatggtagagaaatatagtactcatcacacctaccaaaaactcataaacgctaatcatcaacaaatgggttccgtaaatctttgacaaatttacgatcgtttatagtacgtttgaagcaccttataattaaagttgtcataaactataaaatttggatgagatcgacaataaatcgaaatcgtttagatatttttt

SEQ ID NO: 73958 - DNA, 1142 bp, Cannabis sativa
gaaaaaagttcctcacaaaagttatacggtacttcccactcacttggagactaaaatgattatattgctcatgacacactgttggggacatgcgatggcattactcatagagaccaaaagaagacgatatacttaggcatcctgcggatgctgaagaatggaagcagtttgaccggcttcatccgtctttcaccatcgaacctagaaatatcaggcctggattggctactgacggttttattccatttgggaacatgagcaactcttagagcctgtgggtagttatttatgttccatataattttccaccctggaagtacatgaattctgaatccttattatttactttattgattccaagtccatcatctcctagagaagacatggatgtgttcatgagaccgttagttgatgaactgaaacagatgtgggagacgggtgttgaagcctgcgatgtttacaatggaactgtattttcaatgcgtgcggctgtgttgtggataataaatgattttcccgcttatgctctaatgtctgttggagcacgtaaaagtacatggcgtgtcctacttataatgaacacactccttctattagcctaaacagtgtgatcggatacgttggccacagacgttttcttgaaatgaatgatttaaggagaaaaaggaaaaatatgatggaaagcttgagaagagagcaccacctcttgtgttgacgggggatgatattttgtctcaattggattgaattcaattttgttttcctggaaaacacaaccaattcgggggtatcaaatggaagcgttctgctcaagagctaaattggacaaagaagagtatattttttgaacttgagtactcaaagaattttcccttacaacataatcttgatgtaatgcacattgagaaaaatgtgtgcgatagcttactaggtaccattctatgtatcgatgggaagtcaaaggataccggaaggcgagaatcgattggcaagacttacaaatacgacctgaattgtggtcgtatgaagaccgaatgggaagtgaaaaaagctgttgggttttatgccctaaataaaactcattacaatataatcagatttacttattaatatagatcagaagtaacatttaatgttgcatg

SEQ ID NO: 73959 - DNA, 524 bp, Cannabis sativa
cagtcttctagatgtcgctacaaatattatgttttttccaccaaactaactcaaacaacaaaccaaccaacaaatccaataaaggagaaaacataattagacaataagcctataacaaaaggagatattgagcaagcaatcaaaatctcacaaccaaaataagagaacccaaaccaatccacaaacaaagatgaaccctagagataatggacaaagaatcacaccaaaggatgatgaacaaacctcagcaatcacaaaagaagaaaataatggtcaaaatggatgcaccaaaaggttagaaacaataaaaaaggaaattgatagagaaatggctgggaaaagacacctcacgcatgcccacccaccgacatgtgggagttgtcgccaaagcttcaagtagcacgtgtggctcacgcgtgactattccagccaccaaactctggaattctacaaattggtgattgggctgtctgttggtgccgacggtgagagctcacgtgctctctaaatgtgtttttttgaaa

SEQ ID NO: 73960 - DNA, 966 bp, Cannabis sativa
tataattgtttcatgtaaaaatttcttatttatatatatagatatatagatttggcccactatctagagcatctccaatgaagatgcaatgtaaaatatagttcactttgtattattattattatttcatattgtcttaataaattattaagacaacaataaatgacatattaaattttgtattaagatttataattatacattaaagcataatagtaaaagttgataaaaaagaatatcacaaaactactatttgtgtctaatataactcaatttatacatcttccattaaaaatggtattacaattgtgtttcaattcacaagatgtaaaataagaaaaaaaaaaattgagttgattatattgatgagaattcaatattttattgagaataataaaaattattatttaaataatagtaatatagtaaataaaaattgtaaaatatactaaaagtcagtaaatcataataattagtggcatatagtaaataaaaaattaatatttattgtggattaaatttgacacaatattatatcttgtgctaaatttgatacaattttagcatttgccatacttaatacactttttataacatcatttaaataataaattttttttagtgtgctaaaatattataggaaaaattttaattatatacgtaattttaaaattattaacaatatgaccttatatatttaaatgatgaaatggattgtaattatacagcatatgaacaattatatacactttcctctcactgtactcagcgtcatcttatctttggctttatttttttatttttttattttagaacaacaaatagataagaaatggatactagggtagcatttggttggaggtaataaaatagaatggaaaagaaagaaaataatcttcattctattatttctttagttgcttattaaagtattagaatgatattctaatagaatgatctttccac

SEQ ID NO: 73961 - DNA, 892 bp, Cannabis sativa
ctttttacaaattgagtaatataactttaaggaaattttaacaaaaaaaaatgctcgatatcaatatataataatgatcatgattataatataagtgatttttttcttttagtttacgttaatacgttgttatatatttatttcttttttgttttaagaaaaattttctactgaatgtttgtttatgtaaatattttatttattacattattttttgttattatattttttagaattcctaaggggatggaaaaaaatatgactacctctaatgccttttgacaacatatcatgatctttcaacatgaatttatttcttaatcttgcttcttgcaatttttaaaattttattattagttttttattttatttttttatttaattaaccttaagtttactaaaaataaaaaataactaagtaaccaaccaataattatattaataattaataatacaactaatacaacttcttcatattcaaatttaatataatgattattctatgccgaattacttttataataatagtgactataattattttgtgatttccacttctaataataaggtagatttttatttatttttatttattttatacttataaactagaactataaacatataaaaattcacaaatgttctattattatatatatacgaggttaataatataaaggaatttataagaataaaaattgtattgataatcatacaatgagtatactaaaagttaattgtgtatatctatctataacatatataaagatggatgaagttttttttggtttggtaaagttattttgtcattttgtgaaatttagatgtgagtttttttagtttactcaaattattttgtcattttgtgaaatttaaatgtgagttttcttag

SEQ ID NO: 73962 - DNA, 1485 bp, Cannabis sativa
gtggagagccggctctagttgtcttcccacacttgcacaacttgcttcaaagtttgtccccgtcaatactcgttgtccgctatgtgatgagcttgatgagaccatttctcatgtcttgttcacttgccgagccattaagcaagtatgggaaagagtgggtatagggacttctgcactcacggctggcagcaggtttttggactggtgcaggaccatttttgtctctttgacagcagaaaaacaacacatagctgctgccctttgttgggcaatttggggcgcacgaaatgatgtagtttggcaaggaaaatcgattaatgtttcagcgatagtagtatctgcaaaaagctatcttgatcaatggcaaaatgctcaaaaaactcaaattgagacatcttggactactcttcagtcctatgatggggtcgagcattggattaaacctgaaattaacagtatcaagatcaatgtggatgcgtctatctttgaaggacaaaatcggtttggaggtgcttttgttgttcgagaccataatggattgcttgttgaggggcgtaccaaactctacatagggaatatggtaccggctgtggtggaagctttgagctttcgggaagctctaagttggattaaagaccattcgactagtccggtttgggtggagactgattgtctcttggttgttcaggctctaagaagctccataagcttagcttcttattttggttgtgtgattcaagaatgtaaagccttgttggcttctctaagaaatgttgatttttgttttgttaagcggtcagctaatagagtcgctcatgagtttgcaagagcgtctctattgtaccctgattgtattttcagtatggaaaatattccaactgatttgttgccaatgttggtgacagaatttgaaggttaataaaatataattttcctttcaaaaaaaaaatgtaacatagtatgtaattaatatatcatattctaactataattggaaattaaactgatgtaccacaacaaaaaatacagtataataaattaaattatgcgggacatcaactccatgttttgatcttacaattttatttcttttgaatgaataaaacataataatatataccttatcaagggtattttaggtatcaaaaaataaaaaatgacatttactttattaatctaaaaaagagacattaactttcactagagaaaaaaataaggccatttgttaacatttctcttttttaaaggtgctaaaaatctttatatcatccaaaaatataatattttattttatctctcttctacattatttttgacactcttaattctaaaaacactccaatagtataacactcttcaagaatgttatacataattatgatctacatattattatttaatatattattatttttaattataattcaatccacactattttgctcatagtgcatccgcaaaagtgcagattggatcggttatttt

SEQ ID NO: 73963 - DNA, 787 bp, Cannabis sativa
atgatttgaaaataaccaaatagatattttcaatatcattttctaatcttatattttaataaaattaaaataacaacataaaccaatttaaaatatatatggttaggaaaatgttatacccgaaatttggcttccatctaagtggaggacacgtgttaagataaggggaatatggatcgatgcaatcactttttatggaataactcattaagtacgtaagtattaaagcatatttgtaacctgctgattgtaaggtcttatccaaggaatcaatatacaaactagtgcttagtatattagcgagaaactgtatgtcgctgaatacgaatagcgaggcatcaaggacattacacttaggaagacgaaaagtgacacatattaactatgaaagcccttagtgtataatgtacaaactaagtgtaacagtcgggtcggctcgagaccaagtaagcatggtgcatgggaaggctttttgtaacttcatccagttaacatcagtgaggcttaaaactatgacgagtcagaagtgaacattcaaacgagcttcgaagaactctttgtaaataagaaccgcgatcgtcacaagacatgcatcgtcgacctcagaaggaaaaattgtcccagctcgctattgaaatcactggaaccaatcttctgtcgagacatccccaaatacaaaaattaaggccgtgtttaatacacgatcattttgagccagtaaaagagagaaaatcacagctacatgattttcaaatcataaccgcgtttacacttatatgtaatcaaa

SEQ ID NO: 73964 - DNA, 775 bp, Cannabis sativa
acctctcaacataagcattgaactgtaaaaacagtttattaacttcagatttggtttgcatggggaataaccaaacatactttgtgaaatcatcaacaaagctaaggtagtatttatagccatcattagaggtatgaaaggaaggtccccatacatcagacaatattaattcaaagggcatagtagttttattggtggtacttttaaagctgaaatggtgttgcttgccaatttgacaagcatcacagaatgagttcttgatacatttagcttgaggagcaacattggaaagaactttagctaaaacattgaaagaagggtgacctaatctacaatgtcagacattagaaaatgtgcttttgtcataaactggattgctggaagtggtgaagttgtaggctgctggtttgagaggaatattggctggtgtgcttgttgatggaaatgatgacttaggatggaggacttgaagttgataaaggccttcatgaactttaccccgaagaagaacttgcttggtgttcttgtccttaataagacaacatacatcatcaaattcaagggtaacattgttatctttggtaaattgggaaatacttaaaagatttttagtgacattagggacatgtaagatatcttgaagaattaaaggattacaagactgagtaagaatagactgagagccaatttttagaatagggagactagaaccattaccaacaatgaccttggctttgcccttgtaatcagcagaggaggtgagattttcagagtt

SEQ ID NO: 73965 - DNA, 1013 bp, Cannabis sativa
ctccctcagctcaagcttccccttagccacggcctcgtcccagatcttcaattcttctgccttgcccaatcacgcctcctccaaagcctcctggtgcctcctcttcgcctcagcctccctctggtgggcctcctcccggaatgccttcctctcagcagctaggtctttcaagaccttcatggcctcgtccatacctccgaactcagacaggacatagccctgatctatcaaagtcttccagagacgactggtctctgcagcaatctgcctagataataataataagaaattaagtatgggaggcgtgatgatataaagaaaaatcccaggaagcacaagtaaagacttacggcagacatggcagcgctaatatcttggacctggtagatggcgttagtggaagcgtaggccgcatatctcttggccgagagctgggtcaagtgagacacaaactggctggtcagctcagaggcaaaaggagcaagggtggggccaatgaaacggttgaaccaatctaacagaggatccatgttcagatcccaagcgtttgagaaagccccctcgcgcatgaaattctattgggcctcttgcagaaccttcttcaaggccttcacctccgcattacccttggtgtactcgtccatggcatagttgtacttggccacccgcagttgctgcctttcctcatcagcagggaccggactaaggacgatgttaggagccaccacgtattcctcggcctcaggaggaatccctgagtctgagctaaacgccggagtatccttcctcctgggcttcttggagggttcaccttccgccgcctttcccttgcgttttctatcgctcaaggccacgatctcgccttcttcctcctccacgacctcaccgtcctcgtcgagtaggatgatttggccaggaggcgcgttggaggaagatctctctagggccaccaactggatagctgccagaggacgagaagtatccgggctataggtctgggcaagagttgctaa

SEQ ID NO: 73966 - DNA, 1288 bp, Cannabis sativa
ttttttaaaattaatactacgtggaccactaaaaatttgccaggtgtacaagtgtgtacacgtggatagtctaccgtggtattcaattgtgatttttggacggaggggtacagagcaaaacggaatggggggttcagtaggttttgccgtcaaaaatttaatttacgtgattaagtattacaaaacataaaattcaagtaatttagctgttaatatccctttaattaatgttctctattttccagggattcattttccaatatatataatcatctattttccaaattttactcatactttttttttactattgtggattggaaaaacaaagtagcacactcccttgcatataggggtgcacaaaatgtagggtgatctatttgactcagccaatttagatggaatttgaccatattgaatgaattagtatgtaattaggttattagatggataggatgataggatagataaaattatattgtatatttattttatttatttttatttttattttttttttataaaatttaagatatactcatttttatagatgatgcttccattatactcattaggctaatgtaatttatgctaaacataagtggaaggtaaaagtatattggacaacctacttacaaaaatgggtattttaataaaatataatatgaggatatttttttattaatagatacaaaaaaaaaagtatttctcaatttatccctatttaatagggctattttcaaaaatatgggaaaaattattaaggttatgataaatatggcataaaagtaaatgtcactaaatatttattttttaaaaaaaaaaataaaacaaatgaaactacagtcatcgctggagttgttactcttctcggaaaattcactagagtttgctaccggcacgaaaaaagttgtcggagtagctgtcagtgtcggaaaagtcatcggagttgccgatagcgccgaaaaagttgtcagaattagtattttcactggaaaacttacaggaaaatacaagaaatgatttcttgatgaagaaatcggttgtttcttggtgatttttccaatgattttactggccacaatgcaattccgacgactattctagagtttgctgttggtgctagaaaattcgctggagtagctgcctgtgtcggaaaagtcgccggagttactgtcgacgtcaaaaaagtcatcagaaatagcattgtcaccagcaaaattaccagaaaattaccaagaaactggtttcttcaccaagaaagtggtttcttcatcaaggaactaat

SEQ ID NO: 73967 - DNA, 1271 bp, Cannabis sativa
  modified_base (84)..(86): a, c, t, g, unknown or other
aaaataagaaaatttattgggagaagaaaagatgtttaaattgatgaaaagaaaatagggataaccctaatacttaccctgtannnagttcttgaagatgaagatacgtagtaacacctctctgtaaattttgagagagttttcttttctttcttttcccccccttttgtctgattttttgtttttataagctaatttttacgatatattgatatgagagtggaaatgtgagtggtgggtagttataagttagtggagagagtagtgggagatatattattaattaataatatattttttttcttttttcttcatatgaacgatcgtttctatttcttctgcaatcttcatttagtgtaagcagaaggctttccgattcagtcgtttccctcacttgagtccacgcttaccattacaatcataattacataatcaaaaatacaatggaaggaaagacatgaagaagagaggaaaagggttggtcttcacccagcgatttcaatcgacatagaggaagagatctgtggaagacgatataaccttcatataatatcaagtttgttcatcttcctctaaatttcagtcacactgttttcaattttttcaatgggtaacgatttttactaatgagtttttcttgcaattgatggtattgtttcgattgtttttctctttcaaccaaactttttttttttcatgagtagtgtttgaaaagaaaatcaggatcgaaatcaacaataagggtttggttgaaagtgaaaatttggtcactatttttggtgccaggtacttaattatctaatttttgatagatctatcacaattcgtgaattttagggcttttttgtttgataaaaaatattcaccttgaaggattgtgatggagttaatagtttttgaggttctatatattcttactaccaatatccatttctcacatttttatgtttgaattttgaaatgaattaaggggatctctttatagtttatgcaattctgtaatttttaaatgtcctttggattagttttgagtatactttatagtcataatagtcttgcattatcttctatctaattgagaaaatataatagagttcgtttcatgttgcagaaagaaaaactgtaataggtgatcctgatgcttctacaataaaaaccttttggttatattgatgggagctggtcattgttctctgcaagatgaggtaatcacccagagaaacggtgatacaggagcatatataccacaggttgcagcttaagtatggttc

SEQ ID NO: 73968 - DNA, 868 bp, Cannabis sativa
cactatttttatgtgtatgtgaaaaaatttcattgatatctcccaacagcagccatggatcaagtggggaaacatcactcagtcgtttaagcaaagtccatgtgtgttttttattgtgagtttcaggaaaaccatacacagcagagagatgccatcgagtatcattttcacacaccaagtaacagtcaaagtaattaacattcattgaaagaagagttacatctacatgatctttccataacaacatgatcccccctttcaaaccagtcctaggaacttctaaaccacaactgaaacataaagattgtttaaagcgagaaagagaattaactggaacctttgtctccataagaaaacacatgaggattttgctctttgacaagcaaacgaagcttacggaatgctctcgggttccccaaaccccgagcattccaacttacgattttcatggtgaaccgcggggctgctgagcaacctccgcagagttgtcaaaaacatcagcagaatcctcaatagcagaaacacactgacgtaaaccagcaacttctgacaaggaagaagcagtttcagagttaatagctcggcatctcttcaaagtttgcctcatagaattggtttcaaactgtcttttgaagactttattgggctgtatattttcttgatcatgaacaagagccttggacacattgatagcagcagggacctgagtgaaaaccggcttaggagcagcagatgttgacaattgatgcagtgggaacctttgaacattatttggtgtaatgagcggaggatatgaagcaaaagtgtttgagtttgtagcactggagcctatttctggtgtgaaaacatcaagcaagatagtggaaga

SEQ ID NO: 73969 - DNA, 612 bp, Cannabis sativa
atctcagttaccaaacaaggtaacaaattagttggagcaaactttaaactgaaactacaatcaagatacaatatagaggctctaacaaaattgtgaaccactatattagcttttagtataacaaataaatagcaatattttttaattaattaagcatagtcttacaaacattcaccacttgaccaaacatagataacatatcataataataattgtataatttttttcggtaataataataataagaaagaataattcattattagagtcggtatatataatatgaagaatatgagcaacactaaatatatagagcgtttaagaaaaaaaaaagtatatatgtatgtgttaacgcagactttcgttaaccagattttgagtctaaacagtgataaacttgcacagaaaaataaaaacagtaaaaaaagtctgaacacaaaggttttttacgtgattttgcagttgaaattctacatagtccacgagtcaatcttattagatttctcatacaattctaggacttttttttcttatgaatttttcgtccctttttcagtctgacttgcctctatttataattacatagtcaggcagttaattacatagttgact

SEQ ID NO: 73970 - DNA, 1607 bp, Cannabis sativa
caagccaatcttgagcatccgcaatgtctctactttgaataggcctacctccccatctatcttgatagccaaacatagcattgaaatccccaacaatcatccaaggctcattcggactaccaagactcgcaagggaatcccacaggttcttgcgatcctcaatcttattaaagccatacactgccgtgacaagaaaaatcttcttttgcccacaaactttaactttgcaatgaaccaattgagaagattcatagagaatttccacattcacaaacttatcctgccaaactaataatatcctacccgaaatcacattactagagtaagcattccaattcggaaaattattcagcatcatctcttgaactttatcatgtttcactttagtctcgaagagcgctccaagacagattttattcaacctacaaacatcaagaatagcattttgcttatcttttttattcatgcccctcacattccaccctaaaatgttatttgcttccatcaggagttgtcttagaagtgggaaccataatctcttcactttcctttgctagtaaaacagcataaccattgcttgaactgacctcttttggcccctcttttgacttccctatctcaacattcctcatagcttttttcttaggagttaaccattcattgcttccttcaccattatcctttttcccctcattgttccccttttgatcttctttttcctgctgggcagtttctaactgttttcccattgtatttcctgtgtccctatgagcatttccttgctctttagaaccaactgtctcagccactgatttcttcttccaaacaaccttcttttccttgttacaatgggcaaccgtatgccccaaaccagcacaagctgcacaagtagttggaagccattcatactctattgtttgttccactagttgctgtttctcattgataaaagagataaatttcggaggttcatccgatatctctccacaagaacacgagcaaacttcaccatagacctttcttgagtcactttgtctatcatgattggcttgcctattgtgctaaactaagcaacttagattcttcccccaaatactgcagcccccaatccattcaatcttatccacactggaaccgaattcaccattttcattgaatcaatttcagtagaccaaggcctaagcaccaccggttttctatcaaagtgaataaccccagcttctaaaatgaggtcacgagttgcttcatctcgaaaattgactaaagtgcatccagagtgcatccgaaccaccttatcaatccctaggttaccccaaatcctctttacaaatccttcaaatactctaaacggaggattagcccctaagacaaagcaaacaatagcattcttccaaaaagatgcctcaacttcaatctcctctaggtcaagcttagctacaacttggtcacccactctcatgggttcagtatacgaaagtttagaagaaggagttggtacctgatttgagttaaatctgctccacaagtctctcgcatcagattggaagtctgctggtctcgcatcagtatgttccatttcatcagcccaagaagctggtctcgaatcc

SEQ ID NO: 73971 - DNA, 722 bp, Cannabis sativa
taatgatcgcagttgtgtcaggttactcagatacattaatttcataattagatttcagttatcatatcttgtttccatagaattttagctatgaagctctcctaattctaacggctccgtactgcttataaattaaacatgttcacccttactgacattaatttgctttggaggcttccttcttcaaaactggcaattttttttatatatataatataatatttaatgcttgcatttttcagatttttactttgctgaaatgttgtattcatcgctactaaaattttattgcgattattttatgtaatgaagggtacttttatttattgccatttttgtcttttctgttataccacagacttgcagcaaactggccagctacaatgcaaatagttaggctaatatctcaagaccatatgaacaacaagtaaattaagcttcagcgaactttttttttaattgtttcatgttttaacttttatcctcttcgaaaatcatagatttctgttagttgacttaatttcattttgacattaggcaatatgttgggaaggcagactttttggtttttcgagccatgaatcagcacgggtttcttggtcagttgcaagaaaagaagcttgtaagtttggtttctttttttccgatcattgattaagttgcagttttttcagtttcgtggatttttcaaagtttgagcttctccttgcatatttttggaa

SEQ ID NO: 73972 - DNA, 708 bp, Cannabis sativa
cttgttacataattttatattataaggacactttcaaaaaaaattaaaaactttattaaattaagtacaataaaatataaattaataataaaccacaccaatcataagcgtgcgagtgttttcttatttcttcacggggtagaggaaaaaggaggcacgtaagcttgatattgagatctttagttttatggcactgacactggatctccctttgaaccaaaaagttgatgagaaacaagatgatttccttgattcacggtcaaagttggaagttgatcctgttatcgagcgaaaacagtcgctcaggaacaaatcacgagttgttgaagtcaacgaggttgaaaactctagaaaacctaattttcaatctaatgcgaaggattcgtgcaccaatttcacaaccaatcaggtaagaactccatcatctaagcttgaatatggtgaaaccttgaaatatgttgaacaacttgttgcggaagtcgatttggatgaggttgagtctgaggcctcactatggaggaattctgtactttgtgttgttttgggaccgagtctcccttttcgagtttttgaaggttttatcaaaagattttgggtcaatcttggcgttgatcgaattatgaggatgcactcaggttttaccttggtaagtttttttgatgaaattaccagagatctggtgctcaaagctagtgtgatccatttcca

SEQ ID NO: 73973 - DNA, 543 bp, Cannabis sativa
agtaaaaacaatagaccgtttccagaaacggtctgccctttttcactggagaaaaacaaagtctccaattcgactcaaaactaccccaaactttaccataagctcccgaatacctataatcatcattgtaaaccatttcaaagtgacaaaattgaaaataactttaatttgaaaaattcaccattgttgagccaagttttagttcttgagctcaaacttgctcaacaccaaaatcaaccatctaaataacttcaaataatctagaataacctcaaattaacttcagacaactaaacataactcaaacaacaacaacaacagtaactaaatcccaaaaatgcctacttgaacctaacttccactactataaacaaaggggaactaaggtaaaggcttacctttgaatcttcaccacttgaattcaactagaattcttcagaattgatgaagagcaccctgacttctcctggtttttgctttagctgaatagagagaagggtcaagaggtgcagttttgtttttttctttctaaattcctatttt

SEQ ID NO: 73974 - DNA, 849 bp, Cannabis sativa
gttagaagatgatactaaaatctttccttggacaagaatgtgtttacttactcatttgtgaggaacaaaagtttgaatgtaataagttagattggatgaagaaaagatgatgaataaagttttgtagttttgtttttctacgacgaccacaacgaccctcgaaacctctctcttcttcgcttcagcgctctatgggaagcctattactgccctgactctcttctggttttttcaactggaagatcgcccaattctttaccaacttttaagggccgagaaacccttgttaacccctgatatcactgttatgtctgtgggaactaagattgcatatggcgaatctatggtgcccgatgttgggtgggagaagttgctgagtcagagatgggacagaggcgttgttgtggaagaaacctccaagtttcttgagcttcttcctcaggtaaatttcttcgtttgattaaacatgtcaaagatttgtgaccactagaaagattgttaaaatttcagcactattttactcaattgctcattgcattgtagcaacataaattgaatttcagcaatattttcttcttatatgaaatattggcaaaacaacttctgcaaggaagaaatctaagaagacttgaaatgaaatatgagatttttgttgtaatggtttgattgttttttttttttatttggaactatttcttgtttgcaagttatatgttttcaattcaaaagaggccaaaacaaggtcaggaatttttgtaaaagaaagcacattttgattatcaatttctacaattatttacacctagttaaaaaggtttacaaaaaaaggttagcttttatgtagagaag

SEQ ID NO: 73975 - DNA, 770 bp, Cannabis sativa
taacatattattcacacaaaatattttataattgtcacacatttatcactacagatatgcatgaaactcaaccaaatattaactcacctttgagttagttaataaatttacgaatcacatacacacaattatcttaatatttttattaaactaatctacacaaaaaagatcactttgttgatattttttttcaattaatttaattaaatattagatatctttaattattattataattaaaactattatatattttaataaaataataacaataatacctgaactaatacgcaaaaaaccttctatatacccaactaatataagaaaaatgtagatatcactttagtttgtgaaagatatccggaagatacctataactaaaatcattattatttatttatttatttttaggcacacgaaatcatttgaggaaaccaatgtcaatcgtcaatcacattgggtgaaactgtatctaaaataaatccatatagatgtccaatatatatacagggaatatctacagtaagacaacctattttgtctgtatagtatagtatagggtagtaaatcacactatttatttgataaagaaaatgaattccatcatatataccatggagtacatgcatgtattaaaattttatctgtttacttattttaatttcttttttttattttgtatgcaattagatgaggatagcagcgttattcacacaaagcacaataaatggggggtaagttgaaaaatgcctcttttattaatcaattaa

SEQ ID NO: 73976 - DNA, 627 bp, Cannabis sativa
aaaaatatattttgtttcatgtttaaaatagtggtatacttagggaccatggcaccccaaatttcccaactaatatactattgtgatgtcgttttcgttaaggctagtgttgggatattgtcgtttctatgggttccaaaaccttaatcccataattcccgttcattgttgtgtagttgagcttgagttgaagagtggataaacccatggcttcaaaatatctatccttctcttcttcccttcttccgtctccaaccactccaactcccaaccagtggaagaagaacaccctcaacaaacccacgaccttgggactggttcgttctgcattcgctgctccttctagaaccacttcttcatcttcttctggtaccaacaagagaatctggaagaaaggagagtatcctggattctctgagacatctattcctggggctcgaaggaatccgcccattaagaatgttaagaagaagctggaccgccagaacaaagccaaggcctgggcctgcaccgttactgaaaccttgtccgaccatatcgacaacaagcaatggctccaagctcttcaggtccttttcctttttccttttcgccactcaaattggaaaacccaaatcgttcttttat

SEQ ID NO: 73977 - DNA, 1646 bp, Cannabis sativa
attttgattttatgtataaaatgtcgcaactaaaagtagagattgaaattaccaagtattaattcttgatgtgaaattgtgaatactaaccaacaacaacgttcacgtagaacaacaatgaataagaattagtttgagaattgtcgcgtttggttagaaaggataaaaatataagaataagaatgaaaatgaaaataagaatagaaatggaattaaatttaaaatacataaaaaaattgataagaaaaatattaaatttattctcatcatgcattgaaatagttttttattttattttaaaataaaataattattcatcaaaatagtggaaagttcattctataagaatgatatttcaatatattaatatgtaagaccatttccaatgggagatgtaaaaattgtgctatatttagaacaaaaagtaattttgtggtaaatttacaccaagttatagctttgtgttccaaaagacaattgcaaaattttgatataaaatttaatatctaattaatattttattataataataaaatctaataattttgtaatcaatttttattattattttaatatgtaagataataaaaaataatataaatatttcataatttaatgtgatagttttttcaatgtgatagttaaatatactaataaaataataaaaatgacataaatgcaaatgaaaaagtagtacatttattgtgatgtaaattttacatcatagcaaatattgtgtcaaatttggcacaaaatttgctatgtgccaaatttacataactttttgacacaccattggagcacatttttttgttaaatgaactatatttttacttttcaccacttatttataattccattggagatgctctaaccaaacaaaaaaaatataataaaaatttattcatttctattctattttattttattacctctaactaaactaaacactattttatataagtttttttctactcccaaacgtttataagttctgctaataaatactttattattaattaattaagtttcccacgattgttattaaatattttaaaatgattaataccatgataattaattagtgtattttaccaaatcaaattaggtgggcaattaaaagtgcttaccgcatccttcaggcttctaaagatccaagaacggccagcaataattcaggtttttggcaaaaattatggcaattaaagatcccaccaaaggttagaaacttcctatggcgtgctgcttctgggacttcgccgacttgtgtaaatctcataacaaagcatgttgatgttccctccctttgccctgtttaccgagatgcacctgaaacaacctcacatgtccttctctcttgttcttttgctacttcttgttggaatcatatgggtctaccagtcgtgatctctctagacctctcttttgctagctggttggatggtcttttccactctcttgatgctgaccgagtctgctcacttgttatggttgggtggtccttatggaaagcaagaaactcaatggtttggaaagataaggttctcactgttgcaaatgtcctatcttcggctcgcattgctcttgatcattggcgtaaagctcaggataacacttctctatcctatatctactctagtagttgt

SEQ ID NO: 73978 - DNA, 728 bp, Cannabis sativa
cctggtaaaataatttccccaccacacaagcttttcttgatagaaggaataactccagaggaaaattcacttgttcagcgagacgcgaacacttggaagttttacatggatggagtgtccaactagcatggctttgtgcaggggtgatactaatttcgccagaaggcttcaagtttcactatgccttaagatttcaattcgacacttcaaacaacgaggctgagtatgaagccttgatcgctggcctgaagatcgctgaagtgttgaaggtgaaaaatcttatatgccacagtaatttacaattaattgtaaatcaagtcccaggggaatataaagctaagggcttaaaaatggaaaagtacctcgagaagattcgaaagaacatggaaaagtttgattatttcaaatcgagcaaataccaagagaataaaactccaatgtcgatgccttagcaaaattggcctcttaaaatgaactaggtgaattaaacttggtaccggttaaggtgttaaatgagccaagtatatgtgagaaagaagaagtcgagatgatagatagctctcccacctggatgacacctatagtcaactatcttctcaacaggaaacttccagctgacaaaaacgaggcacgaaaactcttctatatagtgcctcattatacaattgtagaaggcaaattatatcgatggggttattcaatgcctctcctatggtttgtttttctca

SEQ ID NO: 73979 - DNA, 1534 bp, Cannabis sativa
  modified_base (51)..(56): a, c, t, g, unknown or other
tctgtttctttattgatgttgaataaaatagattacattgaaatggagttnnnnnnagggcataaaacctaacactttgcacagtgtaagtgccttgatgatctgctgaccatgcccaactgtcgggtcttgagttgataccaagaggaatggctaggattagatcagcttccttaggagaaaaaaggtcacggactgcctcaatatcccagcagcttgtgttcgtttgcagaagggagttgacagtgttgttgatgagtccaggatgtgtagaagtgacatacctattgctggaagatggaagccaagggaagcccaggattgttgtttcttttccatctcctatgacccgagaagcccctaacttaaccaagtcctttgcaccccatatactgcgccacacaaagcttgggttattcccaaggtcggatgagagaaagtcagtatgtggaaaatatttggctttgtaaactttaccagcaagagaatcaggcttacataataatctccaacgttgtttggcaagcataacaagattaaaatcatggagatgcctaaatcccataccaccttcttctttgggagttgctagacgttcccatgacatccatataataccgcgcccattacttgatttagttttccaccagaagctagccattagtttctcaatctcattacaagtaccaattgggaggaggaatacactcatagcataggtaggcagggattggatcactgtcttgagtaaaatttctttccctgcataagacaaaaacttgccatcccagctgttgatacgagatatgaccttgttttttatgaatccaagcacagcatttttattacggcctataatgtttgggaggcctaaataaaagctgccttcaagagcttctgacatatggagagtagagcagatggatgcacgggtagcaatgtcagtatttggactaaaaaatatggatgacttggagtaattaaccttctgaccagaagcatttttgaaaagttgaagcatgttggtgatgctaccagcagccccttgagtggcttgactgaacaaataactgtcgtctgcgaagaacatgtgggttattgggggcgcacgttgagcaaccttacaaccttgcatgagtctattagcttcaaatttctgaattagagcagagaggccttcaacacatataatgaacaggtaagtagagagtgggtcaccttgacgaattcctctggaaggagagataggatcaagaacatgaccattatgaacaactctgtaccgaaccgtagagacacatgccatgataagctcaatccatttgctagcaaaccccatacgagccatcattgctctaaggaaactccattcaactcgatcgtaggctttactcatagccatgaaacctttcttgccacttctttttcgcttcagatagtgcataacctcaaaggcaaccataacattatcagatatcaagcgtccaggaataaaagcactttgagtttcagagatgatacagtcaatcaagtc

SEQ ID NO: 73980 - DNA, 501 bp, Cannabis sativa
ttgtaatttgttaccattctcttgctattttcactccactttgttaatcatttatttttactcttcaacacatatggacaaagaattacatttactaagctgtaattgaagtaaaaatacataacacataccatctctttttcattaatgttatcatagaccagtttgcatctgataacagaaaagaaaaaaaaaagtgcattaaaggctgtttttatgggactaaaacgagtagttttgttttattattagttctctatcttccataatagagaaatgatgaagaaagtgctacttttttattttcttttcttttttgttaaatgaaaaaagctctttcatgttcaatgttcttaagttgaatttctgaagatgatttaggaacattgtcacagaaaacatgtatagtatactgagtacagaagatgctaaaatcccttaatggttatccctaacatctactcacacacaaaacacaacacacacacaaagctaagctaa

SEQ ID NO: 73981 - DNA, 1352 bp, Cannabis sativa
aggcaaaagttagtatactatgtaattttcctatatttaactaggaaactaagttggctttgcgcgatcatgttatctaacttttataacctttttatttatattttatatatttttttattttttatatttattcagcgatataatttaaaatataataatttgatgtgtgtattacaaaaaaaaaaaaaaaataataatactattgaaattagaataattttttatttttaagatatatagaaagatgacgattttgtgacaaatattaaaaacttaactaataaagaaattgcatttatttttctaataaaataaatgaaaaaaaatatttctaattttaataaaatggccttgtaattgatggtgtagttatttttaaacgactatttagaaccttttttttttttttttcctataatagaaaaaaaaaatttaactaatattataaaagtttttacattttattttgtggtgtcggtggaatgtgatctcactaaaagtgaatttggcatgacaactgtaaaagggtgtcactatttttgaaactgaaaatgagaatttatataaaaatgtcagtaatagaatgtttctatatgaaatattcaattaaggggattaattttaatacattatgaaaatgagaaatttataccctaaattgtaatgatgaaaggggaggccatgatctgtatgtccaattttttttttatacggaatatacggtgcaactcacggagcaacctaaatcgtaactcaatttaaatcacaattatcaatgcaacccagatcgtaacccacacaacaattcaaattattaaaaatgaaaaaaaaaaccctattttttttattaaaaccatgctttattcaatagaaacaaaacactaaacaagaacgtctaggctcccaagaaaaggggcagcctctcaacagaaatggaacaacaaaagttatgggacgcaacccaatctgccataccaatgagaaacatggtttaaaatacaagaaatccaaataaacttaacataattaagattaaaaatcaattggaagagatgatcaaatacagggttgatctgcgaaacagggccctttccagctacgattgttttaagcaaaaattagcatttcgagaaggtgcaaacctcaggccaaccagcagagatgcacatttccaaggctagcaacatgccgtggagttttgcttctagggaagaagagactgagacttttgtcgacattgcatccacaaacactccttcagaattaagaaccaaagccacttcataagccaacgagccacgaacagccgcatcagtaaagaccacgataaccctggggttgctggcatc

SEQ ID NO: 73982 - DNA, 1182 bp, Cannabis sativa
ttttttttttttttttcacatttagctaaaaagttagagaatctctattataaagagactttggatattgctcatgcagttggagttagctgattcctcctggtaaggatcactgggaagcagtgaaatagatattgagatatctacgaggtacttccaggttgtacttgtactttgacaatggtgaacctatgcttgatgggtacaaaaatgcagacatggctagtgattgtaattctaggaaatctacttcatgatttttgatgatatttatagggggagctatttcatagcaatcaaaattacagaaatgtgttgctttatttactacagaagttgaatacatagctgtaactgaagcttgtaaggaagctttatgaatgaaaaagtttctacaagaattgggcttgcatcaagaaagatacattgtctaatatgacagtcaaagtgtcattcacctctccaagaattcaatatttcattcaagatccaagtatattttaatgctagatatcattagattcgtgatgtgcttgagatgaaagagttgcacttagaaaatgtgcatactagtgaaaatagttctaatatattgacaaagattttgcctaaagagaagcttaaaacttgtacgcgaagaacgagcttagaagagcccactaggaaggagaaatttgttgggtccactacagtttatgggcttggaccaaaaataagggcatcaacccaatttcccaattaattgaaataattaaaagagggaaaaaaaaaagaaagagaaaggatgttgtgtgtcgtgagcaacaagaagaaaaaaaaaagaaagaaaaagagaagatgaaagctagagaaagaaagtggggttttggcactttaacttaaagattaaatggttaattctcatatattttagtttaaattttggatggtgaatccttgcaacgtgctctaacaatttaaagtgcttttttagagatccaaattttttttctatttatgtatccatcttttaagatgatgatgataattatatttgtgatctaaaattatttaatcttaatattatcgtcagtctctaggtttactagagaaaaactttgtaatactattactgaactttgatgataatatatgatttgaatggattatagtcctgtgattttttttttttgaaagaaaatc

SEQ ID NO: 73983 - DNA, 769 bp, Cannabis sativa
gatgtccgagcagagtcaccaagtaatgtccgaccaaagcatgattgtgtgatgaactctcatgcattgtacaggatatgtgagttggcaatttcagagatggaattattgtttccaagacacaaagataatccctacattcgtagtattagttcagataataaagacaaagagcctaggtttcccattctttgtattgtaattatagaatcaacttagtttcttattttatttattatagatgaagggaaatcattcttcacgtaataagcccctataaatagtggtgcaatctcactagtaatgggcacaaaatggattcaaaaagaacacttaacagacaaagagcgatctaagagagaattacatagagatccattgtaagagctttagagagagaatactttattctttgtctcataagtcaatacaatcaaaaggagagtaggctattaccattctcacggggccgaacctctagaaattctagagttctctttatttattatttttgctttctattatttattttatttaattgttttattttgcggcactgtcgttggctagaaggaaggttaatattttggtgctttcactgagagaaaaaacacaagcttttgtcttaaagttttgacaggttaacaggatggttgtaactcgtgggggaattcaaactaatccagtcgactcaatggtgacaaacccaagcgtacaaactcctagaaatcaatagatccactagggacaaaccccggataagttaata

SEQ ID NO: 73984 - DNA, 858 bp, Cannabis sativa
ttaaccactttccacctatttagtcatcaatggaaaaaattccaaccagactatacacaagtaattacaaataaaaataaataaaaaagaaagaatataatgtagttgagtttaattttcaaataaacaaacaagaaaataggaatatataagtacatatatatacacaaacatactttctgagtgatgagctgacattgtgttcccttgccagaagcaggagcaccagatatcattactctcagcggctccgccttagcacttcttacaaccttattcgtcaacaataaattcagaaaatattttctttaaagaaaaaaaaaattccatgtccctttcactcaatcgccattattgaagataattagatgaaaatattaccataaaattgggagctcgcgggagcggtgcgacagtggatcgagaaggagttaggttagcacggtggcatcgggagaagctggaaatgaaggaagagtgcgattgagaagagagaagagtagggctttttgtgtgggaattaggattggatggggaaagagatgagcaagagtaatagtaaacctttggggcagcaatggcgcccagtggaggacaaactgagctgacattggaagccattttcgcagcgaagcaaaggacagggagactagagagaggagaagctgaagcaaagtattttgagtgttacaaatacaacttggatgggatatttttattattcatattcattgcttccattagtgttcgtaaaatagccgatccaatcagattcgcctcaattagacttttttcttccttttgttatatactattaggtaaatagtggcataagtacctaaaattttatgtttgtaa

SEQ ID NO: 73985 - DNA, 1043 bp, Cannabis sativa
acctggacccggacacggactgggacccaagatccgaatcggaacgagaccgtgacctaagattgggatacggatcttgacccacgacccaaggcttggacccaaccgctagtgggcgtctagatcttggaatcgtaccaagagccgaacttggaaccacttccaaacaaggacccaaacccaaactaggatccgagaatcgaaataagaataagaactggaataaggatcgtggaatcagaattagacctggacctaaaccagatctagacgcagaaccgaacaatgagccagacccaagctgggatcaatacccagacccagacccgaacccaaacccagacttacgcctggacctgcgacccagatcccataacccaagacccgtgaccaaggactgggtccagaaccgagacctgtacaagaacccagacgcagacccaaacctagaccctgactaagacccggacccaaacacggactgaaactttgacccatatcttagtctgtgtccaagttcgggtcttggcgtctaggtcccaggttcaagtttttgtatgcatttgagtccgggtctaggtcttgtgtttcgatcccaatctaaaattgggtcggtattcgagtctgggtctgggtttatgtgcatgtcaatgtccgaattagagtttaggtcaggggctaggtctaggccgaagatcgggtccaagactttgtccgagccccagttttggggcttagttttagtatagttctgggtctttctctatgtccaagtgctggtcacagtcccagtcctgttctagggtcctggtcacgttcaggttcatgttttggttttgggtcacaggtctgtgtttgggtccaggtcgtggtccaacttcatgtccttctctgagtcccagatcacgatgcagactatgggtcttgtccaagccccggttcccaaatcctaggacaagatctttaccataatcacgagtcccagtctagtttcagttcatgtccctggtccctgtcttggtttgggaccgagtcttgggtgt

SEQ ID NO: 73986 - DNA, 940 bp, Cannabis sativa
ttaaaactttaattgagctcccttaaactgtgggcgaagcacctttatccatcaccataatgtaagactacctaggtgtcaacctcccattagcctacaacatattgctgggtcgaccagtgttaattggactaggggcaattatctcaattaagcacatatccttgaagtttcaaacaccgtcaggtgtaggagttgtgcgaggttaccaactgctagctcgtgaatgctaccgcatagagctgcagagtagaaaagctggtcatcaggtaatggcagtcacgactgaagaaggggagaagcaggatgaggatcttaatcctagaattcaagatgaacgaaactagctaaaatcaatcgaagaattggaagaggttattttagatccaagaaattccacaaaatgtgtattcattgggaagaacctggatgaacaactaaaatagcaactaataagttttttgagggcaaaccaggatcaattcgccagaagccactcagatatgatagggattgaccctaagattatctatcaccacttgaatgtcgacccaaattacccagccaagagacaaaagagacgacccttggatgctaagagacaaggggcactcaagcaaaaactggataagttattagttaacgactttatacgcgaggcattttatccctcgtggatatccaatcctgttctcgtcccaaaaccaaatggaacttggaaaacttatatcaactttttagatttaaataaggcgtgtccaaaggattactttccactaccaaggatcaattagtcagtgaatgcaattgcaagacacgagcttatgtcattcacggatgcatattcttgatataaccaggtaaaaatgcatgtccccgatcaagaccatacaagctttgtaaccaacatgggactttattgttataaagtcatgccgtt

SEQ ID NO: 73987 - DNA, 1451 bp, Cannabis sativa
  modified_base (69)..(71): a, c, t, g, unknown or other
tatttaaaaattttaattgctaaaaaaggtcttgttaattatttatttaattacttaaaaaatagttannnataattaattaattctaaaaagggaatttttacctattcgtaatttgctactacaggtaaaaaaaaatataaccatatggttgtaataaaaatgtaatcattggatagtcacccttataaaaattaaatttttaaaaataaaataactatatttaaaaataattataatattcctcagaactagaatcaagtgattgtaacgttctactaatttagacacgttactgtattttcttaattactgcgctagcatttgctaataaaaaaatttatcgtacaattgtgtataataaaaactttataataataaaatactttcataaatatacattgtaaaagcaaactgttgataaaatcccggatcccgaaatttatttttcaaacatgcacataatgcaacataacaaaagtatcacccaacgactaacaaaactaagctcatgttcttatgaagatcccaacccttgaggtttcaccatccaaatttgtacaatcttcattgagctccaaattcactatgattcttgttttagtctggcatttacctacacataaaaaacataaatgtgagtcgataaactccataagaaaaacataaaatataaacatatatctgacttgtataattaggtgcccatacacttaattaccatgagtctataacctacgtccaatgtgtataactaagtatcaaacgttcttgattataatacgattgaccataataccacatacactcagtactctaggcgtactaatagtgttggtagcaccaatttgtactccctaaaagcacaactaaccataatatcacatgcactgagtactctattcgtactccaatgtgtataactaagtatcgaacgttcttgactatagtacaattgaccataataccacatgaactcaggactctaggcgtactagtgttggtagcaccagtttgtactccctgaaagcacaactaactataatatcacatccactcagtactctaggcgtactagtattggtagcattaagtcacacttcttgaaaattgccaaacatatatctgttgatatcttggtgtaactttatgcacaccaataccactctaactgatatgttatctaattaagaaatataaaatatgtacactaaacatgtgcatatgtgaatctgttatactaatcttacctcaatttcgtaatcaagtgcaccagtcaacctgagtggaaaaacttctcgaagatcggagaccttaagtcaaataacgtaaaattggtaatatcttgctaaacactttcggggacttaaactcaaaatctaaagtttccctatccataaatagcatatgacaatatcttaaatatcgagaaaatgttaaaatcaggatac

SEQ ID NO: 73988 - DNA, 669 bp, Cannabis sativa
  modified_base (642)..(643): a, c, t, g, unknown or other
atgatgataaaggaaaagattcatgaaggagggtaaaatttgaaggtgagaatattggagtatgaatttcgatagggaaaattgtaattattaccatctttgatacatacaaatgttgggtttgttattatatgaatatacctcaagatagaacgtttctactttataaatttttagtataaaaatttaaaatttacatattaatattaaaaaacaaaattaatattaattttagaagaaaaaaattttctaattagatgtatatcatatttattgaattaaaaaatggcatctcaattctaaattgcatgataatggcttcgatatattacatttttatttattttttattatattggagtactaagtcctaaataatttgtgttttttcaaaatttagaatttttgtcttttaacttttttttttcgtaaataattgataaccattgcattttaatcaatgaagtgaaaaataaaatcaaaatagtgtgggtgtgtttttttttaattattttatctttgtttttaaaaaaattttaaattaattagttggttagaatttgagatatttttcttatatattaaaaaaaaacgttatatttaaaaaaggaaatatatcttttatatctttatatattaaanntgcctatctaacggcaattcttggtt

SEQ ID NO: 73989 - DNA, 616 bp, Cannabis sativa
atgggcataaaacccaacaatttgctctttaaaaaatatgccactgttagaagaagtttgatagactctattttggcaactggtgcaaacatttcttcaaaatcaaccccttcaacctgattgtaaccatgtgtaaccaagcaagccttgttgtgaatgacagtgccaaaatcatctgttattttattaaaaatccatgtagtaccaatgatattgacaccatcaggtcaagaaaccatgatccactccctgttcctcttgaattgtcccatttcatcttccatggaattattccgaaattcatcaagaagggcctcagtcacattctttggttcaacaattgacacatagcaggaaaaagcaatagcattcataattttttgtcgagtaaccatggtaacattcagttctccaataaccacggtaggagggtgtgctttttgaatccaagaaggaggtcctttcttgtacaaataagcatgtgaataactaggaggagttgcactagtgacttcagtatcaacaactatttttggaggcattccagaggtcttagattaatctgattaagcttcaaatgctattgcatttgaacttgtaggaactacttgaggat

SEQ ID NO: 73990 - DNA, 901 bp, Cannabis sativa
gacactttaaaaacttatatataatgggtggtatagttcctccaaataaaaggatctccatcagattgttatagtaatggaaagttagttgtctctcagaaggatgttcccagctaacttgtccatccggaagtagtctcgtggaatgatagttgcctttcggaagggagttcccggatgactatcatgtccactccgggtgtagtctttaggatagctagtcctcctctggaaagaagttctgaatggctagttgttcctcctagaagggagatccagatagtcgactctagctggctcttttcctatccaggaattccttcagcatacgcctcgatcctttgtctcgggaacgtatgtctcatctgaaagcactctgtcttgtgctgacgtgaagattatataatgaggaggttgttaagtttgttgtggcgtaactaacttaacaacttaagttgcagccatcgactcaggatctttatcctaagcctataaatatcaccaacacttaccatttcaaacacgctgagttcagatgagtttcgagaggagttttcgagattgcgagagaaaacaaaattagaggtaaagagagaggcacgtagaaaagagagatatttggtttggattttgtataaaaaatcttctgtagatgaaaaaagattcttaggtaaaagtgtgagagttgaaacactttaagagaattcaacagataatcaatctcgattatattaacccttattcttgctcaatcaataaagatgattaggtggtattttaaaattggagcagagccataaatcacatcgatttatagaacttgaaccggtatatatcttggtgttgattttattgttttactactttaatcatttttggttctcttatactctcgttcatc

SEQ ID NO: 73991 - DNA, 919 bp, Cannabis sativa
  modified_base (29)..(30): a, c, t, g, unknown or other
aatcaagattaactgctaatttccaaatnnactaagcgggctttacaattaagttcgaataaaaatagtgcaaggcatttaagataagaaaaatgccacaaggggaaaaccattaagtcattctcctaagcttatgatgagaggggaagccaatgaactcgagaaagaccgtcttcatatagcttgaaaaagaccttctacacgtagctcggaaaaacaccgactacacatagcttgagaaagaccggctacacgtatagagccttgatctctgcataggccttatttccctcatcatcacaagatccgatttcgtgaaggtcgagatctatttcacagcctcaagaaatcactcaacactgaagagaggctgacgcaaagatctcctggcacaggataggatcttaagttggttggttactctgaaagaaaccataccaacttcctccccagatttacctgaaaccgtgcagatcttcctttgaaattcttcatcagcctgagcaggatctttgagacccctcacaagatcaataccctctggaatcacttgtgaggatcggccatggtaggtcacgggttcctttggatttagctcagccttggaatccattgtttcctactccaattgagacttgaagtccgtaggaacgaatagaaattggttggtgcatctgggtattatgagtctgggaagataaacttctgaactcaaaagagatatcttggcagaaagaaagtaatccattctaaaaagggatttcaagctagaaggtttgtgaaaaatgacaagcttgagccgcccttttatacacgatgtacagtgacaagaaagccaaagattaagaaatctaatggctgggaatcatgcagaatacaaataggcgattcataatgatcttcgaaaccatacaactgc

SEQ ID NO: 73992 - DNA, 535 bp, Cannabis sativa
tccttgattgggaataagtggggaagtggattaaaatccttaatggggatggggaacggggagcactccatgtaattcctcgtcatgtgtgcatccttaggtgctagaacactattggtactcaataacaatactcattaattaaatataatatttttgagaagtataagagtggtgctatttttttatttaattattatattagtgattagttactttcaattaaatataatatttaaaaagttttgacaacattaaatgtgatcttggagatgcacaaatccccattcttcacccactaggaaaaccaaaacggttacatatttagagaaatgctaagagatatttttatacgtgaatattattattaatctaattaagtattaggttctatacaggggcggagccagaactacatagttgggggggccaatatcagacaacccaatatacaataaatttagatttctgtgactaaaatatctttaaggatgtgtgtcaattgtaaaaaatattatcatttttaaattttata

SEQ ID NO: 73993 - DNA, 1236 bp, Cannabis sativa
gaataattaaattataacaccataattatatagactctattaatttgttacgttaaaaaaattatatatacattttatgaaacaattagagtttattatggctttagtttggataatatagagtgaataaaatacaaataaaaaacaaaatgtgaaaacaacattaagattaataattgtgactaataaaagcatataaattacatttgactaataaattataaaaacggaaatatataataaaacattgattctattaaaaaaaaattgattacctattatatcacattgtaccctttatagttttttttcccacactttttaaatataaatgctttttataactaaaaataataatgacaaaatatttcggttacaattatctaacttttatattcaatcacaactttttaacttttttttttcttaaataattaataaatataaataaatttttcagtaaaaatctattactcttttttaatctgtgtgctcttaatttttcagattaacttaaattttgtgtcatgttttcaattatttttctctattagtctacatcaacattgatatactttaataatactcatgtataaatgaaaatcgttagaagcaaaaaacttgctgaagagactataaacttttgagataaatactaacaaagattatttgatatctaataattaaaagtttaatgagttatatatgtttgcaactgatattaatttatatatatatgcacttttcaattacttagcaatataataaattgtaattgaatacacaaaataaaaaaatacaattatagctcatacaataaaatacacattcaaatcattaatagagtaaaagtgcagttaggagaaatagacatggggacaagtgtgaagtgcatcactttgatatgagagagtctcttttctttggtaattaggaagccttcagtttcgtgacaaagaaaaactaataaaataattgcattaagaaaataaatattaattgttaccacaaaaaaaagaaaataaatattattattattattatttattaagatatagaaaataaatatattactttatgcaattaataatacctttactttgtctttaaaccctatttgtctcttcctttctctgcccaataagttcaccagaagcaaagggatggttttttttttttgaataaagcaaagggagggttttattttgtcaacttcaacggttttattttgtcagc

SEQ ID NO: 73994 - DNA, 748 bp, Cannabis sativa
ggtcccgagttcaggttcaggtcctgggttcaggttcgggtcttgggtcccaggtcccaggtctcgggcctcgagtttgggtctgggtccaggttcaatttatattaatatttagttggaccgagtttaatctcgtatgctttgttttaaaaattatattaatatttcaatttattaacatatagataagtatataacttagttagttaattagaagatttgtatatttatacccaaaattcggctggaggacacgtgtcaaggtaaagggaatgtgaatcagtgcaatatctttttatataataactcattaattgcgtaagtatcaaagtatatttgtcacccgctgattgtaaggtcttaggcgaagattcaatgtacgaactgatacttagtgtattaatgagaaagcatatgtcgctaaaggagaatagcgaggcaccggagaaaagcaacacataccttagcttacaataagcaaactaagtgtaaaagtcagattgactcgaagaacaagaacgcgagatgaccatctcactacgaggaagcttcctatagtttcatccaactaacaagagcgaggctcataaccctgggaagtcagaagattcctgtatacccgtgattgaagtaagacgtatcttgtcgacctcagaaagaagaatggttccagctcgccattgggatcactacaatcaagtttctgtcgagacatctcgagattaaacaattaaagacgtgtttaata

SEQ ID NO: 73995 - DNA, 1033 bp, Cannabis sativa
atttacaaaaattctaagaagcatcaatttaggataactattagaaatttaaaccattatttggagagcttaaaatattttaaaagaatgaacacaaaataaatattatacatatagagatggaggacataagagaagaaaaatagtcaatgaaattgttagacataaaaaaatggccaacttggttcaagagaaatgttaaaatagtgggaaattaacaaagaatagaagaaaaaaaattgagatattgacagaagagcgcgtaagtaaattgctaaattggtgatcaactataaataatgataaaatatagtaagatagtagagaaagaaagaaagaaagaataaaaaaaaaaaaaaataataaaatcttgtaaaaaaattataaaatggaatagtaactaatttgttccataggccttatgtgtcatctattaagaacatctacaatggtaaaactttagaggatgcttggtgaggtagatatattatgtgataaaatattgagatgatatatcattgaagagaaaagaatgtcattctagaaatttgcacgaatgttacattgtagcattgatgctatttatttttttaaataaaaaattgaagctaaaaagttattgtagctaaaaattaggatatatattaaataataatgtgcgagatcataattataacattagagtatttttagaagtaagagtgcaaaaaatgatgtgaaaaaaatattatattttttgatgatgtgttaatttttagcatccttaaaggataatactattggagatgctctaaggtatccgccattataacacagatttgtcgctggaattatttatttttttaacagttaatatagataatagtgagattataaatgagtatatgtgagtatataaattacaaaattttgatatgtaaaatagtacatcataaggtattgtaaatactttacaaaatttgggtcgttatgaaaattctaaacaattattttaataaactaattttaattcatattcttattgttaattatt

SEQ ID NO: 73996 - DNA, 885 bp, Cannabis sativa
ttactttattttcaacccgcccaatatacagattgggcgtttttttcgtcagttttttcgatttttttttttttgcagtattttcggtttagtttaggcaggttatccggtttaggcggtttacgaaaatatatgtacaagtgggagataatgatggccatggcaatgatgatattgatcagctgatttttgttagtatttattattttagttgagaaaattatgtttatgttggtattttaaacatatgtttatttactaattttttcgacaattataattatatcatgaatgtataattaaaaaaaataaaaattatattttattgtataattatttataattaagctttcatgtttttttattttttttattttaatttaaaaataattgataacaattaaaattaaataataataaataaaaagattaaattacaaaattttactggctcattattgcgctagcaaaagtcaaatatccatctatcgaaagtgacttttcccagcgcatgtaatatcccaaaaaatattataatatttaattgggtgtattttattaaatatgtgagtatattgatattagagtaagataatgatcttacttaagctaattgtgtgataattagtgcaaatctagtaaatgaggagattttatcagattatatgggtattgtaaataccattttagaaataaaatatttttgggttcggcggccttgaaaactcgaaggagtggtcaaaagtgtcacggcaattaagttgtgttgcattgaaattataccgaacaagattaaaatgttgagaagtaggttaaatcaggggaatctagaaatgaccctaggttattccatagcttaagtttagagggaggggtaaaatggcc

SEQ ID NO: 73997 - DNA, 875 bp, Cannabis sativa
atatgctcaaggctccaggcgcccatactagtcgaaccactggtactagtctcaccactggtccttagattactgcttacaaaatgcgcaggggggtaacaactgatcttgccctcccgtactgatctaacttggcagattgcccaagttcgatcccacaggtcttcagcatctcgctcgtatagcctgagatagttcgtacctttaattctatcaatttagcctcgaatatgacattggggtcctgaggagtctttgatgtacgtggtttgggagacataatttcaaaatccaagtcacctggttcaaaagcaatcgtgacgttaggtacaggaataaaggacacgctgggaggttctggcaaggctgcttctcgcaagaattgacgtttgccctcgaagatttcttgcaagaaacgcctatagcgactagcaatatcttcctggtgggttctcattacatgttccctaaccctagcatcgttcaactctaatttggaggtgggttttgaagggttaggtttatatgggatggttgattttgtagcaaacttaaactctaaaacttctggacgataaattcctgaaccagagtgggacattgctggaggcaaaaagcagtcccaatccctggagagaattttatcaaacctgaaggtaatgagtcgaagatcttaaaacaacctatatattgtgtgaaccctagtatgaacctagatacggtttaaaccctaaaaactaccaaaaccagatgaaatgaccatgatacaaacaaactaagtaaaaaatctacaatgtaacaaacatgagaaagaagaaagcaacttactgtttgaagctaggacttggggcatgttgggaatatttaccaggatc

SEQ ID NO: 73998 - DNA, 934 bp, Cannabis sativa
tatagggtacataattaatgtattgggtctattaatacaattaattatagaacttaccatatatattatattcaaaagaaataaacatcttcctatattaattgcataaaatttatattactattcaaaatttaaattaattgaagctaattatttaattatttgattatattaaactgatatttgtatttttaagtaattcttaaactaattaataataatataaatgtttattatttttcacattaatgttatattaaaaattaatttatattatacacataaatttataaaatatgtacgtttaataaacaatgtcaatatatgttttttttaatgtgtgtttattgttaaaaaatgtacattcttaaaaaaaattaaaatacaaacacttttataatataataaccttaccgtaacatgtttattaaaattaaacatttttaaaataaaaatacatatgcattttataaacaatatcaatgtatgtttattatttaaaaatgttatttatttcaatttctaattaagttactaaaatataaatactaaaattaaaatatataaaaaattatgtttattttatgattatataatattatatttactaaaaattaactggaaaaaaaattatacaaaatatgtatgtttaataaataatatcaatttatatttattatttaagaatgttaattatttataatttttaattaaagtactaaaatgtaaacgcttaaaatttaaacatattaacatttatatgaatattttattctattatcaatataatatatttattaaaaattaatatatcattaaaaaaatcactgattcataataaaaatatatatcataaaaacatatatatataaaaatattcacgacttacatgtttattatataaataatgttaatatatgtttattatttaaaa

SEQ ID NO: 73999 - DNA, 735 bp, Cannabis sativa
gtaacaaacggattgatatcatcagctaaccatgggatattcagtacttcaatatctcccactcccactctgatttttgcaccagcaagaattaaactctgagattcatgaatgctacgccatatgtaactcgggttggcaccaagaggagcacttaacattgagctatgaggatagtagcgagccttgtacacacgactaaccagcgtatcagccccttgtagcagccgccaagcttgttttccaagaagtgacagattgtaatcccggaggttgcgaaagccaaggcctccaatactcttgtgacgactcaaacggctccacttcatccaagttataccacgcgactgttggctcaattattaattattttagtatatataaataaatatagcgtacctttttagaatattctattattttaaaaagaaaggaaataccattccaatgtaagaattaatttttttatgtattttaaattttattccattcctattctcattcccgttcctatttctatatttttattcttcccaaccaaatgtcaccttatataagatatattctgtttaaaacatacacaaaaaatgttatatagatattgatatatataggtaagatatattgatatattactaaaaaaaggtattatttcacaaaaacgtaaaaacaacaaaaaatttacaaaaatacagtttcacagaattttaagtatttttacgattttttttattt

SEQ ID NO: 74000 - DNA, 1023 bp, Cannabis sativa
  modified_base (980)..(983): a, c, t, g, unknown or other
gtataaaacacaactctcaaaatttcataaaaagtcatccacctaacaatttatctaaatttttattaaaagtaagattaaaatataaattcttatggtaaacatttatttaaaaaaaaaaaatcattgtaaatcacacataaaaaagtaaaaatattttgccatcatattattaaaataatgttaagataattaaacaaacaaacaaaaaaaaaaatcatcatattacacataacaatttatataattgtatttaacatataaaattccaccataaatatttatttgtttttatttttctttctttattccacttgaaataaattgagatagcaaaacaatgaaaataattcaatattaaatgcattataatgtattaaccatataatcacttacccataaatttatttaaaataaaatccctaattaaacttatatttaaattttataaatatacataataaatatactaattaattattgttagatctatataaatgtgtataatttcaaaatatatattgagtaaaatatttatttaaaaatactttattaacaatctctaatttgttataaaaatattagactacaataaattctaattagttatacattttttaactaacactctttgaccatttactcacactcttactccatgcatctctatctcaccattataaccatacatgtgtcttttttttgttagtttatttgcatcatcttatatattttttttaatttatttgcatcatcaaattatatccattattcactcatactctctccatctatttcattattataattatgctcttaaaattgagaatcataactataagtgaaatatactgataacacgacaactttgaatatagtaacaactactagtaaaatacgatgattacaacgattttgaaattataagatgagtttttttttatagatttatcacttgtcttttatatatatatatatannnntatatatatatatatttataggggctgtctgttgtcacgc

SEQ ID NO: 74001 - DNA, 815 bp, Cannabis sativa
actccaaatcttttccagcctaaaaccataatgacccatatcctcccgaggaaggcgacggttaataaatgatcgattgaaacccaaggaggagtagaaccaagagttttttgaaagatcatttaatgagggtttcgacctaattgaaaagaagtgataattaaatggtgtaattatgaaaaaaggtaatggtggaaagatagaaaaagaaaagaggtgaaggatggcatcacgttgataatagaaactggaatggaaggactagaagcagggccggccctgagagtaggcgggctaggcgtgctcagggccccgaaattgtaaaaaaaaaaaaattaatatatagataaagtgttaaataagaagaaaatatataaaaaacaattgtttggtgtagtagtaaaagttcttattttaaagtaagaggtcatgtgatcaattcctaacctctactttttaattttttttaaaaaatatttaatgtgtactagaactatcatttttataatagttaaactatatataggggcctcaaaatttaatttcgccttaggcctcatataccttaggaccggctctgactagaagtaaagagagataaatccctagattattctagagcaagcaagcagtaattttagttttttttttttaacataaacttttgaaattattattactaatgttgtgtcatacacatttatatttggtacaaataacaagcctagaatgttccaaaaatacaaaaaacacaacaccctggtttatgagaacctagtaggggtgttcatcaaaccggctgcactgcaaaaaaa

SEQ ID NO: 74002 - DNA, 721 bp, Cannabis sativa
ataaaaaaatcattattattgttgaagtacatgtgcaccacttgatattttgttgatttctctatttaaattcaaatttaaagacacctgacaatacaaacatttgatttagctatatatttccactaaaaaaaatatataattacatcactaacatataattcttaatttcataccttgccaaaatcaaagtatgaggtgagtgatgtcctctcaattgatgcatcattactatttgtatgatgtgaataatttttaggggacacctccataaaaaaaacatataagactaatatttatatatatatatatatattatagtaaattatatatatttatattcttaccgtttttgcttcagaatatttttgagaattctttgtctttctcttaatcttttcaagagcactttttggtctccgagatgttccactaaatttttctttattttttacaccttttaatttgctatcaattgagttactcgcatcattcttgcaaatttcaatagagtcttcaccttgtaagcatgcatcaattccttccaaatctcttttaaaattttgtattgcaatctaataaactttttcagttagcgatcctcttgttccaatttgagtactaattctactcaattcttggtaacgccttgtcatggatgtttttgggtcatcaagatgtgtacttttgtatgtcgaagttattgttcccattttagcat

SEQ ID NO: 74003 - DNA, 1006 bp, Cannabis sativa
aactcttatgtgtttattttattgttttagaatacatattaggatgttaataaaacatacttggtagtaaatctagattctggtaaaatatttctaacataaacttacctcgactgcatcataatattttggccaaaataaattgtatgttgataattctcgacaaatctaatatcatgatccttgctatctcatgttagtttattgcatatgcaaacattcaacatctattgtcgacaaaagttttattatatgatatataatttcctcccatatttaggggtgttcataataaccgaaaaattgaaaccgaccagaccgtaactgaatttttggttccacatcatcaccgaatagcggtcagtttcggttacggtttttttgacatggcaatcggttttggtttttgaaataaaaaaaatagtcaaactaaaaacctgccaaaactgtcaaaaaccgccaaaaaccaccaacaattgtccaaaaccgccaaattgaaaaattaccaaaaactttacggacagttttatatggttataatttttaaatggtcgggttataatttttgtaatattgaaaccgtaaccgaccagtcggttataaaattgtaaaaaccgaccataactgatagatttttacccctatggccctacccatattgacataacttaaatagagatctctttaaattacatattttttaaatatatatcatttataggtacctatatagaattactttaagggttcaattatgatcaaatatgttatgtctaatttctctggtgagtctcttctagagtaccgtttccatcacgattatcatttttaaattatcaatgttttataacgttaatgtatctccatgagcacatctagctttaacatctttaggataaatcaaataaacatttattaataatttctacattgttcatttacgtttcaggcgttttcaactcattctatctcaattttaaagaatattaatttgtagttgacatat

SEQ ID NO: 74004 - DNA, 678 bp, Cannabis sativa
aagaaataatgtgcccgaagtggttttctagcatccataagactgaaataatcaagaaataccatccatggcttcccacaagccatggccgaccactgccactttccagccccgactggtggcaatcgtctctcgttagggtttcggatgtcaaaatgaggttttggaatccctagatccccaaaaatatgactcaccatccaaaatcagtcaaacacaccctgaggggtccgagaacatgcatgcctgagagctgccactttcccatgtcagtaaaacgggcataaatctctcaatttttatctgaaggacgtggttcaacttgaattggaaagatattttcaagatggatctatgtgtgtctcattgtcctagctccattctgaagttatcgggtctaaaattggctcacaagtcagactggtacactttactcgagatttgagtagtgtaattaagtgtgggatgttggagaacaatgccacaggccatgtggcatcatatgcaaatagaggcaacccaaaatacatgtttccaacacttctcaccaatgtcatcaattccaagtcgagaggtgacatcccttgtcactcattttcaaattgatgcatctctagctgaaaataattatttattgcgatttgttaatgggaaaccccgacatgtgggggatcatta

SEQ ID NO: 74005 - DNA, 847 bp, Cannabis sativa
cagaccaaatacaccacatgagaccagtaattagttctaaatcagtgtcattgtgggcagcagcaaggtgggaataaatatcaaaacctttgatgttaccaatgttcgggatatacacattaaaatgaagcttgttccacaccgacttatctctctcacaacgaaaaatggcatgaccgactgattcccagctacatttacaaagagcacaagcagtagagggagtgattttcctatgagcaagattaacagaggtagggagtgcatcattaactagtctccaaacgaaattttttgacttttttagggagctttagagaccataaccggttccaccatcgtctatttgtggatgatgatgaatgatcatccattaaatctgaacttacagcaaggtgatatcctgatttcaccgtataaaaactagtatcagaatggtgccaaataatcttgtcatctttgggaaaaggactaagcggaatagagaggatacgctcaatgtctatagttccaaaatgttgctctaaaatctgaatatcccattgcctattcgtagagatatagtgttcaacagtgaagaggtgatcaccaccataataatagggagtaaaagaagtattcccaggtaaccaaggatccgttgcacatctaacatttcgcccatcaccaattttccatcttagacctttcaacaacaactctttaccatcacatatactctgccaagtgagagatggtaaagtgcctttctgagccgagaggaaatcaccatttttaaaataccaggtgttgacctcgcttttagccaacgacagtgagtcttatttagtaagcgataagtagttta

SEQ ID NO: 74006 - DNA, 961 bp, Cannabis sativa
aatatatttccaaaatatacatttcataattattaattaatctcatacataacccttaattatttgataattcaaggtattaattatatgcggtctttacactccccttattcttccctcacaagccaccgtagcaaggcaacaagatttttttaattcattattattgttattattattattattattgtcttaatttttaaatttattatgtgaaaacttaatataaataaataaataaattcaatctgtgaacccatcccgcaaacccacgaactcgtgcactcggttgactcaatcattacacaagcgggtacgaatatttttttttctaaacctgcaaactcgatacctgttaatctgaagtttagtcaatctacttaatgttcagccctaaggtcatgcaccgatggcacaccaaacggacggagcagtaccaccccgaggtgcattttttttccttactttgcatctctctctctcccatttcttcttccctctctcttgtaatctcagatttcagtcccttctcctccctccactagccaacagctccactcgacgacctcctccttcctcgacggtcaggcaatggtggtcttccctcaacaacagtatatactattttttttaataatgtataatatatagaaatatttatggtgaaatccttttaatattttcaattgttacacatatgacccaataaaaaagagaaatttgattttttatgcgttaaaaaaattttcttaaacaaataataattaatatttgtaggatatgacaacttttatgatattcctaaaataccttctatttacatcacccccatttatataatcggatcccacagacacaatcggaccccatatcggatccatcggaccaccatcggaccatatatgctaccaattttttttatgtttttatacataataaaaatagcatcaggtgaccatcg

SEQ ID NO: 74007 - DNA, 1411 bp, Cannabis sativa
ttcaaagattcattcgtggaaggttaggatggacggggagggttcttacagtagctccagtcatcgaaggtcgaaaaggagtggttggttctgcttatcgaagggatccttaaaattgttactgtggcattctgtggatcgtaagaatatcatggacggaagcaaactcaggacgttattttaggaaatgcaggctagcatatgtaagccattgttttttcccctttattttgctttttgttattattgtttatctcaagtaaatcaaggtcaaaattttgtaatttgtccacaataggatggtagatggtgtaagttttttgaatgggtggatgttgattcttgtataaagtgcagagacttaataccgggactcccgaggaagataagtaagcttgaagatcaattgatgttgtatgaggcaaatgaagtttgaaagaattcaaggacattccaaaaggatgtagcaatgttcaagagtgtgattgtggtcatatatggttattgaaaaacttgaaaaccattctcattacaatttgtgttattgcttttgtattttttatgcttatttagtagtgttaatcactatgtttgtaatgtcgttgtcttttgtttgtatcaaacagtttgtaatgacattgccttctttgaatctaattgtttgtaatggcattgtcttattttgtatgaaacaatttgtaatgacattgccttctataatcaaacagtttgtaatgacattgccttccttgaatcaaattatttgtcatggcattgctttcattgagtcaaagttattgttgatgtaattgaggtgtggaacattgctgttttggtcaatgtgttagtaaaaccacatttcagatttttttccttattttatcagcaaagaatacaaatctaacgcaattgatgatataattatgcattaataacaagtattaaaaataaatttactgcgtagcataagataaaataggtcaccaagataaatttacaaatctaatgtttctctttatagtttcagggtctaaattctttttgggaggacgacccatctttttcttctgtggaggttcctgattcataaacaagtgctagtgtcagattacaaacttaaacatagaaaatgcattcaaattatcaatgctaaggaaatgaatatacctgttcttatattggtttcttacaagttttctttgtatttgcaagctatttccaattagagcagttgttggactgcccaaatctcctcattttagttgcaccaggtggaggttcatccacttctcttacagccacgcaataatggctcttatacacgagtacaccactttggctgcttcatggactgacgactggccctacagaccaacacgagtgtttctatgctttgtcctcactcgcacgc

SEQ ID NO: 74008 - DNA, 774 bp, Cannabis sativa
attcaatagtgataagttttttttagaaaagtaaaaaataaatattattgtttagagcattgctagatgccagcatcttttataggtagcgacttacgattagttagcgatattccttaaaagttattttcttaagttatatgagacctgatacttaattataccaatagtagtatgacaccgaggaaggcattaggcatgttttttagtatttctctattagttattatatgattagagcatctctaatgtagatgtaaatgtaaaatataactcattttgttaaaagtctactccaattatgaatcaaattacaatgtaaatatgtcacttaacaaaatatgatctaaatttaaatcacaatataacatgatataaaatttacattacaataaatgttatatttttatatttattatattatatatttttaatatgttattattaaattttagttatcgtacacttttatattaaatattgacttgtattattattattaaatttaacatttgcttttatattattattatattttatatttatttaataaattattaagtagaatattaaattttatatgaaaatttataattatataatagagcataataataataataataaaaattgacgtaaaaataacacttttatatcaaatataatttaatttgttgtaaaaggccgttgaagatggtttgtatgtattaagacaatatgagtcccatgttatgatgttctttgcttcgttcaatgagagagagagagagagag

SEQ ID NO: 74009 - DNA, 680 bp, Cannabis sativa
gaactcgaactatacattaaggaacatcacaaaccaaataaattagttcatcccatattggacaagaaccaattctagtcctaatcaatcggaacacaattcaacccaacttccacttttttttaatgcatttctataatacataaatcaattataatttcaatatttttgttatgacagtgtttattgcagttgtagaattctatcttacaatttttttttaagaaattaagaaaatttacggtgtcgaaattagtgatcaaaatggatgttacacgtgtgtgttaattattttgatgtttggcattcgctcgctcattatgttgtgagctatgaattcgctttgaatgaagctcccttgatttttagcaactatctcttttaacacacatcttagtcttgagcaaataagcttagccacaattttgtaaagcacattaaagcaagctaatgccccttcatttgaatgttcattaaagcctcttcacactttcaccacttaactaatgcctattcattgctattaaaccaactatcaaaaatgcccttacaactaactaatactaaatccatttcttagttttgaactcaaactacatattatggaatatatcgaaagccttaaccatccaatcatgaacacatattatctgttgaatagcaaaaaagtaagtttgaat

SEQ ID NO: 74010 - DNA, 677 bp, Cannabis sativa
attttgagtgttatatggtttggtggccctttgttcctagtcagtcttgacatatcttttcaagtgagggttatttttcctaatgaggaattctatttcctacttcaagttttgtattcattagtgtcgtgaccgtagtccgtatgaaagcgacagaacatagtggtatcccttttgctcatgtctttattcatggaaagaggttttttatatggtaccatggactgggtagttgtaaaaattgtctctatattatctgttaggatggtaaatgcagtaaattttgaggcattctcctgaggatgctggccggcgttgccactgaatctactttttttttttttccattaccttgtttgttgccattatatgttcttttacaaccttggctcaagctactgtgattttgtgaattctggtctggctggatggatgtattggctgtagtggcatgttgttgatttttcttcagtccaactgtgtccacacactgaactgcttttttgagctttataaatttttcttctcagtccaaaaattctgccattatccctatagtaagtctctttatgtctttccacaattctcttaggggtttgatacctcataggattgcatctagcctgtaatgaccgtctagtaatatggattagaaaaaggcaattagcactaatttt

SEQ ID NO: 74011 - DNA, 670 bp, Cannabis sativa
tggaaggaacaaatcaaaaggagaggtaatacacctccacatcaaaagatcaataaaataaattaaaatgggacgaaagggaaagtttggtcaccagtcctccaaaaataagcttggtgttatccatataaaacctaaacaaccatgaaatgcaatgaccaagttcaagtacctaatcccaatcttaaaggttgaataacttagaaggaaaaactgcttatcttctcaaaatcagtttatgataaccccagcagcaatcaaatgtcatagttattaccctaaacagaagtgagtgtgtgtttcctcaacttattctacagcaaacataaagagattattctttgttcttttctaatgtgaaaattcttttgaagtctcccagtttggcaaaattattgaacataactagtctaggaactatgattgatgaccgcaacaagaaaatgttaataacaaaaaaagacagtaagaaaagagtcagggaaagttagctcaccgtgtcttcaatgctgaagcctttagtccactcttctagaataatgagaaaatattatattcaacttatgcagactctcactccccaacccatctctctttatttctctcatcatattcattttattttaaactgaatccatccatgtatattgttaagcaaagattaaacata

SEQ ID NO: 74012 - DNA, 1019 bp, Cannabis sativa
ttttttttttttatgggtgattgattaatgtcttactcaagttttatatatatggatttttataaatagttatttatttatttttaattttatatatatatttatgaaagtaatttaatttaagaatttattttaatattctaaatttttatatattgttatttgttccaattaaaaatgttttttaaaactaaaatacttttaatattttcaaaagttaaaaagtgatagtgtatatgattatatatttgagcattttttatcatattttatgacttttttttatttattttttgttacttttttattatatcaattttagaatacaaaacatatatatttcaacaaaataattttttattattattttatcatttttctatttttatattttgtaaatttaatttaaattatttaaatggttaaaattattagagataaaaattgaccctttttttattaaaagaatactttttgtaatttacattataaattaaaagtaaaaatatgaactttaaaataatttatgtggcatcctatgtgaaattcaattgatattttttttatccattttttctcattgtttaataaaaataaaataatcaatatcaatatatttaaaataattttaatattatgtttaaattcatagttgtacaagttaaattattataagtatatataggtttatttttcctaaattattactgaaaaaattatgtctttgaactattatcgatactagacattctccaaaactatttaggttactaaattgtgaccactctcttactttttgtcctacatggattttaatttatattttttttttaaaaaaaaactccaaagaatgactaaattataatgatattttaaatttaaactttggttttttttaattctttattttacaaaatatttaattgggtaagattgagttattcactcactgattcaatggaaagaataataagtgatatatttataagttacaggtctaacactaatcacatttttaa

SEQ ID NO: 74013 - DNA, 1068 bp, Cannabis sativa
agacacaacggctgatatgtacatcgctgggagacctttgactcatgggcaaacacaaattccatccttcttacctgcaccacgaagcacacgtgagtcagaataactcagcaagaaaagctactaaatcaaaagcatttaaaatgcaagtattttcatcacaacatagtatacctactcatgattcattacatattcagcatgcatacgtactttaatgtctatacaaacacattcattacacattataagaaaatcatagcaactcataatcaacaatttcatcatttcactaaatagatattcattcaatacataatcacatagtttcagtgcttcaaaaatcaatcttaccactcgttatccatgagctatgtatgtcactatcattgcccaataaagcgaacgataactaagaaacctaactgcggtttcaacgagtaattactcataatagtaatgaccgtttccaaccctccccaattgttatccacaagctacgtatgtcactatcgttgcctgatatagcgaatgataagtaagaaacctaaccacagtttttggagtaatcactcataacggtaatgaccatttcccaccctcggtcataaccgaggcataacaaacacataaacaagatctcaatcataatcaagactataacaatcataatcgttcatcatttaatcataagtggtgcgaaacacttttcttacctcagtccaatagttaggtgtatgggtcaacctgagtggaactacgctcgacaatcttgggtcctatgttacaaaaataaagctcgataaacaacttattcaaaactccaaaataaccctaactttgtaaccggacatatctaactccccactggttcaaaataacttaaacatcactaaaataccctaacctaggctctgaaaaacagcctgaacaaaatcagttttgaggcttaaaactagagtttttcccctgctggcaaaaccagttgatcggtttcacagcacctgtaaaaccggttaatcggtttctctgcttgtggaatcaggaactctggtttttcacaccaaa

SEQ ID NO: 74014 - DNA, 1215 bp, Cannabis sativa
gtctgcgaggtatcccaactaggacacacaggtcgacgaagaccccgaacgacgtaaccctcgcagtagaccttcgcgagacattgacgtagaatctgcctcctcgtcctcgcatggtcgcacacctagcaggtatactaggttcggttcagtggaaacatagcagggaggacgatatcaggttcacagggttgatctgcgtgatcaccttaacgctgttttcagggcacgctcccacgcccttcgtgatgaggaagagccccgtgatccccaaatgggcaatcagggtgtaaacactcgcacaaacccgcctaacgcaccaactgtgactaccggggtcaacatcccagcaaacctcgctgcagaagccacagcccctacagccgcatcagtccctacacccttagcttgaggtattgaccaaagcatccttttgcaggctttgaaaatgctcgagcagcagagaaagcccatatacaagctgcatgggacctctcctttcactacggaaatgcgacaagctcaactccccaagggattctggttatccgaatccctaaagtataaaggtacctctaatcccattgattatttagagaaatttaacactattatggaagtggatcaggtacctcagctcgcaaaatgtcgcattcttgcggcaactttggaataaaacgcccacaattggttcagccaattgcctgaggcctctatctcgacatgggagacctttgtcgacctgttgagaaggctcccgagtcttcgctagtgtgtatgctaataacaggtgtcctgccgagaactgacttttggaaggagctataggctcgaagaccagaatcgctagtcgagttctttgccatggtagaaccacataagaggattgagaactctctggcagaattagagaagggcaaagacaagcgtaagtcaccagtgccgcggtcacaatcccgcagtccccgagggaaaagttccaaaggtcgaagcccaagaagacgcagtccacggagacagcgaagtccgaaattggccaagtccctccaaagaaggaatcctcgctgaaaagaaaaggtggaccgcgcttcgtgaactatactgagctctcagtaccacgagaccagatctacgccatcgaagaaaagaatggggtcttcaagaagcctccctcgatcaggggaaactgccataagagggaccccaaaaaattct

SEQ ID NO: 74015 - DNA, 760 bp, Cannabis sativa
aaattacttattaattttttaattttttttaaaaagtaatatttaaagttttaaaaattttgaaaaatataaatataatagttaagaatattaaaattgaacatactctcaatattaaaaactaataataaaattacaaataatatattaatatttatatatttcaattaatttaaaattagtataagttcgattaatctaaaataaataatattaatatttatatatgtttaaattaatttaaaataaataatatttatatttatatatatttataaaactaactctactaatattgttaaatttaacataatatttttatattcttaaaatattttgttaaattaagtcccattatatataaagatatatattatatatatgtatatatatatatataaatagttataatttctcctcatactgaaaataacatccttttgtggtaacattaaaaccaatgctctacctaaaattcttcttgtaattatatatattatttacaaattatgattcttgaagtaacttgcaagttacaactagttaataaaaatatgttattgatttgataaaatgttaattatataaaactagggaactaagccgcgcttcgcgcggtgttgtctaatttttgtaatctttatatatatattgtaattatactgagttatataaatataatattttaatgtgtgttgttatataaacaaagtaatagtattgaaattataaatataatttactatttttaaaatatata

SEQ ID NO: 74016 - DNA, 935 bp, Cannabis sativa
  modified_base (27)..(28): a, c, t, g, unknown or other
actaatcagattgtaaagagttttatnnagggcataaaacctaacacttcccatacctctttgtcatgttttacggctccaacttaatgctttaactcgttcctagtggttcctccaatatgaggtcccccggagatcatagcgactctcatgttaggaaagggtgccagttcgaggtctgctaaaggggcacccttccaggaagtacctgaccctcgagcgtacccagttcctccgtgaggtaagggaccttcagttttgttgtacccgaaattgggctggaggacacgtgtcaagataaagggaatgtgaatcggtgcaatgtcttttttggaataactcattaattgtgtaagtatcagagtatatttgtaacccgctgactgtaagattttcggcgaggaatcaatgtacgaactggtacttagtgtattaacgagaaaccataagtcgctaaaggagaatagcgaggcatcggagaagagtaacacataccttagcttacaataagcaaactaagtgtaaaagtcggatcacctcgaagaacaagaatgcgagatgaccatctcgctacgaggaaactcctatagtttcatccaactaacggaagcgagactcatatctctggcaagtcagaaagtttccatatacccacaatcgacgtaaaacatatcatgtcgacctcagaaagaagaatggttccagctcgccattgggatcactacaatcaagttttgattgagacatctcaagattcaacaattaaaggtgtttaatacatgatattctttatccagtgaaagcgggaaaatcacagctaactaattttcaaaatcatacaccccatttacatttcatgatatgtaatcagatcccactatttaagggataatgactgtaattacattttggtcagccttgtaattaactaccac

SEQ ID NO: 74017 - DNA, 957 bp, Cannabis sativa
  modified_base (72)..(74): a, c, t, g, unknown or other
taaccagaacgttcatccattacattttaatattgagttctatattgagttctatatattttaatttaatannnaatataaaaaattattaattaattattagatgccatattagtataatattaagtgtcaaataacaatgttgagatatattatagtgttgcaaatataagctaattttctttgacataatatgaatttagcacgagtttggaaggcacgatattataaatgacatattacgatactagaaaaatatgagttttagtataatcagtactacttagggtcgtctcaagcttgtacaaggtcttaagcgaaggttggacttaagtaaaaattaaattagaccttcttttatcaaaattattaatttgatcaatttattgaaattttattttttcagataaattaattttaaattcttattattaaaatttttattttttatattaatcttatagtattcttcacatattttattaataatcatcacattgtcacatttttcatgaactttaatccatttataaaaatctttcacaaaaaataaatcaataattataaaaatgatcacaataaaataaatataattataaataaacattatgatatatatattacttgaatttgttttatatataaaatttcttataaaaaatcattaattatttataaatagttttaaaattttagatttcaaattaattgaatgtaatattaataattagtaaaaaaaatattaatattcaaattaatgttttttaaaaaaaaaatatgaaatatgttttttaatgtatatattactgttattatatatatataaaaacaatgtatatatcagacaatcattagagtaactcaaacggttaatttaaaaaaataataataaaaatgatatattaaatgactgtcctaataaaatttaataataatcttgttgaccgagattttcgg

SEQ ID NO: 74018 - DNA, 767 bp, Cannabis sativa
agtttacattgaaaatagggaaaattgaaattatttcgggtgtataggtttaggtattgaaaatagaagtttttttttaaaaaaaaaaaacgtacgctcaaatggtggagatatggactgtaggagaggtaattggcaaaggtggcaacgattttggatagtgttagttattcttcgcttggttttgttaggaaaaagaagatgaagaataggtgaagacggatgctgaagtgttaatatataatcttatagcgtcggttatttgaaaaaactgacgacataggctacacgtgttaaatataaatgacacctatgccgtaagttattttcaaatgaccgataccatagggggttttcgttacagtttattatttctaattaaaaatcgaaggcaaatggttttagtaaatattataactacgatttttataaaataaccgcctctaaatgtcaatttttaaaaggcgggtatttttacaccttttagctttcctttttataaaaggtgtcaaaaaaccaaacctctaaaagactgtattgtagtagtaatttagtgtggaaacttgttgatacgaaccagtggcttagtctcggtgctatgttcgagtggatccagatcaatagttatcatcatgttttatgaatcgcggatgtcttattatatattgtatttgtatcctgttgatacaatatgatgcacaattagttttgtattagtgtttcttgagatttatgtctgttggcactattgcatagtgatagcacat

SEQ ID NO: 74019 - DNA, 941 bp, Cannabis sativa
  modified_base (110)..(117): a, c, t, g, unknown or other
accatttgctgaagctgtcataaagtcagaatgagggtaatagcgaccttttaaaacacgacttagcaagctatttggttgttggaagatacgccaagcttgcttagcannnnnnnnttgattaaaatgcacaaaagatctgaaacccataccaccatcgccctttgacttgcaaagaaatttccacttcttccaaatgaattttcttgttgtctgtggcagaaccccaccaaaatctcgccatcatagcctcaacttcattacaaaacttttttgataggcgaaaacaactcatagcataagtgggaatcgattggacaacagctttcaataatacctctttgccacctattgaaaaaatcttgtcattccaagcatgcataagcttccatatcttttcttttatatggctgaacaattgagatttatcacgttcactataagcaggtaaacccaagtaagtttcatgacattcgcaaattggcatgcccaatatttgttggaatgagttttgaacgaacattggagtattgggtgaaaaagacatcaccgatttgtcagtattcaattcttgccccgaagcacgatgataaatatcaagagctcttttaatagctccacaggatctgtcagtcgcttgacaaaacaaaagactgtcatccgcaaacaacaagtgagaaattgtaggcgagtgacgagaaactgccaatccttgtagccgaccaatattttcttcgtatttgagcaacctagatagtccctccgaacaaatgagaaagagatatggtgagaggggatctccctggcgaagtccccgttgaggtatgactgaacctgaaacttctccattaatagcaaaagagaaagagtttgtgtgaagacatgtcataatcaaattaatccaacgaatattgaaacccatcttgcccattactgcagcc

SEQ ID NO: 74020 - DNA, 1134 bp, Cannabis sativa
ttatggtcaatagtattgtcgtacgaatgttctagactcagccccgtgcgggacatggggatagggttatgattgggggtatgggcgtctgatcataatacgggtgattgctatgttattgtttatgcttttcttactgagtctgttgactcacaattgctatttccatgtgtaggtaagggcaaggctaaggctgagcagccgtgagagcgagcagatggagattgtacatgtcgggacagttaggcctggagcgtacgatctttgggacatcagggcttattttcatttgtcgctaagcgacaaacttttgtttatgcacagtaaaacttttgtaaatatttttgtaaacgggattgtggaattgcatatgtatgttattttacgtttataataattaagcaaaattttaattaatcactgttttacccgaaattcggcaagcagatcagaggaagacacgtgtcgagctagaaagaataaagaactcaaacacgtaatcataattacactttaaattgaataacttgttaaaagcacaattaacagagcatgtttacaactcggttgactgaacagtcttatgcgagataaaaatgtactaactgttaacctgtgccccaatgagaaaccatgtaacttcaagtgtacaagacgaggcactaacctcgttacgtggtggagatataatgacaacagagatacttagcgtataatgcatggtatactaactaagtataaatagatgggtgaataaaagtgagagatagcgaggcatccaccttgccgtaagaaggtctggacgtgaaaaagatcatatcgtcaccagaaacttcagttctcagaattaaagtaaaagcattgtcaacctcgggaagacatatgacgagctcccgctcgtcattaaggttaactcaactcccttcccagcgaggcattacaatacgataaggcttaccatatatctttaatactcattcattctggcctagtaaaagcggtatattcatagctgtgtgaaatttaaataaaaactgcgtttactcagcgtgatgtgtaatcagatcccatgattccaaaggataattattgtaaaaagattacattctctaattaactgcctactatgtgatt

SEQ ID NO: 74021 - DNA, 1256 bp, Cannabis sativa
tgaatggaagaactgagaggaatagagagaatagccaacctatcacgagtctcaaaaagatcttcaagaatctcaacatcccaagcacgctcatcgatcctcattaggctagaaactattttgccgattaaccccgggtgtgtagactcaatataaggatgatccatctcagcaagccaaggatctgacaaaatgctaactgagagacccgcaccaacactcttacgcactcctgccgctaccaaatctcgagcttcaaaaatactgcgccagacgaaactcggattagaatcaatctccgctgtaagaaaagagccagtaggaaaataccgagccttcaggagtcgtgtagccaaagatgacggatgggttaataaccgccaaccttgtttaccaaggagtgccatattaaaatctcggaggcttcggaatccaagacctcctacattcttatgcttacacaatcttctccagctcatccaactcataactatcatcagcaaaaagcatgtgcgatacttttggtgctcctctagcaacactacacccatgaatcaagccaaccgtctcataatgccaaagaagagcggagaaaccttctgaacacaggataaacaaatatggggacaccggatctccctgcctaaccccacggccaggaacaatagggcctagttcatgaccgccgtgaacaatagagtaagaaaccgagctaacacactgcatgattaaattcacccatctaccattgaagcccatacgcagaagaatagctcgcagataaccccactcaagtctatcgtaagctttactcatatccaatttcagagccatgaagccatgcttacccttagtcttacgtttaagctaatgcataatctcaaacgaaacaagaatgttgtcagagatcaatcttccagggaggaaagcactttgagtttgcgagatgacaatagggagaaccactttaagacgattagccaaaaccttcgaaaccaccttgtaaacaacattacacaacgagataggacggaggtcacccatggcaattggttgtttcttcttagggatgagaacaatgttagtatgattgagacccgttggaagagaacctgtaagaaaaaaatcttgcactagtcgaacaatatcattcttaacaacattccagcatttatgaaagaaacctggagtcatcccatcaggaccaagagatttgtcaggatgcatttggaagagagcagacttcacttcctcct

SEQ ID NO: 74022 - DNA, 2162 bp, Cannabis sativa
atatatatatatatttaaaactagtagtaataagttgaattatgaaaaagatttgatatttgagtttttcaaatatctttattttcaaaaaaattaaacgtgattgatggtataagaaacgagaatatactcatttagttacattttgacgaaaaatatatttggttccttgtattttcaataatacttaattggtaccttatatgtttaaattgtacatatttggtaccttaaagtagaatttaatcaatataattttactaatttaaccaaacagttctcagttatatataattaactcattaaatttgaattcagaattcataaaattttagataatttgattgtattgataaattttatcaaaaaaatttaaatttagggtactaaatatgtatgattttaaaatataggataccaaataagcattattaaaaatacaagatacctaacttgtatttagataaaacacatggtactaaatatctagataaagaaaaaaaaagatgattgattgtttaaaaaaaaagacgtggtgatatatatatatatatatatattttgacaaagtgattagaatcactcatgaatttacgacgcagacgtcccctaccggcgctagagcctcctcgaaccaggatagctcatcgtctaaccgcagagcatgttttgccaagccatgggccgctaaattgtcagaacgaaccacatgagacaaaactgctcccgaaaatttagacaatgaaggtataacatcttcaaacaatgctcctaactcgttgaaatacatcttcctgttgttgatggtcgtcatcaaagctaacaaatctagataaactgaaaaaacatcagaaaaccagaaaaaatttataattagaaaattatcaagctgatcaaaatcagtcaaaaaccaaaactaaacaactagatcccctataaaattacgagaactagccaaagggaataccctttggctagtaacaacaacaattaagccccttactaagaccctaaaacctaaaaaaagattttgatatgtaatctagtaacaacaatttagccctgcaaagctcccataacttaggatatcaaaaaattcctttggaaataaacaaaataatgaaataagcaacgaataatgttttaatgtactcacaatgactaacttttaggggtttgctctacgtgatgtggttcttctgacaatataacagcacctaatccaactaagctcctggtgctcaataccgcaaaaatttccgttgaaaacttttatttctcgtgaaaacatggaacaattaatcatattaccctaaataattaggggcacaaactataaaaataagtgcaaaagccttgaaaggcatcaaagccaacaaaattgtggcgcaacaaatcttcacaatgtataaaatattaattcgctgactatttgactaataataattgcttacataaaataataatagaaatacatataaagacaattatgacttaatgtaaaactaaagggaaaaaaatataataataatatagtaaattataaaattaattattaataaaattacttaattaatggacttaataaatttcaataaatattgtttcaaactaccaaattaaaatattattataaactacattatgtccatataaattaatatataattaataagattatcaaatctaataaaaccccttaaaataagacacaaaataaaaatctagtatacctaacttatttatcatgtaataaaataattaattaatgcctatatatagaaactgttatatgtttttaaatctttataactattagtcgataaaataattaaatttaaattaataaaataattaaaaaattcaatattatattattatagcaagaataaataatatattaaattatattatactaaaaaacataaaaattatataaaaaataagtaaatataaattaactgtagaataaaattaccacaagtaaaagataagaaaaaaaccaaaaacaaataaaaggaaattatcaattaatgttgttaaagaagaaaaaaattaaacaattcaaatgaaaactaatgacatttttcaatcacaataattttagtaattaagaaaattgccataataaaatatgaatatagttaatattaataattaat

SEQ ID NO: 74023 - DNA, 568 bp, Cannabis sativa
tacagaacccaatgtgcaagtgtacccccacgagcacgacaacttgctaagattccctaaattttttaactttattaaatagcaactaatagaccacacctacttttattcttgatcaactaacccaccaccaaccaaaaatatcatataaaaggggtcattattctctaagaaaaacctagaaatcaaaagtaggaggagttgagatgaacacttactgtaatcaggagctgcatcatccttgttcctcattcgaaaagccattgcaacccccttccacccagtttgaagccctcactctctcttcctctcctcttcgtctccgagtcgtcttggtcttcttcttagtttcagtcttcttctggtgcgaacgtctccttcttgttcttctgttctccccaaacttcttcttcgtatccctcttcttttgatttttgattcgtcttcgtcttcgtctccttcttcttcctttttctttttgatttttgattttgattttcacaggtactgttttatttttaagctttgttggatgtttgttttaattttaagtttagtttatgtaatt

SEQ ID NO: 74024 - DNA, 1142 bp, Cannabis sativa
ttttatgcttgattttgttatttttttattttttgtgttgttttagtaatgttttcttttgtttttttataggattgggaatccaagtacacccgatcggaatattatcattccagagttataacctctggttattactctgttattgaagatattaaaaaaatttactgaaacccaattaaatatgttttcaaaaactgtgtttggtcattttttttgtatcccagactatagtatccatttccaactcatccatggtttgctgttgagggaggttcaacagccaaatgagttagaattttacgtttgtttgcaaggaaaatatctaagatttattgttgaggagttttcgttaattaccgtgttggattgtcatattgattctgacattttcagtacaagcaaaatgataatatgcttgtaaaacactgtttaaagggctgcaaaaaattaccaagagtgttatctaaattgtttttattgctgacaatctaaagtgtaatgatgattttacagtcaagttggctgtgttatattttattcagtactatttgttgggtggtccttcttgggaagttgtttcgattgaagaaatagatgttgtttattaatcttcttgaagcgtatggttttgataaaacttgtctgaagggttgttctgttaacactttgattgggtgtgcctggaagtaacgccgtaacttgagagatgcgtgaactaggcataaggcaagtttttcaagagagggatacctcgattttgcccccagtaaccttttaatgacataataaacaggttgctggagctttccctcttctcgcactattgttgcactaatcgcatcttccgagatagctaaatagaggagtaatgtttctcgagttactggttttgccaaaactggaggtgtcgccaaatgccttttaatgctttgaaaggcctcctcgcattcttctgtccattcaaattttttgttgcctcgcaatacattgaaaaatggcaaacacttatcagttgacttcgaaattaatctgttaactgcggtcatccatcctgttagggcttcaacttccttaggctttattgatgatggcatatctatcaaagccttgatttttcaggatttgcttcaatgcccctc

SEQ ID NO: 74025 - DNA, 1184 bp, Cannabis sativa
gtgttctatgttatatacaaatagatcttgggtttattattaatttttctaacacataattcaggaggtaatatttcagcttgttacaaatgttgagtacacctgtttgaagaattttcacattacgaatatatatttttttaattagtcgattgataatttgaaaaaattgattgttagttgacaaacccataattttaatttttttgtgttggggtatcaattcaaattccatatcgaaagaataggtaagatttatctttaatataagttagacacaataacacgacttaaaaactgcacaaaacaacttaactaaaaaaatgatactacaataacctatatttaaaaatatacacccttgcatttgttttaaaagaacttcaagttcataacactagaaaaaagaagtgggattcacatgatgaaattcctccctagaaatattaaccagactattacaatcaattctagtcttagaggttgaatcattccctaaggaggtaaacacttttttcaacaaaaacaaatatgatttctaatttcctctctcgaccaggcaaacctattataaatatgatcaactcacacactattaatccaatcccactgatctacatggccaacttatcacttatcatccctacattttccagtgatgctaatataattgtcaaaagcaaaaacccaagggttaaagcaattcaaagagccctaaaagttcattccactctcgtcaggagatatggaaagataatatccgaagaatttggcttctacccagactacccatttgccaagctgttacacatgaaaaacaacatattcatgccaaaaaagatgacagatctatactggtatttggcaagttcatatactattgcagtcgagatccacacggtagggctccgaacatcagttcgtagctatatccaacgccctgacctcaggcctgcctaccaacatccaatgactatgttgcaatggttcaaaatattgcccgaattggacacactccttacgcaagagtgggaaaaggtccgtaacaaaagacccgtgggactcaattgcccagtcactaaaaacatgacaaacccattgcgctgcttcacaattttgctactcaggctacatgtcaatccagatttgtcctttacagcaagtgtcaaaatacacaagtcaag

SEQ ID NO: 74026 - DNA, 1000 bp, Cannabis sativa
gaaaaccaaaaaacaacaccaaaaaataacaagtattagaaaagacaatctttgaattaaaattaataggaagtaaatccgatttaaacacatatataattgaattaaactcaaaataactacattaataaaaagagaacgaaattccaactaaaccaaagaaaatctagccaaaggtattaccctttggctagtagcaacaaactaagaaagcaaaacaaagcacaaaactcaacgaagttaaaaatcattcaaagcataattaactcaaaactagtgccataattagcaaatctggtctgaaaatgatgagtataaaagcaaaacagtatactaattattaaaaatctgtaacaacgcaaaacaataaccaatatgcgaaaaatttggatataagaagacaaaaagtgttaggtcatttttattagcaattttagattaatttatttttaatttaattttacttgtgtttggagtaattctacgcttgttatcttttatttttgaagatttaaaataaaagaagattaaaaaaatatcagaggaaaaagataaggaaaaagataaaagattgcataaaaggataagagtgcagatggagcatgtcgtgcacgtaacgaagcttgccttgaagacgtaggaaaaggccacatgggccacggcccagcaaagtgggtgtcgcggcccgcccctatacaacaaccaaaaacatatcttttctcaacgtgagctttgtggcttcctaattcaaagttgaataggatggttagcatgtgcaattttctatctttttagtccctcaattgctatataaggagagaacttcaattgatttcatcaagcgatttgggagaggaaataaatagcaaaagacggagtgcgaatttcagagatcagctgcaatattggaggcattcttcagataattttcaatattcttttctctattttttttttcttttctttagttaatatgtgtgattttgcttctatgaacatg

SEQ ID NO: 74027 - DNA, 779 bp, Cannabis sativa
gtatattactaaaaattgccctttcttttttgtgtgtgactctttaaagtattaatgttttaaatttaaataatttaatatttattttttaaatcaaattgagggagcaatatctccctctcaaaaacaaaacgtttaaacattcttgaccgtcaaatgcactactcagataacattggcagatctcttgatcatttgatgagtaatgtagtaatgtttggcaaattgattggtcgagtataaaattctgtttatacttattaacttttcatagaaggattagtaatgtttgtgtggatcacaatgtctctaatcattttgtctaatatgttggtgatgtaaaagttgtattaaattcagggtcgtcttaaatattttggaggctctgttcaaattttaaaaattgagcccctacaaaaaagatgcaacttataaataatatttttaaatattatcatacggttatatattttataaagtaccaaaaagctccaattaatttataaaaattattattgattgcaatacagcaaaaaatatgaaaggtttgaaaaaaaaaataataaataataacaatgaatttttatttattttgcttaaaaacaagatttaacataactatacatctttatctatttaattacaaaaaaaacttataaaaagtattataacataatgatatgatttttttgtcaaaataccgaataggaaagatttgtaactaacatatctaattaattactatatttatttatagaataattataaataataataat

SEQ ID NO: 74028 - DNA, 1005 bp, Cannabis sativa
cccactgactcacatcaagtactttgagatgcaaatcgatctcctgaaggttactggttatgtgcggtgccacatattcccatccacattgtcagagatagctcaacaatggtactttaaactcagcctagaaagatttaactcttgggctaatttctcatgagaattctacacatgattctcgtcctcgagacatgtaccatcgcagctagaagaccttctcgaagtcaaataacgacaaggggaacctctgaaggattacgtctagaggtttatggccgaggtactaaaatcaaagggccttaaagaaggctgatatacgaccatactggggggtatactcccattaagtgatttctggaaagatatccaaaggatctctaccaacaacatgaaggagttccttgatagagttgatagctttatcaaacttgaagaagccatatgacaagcccaggcggggcatgtcaacaacaggaagtcacgaggcatcgagcagcctcatgacccacgaggtgaacaggcagacacaagtaattttatctagacttctagtggcaagaacactaaaaacaagtgcgacactaacaactctacaaggaacaatggcaaaatggggaagttcaacacttctccatgccacaaaataataaggagggaggataagtacacctacttcaccgtcctaacggagaagcctgaggccatcttcatggcaactcagggaatagtcccataccaaaatccctttcctatcaaaaaagagatgagcaagagggacatgtcaaagttctacctgtatcacaacgacttcggccatgacactaatgagtgtcaaaatctgaaaatggagattgaatacctaataaggtgtaccaatccccacctacgccgttatgtgcaatacaaccaaacacaggcgtaaggaggtaagaacgaagacccaatgccaccacctgtggcaggacacctaggggtcatcattggtggacccctcattacaaa

SEQ ID NO: 74029 - DNA, 731 bp, Cannabis sativa
tacacttgcgtgtgcaaaatatcgcaacaagttttttgaaacaccaagcctcactatccacaacttctattgaagcagtgtaggctgctggtggctggttttgtttctaacttatttggccaccaagttttggatctgacccgatataagcttgatcgtatctgtgatagcaaatagtagcagaatggccataacggccacaaacttgagaggttggtttaggtccatttgaacgaccaccacatcctcttccatcgctgccaccaccacggttgtagttacctcaaccacctcttgactgattttgatgttgatggtgattcccttgatttgattaggaattttttcctcctcctctattgtttggaaatgattgattggccagatttgcatttggttaaatagggtgatgtgtagatttattgttgctgttgagactcaagttctgaagtcactccatcttgttgtgaaaagcaaggaggatcccctgtagctcttgctaggttgttgatgatcgagcttcgatttgaagaacactgctcaatatctaaaccagaggtaacatttgatatgagttggttttttgggtatgggttactagtaagagctaatgaatttgaccaagcctttttttacttcagattgttctccatagatgttgaacctttctgtgttgtttgcatcaaggtgtgagtatcatccattcacgattttgagtgagctccatagag

SEQ ID NO: 74030 - DNA, 563 bp, Cannabis sativa
gttggtgggggtcctcaatttacagagttggacatgtgcaatatttactgtgtggtcgactgttagtttgacatgtggcatgagagagagaatgacgtggtcgtccttaggattttaatccagtaggccataggatagttcacgaaaactctctccatcgtggactcacatttcgtaccattactgtcaccacgatcgctctgagtagtggcctaccctccacctttggatgtcctttttgtacgattaggcaaaattcctttcgtgaccgttggggtggtcccattcacaggcccattggaggagggaggagtaagcctgcttttctttcttggtggattaatcttcaagttttccatctggtttgcaatggcagcaggtaaaaggagttgtcttttgtgcatttctggcttcctagtattaaagcagctatgaacaggggagctaataacttttatccaagagccataaaggggaagcacattgcccaccggatgaaaggcaaaggccttaggctatgaacaagaaccaacatcgttaaataagtaaccacagttaaagaa

SEQ ID NO: 74031 - DNA, 930 bp, Cannabis sativa
  modified_base (412)..(424): a, c, t, g, unknown or other
ctattcgttgtttggattcgttcaactgttatgcttagtttgtacaatgtatagtatacgctaagtgttctaacagttcaacatgtctcatcttcatctctctatacgtagcgagattaatgcctcgctttgtatcacaaatgtcatccttacgattgtgtcttctaacacgaaatggtttctcgtcaacacatgactcaatagtttgcatatccttatctcgcttaagactttacaatcagtgagttataaatatactctatgcatttaatgagttattccattgtaatatccttaaatataattaccattatatttgttgattcatattctcccaagtcaacacgtgtcctcctctaaagttccagccaaattttaggtataaaaattgccccttaaaaagttcttattnnnnnnnnnnnnnttttaaatgattacaaagggtatttctgtcataattccttttgaaaaaacgtatgtcctctgattttggtggttttgtggtttcgatgcacataagcatttaataactatcatttccacttcctttttaaaattttacccgttggatcaagtgtctccttaatctgacagagatcaacctaagagtataaaatcaaaaaaaggaaccacctttgcattacctttgccatttcaaaaactctaagaattttcgagcttttctgtagaaaaaaccatacctagattagcctaaaaccttgcatgccatctttgtcattaatatttttcctacgaatttcatccgatttaattttcgaattcaagcattcagagggatcttcacgccattcgttgttccgtcgattacaggaacattcatcgtcccaaaacctaacttcaaacaataagtgacttttctctttattttattacatgcttttaattttgtgtttctgggtttgattacta

SEQ ID NO: 74032 - DNA, 967 bp, Cannabis sativa
  modified_base (917)..(922): a, c, t, g, unknown or other
ataaatcataactttctttgacccgttataatatctataattaaatatctctattaattaattatttttacaattttcaaaaaccaatactaacattttctcaaaaaaaataaaataaaataacactaacaaaaataaactaaattatctaattgattttattcaaaaaaaaaaaaagtatttaattgattagtttttcaactaagtaaaaggtgccaagtagtaaataattaaagaattaaaaaaattattaattcaattaattaattgttttatttcttaatcatgcaagtcatgaagtgaatacttaaggattaaataaaattgttctattaattatatatatacatatacatatatattgtaaaaaatcatataaatcaattactccttatacagtttttgttttttaaatactccttatgcagttaaaaaaaactaatgctaaaataaattttatgtttttttttttttttgaattgaaacaaatagaagtaattgatagcttgacacaattgatatagttccaacatcttaattgaactaattataataaatatttattaaaattatgttataaaatttgaattgaaataaagaatctacaataaaaataattaatcaatattaaaaaattaattaactaattgtattaattaattagtaatttaatctatttatccttcttctcttatttttctaattttttttaagttttttaatctatttaattaattaataaattaaaaaaaaattaaaaaaaatctcttcaaagtaatattaataatcattattattattattttattttttggaaaaaagaactcatttattctaaaaaatttcggtaacaatatgaactaattatttatatatatacccattaatgggtaataaacaaatttaactataaatannnnnnttaaaaatattaaattattagattataaaagaaaattttgaattt

SEQ ID NO: 74033 - DNA, 784 bp, Cannabis sativa
gataattgaggattcaacgaagtatgccggggcagcaaacgcggcggattatttgccccgggtgttgagttggtttggaatgggttacgagctagaagaaagtgaagagtgttggtaggaatatggatgagttcttacaaggtctcatcagtgagcatcgaaataagggtactacttcttcttcttccaccgtgatcgaccatttactttctttgcaggaattaatctcaacctcaatattatactcatcaaattatcaaaggttttacacaggtaatattattatacagtcctattcctatatatagtactacagcaaaatattgtttaattagttaccaagtaggtacttctttttctaacgctccttaattaattaattattattaccaaacatgtcatgattttatacaattatccaaactgtatcgtgagattaagacttaagctaaaatatataaatgctagctgaaaaatatgtgcgttttgcacactgtgttttaattacaaatgctattattaattggatcatttcttttgtaaaataataaattagattgtgaattttttaatagtacaaaatattactgatttaattttttattaaaataaaatttaataattactctatttaaaattattatgacaaaactagttacatttttatatcgcattaaaatttttcttcaaattagttatatatactgaaaaaattataaaagattgagttcaaagtagtattttacgctattttgatcattttttacaaaactcaatatccaaa

SEQ ID NO: 74034 - DNA, 1503 bp, Cannabis sativa
tggtgtccaataataatgttcaatcaaaatacatcataacatatttgaagagatatttaattaatcagaattgctaaaagataccactagtgtctaacacattcctcatttttataccgttattagtataattgcgtatcggatttcaaattgctaactaattgtggagtgtcacgtatagaatgtgttgggtaatttagagaaatatgttaacaaattataaaactcaatgtgtgattaattcaattttttttaattagccaagggtaaaatgaaaaaaaatatgtaaacaaaataattattttgtataaattaattgggggtctaaaactctaagttttaatatgtatgaagtatttttttaagtatataaaatattttaaattttgaataatgtcatgataagaataaggattattgtctttttaagcaagttgatctcaaaaaaacagttagggaagtagactgccaaacaaaaacaattaaagggcttgatgaaacattggaagagcctcttgaaatattaggagaaagaactaaatgaaaaatccatttcttttgacattgattgtatgatccaagccatgaccatgttatatatattacattatgtttttgtctttgtagttgtaaatcttatataaaattataaaatatgatttttattcttagttaataataaaaagatgttctttcatttcaaataataaaaaaaaaaaagcttatttggtactagcttttcatcccacatctacaagtaaggatatactccataagtttgcaattataaatgttataaaaaatgaactttaaatgttaatctctagtgtctaaaaagatatataattgcatatatatgggcatattagctgtataaataaaaaaattcttaaggtagaaagtggatgttgaaattggtttagggagtattttatatttgttgaccaagagattgatgtcgttcttgatgaaccaccttagaaaaaacattggacaagaaagaaatcaaagaatccaatctcgaatacagtattcttgaatcctctacatactctataagtacatccacaagtacaaaattcattaacactatatcaagaatttaaagttaacactatatcaagaattgaaagttaagtacaaaatctccgtgtttatgttacttatcaccgtactgaagattattccatcaagaatatttaaacaatatactaacatcaatttcacttaacataaattataaaattcaaaccatggccattttattacatttgtcccaaaaaaataaattgtaattatcaataaaataagttttatttatgaaagcgtagacccacataaaagtgaggcggggcaagttgtcccttaaaatatcgagaaaaaaaaaatatatacattttaattagttatgacttatatttttcataaaagatgatgtttataaatttaatattaactttggtgtaatggtaaagttacattgcatatagaatagaggtcaag

SEQ ID NO: 74035 - DNA, 1155 bp, Cannabis sativa
aattaaaaagttaattttaatagatgtcatttctattcacaaggaaagtcacacccgttccatttacaaataaattattattcacatatggacacaaccattcgcaaggcatggttatcaaataacattcaactaaatgaaacaaataaataatcatctctggacatttaatttaaaaaattaatctcctgaacagtgtatagcaactcgacaagaatagatccatttggtaagaatctgaatagtttacaataattctatgagaaaagtacgagattgtaaatggtaagatttcttctcaaatcactaattctcatctctcagatttcttctccaattgataacctacagtattaggaaacatagaaaaaaaagatataaatttatataaatattcacaaactataagaagatattgttggttgatttttcttgagtcccttcacgaataatacaccgaaaaatacagcatttttcgaacccaaacctattaaatattcataagaatctccaacaccaaggccttagatgataacaaaaatgcaaaaattctccatcaaatactgtttagaagcccaaacaccaaagccttaatgaaaataaaattgtaaaagataattatccttattcaaaaataatggagaggatgagtcttataggtgtagaggaagatcgataggaagataaaaaaaaagaaggaaaaaaggaaaaaaagggggaaaaaaaaaaagagagaaaaagaaagaaagctaaggatttaagatgaggaagatctctgttattgactcattgcaacaaaaaaaaaaaaaaaaaattctaaatttcaacaattaatatatatataaaaaataatttgaggatttcaatatatatatattttgaaaccgaagtcgtttattaaaataagagcaacttttttttcatgggatgttttcaaattattattctagattttctaatttaatttaatagttttttattaaatcatgattttatacacaattagcttaaataaaaatacgaaaagaacaataaaacaaaatgtgcattgcacgtaggttacttctaatatatatatatacatacacccacatacacatatatacatacacatatatacatccacatccacatacacatacacatacacataca

SEQ ID NO: 74036 - DNA, 781 bp, Cannabis sativa
cagtggacctagcatgagcaattcctcaagcattggtgcctagagcctcgagcacatcaaggcaagggcagttcttccccttagggattattttaaggagttttgcatttacctcagggtttccccattccagctgaaccccatctcgtataggatccttgtgagcttgaaggtcatgtaccatattttaggatgggagtgctctactcctttggagatagcctatttttactcagtcaaggcagttctttcaaggaagtgagctgtaggaggcttttattatctcaacacctacacgaatgatcacaggatcatagttaggctgccaaacaagacaaagtttaaagaagacttcttctggatgacggacctctccaataaatacaaccgccttttgcattatacgtaagttctctttctcataaacttaaccttaaaatatattgatttttatttttgagttcgcttattaaacttttatctgttcacagcagttcctcgaagaccagttccaactcttgagatagttgagcgccattgaattctactaagtcttccatttaagctacaagtagtagatttcttattaaatgagaagaatctgaagaatgttgcttcttgcctcggacgaatttacttgtgactacaaaatagccaagtattcttcgtggcaaaaggtaccagttccagtccctaagacgcctttaaaattatggaatggtcctacacctagtttacgccattatagaatctgggggtgccctgctcacgtcttaagaaa

SEQ ID NO: 74037 - DNA, 589 bp, Cannabis sativa
cttcatttgcttctcaattgcctatttcctcctgactggcctttgggtccaatactattgggcttctccaaggccatggtatcactactcccacccctgaaattaaccttgtcctcaaggttatgcaccttgtacatgtctaccaatgtgtcaaaatctttccaagtggcatccttcgagttgctcaaggactactggaccagaacctgcttagtggaagtgttggaagtcttcaaaactcttgttgccagtatagccaacggtagcatgagacgcttgttggccacactcaactctggtaagggatagtagtttggtggtgacagacctaagaacggtttaagctatgagacatggaatgtagggtggatgcgattgttggaaggaagcttaagcatataagcaactggtctagctcaagcaatgacttcgaaaaggccaaaatactgacgacatagcttagagttcaaatgataggtcattgtagtttgacgatatggctgaagcttcacaagaaccaaatcacccacttcaaagtcaatgtctttgcattttttgttggcttgttgagatatgcagttgtgtgcat

SEQ ID NO: 74038 - DNA, 1270 bp, Cannabis sativa
tccaaactctcataacctgaaatcccatttcagaccagaaaactctcgccagataacccaaaattggagatcgtctacctccctccccgacgttttcttcgttctccggcgtctctctcacctccggcggcttggtcctcaaagttacagagtaagtttattaatatctatatataactgaaatgttttttgtttttctactttgagttttattttttccttttgtttcagatttacatataaatatatatatttatatatgctggtcttcttttccaattattttttgtagtgattctctacttttctctgttattaagatccaataaattcttatctcttcaactaatttcatttttttttctcttaatttcttgttgaactgggtcttttgtgaatgaacctgtactggtttgatatattacattcattggttactttctaattaagctttttttcgagatcatgtttgcgtgtgattcttcagttttgttcttagtgattttgatttttttagtactagtgctctcgtttttggatctgaattatggtaatgattttgaaagaaaatgcatttatgctttcgttttattagagtaaactcatgtgattgtgctgctagttaaactgaagtatttagcggagatgcctaattgaagtcaaatttagtttcaattgtaagtttttttaggcaaaatgttaggcctttttttctttggattttcttcaacatactttgtactttctaaaagtaaaacaataagataagacaatttgagcttgaagtggtaaattgctaccacagtggtttgattttcattgttattagtctatattggattgcagtggtaaattttatagaatctcagcctaaagtcatttgcatgtgtagagcgacattagcaccagtgctctagtttctgaaagttttattttttcatgttttctttaagtacaatactcttgctctactattgcgtaatgtgggattgatagatgcaatcacatcatcttacttgtgaatgggaatgagtaatttgagattaacaggtgcaaccgtatcacgtgccatcgattggcttgtagacaagtatgttgtagtcaaacatgattaaagattgtgaggttttttagagtaatttcaataattaacaaagaatgcattaccttcttgaaaatcctttaataaacttgtatccaattccaagtgtcattattttaaggtgtgggaactgtaacttttttcacttggatccatttaactgaactc

SEQ ID NO: 74039 - DNA, 1079 bp, Cannabis sativa
attatttttagtataataatatttgtaaatattattatagtgttaaagggtatatttaacacaattattattattattgttattgttatgattattacaattattattattattgcgtactgttattaatttttattatagttgttgttactgttgtgtatatacgaatgtatatacgcacgtccgaaccgaaccgagatttttatggagtgagaatcgttgcacttcagtttaaagcgatctttttgctagggtttaaacacgatagaaattaggtttttgagttctattttcgtatacgataccgaaaaattttgttcttcaagtggactgcaacctgggtgaaagtgggggttcgggatcacttatatacgacctaaggaagctttttaacgtggtataaggggcggaggtcctcgtttcgagtttcgccattgttgaagcttcgaaggtgctgcttgaaacggactcgaattcgaatgtgtttaagcttgttcttgggtcaagggaggttatatatgagtgcattggaccctaaggattttttttgacgtaagaaaacgaagctttaacgtccaaaacgaagaaccaatattttgactccattaaagacggtacaccgccaaagaaggacacgaccccgatctgccttctcggacctcttttcttgatcttcttgaggtcctgagcactgtggagagcttccccaatcgaaaggacgcttcaagagcaattggagacaaagttacactttaccggcgacgaaaccgacgagaacgtcggcgatcacgttctgagcgtttttgaggtgtttttcttagatatttttgtatgttttgattccttgttttattctaaggtgcttggtgaagtttcataattttctgaatttatttggaattattgtgaattatttagtttacttcataaattaattatgaaaaatacttaggtgctcagaaaaatctagatttattttatatgatgagctataatatataaaactgttataaaattggtagattgaatttttaggcaattatgtatttttcatgaattattgatgttatttcttattt

SEQ ID NO: 74040 - DNA, 1425 bp, Cannabis sativa
acatgaaccaaatgacacaataagtgatgaatatacttctgttctttattgatatttaaataatagagattacattaaaatgaagttttatttagagcataaaacccaacatttatatatagatatagatgatttatttattaaaaattgatattttttaaattaaaatattttacaaagataatatttacaaatattttttaatttaaagatatctccttgtttttttctctttgaaataaaaattgtatgatgattttctttcaaagttttttagagttctcaatagatttataattattttttaatattttagtctttatataacttctgaaaatattttatctattaaaacaatataaatgtatggatcttcatagaaatttaaaaaataagtaaataaattaaataaggcatataaaataaatttaaagtaataaattattttttaaaaaaaatgtaaatttccaaaaaaatatattaaaatatgtaaaaatatgtataaatgagtaatatctaccattcacatatttgatgaaatatatataatttaaaagtttaacattcacaatagtctcatatcacaaaaatatatataaaaaatttatatttaagttctcttattattctaataaatatcatatattaataaatcattacagtttaaattatttaaataaaatcaaatacataattataagaaaataatttttatatgaaaaaataattaaataatttttttataattattttaaacttaacaaagattgaaaaatgcaaaaatgtatcctcattcactttaaaaaaaaaaaaaaaatcaataggcaagattaagttctccaatcacctacatagaaaataaatacaaaactttttatatgaaaaaaaaatattaaaggatttttttataattattttaaacttgacaaatattgaaaagtacaaaaatatattttgcgttctctttagaaaaaaaaaattaaaactaattgggcaaaataaaaacttgggtgagatattaatcaatcactcataaaaaaataatattcttttagaaagtaatgtagtaaggatttattagttaaaaactgatttttttttttttaattttaaatattttgcaaagattgaaaaatgtgaaaatatgtgtaaataaatactatctatcattcacatatttgatgaaatatatataacttaaaattttaacattcacaatagtctcatgtcaaagaagtatatatgaaaaagatatatttaaggtgtcttattaataaatatcatatattaataaattattatagttttaattattaaataaaatgaaaataaagaattataaaaaatattttttatatgaaaaaataattaaataatttttttatagttattttaaaattaacaaagattgaaaaatacaaaaat

SEQ ID NO: 74041 - DNA, 982 bp, Cannabis sativa
cccttccacttgattgtagccttgagcaactaacctggccttatttcgaaccactgtcccgaactcatcagatttgttcttgaagagccatttggttcctataatgtttactccatcaggtttaggaactaggatccacactcggtttcttttgaactgccccatttcatcctgcattgcattgttccagaattcatccagaagagcctcagttacattttgaggttctaccagagacacatagcaagcaaatgcaataacatttagcaccttgcgacgagtgaccatagttgcatttgggtccccaatgacaattgtgggaggatgagctttttgaatccaagacgggggacccttcttatataatcgagagtgaggtgaggacattgcatccttgctgatgggctgaggtgctgagatggcgtcatctcccatagaatcaacagatgaggtaccatcatttgcagatgagactggttggctgtcagatggtgttatctctggtgtttcttgattaagtgtaaccagagggagtgatgggatacatgggtcatgggaatcgtcctctccagatccaaacccattgtctgacacctccaagtcgtcaaactttacattcattgactccatgactgtaaaagttcgtttgttgtacaccctatacgcacggctgttagtcgagtatccaaggaaaattccttcatcactccgagcatcaaattttccaagatgatcacgatcattgagtatgtaacaggtacacccaaatatatgtacatggctcagattaggagtcttgcctttccacagttcgtaaggagtttgagatgcaccagttcgcagatgaactcgattacatatataacatgcagtattcacagcttcggcccaaaaccggatagccacaccctttgcacacagcatgacccgagccatctcctgaagagttctatttttgcgttccacgatcccattctgctgt

SEQ ID NO: 74042 - DNA, 1015 bp, Cannabis sativa
  modified_base (983)..(984): a, c, t, g, unknown or other
tggtgaaacaaatttcttagcttctcgagcatctctctcaggaggcttatgagcacacctcttaattttcggcattttgacccctgcttaatagaattcagctacaaattttcctttcaacaacccaattatcaccagtataatcacagaataacaacacaaatccaatgctcctccaccataaaaatattcagctacacaggccacaattttcaccaaataacaccttttaaccaaataaattttgaatttaaattctcaaacccggatttacttttacttggctgaaatgtgcaggcttcaacttcttgctgctgagatgatgcgtgtgaatagcactcgatagtgaatacctcggtcgaatgtgcttgctagagcttgtgacggtagctggttcgtggttgtgcaagagcgaatttcagcagctcgaggtgtgcgaaatgagggctcggtggtaatgatgaggtgatgaaggcgagttcgagcttgtggatggatggactagtgatggtgactcacggaatggtgaaggatgcagagttgtggttcgggttgtgagtcgatgtggttgggcggagggtgtaggttgactgggcaaagggttcgagcttggtggtgcgaaggtggtgcgattttggtgaactggagctggacgtggtgattcgaatggtgggttgtgagtgaggttgagtagtgtgcggatgggaatggtctgtgcaggggtgaatagtgcggctgggttcgagcttggagattgactggggtggagcaatggtggacgactagggtttgtttgctgaaagtgatgggctaatttgggggtttttcttcttcttttttttttttttaacatataaatgtatttatcattactacatattagtataactaaaacctattataaaactttttttttataagtatatcagataatctgtatatatttatatagctatatatatttattttattttttttatttnnttattttttttttgtttttttaaagaagaaa

SEQ ID NO: 74043 - DNA, 995 bp, Cannabis sativa
aaaataatttccaacaagtagttcattgtaataatgaatgaaggcatcaatgatagccctcgactcttcaatcctttctccctcagcattcacaatagtaataacttgattgtgtcttcttctctctcagatactagagtgaaacaaggttgagttttcatcacctgcctttgcccagttgagctttgctttttgctgcaaaaaagacaagtaacttttgaaaacaagggtataatgagtcctgagatcattttcctgctggtgtaattgttcgttcataggctgctgctgaagtaaagattgacattcatcaagtttagctttagcaatcgcctcctgagtacatatatcagaaaagtgatccttgttcaaatccttgagagcaattttcatactcttaagtttagagacaatccgaaacattaaagtccccttgcattgtatctgccactgttgctgaataatttcagcatatctaggatgcaattcccacatagaaaaatacttaaaagacttccttccacaaataacactgttgtggaaattcagaactgctggggtatggtcaaaaatactctcattcagaaaaataacttcagcagtaggatgtgcttccagccattcttgattagctaaagcacgaatagattctgtcatctccaaattgcttattgcaccacgtgtaaaaactcccgctaaatttaatatcatccaatctacaatgagcaatacaatcaatgaattccgtagaattggagtacctcactcgcttgccaattctctcttcctttgacaaaatgtcattgaaatcccccattacaatccatggcttcaaagtagataagctttgaagatgatgccataacttcttccttccctctttatcattaaaggcatatatgaatgttacatagaatgactccttcatatccacagttgaaacttccaagtgaaccaattgactagaacaacttagaatattaacattatagcta

SEQ ID NO: 74044 - DNA, 1379 bp, Cannabis sativa
tatttattataaaaatttcttttaatataactttattaacgtcaaaatttacatttttactgtctatgaacataaagtaaaataaaaaaaattccaatttttattttataaatcagtaaaattataattcaataaaaacttcaactttacaaccaaagtactaggattctgaaacaccctcacctaaaataaattttgaaaccaatccatttcttcattgtttacccattttaaaatataatatgtaattttatataataaatctcccttttaattttttttcacagtaacaacaatattcctacaaaatattaacatatattatattaaagtaatattcaaaaaaaaattaaaaaataaaaaaacttatctgatgcaacgatgtagtgtgtagagatcttttatatctacatttatataatcaccaaacaaaacatatactttagaataacataaatgtaggaatattagacaattatcaaactgccctacaccaacattaaaataatcagtataaccaaggtcactttcgacctttaccaatccctgacttttcaaagtcagtaaggtcaatacgacctcgttttgtctttgaacaaaaccaaacactcaagaagcttcctgatcacaatcactcagcccttaggttttcctcaaaaccctagcagagagtttctctctgagaaactcgaagctagcccttaatcaacccaaaaatcccagatcaaacacaaactctagatcagatctaacaagatctgatctatacacaaacacacacacataatcagaaagaatagggttagaaaacaccagaatttttttcccgaagttcaccaataaattggctacgtctccgttgagctgctcctcagattgagagctcgattccactatgaaattgatgttcagagttacaaggatgagattccaagtcacaggtatggtttttgactggtaatctctttatttattacatataatgtgtttaatccctctctctctaactatactaactttcttctgtttcttatgcatgtatgagcttcttctccttcttcttcaagttgtacaaccctgaatcttgaagaatatcactcaaccataggtataactggatttgcagcaggtatatatagcactaggtttctgatctagtttagtacttagttagttatagaaattagttaggtgtggattaacctaatccattctaactaatttctgtaagggatttagaggtcgaaggccaaattagggatttacatgtatttactgatttatccttgtaagtaggtcattatcagtgcaagtggaggtttaatccaacaataaacaaaaaatcaataaatatatatttttttttttttgagaaagac

SEQ ID NO: 74045 - DNA, 679 bp, Cannabis sativa
ttttttttaatatatattaattattataaaatttaacattctttatttacatattaaataaccacgagtaaaaacttttgttctcattttaattttacttaatttgcttattatacatagagtacaaaaccacaaatagcatatggtactaacttattttttttttatttgccgaattcaatataaaatttacatgttgtacggaagattgtctaattataattattaattaaattaaaatatataaaatttaatattaaattatatcaccaacagtacatatcattttaaaatgcaaattctcatacaatatatcaaaaagacctttattttattttcactactgtgctcctccttatcttgttttctctccactagacccgacccctgtttttcctcctcctcatcaaaaattgaaatactaattattaatcttgggtttttttcttctttatattatttccatttgttatataaatatatatacatatatatatatgaagtggaaaaaaattgttttaaactttgttgagtagagtgtgctaattccaacctcttattataattttttagttaacttctatatctgaaatcacatactgaaatattttttttcaaatttgttttcatggcggtattcgttatagttacattatcatctctttaaatttttaaaaaa

SEQ ID NO: 74046 - DNA, 763 bp, Cannabis sativa
tcatattcatgggagcctggtctcgagtttctaggtgaaaaattcacattataacacatgcccctagtttcgcgattgacaatcgtgtcatgagggaaactataatcgggaggcaggcgagaagttgtcacaagatggtgacttttgggtgtcctatcgagggtttcgaaaagacggctttaattattacttttaatccatttggggtgccacgtcatcaagtctctttagagctcgtgtaggcgtgattatgtataatcgttagattgtaagaccttaggcattctcttgccacgtgtcttcatcccaataaatgaggaatattagtatttaaacattctgatacgacatgatcccttattcattaccctcccttttccattttctctcctttcatccctcagaattttgaattctcaaaaaattagtttgcattttcttgatttttcttcatcagagaagcattttaaagttcttgatatccccagaaaccctcgaaaaagagactgcatttctagtttagtgggctagaacttttgtaactatctttcctcctctgagaattttgtgcatattttgtgcttttaggggtagaaaaatgcataagataataggaaagatgtatggaaatttatttgtcttttgacaaaatgcttgttttcttggaaatatgtacctgaaactcgaataatcacgagtttcaagaagaacaccttgagtgcccacatacttcctgttgagtatttcaaatactcacgagttt

SEQ ID NO: 74047 - DNA, 732 bp, Cannabis sativa
agtggataccagccgacctgtgacatctagacctgagagtacaagattggtatgcgagtttcttaacgtctttcccaaagatctaccgagattgccacctatccaggagattgaatttgtaattgagtttgttccaggagcgcaatcagtatcaaaggcaccgtatcaaattgctccagcaaaattaaaagaattggagatacaactgcaagaattactgaatttgggattcattagaccgagttactctccttggggtgctccggtattatttgtgaagaagaaagatgggtctctgtgaatgtgtatagattatcgagagttgaacaagcttaccatcaagaacaagtatcctttacctcgaattgatgatcttttcgatcaactgagcactcggggtaccctttacctcgttccaagcttacaatcaagaacaagtatcctttacctcgttccaagctctatgtgaatttctgtagcttaaatgacaattttataatttgtggaaatggatttagggattaaccatatacttgtgtatctcagaattgtgactaggactaccgacacttggtcaagagcacccggggatttggcatctccatattttcaggacatcaggtaagacagtaattagcacgtagagatatgcacaatggcgcttatatagaatatgatatttatgagaaactagcaaccgggattagagttattactctaaagtgagctgtt

SEQ ID NO: 74048 - DNA, 924 bp, Cannabis sativa
taatacaatacaatacaatacgacctaatacggtgttccaaacgaagagtattgttattgggtatttaatattgtctagcactttaaataagttgtgttctatgactagttagggatattctctaaaagttatttcttcaagaccatttctaatgagagatggaaaaattaatctatatttgatacaaaatatgattttgtgatatttttacatcaacttttattaatatgctctaatacataattgtaaatcttgatgcaacatttaatatgtcatttaatgctcatctaataatttattaaaattataaaataataataatacaaaggtaaatataaaatttaataataaaataataataattgagaaagtcatttaatgtaaattagcatgctaattaaactttaataataaaatattaaaaatgatataatgttaaatataaaagcataacattttgtgatacaaattttgtatcatgttatattgtgatgtaaatttggatcacttttaattatgtgagatttttacatcataaattagcatactatatattaaagtaaatttttaacgaagtgaactatattttgtatttgcatcacttattcatatctctattaaaaatacttttacctaatacttaattacatcattgtcttaatggtgtctttggactagaggttgtagagattatgggtatcaaagaggccctaagttggattaaacgacaaggctggcaacatgttgaactggaatttgacagcttagtctccatccaagctattcgtagccgctcgccactttgctccatctttggaaatctggttcaagactctcattctcttatgctctctatgcctttaataaaaattcgttttgttaaacgatcagcaaaccgtctagcacatgttgttgctaggatg

SEQ ID NO: 74049 - DNA, 703 bp, Cannabis sativa
caaacccaaacacaaacaactaccgtatcagctaaatcaccatttcacaattaaaaaccaaagttttgagttcaaactccaaacttgaataaaaccaaccaacaaccactagaacctgcttaaatccacatatctaaacacaattaagctttagaaaacaacataaaacaataacagcagctacaacaacaaaatcaccaagcatgcaaaaattcactttccttaaacttcaagaaaatcaagaggaggagcaagagctataccttggcttggatttactaacaactagaaagacttgaattactggaaataatccaaccctagcagccccaagaaattttcgagagagagagggagagcttgagagaaaatgtaattttccttttctttaaattttgtaaaatgaaataacatgggttggtttaactaaaaagatcagtcaagaattaattaaattcacatttactaagtgtaacatagtccactaaaggacaaactacatacattttgcccctccacactaaaacaacataaaagatgtactaagggtattttggaaaattttaaattcccgactaaactcgacatttccaatatctaactaaactgccttgctataataaaatactaagatgtgattctactgagccatataccgcgttccaatgttgtcgggcactgaacatgcaaaaatatgaaattt

SEQ ID NO: 74050 - DNA, 1017 bp, Cannabis sativa
tgcgggtagttgctttatgttagtgaaggcgctgacttcgagattaatctttctcgctgcgacaaattgtctccagaagctgacttgcaacttgttccagcagtccagtgattctagttccaactttttgaaccattcctcaacgtaaccgcttaattttagcagaaagcatagacatttggcatcgttacagaccctcataaccatcattacctggttgaaactggataaatgatcgctggggtccaagtctccagtatacgctgccatctcgggcatgttaaaattcttgaggagctctacctccaatatgttccgggcgcatggctctcgatcctcacaattggaatttgagtggtcccctttttgcctccaagagatccgagcaatgtctttgcgtagtgttgctaactctgccagaatttcttcatttagtgtccccgcggagaccactgctacatgtttcttcttatctaggtgatctcgtagatcaccgtgtttttcattgattttttatcttaagtcaactgtagggtacctccggtttctccttcctctttcccgaggctcttggtgcacgataccctctttcgttcctcttgatcctgagggccaagacttgcttttgggagcttgcccctctgcgggcctttccctttcgggaaatctgagcggacctttcgcagatcctgcacctttttggaagtggggtttttcccctggttttctttggaagggtaccgtatagcgcttggttccctggtacagttttttttttctttttcttttttatggcttggatgaagtttacattctttttttctctctttctttcttaaactgaattatcatctatttactgtgaagaagaagatgaagaagaagaagaagaagaagagtaattgaaaactcagaaatgaatgaagtgacacagagagagcacatttatttaatttaataataaaaataaaaagagaaagaaaatattttagtagagattgtattgtattgtagtgt

SEQ ID NO: 74051 - DNA, 881 bp, Cannabis sativa
tttttttttccacatgtgttattgtttttcatttcagttacttcatttgatcatttgtcattttgtaattattttttcatagttttttaatagtttaaacccccttttgtatgtgtctttttggaatataattttgtctagttgtttcctgtccatttttatatcataaatgggtaacaattagatttataatggattttgatgttcaaagagtttttcctatatttatgtttgtttacagtagttttgtagttttattatagcttcgctacttgcatatgttatttcattatatatgctttctttgtaaaatgcaagactgggttaacaaatatagtcccaaagatttctacagatcgaagtgtgtatgtacgagtaatttctctgttattaataacattaagaatactttgtctgtgaatttgtaaactatgttccgagacacccagtttggatattttttggatattcctgactttgttttttaccccaattgttcatagcctacttttgagggaggtttactagcctaatctcaaagaattttgggctaaggttactggccgttgtatacggttcagtgccaatgagtattacttaattactggtcttgattgctttggcgattgtaataaactgttattttccaggaatcaaaccagttaattgaggtttgtttccgtggcataaaaaccattgatcataaggctataaatgatgctttcttgggaagtaggtggggacaggatgagtccttaggtttgaaactatctgttttatatttcatctaatgtttccttcttagcaatactccggataaggaagtttctaggtttgatttagatgtcattgacagtggtcgatgggatgagtattgttgg

SEQ ID NO: 74052 - DNA, 1013 bp, Cannabis sativa
aaattatataaaaaaaaaatatattatttaattaaaaaaaattgaacatacatgtattgtaattaacattacttaattaaacttaattaaaaaaaaataattatacgtacataacatgaaaaaaaatatattaaagaatacttgtggtcgtactgtttattataccttcatgaaatattatattggtaaatgtataattaattaatgtagggttgtatttattttattttaataataattattaaaaactgttgtaagatgttataatgttggaagccatggtgctcacatgagtttccttctagatgatatattgaacagccataaactttttatggatgagccaataaataaataaatatacaaaaggaagctaagctgaagatctcaacctagatttatagctaagaacacgggatgtgagttactaccaattatgagacacatccgacaaaaattcatcaattcaatacaacacatatcattaatgacacacgttatttgtacaacccatttactgtatatgtcaatatatatttatatatgaaaaatgttaagggggcacccacccaccttaggtgccaagtgtcatagaatataataaattattattaatataatttaattttaagtgtgatatattttaatttaataaattatataaaaaattattatcataacatattaaattagtataatattaaatactttaaaatatcaataataatactctttatatacacactttataaatattaatttatttactttgtaaataaaaaaaaaaaacatattcaatttattaacaattattaaatcaactcactcatataactagtaaagcggtcctaaatagatttatcgatacacatacacttttttatattattagaaactaagatactaaaccgcgcttcgcgcggtaacgtccaacttttataaattatacatatatattatacttattaagtaatataatctaaaatataatattttaatatatgtattataaa

SEQ ID NO: 74053 - DNA, 639 bp, Cannabis sativa
acatcttgagagttgtagctagagttcactttgcttttcttagtgatctgcacgacattatctcataatcaatataataaaaagaggccggtcattacctaaatctaagggggtcgaacctctataattctgtgctttcttacgatttatttattattcctaactctttattggtgattactcagcgtttattagactctaagtcagttgacaatttttccagccaacaagaacgattttacttatctgagtattacttgtacgatacgtatacttgcgtgttggatatttcgcaacatccatctcgaggttggctgtaatacttctatttttggaccaaataatagtcatatgtgttattttggtcaactctcttaatacttgacttagttaatatataccaaaatgttatacagtataacgtgatacaaacattacacgtattgtttttaatatttatttctagatgtaaggtttaggtgtgtatgtatataatatattttgttttgttgattacgttttaaaaggggatggataggtgcatagctgtctaccatatatatatcttgctgactacataaaatcttttcttttttaattttttaatactaagattaattttttgattggtttgtgatt

SEQ ID NO: 74054 - DNA, 1048 bp, Cannabis sativa
agcttggttgaggcagattttttaccagtagtattttttatcctctttgaaacttcagggtttgacccagaagtagcttccatcgaggttgtactcttcttgcatcgcttggtgggacctgttggactgcatagaagatcttcaaagttcatctttgaggggctaagaataagattaaaatttgaataagaaaaaaatacaaaggtggcaaggctatatctcccactaagaatattactatcattaccagacaaggaggaactgctataataattactagattccctagatctagtaatcatataaagatcaaaggatttaagaggagacatatcccaatttgaatagccgagcctatcaaagttagtttcatactgtctatcgatcccaaagtatgaaccgttacaacttagttgaacatgatgtttagggtaccaactatcgaatttatgggcaattaggtcaatgcagttccaaatgtagaagttatagtgacaatctttaaattgaactaatgttgtttaatcagtcttaagaacagtaggggaccacccacaatgactgaaattattacctcaagaggcctcgtcttcaggttcccgagtggttacattcctaaggtaatgaatgtgagccacatagtcctcgtcctcttcctccgtgggtatagggacttgttgccaatttggaaacttgggagttttgaagtcattggtacattaatctcttccaagaagggcgcaagcttttaaattgtcatcgtgcaataaagggtctacagctcgcataccatagggaagattgagaaggatcttgtatttttccttaatttctaaggtggtaataggcctcttggtgatcatgtgaacataacaaaaaaggaagaattcttttaagtacaaaaaataataactcaaaaccaagaatttgagaaaaattcgtagttacgtaaaattcggaactttgtggtgttgattggatataaatcagtggtccaaaagaagtcattcatgaactccttttcgttaagcagcctcacaataatctt

SEQ ID NO: 74055 - DNA, 572 bp, Cannabis sativa
tttaacctgtatcggtttcctttacaaaaaaaagacaactcttgtctattcttccaatgtgggacttaagttgataccccaacaatcctcccctcaaaccaaggaccacatactcgtagtctccctccaacgaaaccaccttatgccaccactattaccgacggaacttgccgcctgaccattacctttgttaggaagacttttgacacaacactactaaaaaattgactttttctaacggtttataagtgtcttttatactttctcatcagttactaaaaccattgactatgtgggcacgtgtcataaaaatgcagaactttaaaagacggtttataactgttgagaaaaatcactttaaatgacggtttagaactgttgagaaaagttactttaaatgactccttataactgttggcaaatatattatgtagattaaattaaattactttttaatatatatttttaaatagtaaatatataataattaatattaatttccatcaaaaaataatattaattaaaataaataaaatcaatatattgtcaaattaaaatataataattaatta

SEQ ID NO: 74056 - DNA, 770 bp, Cannabis sativa
gatattgaactttgattagattaagtgtcatgtcttgtggcaaattatgtaaatacttttggtttagtatttctgcttcagtattgtatgtattccatgtggtaattttccaatttttagttcccattcgtttcttttcgtattgtctatctcgggtttgggctgttgtgtttttactattgttaatgggcttggacttcatgaaatatagctctaagggtgttttcgtctttttcactaattggtaataaatatctttttaccatactttgatttcacccaccttgtcaatcaaactattcatcttcctaagccaaggtcatcttcttcgtggtatccctctgtgtattgtgcttactgtgaaacaatgggcaaaaaggctgggcgtcttgttaaaatgtctgcattgtctggtgatggttcgtcgtccccctcgccaacagtggaacctcgcttgtctcccactaggtctgaatcgcctccatgcacaccaaacctaggtaagacttcttcttctgtaagtcttccaagacgttttacatgctccatgtccattccttttgcgtcgcctaaagaccatcctcccccatctaccacgttacccaaccctctccctgagtctgactcgtctcagcccccctgtcgaagccaaaaccgaaaaggaaaactgtttcctctgatgttactccttcgtcagtgtctaagaaaatgaaaactcctcaacctagtgtgtctgagccaaacataactaatgcaccgttttactccaa

SEQ ID NO: 74057 - DNA, 521 bp, Cannabis sativa
acaaacaacatttaattaaataaagacaattaaaaataataatttctacaagacttagaagctagcttactaaatagaaaatgaagataaaactaattaaagttgaataaacaaacacacttttattactcttttcatgataattttagtttaaaggcactaaaaatagctctataccatagagttatcacctattttttgtattagtataaggtaatttcattttagacacacaaattggttatattttaattttatttaatgatatattaaaagttataaagttaattttttgtacatatagaaaaaaatataacatactttttggaattatttaaatttttctaaaaaccttgttataactatataaaattgatcaaattaggccagttaagggatggtggagagaaaacaaagcgggaagatgctgaatgggtcagattggtttaggggtactttaaaatcaatgttgatgtagggttgagtcgacaggctaattgtgtggcggtgagtcatgtggt

SEQ ID NO: 74058 - DNA, 829 bp, Cannabis sativa
aataattcttattaatgttatgtccctattatatttagataaataaaaaaataatatatcattattattttgtagttattttaactatattacgataataatttttttttaaataaattagctctaccattaaattttttcttttgatttgagttttacaattccttttcattatttgtttttgtgactttattattattattattttttttaaaaaaaatatctctttgtggtttataggttgtgagtggatagtataggttatagtacaactaattagtatgttttctcaattaaaagaaaaataaataagctttaaattgctcttaaagctctgcaaaactttttaattcctttaaaaaaatattttataactaaaataataaatagttatgaaaaaattactataaaatgtatatttaataaatttatttaattttcaatttatattcagtattgaagattgtaatttgttaaaaaaatatttatttaaattatatatttatttggtgataaagaacattagatttaaaattatggatgacataataaaattacggatacataatttcaatctcgtcgcatattagaatttgaaaaagaagaagaagaaaccaatggagataaattggtagatgataacaagaaaatcatagaagtgattcattctcaaatatgtgagaaatcaattccaaaaatttgcatggagtttgaaacggaagatgaggcttataatttctacaatgtttatgcttataaagctggttcttgcatcagaaaaagtaaagggtataaagatagtatggcatgatgataaatagaacttttg

SEQ ID NO: 74059 - DNA, 775 bp, Cannabis sativa
atagaattaatgtattttacaaaaattacccacattttttgttgtgttaaataacaaattaaatatatttattaaaatagtacattaaacttagttttcataaaataaaaaaagaaaaaatcaatatggttatagatacatttacacaattgcgaactcagagtttaaagtgagcgagacatatttttttttaaaggtagtagtaaaaataaatattttttatggaatctaggtaccctatatataatctagtttaactattatactaaagttaatattatgtctataaatattattttttattataaatatatatacgtaactaactaaattatatatatattcgtctcacctacatgtaggtccacccttgcattgcattgacgctcaaattattataattaagtttattttaataaaaattaagttcaagcaactatttttgtactattttaaaaaaaaatacatatataatataatttatcattttacaaaataaacggtttaaaataatatttactatcatattatataataattaggtagagtgattatttataacatattttcaaaattttaatatatattatgaataaattataattctacattttttttcattacggtgtacgtatagttagaggagacttttcacaaattttcaaaaaataatcctaatggataatttagaaagtcaaaatcaatatttcaacaaaaaattgtttgaatccaaatcatagcatcctaaattatttaaaattatttcttcaaaatt

SEQ ID NO: 74060 - DNA, 1030 bp, Cannabis sativa
agattgaatttaaaattcaaattatacgtcataaaaaaatatagtagtttaaactttttatcttttataaatatgtacataattatataatatatagattatatctttatatattaaaagtgcttatctaacgacattttaataggtttgatctcccgttaacaaataaactcaataattaaacccaaaaaattaaacaattttttaaatattaatacggttaattatattcttataaaaaaatataaaaaaaaaatctctctcatctcaatcgtttcattctcatacagatggacttttcactcttccctttaatatgtacaaattcccgactgcctacaaacctgcaaagtcgttaacataaaaaaaaatatgtataaattctcgattgcctacaaacccgccaagtcattcagtcacgattgaaggcataaattccgtcgcttcagttgcttgcaaaatgtttttcgctgatttgcgattggagatgaatccgtcccagcaccccgccgccacaactagccccaagctccgtagatctgactccagatttttttcagttagtatcggttagtatgttgaatttatttatttgagtaataataacttttttttggggaattttctaattttgggatttacaatttggatttttgttgtaaagtttggaccttgtgttgatcagattagcttacttacagttacagcgatagagagaaaatcaatctggaaggagagaatgaatgagtatgaaaggaaggggtttttgggcgttggtttcgttcttttgtgttttgacttttattcgcaaaagcggtgaagtgaaatctttttattagaacatatatataaatataaattgtattatattatatatgaaaacttatgtatgacagtctggaacttgggaccctttgggaaaactccaaaaactccattaaattacataagagaaccgtctgtatgtgcattgggtatatgtatttgttttgacacttcaattaaaaaataaataaagaaattttttggg

SEQ ID NO: 74061 - DNA, 700 bp, Cannabis sativa
acccgtgagccaagcctagcaagatagtataaacatccatatatgcagtaaaacatatcacatataaattaacaccattacacttattgtctatttgacatagacctacgtgttacgctcagacgcctatttatgtctatgtgtcatagacccatgtgttacgctcacacgttgaattacaataaggccttagaacagttcatctcaattctaattaccgagtccaaccaaattatgccttgagcgcataattctttatttaaacatttatatcatggcacaacatttaaaatcatataatcaccagggtaataaccctaggccatataaccgctcactttagggtaataaccctaatcccggttctcaattaatgacaattataatatcaaacatgagttccaccgcgtttaactctacgtgctaactgctgtcttacctaatgtcccaagtacatggagattccaaatccctgagtgctcctgaccaagtgccgataatcctagtcacaactctcgggattcacaaatagggttaatccctaaatcaactttcacataatcatataattgacattcaaaacaaaataaacatacagagctcagaacgagctttccaatgatatatggaacacctgaaacggagtctggatcaaaaagttatgaacaatcgaacatagcattcaaaactgcccagaaaa

SEQ ID NO: 74062 - DNA, 1266 bp, Cannabis sativa
aggtatgaacatcattggcaataaatgggtgttccgagaaaagagaaattcagatggtactttgcaaagacttaaggcacgtttggttgcaaagggatttaatcagcgacctggaattgattttggagagacctacagtccagtaattaaagcttctaccatgagaatcattctcaccattgctgtctctaaaggctgggaaattcgtcagctggacattaataatgcgttcttgaatggcactctccaagaggatgtttacatgttacaaccgcaaggttttgaagatcaaaaccaacctgatgcagtgtgcaaacttaccaagtctttgtatggtctaaagcaggccccgagggcctggtatgacaggctaaaaggaaccttactcagctggaattttacaaaatcaagagccgattcatctctgtttttctacaaagcttctggtacaatcataatggctctaatctatgtcgatgacataattataacaggaaatgatgtctccaaactcacgaagttcattgaaaaattaaatgaaatgttctctctcaaggatctctgccctcttcagttctttcttgggattgaagtgcacagggatgacactggtttatacatgagtcaagggaagtatgtcaaagaactcctactcaaaactgaaatgcttcacctaaaatcatgcaacactccaatgacagccgggaagcctttgtccaaaacagatggtgaactactttcaaacccaacagaatacaggagcatcataggaggtttgcaatatttgactcacaccagaccagacttgtcctttgccgtgaacaagctaagtcaattcttgaaatctcctactacaacacactggagtgcagccaaaagagtccttcggtatttgaagggaacaacctaccatggacttcatataaaaccttcagatcgattggctataacagggtattcagatgcagattgggcgtgttgcccggatgatagaagaagtgttgctggctattgcgtctatcttggagacactcttgtatcatggtcgtctaagaaacaggcagttgtatctagatcaagtacggagtccgaatatagagcacttgctcaagtggctgctgaaatagcttggatacaatccttgctcaaagaattcgaatttcctttaccttgcactcctgtcacttggtgtgacaacatgggggccagtgctctggctgccaaccctgtctatcatgctcgtacaaaacacatcgaattggatgt

SEQ ID NO: 74063 - DNA, 1725 bp, Cannabis sativa
  modified_base (1672)..(1675): a, c, t, g, unknown or other
agagagagagagagagagggtctgggtgcttcggctcggctccggtggtgtttcggttcagtagaagaagaagaagaagaaagaaagaaagaagaaagaaaaacgaaaaggagaaaaagaaagaaaaaaagaaaataatttttttttatttttttaattttttaaattattttttataattatttttaaaattaatattacgtcgtgtacaaatgtgtacacgtgaacagtccaccgtggtacttaactgtgatttttggacggagaggtacagagcaaaatagaatgggagtttaggtagttttgccccccaaaaattaatttttgtggttaagtgtcaaaaaatttaaagttcaagtattttagccaccaatatccatcaaaaaaatacacattacaatataaattattattctaaaaataatggttaagccacacaaattttatacactatatttatcacatcaaagtgtgtaaattatctcaattacacaataaaaaaaaaatgataacgaacattccttatcttgtcttcactaggggtagcaaaatgggtttcgacactgcacacgaacacaacacaaattttacgagttaggatcgtaaaaattagacatgggtcgaaaacggatcgacacgacttgacacaaaataaaaacagatcaaacacgacacgactcacttaacacgaatttgatacgtatgtttcacactatttttttaaatataataaaataaaaaaaattattaataaaaatatatatttagtgatttaacgtttattaaaaaaaattaatttaacatgaaatttgaaaatattttaaattttttaatttttattatatatataacaaattatatattactattataaaattggcttattggtgtgatatttatagactattttacctttacaagtttaattttattacaagtctattttcttttttgtctttaccctcacaattacaagtcaaatttctttcaaaactacaatgctaatccttttcttcaatccctacttttctaattacataaatgtcgtctcacgttcatattgaaaagatattgtgcacttacaataactttaataacaaatattatgaatagaattattcccttgttctttttttaaatgataataaaagccaaatattatattttagcttgaaaaagaaaatgttccatactaatggattcgggtccataaccatgggttccaatgtacgagatcttgtagaacttaccaatgaggtcgtctccgtaaaaaaaatttgacaaaaaaaaagaatttgattctattaattaattaattaatgttttcccttttgggtgggacgaaagaatcaacatactatcgtaatcaactatatttaatcttttatcctattaaattaaatacattaatcccattatccttggcagatagcgggaattgaacccccgtcttctccttggcaaagagaaattttaccattcaactatatatgtacttgtttttgttcgcgatacccaaattcaaacttgctcccatttcgagtcaagagatagataaatagagatacatcacattacactgattgggggcgctcgtagtgactgagggggtcgaagacaacaaagcaatcttcttacggctagatccaatctcttggtccctgcggaaagnnnnaaaaatttcacgttcttcctttcgaaaaggtgcaatcaataggaaaaaaa

SEQ ID NO: 74064 - DNA, 943 bp, Cannabis sativa
gtaaaataatttccaacacatgctccttatgttttgattcgtgaaaaaagacaactattttgttaattttttaaaagaatcaagtttcccgatggcttttgttcaaatttaaagagcaaagtttctccagatgagtcaaatattattgggttaaaatcccacgattgtcatgtcattatacagcgagtacttgcggttagtgtccgtaaatttctacaacgtgataacgcagccactattactcagctatgtaatttcttccgacaattatgtttgagaactttaaatgtaaaatatatagaggatgctcaaaataatttaattctattattgtgcaagatggaatcgatttttcctccagctacttttgacataatgatacatttggtattacatttgcttgaaggagctatactgggtggcccggtatttatgtggtgaatgtatcattttgaaaggtacatgaaaaaattgaagaattatatgggaaacaaggcacgtcctgaagggtccattgcccgaaggttatgtcactgatgaggcagtaaccttttgttcaatgtactttaaggagtgtgaaacaagatttaatcggcttgatcgaaatgaagatgcaccttctgtctctcgctatcttacactttttaattctcaatgttgtcctttaactagtggaattatcaagcctcttgatcgtatcattcgtgaaaaagctgagtggtacatacttcaaaattctcctgaaatacaagcttatttagagtaagtttgttacattccaatgaattattttattaaattttaagtttttcttctctctttttctctgttgtaccttgacaatatcacatttcatagtgaacatttggacaagatcaagcatgaatatcctaatggtaaccacgatgttttgcatagacaaactttccgtccgtggtttcat

SEQ ID NO: 74065 - DNA, 1190 bp, Cannabis sativa
ccctgctccaaaaatgcaagtagctcctacccgtgctatgcaggcaggaccagttgttgcagtgaaccgaatggaacaactttatgaaaggttccgcaagcaggcacctccagtctttctgggaggtgccgatgtaatgaaagtcgagcagtagctgactgttattactagaattttgaattttatgggtgtcactgacaatggtagagtggcatgtgacacattctagtttcaagaagatgctctagtttgatgggacatggtgtccctgacttgtgatgttaccactatgactttgggaaaagttccaagagttgttcaacatgaagtactataatgaagtagtcagatgtgcgaaaagaaaggaacgaaaagaaaggaatttactcagcctacccgcaagaaaatatgagtgttactgaatacacaactcagtttaatcaattggcaagattggcttcagaaattgtgccaactgatttcagtaagaaagagaaacacctggatggattaaatttgaagataacacatgcccttatgatcacgagtgatgacaacaaacaacaacatccccctaataagaatgaccccgtactatggcacacaagtgtctaaataggtctagttttgttccataagctaacctaaatgaagtgttgccttatacagttatgatttcaaagatcaacctaattggtggatcagtagggtggtgggtggatactggtgcttctcgccatgtttgctttgatcgtgctatgttcaaaacatacacaattgtgaccaaggataagaaagtgttgttaggtgactctcacactattattgttgctggtattggtgatgtgaaattaacgtttatgtctagaaaatcatgattctcaaagaagtcatgcatactctagagatgagaaagaatctagtcttagactatcttctcaacaaggtggggtttacataaattataggagaaaatttgtttactttaactaagaattggatttttatggggaaagggtatgctactaaaggaatatttagattgaatgttgaagttaataaaatgaatgtttctgtttacttgttgtgttcttttaatacttggcatgctagactttgtaacgttaacaaatgaataattaagagtatgagtagttaggtttagtccataaattatctttgaataattt

SEQ ID NO: 74066 - DNA, 626 bp, Cannabis sativa
tttagggcataaaatccaacatcaattcccccaccgctggcgactctaacttctactatagcactatcactttgtccatccccataaactctgttatgaacaacatccactcgactctttccctcactgatgaggaaagctttgtccttacactctctgatgatgctactttgcatacaacgggacttcaacctattgttggacttttggcaagggtcctcaccactcagcatgtctacaaaccaggattcattggccaaatgtctggccattggcaaggacgatatcctatcactgagtataaaggtgaagatggtttataccatattcggtttggctgtgagggtaataagcgacgtgtactcaacaaagaatcttgacactttcaaaatcacttaatcatcattttggcgccagatgctctacaaaatgtcacaaagaaaaatttgatatacactccctttttggtgcaaatatatcggctccctttcttaagcaaatcaaagtttcttgctgaaccactaagagatataataggcaaatttttggaagtgcatgatgattctaccaatgaaggctggggtccatttctgcaaatccgagttaaactccttgttacaaagcca

SEQ ID NO: 74067 - DNA, 1174 bp, Cannabis sativa
  modified_base (464)..(465): a, c, t, g, unknown or other
ctcgtagttggccttctgtttcaacatgtctttttgaagcgagtgtatgagtttggcaaatgagtgcttcccccaaggaatccagaagaaaaacttgagatctttgatatatctaagtatgtcaggcgtaatcagcgcgttagcctctcgacccaaaagcactgactcaacaaccaacacaagccaagcttgtacaagtcttttgggttctgacagtttgtgaacctatcttggagtgcttctgtcttcacactaccagaccggttgaaatatttgttgatcaatcagtctgaccctgagcgagcaacatgcttagccttctcctcttccgttagccccgtggagaagtccaggcctataatgagtgcaaactcaagcactccgaatctgagctccttccgaccaatgtaaaaccgcatcctcaactcctcctgagcatcaaccttcatcttgtgcaacatcannttgtgaaataacaccgaggagaatgtcagggatacgacattccaaaagttgccaaaacggctttccttcgccgtgttattcaaattgaactcctcaaaccgagacttgatttttgcaaaagtttcggtgcctctgtaagtaacgcggccagtaaaatgctcgaatgctggaattatgagtctcagagccatctgaaaaaataaataacaaagtaatattactgccaaaaaattataaaatggtcgacataacgtcgacatcatgtcgatattctgtcgacattatcaaacagtaagcaacaacataatttggtcgacaacatatcgacataccgtcgatatgctgtcgatattcaaataacatcaacacaacatatcatcacacaatattatcgacattgtgtcgacatgatgtcgatatgaggtcgatatatcaaacagaaaataactgcataaagtgtcgacaacatatcgacatacaatcgacatgctgccgacaacgaaattaaatcaataaatttacattgtgtcaacaacatatcgacatacaatcgacatgtgggcgacaaataaatttaaacaatgaattcagataaaaaaaaatttcctcgaaatatgttgacatcctatcgatacaccatcgacatcctatcgatatacctaaccacacagacatttctaatggtcactttgtcgatattatatcgata

SEQ ID NO: 74068 - DNA, 1128 bp, Cannabis sativa
aaggttaagtaatcactatagatatcgtaaaacatttcaccaggattagaaatttgtcttgagtcttttgaatagacattgtcaaatttcctatcttatcctcattattctgacaagttactactatccattagaatggttagatttactttcttagttttaaataaagttcctatcatgatcataacatagtaagctatcactagtgtcatcgaaataatgatgggctgaaattttaaaattctcccactaaggtaaggtactgtggtactatgtccaagaacttttattggtatcaagttactattgcgatagtaacatgttaattggaacacgtacaggattaagaataaattttgctagtttgctagttattttattatattatgtttatgtctaatcaaaatatgtgtgtcatagagtttctgtggtgttatgaatataatttagagttcaatgaaaaaaagtttgaactacatatgttaataacttcttccatcccttagtgttatagagattctgtagagttttgaatatagtctagagttcaatagatataaaagatctttgaactgcatatattatttcttaacttcttccacccctatcagatcaaaagatttttttattaaacaaaatcttaataattttttaagaattgacaattattcataaacattaaattaaattctaagtgtttatgtggtattatctctttgcagagattaacttaccatagattttgtattattaataaatacaaaacacataaaatatgataaacatataaatataatatggtattggcatacaagttaaaaaaaaaatggagctcaatttcattaaagcaattcataatgaaaacatcttaagagaaaattttattaatactcttcaaaatgacataatgaattatttgcataaatatgaaatagggaataaatttcccaaattgataattgaaactaaattgtttgaaaagtaaaacatttaattcaaaaaattaaagaagataacgaacttcatcttcaacttggagaatctccacgcttcttgattagtggtcaaaaatatcattttattgatgttaaagtttgaattaaattaagttttgattaatattttcat

SEQ ID NO: 74069 - DNA, 885 bp, Cannabis sativa
tatattttttattcacacaaatatatatatatatatatcttgatagagagcaaaccatattagagttttccttagagccatcaaagagttgtagatcatgaacataacccagaggtgaaaccagttgtgtaaggatctttactcccgtggtaggactttttgataatttcacgagatcgtagtaacgaatatcctctactacaatatccacaatatatatattaaattatgtttgtgataattaattatttatacatatatctatgtatgtacatgttaaatttaataagataccaacatgtgtaggcataaacaatttgaatcaattaattaaaatattcttaaactagtatgggctctcagataattaaagtgaaattaattattttttgtatggaggtcaaattgaaaacttagtatttatgtttcttctcaattatttgcatcataaaatgcacaattgcacacacctaggccatcttctttacttaataatcccctatataccaaaacactaattaaaagaaagccacaaattattgaataatataactttaaatacttattaagttccataatattttctttaatttacacaaaaatgttggtaatatgtcacataatttttaacgtgagactatgccacaaaaatgtaatgaacataatgaataaacaaacctttgtcttcttcaaaagtgagtcatttctgtttgagattatcttaataatcccctatataccaacacactaattaaaataaagccacaaattattgaataatataactttaaatacttattaagttccatattattttctttaatttacacaaaaatgtatacattggtaatatgtcacattatttttaacgtgagactatgccac

SEQ ID NO: 74070 - DNA, 802 bp, Cannabis sativa
tcaaagttcatggagtaaaaatatgaatttataatggtaaaaaaaaataaaaatatcagaaggagcataattatgtaactgttatattttaagaagaatttttaccaagccatatattttagagtgaagaatttttaacaagctatatattttagagtgcaagatcaagtagtataaaaagtttaagggttaaaatggtaaatattttttttccgggaaaaaaatgttgcttaaatctttaacaatttttttgtcttttttatatattaaaataataataataattacattatgaaacaaaaaaattgattaaagtactcttttatatatcgatataaataggggatttattgaaacacagatagaatttattatagacttaccctcaaatatatatggatacaagttaactcttcagcttagtttttataaactttttttaacttttagaacttggaaaagaaattattttaagagtggataaaaaaataaaaaatatttctttaattaaaagtcaagaacttaagatttctagtttctccaaaaaaaaaaaaaaaattaagaagttttctttttaaattaaaataatttatacgtattttaactataaataaaagtagaaatttcacgagacattaattttataaataataaatatcataaatatattttcataaataataataagtataataaatatatatttatattttttttaatagtagacaaacaaaataaaaataaaaaataccataataatacccattaatatttttttaatgcagagaaatcatacgaccac

SEQ ID NO: 74071 - DNA, 562 bp, Cannabis sativa
ttctggatctctgggaaaatgcctgtgagttttgtttcgatgtccattacaacaaaagatctgaagtgaattctggggcctcttttgaagtacacggaatagccatctgttgggaaaattctgctgtgtattatgtcaatctacctaaagatctacaatggtttgacaaaagtataaacgattgctcgcatgtgaatgcatctggtgataaaaatagtatgtttcttggtggaaatgggttggagattgttagacaaagatgggagaggataagtaggataatggggaaaagagatgttagaaagtatacttggaatttgaaagttcaaattcaggcacttaaatgtccggcagtttcagttcagaaattcggttcccagaatcttgaagagataaatagagggtttgaaatcatagacagttcatttgttttgttgacacctatttgtgtaaattatggaattgacatgtgcattgtggcatggattctttggcccgatgaggagagaagctctagtccaaacctggagaaggtaacaaaataaatctataaacaaatgta

SEQ ID NO: 74072 - DNA, 648 bp, Cannabis sativa
ttaacggccaaaaaaattcagagggcacgatttggtacatgtcaaagttcaggagaaaaaaattactaattagccccattaaaaccggtgagaaaaatagagagaaaaagaggatgagattgcgagaggaaagatagaggtgtggggtttgggggtgcgatgcgtcgtctctatttgacgagttagcgtcgggttgctcaaatctgagctcagatctgggaatgggagggaggagtgtatagttcattgatggtttgttaggggagagaggactcagggagataggaagagagaaaaacaaaaaaaaaaacaaaaaagaataatatgacaagaaaaaatatttattttattaataattttaaaacttaatttttttaattttgaaatgagtttataatttttaaataattatattaggtgtaccaatatcaatatgacacgtgtaccagaaaattcacgtaagcagtccatgttggcatttaactgagataaatagatgtcaccttaaatttgctaacattttagtagtttggagggttttaccatcaaaatttgagcttaaagaactaaatgcaagtaaaatgacacttggtagggtttagccgccaaacaatcgtgcaactaatcatatttataacatttaattcc

SEQ ID NO: 74073 - DNA, 839 bp, Cannabis sativa
tctccccagtatttgatgtccagaccttttagctgaacccaagtaggcacattagtaacttcctctttggtgaaatcgttgatagggttccggggtttcatcaccattggcttacgatcaaaaaacacatatccctgctgcatcactttgtctctttgttctaaactttgaaatcgaataatgaagatgcctttggctagcaatccaaccttaacaacctcatctttccaaattctcctcacgaaaccttccagtatgctaattggaggattaactccaataacataacaaaccacagattgttgcaagaaattaacttcatcttcgatatcggcaaactctatcttgaccttcctctttgttccttccttccctggatcattcttcaattgatcaaaagaagattccaggttcctgacaatgttagatctgagaattgggggagaaatcctcttcccagaattaatatcttgagtagctcgattcgcaaccgtaagccaatcggagaagtcttggggcatctcactctgcctaataatcagttcctttgactcctctggagagaagactttttccacatactgttccattgaatgatggcattgttccattggctcttcagcttcctcaacttctagttcttgaatccccagtacagcatccatagattgagtcttaatgactctatccgaggatgagggaccagctttcttgcccttcaatttccctttcccgtccattttcgctctttttgccataggtccggtgaaacaccgaaagagagagaagggagagaaaaagatgtttttttaagaggctcggtttttgacaagtgaagt

SEQ ID NO: 74074 - DNA, 548 bp, Cannabis sativa
aattatttatatgtatatatatttgactccaatattattatgatgatttcttatataataaataagcttgtacagaaacaaaaatgtgaacagttttcatcattattaattggcaaacttctttacaaaatatcacttttgttgtgttacattatggtacctaataataatattattcttattacaaggtgcttttagtgccatctttaacttttatagggtctaaagtaaattttaataatatatattttatttgagatataaaatgaaattcaattaaatttttaaaccgtatttttaataaaaatatttttagactaatattaaaaaaaaaaccttaaagagatcaaaaggggctttgagcaaaggctctagccgccctatcctaaaaaggatcctgattataatgcaaaattcacaatattgttgaagtaataaatattagcatttaaaaataaaaagaaaatagtatatatatatatatgtaaattagtatatacataaatattatgtaaaagaaaatggtatgtacatatatattatgtaca

SEQ ID NO: 74075 - DNA, 4458 bp, Cannabis sativa
  modified_base (213)..(217): a, c, t, g, unknown or other
ctaagtgtctgacaaattctttctcttcctcattctctctcacacgcctaccctaggctgtccaacaccaaaggctatccaacaccctaggctgtcgaacaccctaggctatccaacacttgagttctaccaaacattgattcatatattgtaatcttaagggtactatagcagatctaattccctcagtataatacaactaaaaggggagtnnnnnattacccgctatcacaagggggcggaacctctataataaatcctattgtttattgcttttcattcttatttgtgcatacacgtgacaagcatctgatctacacgcccccgctgttattaattgtatatctttttgtcagctaacataagaattcttacttgtttgcttttcaatttttttctaacactcttatttcattcttcaaattttctatagttggagttatgtccttaattgatgtatatagtgtagtcatttattcacctgttcttaaataatacattagatgtacaaaatgaaaaatataattaagctcatattaaaatttattaataaaaatgtttatcatgctaattagttattggataggtttgttggtggttgaaaaggttgcacgcttcattataacctgagaatgtggatatataacgtttgattatgtaacaaatgaatactgtataatttgttttacaaaacacatatccaactaatctatatgatgacagaagttacgttttatatttcacatttatcacactgttatatataacgaatcatatagaggaataatgtagtgtgtttggttatttatatattgatctgtataatcacaattaattatcatataaattgttattttaaaaaaataaagtgaaatgtaattctaatgttagagtacttggtcgaatagtttatagcaaaagaatctattattttacaaatttattaagtaagaaaagcaaaacatcattaattatattgtaatatgaagctgaaagggaacgatgatgaaagagaagtatgtggaacactctatagaaaattaatgttcatttagataattattagcaaagagaaatacaatattataacttaaattgtctaaaaaataaatctcttcactaatttgcctgatgagcacaattttattgcaacgcatcattcaagaaaagacaaaaataaaaatacgtttgtgagttatcggttgaaattagtttatacttgataattctaataactccctgtaaactatgtttttggtgtaattcttatcgtgatgttcagtggtcacaagtcgaattaacacacaatgtagacgatatttttgtccttgacaaagctacatataattgaccgtgtgaaaaaacaaattgtggcaaataaactccaacataatccaacgtttggccttgggatttgtttattgtcataaaaatactcaactttataaggaattatgttcgtttaaatgggaagctgctattttcatccacatttggtaagaatggtattcttggtatgaggactctttttcctatgtggtgtcctacaacaatttcaccatctatcacagttgattcgaatgctcgacaaatcaaacgggttccattgcagaacccatctgaaggattaatgtttctaagcaacatcataggacaattcctctttaactgcaattcatgtagaggaaggtcgtttgatgttagagtgtttagaaaatcttccataactgattgctcggtgctttctatagcctcatctctactgtaatagtgatgtgcttctgcctggaaccttgcaattaacatcgaattaatttcatcaacgaaagaattctttgatgttaatatagctcgattcatcataatagacacatttttttttagtattgatggatgttgtggaagacattttttatcaggaggttcaaaaaagtgttgtcgtcgtgataagaaataagcatattacttgagatttttatggtgtcattgacggtggttggtgtcattccattgcccactgccaatacgtaatcagagaatattggatccagtcttactctcatattactatatacatatatatatactatatatataaaaaaaaaaaagcacaaaaaaaaaagcaacaccaaggattcatatatattactatatttgagaagtttaaaatgtcaagaagatgatcaatataaatttcttccattcgttaaaaaaccaacaaaacattatgtcaaagaagagccagtaagctcaacgatttgatctctcgtaataatctaaatatcaaacggaatgtcattatagtatagtctacccagtaacaacggtacgatgaatactatgaaaataacaaaaagctctacgataagactacttaaatgagcatatctaaaatgcctaataccatttttacagatacacacatttgaaacctgcagtacttaacatttctcatcacatattttctaacccaagctgcaagaaacagagataacaaacccttatgcaatggtgcaaagttaagtccattcattttcaaaggcatatagttaatatactcctaatcttcattcttattatccttacagaagatgtaaacagcaatgtacataccatcttatgctatatttacatgtagctaaacataaacacatagctaaaagcctgaaattaagtttcagcaagaaaaagggcaacaactagatctagaacgacataaatgccagtccaccaaaatcctagtcatatctatattaagatacataggtctataggtatcaagtaaattcattttgatagcacaatgaagtattaaacaatcaccaagaacaatacagcaagtacacaaaaaattggaaaaagtaatcgaacacatagatttaataaaacttcacaaatttccaattacattatagcaagtaatgtttcaataagaagaaagagtaacattcgtcttaagcttccttactttaaaattcatgcagtctaatccacacccacattgagggctctctacaaaattatcaactgggaaacccgctccggctatgcccaccgagaattcgagatcatcgccgactcgtttgacgtccacgatatcaatccaaaaccaaaacaactttacgctaacaccctctaatctcgtgagctctcccattgaaatataaccattaatggcggatttatatttcaactgatacgatccttcgacagaaaagctacaggtgccatcaaaataggcagcgaattttccagtggagggatcataatcgtaacccaccacacctatgggaagaattccagtgggaaagccgaagctattgatgaattcataggccgtgggcctgtcagaaacgacggcgttttctgaggcgaaaactggtgaaggggatacaattaggagtgaaattgagagtaaaacaataaagctttggttaatgaagaaacccatatttgaatctctgtttctagctcttattctcttagttgatcgacgttttgggttgtatattttctgatcgaagaatggaatggtagttgggatggggatggaaagctcttgtttcttcatttcatagttcatacggttactgcttttttcagtgtttaaatgggctacctttatattgagccctaaacataagaattatggcccaataagaaaatggagacaaattagaaaaatgtcatttttcgaataaatacctaatttaaaactggatttactatatttgtctctatctttagtttaatttatagtttatataaatttaccaaattattattctctacaattcacaatcttcttatgaaaactaggtaatataaactttaatatagtcgcttttcgggtgtagctattttaatttttttagtattataatatatcaatataataaataataacttaaaaataattgtaatatataataataataataaattatactatctaattacatagtattattaataattttatttattatagcataaaatttcatattaaattattattattgataattttatttattaaaaatttatttatttatttttatttattaagaagtttaaaatttatactattaatgtatagtagaattttaaaaggatttttttatttttacattttaaagtatttttttttacagttttacggtaatactcatagcaactcagcaatcaataaaacaatctaaatacacatagtttcctctatagcaacccaaaccgtaaaaatgaaaaaaaaaaattaaaaatagtatatgaagcaattctcctatttaaaattgtttttcttttttaaataaataaataagtagtttgcgtaaaaatgttaatgtgttattattattattatttaagtaaacacctttttttgcatttttttatatcgtgattatataaaattgatgctattattgtagttcatgttgttatcatcgtatctccccc

SEQ ID NO: 74076 - DNA, 960 bp, Cannabis sativa
tcaatagttcgaggggaatttttaacggcaaaaaaagttcaaggagcacgatttattacatgtcaaagttcagggaaaaaaattactaattagcttaaatttaattgtagacttttttttagtttataggagtattcctctaatttaatctgtattattttgcttatatatagtttatttgattggtaagcatatttagaaagttattatgtaaatagaatcgagagtaattcagaataattataaggtctaaggtatttgtttagctagataacacaataatataactataggtaattaatattgagtctcactcaactactctctctaattcggaggtaattgtacccatgtaattggaataattacaccgtgtaaatgtaaaatattactatttttaaatgattaatgttattaataaactacgtaattactaatttagttatcgaacatgaaaataaaaattcatacgcaattattacttcccatcgcttgcttgtgccacttgcatcaatctattgtacttagacatatgggccctgaagtttgttctaccttcctatagatccatttgtgatatttagaaattctccgggagctgtgcctctatgattcttcttaagcatggctcaagatccccatcttcttaattagtcatatatggctctgtttttttttttgggtcagatagtccgtaagtttagtcaaagttattatctaatcttccaatcgtctagtgtggtcattcaggagctcacatccacggattttgtcattgatgttgaacctattagagatattattacagtgaaagaaaatcaagacattacaacactattgcaataaaatacagggatcaataaagagattaaataaatgttacaataaataatatacaatatatatatacactacatatattatatataagaaatgtagaagaagatatatagattacac

SEQ ID NO: 74077 - DNA, 976 bp, Cannabis sativa
gaaaaagagttgatatttttctatgttttcaaataaaggttgacataagcatgtatttatagaaaattttacaatatacttctttgaaataggtatgttgatgcacacccttatttgttttggtattttaaaaaatatttagtttatttttttatgattactgtaattatttaagacatttagaaaaattttgagaaatttaaaaaattttcacaccgaaaacaagattcaaagagtttattgcacacataatttttttattttatatgcatatgaaatagacgatttaaacattaaaatttatattgtaaattattttgaatttttaaaaattttgtaatatgttttaaataactataagaattataaaaattaaaaaattatagaccctgaaacaattagggttacatcagtgcatttaatattttagtaggatgcattataaaagcatcctatatctatatatttattttaatttttcaacatattcaattctctttctcactaatacagacttgcattgcacacttaaattattgctaacaattctttctttattaaaaataaatatatatcaaaatttctaaccatttgaagtcagttgacttttaatagacatttcatgatatgtataaactagttagtaattaatgtgaatctaggagacctagctacgtacttacattaagaacatatattaatgttgtcacattaaacatgcgattataatcaatgattactagaactgacagttataaattaacggttaatatcataattttagatcgatgaagatacgttggattaatcaatgatccatatattaaagaagttattaaccattacccaatagaaattataaaatttttattaaaaagagattttttttttatttttatttttaattactaaatagcaccaaaatctaatatgtgtacagaataacagcttattatttcttgtgcagattatttat

SEQ ID NO: 74078 - DNA, 830 bp, Cannabis sativa
gctctaataataagagtattaccggcggagtacgtatttcaatggtaatattcactaaaaataattaaattaattcaatattagtattactggtggtttttttattattactggcagaaagcccgctgctaattcgttaatggaaatgtgcggaaaaattcccgcttttttaatttgaattagtattaccggcggattattagcagcgggggtccgctagtaatacaatattttattatttttatacttattaccaacggaaaaaattaataccgacggaaccccaccgataataatattatatatatataaaaaaattaatgcctaaacattcatttcattcctctctctctttacaatccctcccctctctacaataaaaccctacacaagatttactcatctccttctgacaacactgctatgctagccccttttttccttttttattttcttggataaccagctgtccctttattcattccccctctcaattttcttctctttcgatggattagaactagttggccaaaccagtcgtctcttttcattttatttattttctcatctccttgttttttgagattcatctcataatattttttttcttgtgttatttttattctaatggcagatttgattttttttgttattcttctattttctttgcaggttaagcattgtttaggattgtgtgtcttgcatcgtcgggttcacatctgggcatttgagttacgatgttcacttttggatgagagcgggtttggagtttcatggttgggcttggtcgggctcacagaggcggcgcatctcaccggagtggattcaat

SEQ ID NO: 74079 - DNA, 908 bp, Cannabis sativa
tcaaaaggtagaattgagcgtcttatgtctgatgacaatttagagtctcttgacttcacagatttcaatgtctgtgtagattgtatcaagggcaaacaaacataaactaagagattatgtgccaatagagcttcaaaattcttagaattgaatcacatagatatttgtgggccattccctaagacatcttggaatggtcaataatattttatatcattcatagacaattactcacgttatgggcacctatatctcattcataaaaaatctcagtatctggacgtgttcaaagcttacaaagctaaagttgagaatcaactcaacagaaagatcaagaacgtcaaatctgatcgtggtggtgagtactacggtagatatgatggcttaggtgaacaacgtccaagaccatttgctgaattcctagaggaatattatattgtcccactgtacaccatgctaggatcacctagcatgaatggtgttgctgagagacgaaataagactcttaaggatatggtaaggagcatgattgctcattctactttacctaagtccctttggggagaagcattaaacacagcagcttacattctgaatagagtaccaagtaaagcagttgcaaaaacaacttatgagctttggataagtcaaaagcctagtctaaagcatttccacattcggggatgtccagttgaggcaatgccttataggtcacatgaaaataaattcgactccaaaatagttagcaaatacttcattggttattctgagcgatctaggggctataagttttatgataccactgttataaatatttttgagacgagaactgcaacattttttgaggatgttgaatttgggggagaaataaggttagagacatttcttttgaggaggaattgaattca

SEQ ID NO: 74080 - DNA, 929 bp, Cannabis sativa
aaataatcccaaatttaaaacaaacaaaaaattataaatatgttaataaaactttatatgatttcaatactatcacgtttatttaaaaataaaaattaagaacatgatttatatataatgaagtcttaagtttattatttatttaaatttaggaatttttcatgtgaaaaacaagaagaataataataattagattttgtcaaaaaaaaaaataataattagatattttctttttaaaatttaatattaataaattttatttttatatttagattatttaatatttaatttaaaagaaaaaaagaaaaaaagaatagagtaaaataaaactattttagagcgtcatgttaccggcttatatttcttatttatatatagatatagaatatagatagattttgatttactattatcaattgtgaagtaagttaatattatatatatgggtgactattcaatgttacattttttagtcacaaaataattgtattttttgtgattaaatgtgacttttagttataataaaaagttatttaccactaaaatatagtatttagatacaaattattaagtcacacacattttaatcacaatataggaataataatttataattagttatatttttttttctttaagtcacaagttttgttatgactaaaattaagatttttgtagtgacttaaagattaaatggttgattggtatctatttttactcaagttttgagtgataaattttgtaatctataaatctattgggtgattattcttgctctcctatttttggggtttttgttgctgagtctattcttagagggggttatactctttccacaaatattgttctatatttgcaattggattgatttaccgtatgtttgtcatcttctttgttagatttgtgcaactaataacctttgaactttg

SEQ ID NO: 74081 - DNA, 1197 bp, Cannabis sativa
tttcatggaatgagaaatcttgtttgcagccaatttccttcattattcgagatagatattacattccaatgacaaaaaaaagtggggataggggattgccttgtcgtaatcctctcttagattcaaagaaaccatgtaaggtaccgttgaaaaaaaagatagagaattttggtgttttgacacaattcatcaccaaagtgatgaacttgtcaggaaaaggtaagcccgtgagtacctcctctataaagtcttactcaatcgtgtcctaagcttcttatagatcaagtttgatcatacaattggccttgtttgattttcttccatagtgcctaaccacatcttaacaaatcattatattgtggtcaatgaaccttccttggacaaagcaaccttggttttgggcaatgagatctggcaagatgtttttgagcctcgagcataagatttttgtggctgccttgtatactacatagcaacaggcaatgggtttgaagtcacttggagagttggggcatctaactttggggataatggtaagtgtagtacagttgatctcttttagaatatgtcctgagtgaaagaaagacctgactgtctcacatatgtccccctcaattaattcccaattatcttgaaaaaagtagcttgagtacccatcaagacttggagctttggttcatggaatagcaaaaaaggctttcttaatctcttcatttgttacagcagctagaaggccatcagcttactgttgtgtgactgtggggccattttttaaaactcttctgttaactgatgttctatcaactttgttggagctaagcaaagtctgataataggataaaaaatatcagttatttggttcaggtcatcaaccctaaccccatgtgaatcctctattgatagaattttgttttgattccttctggccatgatgctcgacttaaaggcagcaatattatcatctccatcacgagtccaagtgagtttggccttctgatttagaaaatagaggcagtttctatgtgccactttgtaagcttaccttgattccatttcattattctgcataactgaattaaaagggtcttggtgcatctaattttggcattcagccagagtttctttagccttgattactgcagcttgaatgtcaggaaaaccctactggtttatctctttgaaaatgacctttagagc

SEQ ID NO: 74082 - DNA, 733 bp, Cannabis sativa
  modified_base (233)..(234): a, c, t, g, unknown or other
tttaaaatttaatattcttaatatcaaaaactaaatactacttgttttcttttttttttaaaaaaaaaaagatgcaatactgaattactataactgagtgaaccagtgcagtatatgaaacatgattatcgaattgaagtgtcaatatcatgtgaaaattgttataggaactggtttttttttttttagaacaagtatcatttagttattgatattaagaatattaagttttnnaataaaataaaaataaatgtaatacatttgaacccttcacgtatctatatttatgagttaatggaaatagtagtaacagtgtaagagaattgtaacattaggtatttttgcctctaaaaataaacattaggtatttacgtgtataaaatctgaaatattaggtatttatatcgcaatttaccctatagagatatcccaaaagcactactacaatattaaattttagctttgaacttttttaataattaattaataaagaaaataagcaaaatcacaatcttccaatgcgtctctcatcacaaaaaagaaaaatatatatatatggacactaggggtgttcatcaaaccgctcaaaccgccttgcactgtaccacaccgcaaaaaaatacagtttgaaattctttccgatgcgatcgaggtttgaatttttcctaaaccgcacagtgcggtgcggtttgcagttttaaattgttaatatgtggttcaaaccgcaccacac

SEQ ID NO: 74083 - DNA, 888 bp, Cannabis sativa
tggtttaagaaaaaaaatttaaagtttttttaaagttttttaagtatagaaaatcaaattttcccatttattggcaccaaattctacaccactaatagtgttagattttgaatttacactaatttgatgtaaaaaaaattctttacattctaaatctttttttattttaatttaaaaataattttacattttagttttcaaattaaaatttattataaaaataataaatttaaaacactaatatatttaaaaatacactttggttatataaacttaaagtattttgagaatcttgatatttttgaaatacttgatattgttagcgaggtcttttttttttttttgtataattcttgtttgctcattttaaaaatagttgcatatattaaaattaactataaaattttaatatatttttttaaaaaaatgtatgtgtttaattgattttaaaaatattttattttactaaattatttttagattttaaattattactagtagttataatattattatattataaataattatttttaattaatgtaaataatataaaataccaaattttttaagtaaaatatttttcgtatagtattttagtgtaaattattaaagttgtgacactaaaataaaaaatttacactaaattaatatagatactacactaaaattagtgaaaaaaatagtcttaccaacaactccaaaaatgccaattttgtgtgtacaattaattgataaacgattcaacctattctaatttaaattagaatatatatgtgaatcaatattagaataaacaatgttggaaaaaattctcattacaagagagaataggaggattacaatcaaaatactcaaaatacaaataaaagtatttcatcaagatta

SEQ ID NO: 74084 - DNA, 1355 bp, Cannabis sativa
tcgtagataagcaggaggtttggtggttctgcttgttcttcgaggaagaactgctgaagtagaagtttcagctgctggtgtatttgttgtgtcagctggtgcgtgagttgtgtctgctgatgtgtgagttgtgtctgctggtgtgtgtgttatgtcagctggtgttgtatcctgggaatgtcctgcacatgtaagtcactgccaggaatagccttgttgtcaatagggtaatcaccaactggtgtattattaataccagtagagggtagaacagtagtagtgaatggatcaaggttacctgtttcatcattaagtttatgaaaagggaaaatgtgttcatgaaacacaacatttctggaaataaaaatttgcttactgtttatgtcatacaatcggtacccttttacaccttggggataacttaaaaaaatacaagcttttgctctagaatcaattttagttcgatgagcagtaagagtagaagcaaaagcaagacatccgaatatttttaattgagtataatcaggttgtgtgtggtataataattcataaggtgtcatgttgtttagatttggagtaggaatgcgatttatgagaaacgcagcagtcataatgcattcagaccaaaatttcagaggtgtgtgagcttgaaaacaaagagcacgagccatatttaataaatgttggtgttttctttcagtaatggcattttgttcaggtgtctcaacacaagtaaaatcatgtaaggtgccatattttagaaaaagatccttaaaggcaagttcaggtgcattgtcaaacctaaactttttgattttgcagttgaattgagtctcagcataagtcaaaaattgaggaatcacagtgggcacatcagatttttgctttaaaagatatatccaagtgaaacgtgagtgatcatcaacaatcgtgagaaaaaatctaaaaccagaatgagatgggatatgataaggaccccacacatcacaatgaatcaaatcaaagacattattagcaaaagtggttttatttttgaagggaagcctcttttgtttagccataggacaaatatagcaaggaatgtctttatgtaaattggaagtattacaattaagcttgttatctaaaagtttcaaattcttgttcgaaggatgtccaagccttgaatgccaagtattagcagaaatagcaagaatcgggctgtaatgaggtatttgatccaagatgtataggccattcttggattcacccctgccaatccccctcttgttggttcggtcctgaatgacaaagttattagtgtagaatttgacagaaagattattatcattagtaaggcaacttacggaaatgat

SEQ ID NO: 74085 - DNA, 585 bp, Cannabis sativa
aagcccatgcttacatgcattattatatatccatgcaatgcatgcatgtgatgatattattctgtttaagtattattatatattataatatattaatatttcaagtatacgtatcactcattcattaattattctatctaataataatatattcacatatatatatatatattttgtaaatgtaaatggagactatatatattatatatatacacggctaaatcttaatttattaatgaagagaaaatgacatttcgaaagggcgagacttatgtatatattatatatatgtccaaaattccatattaattatttataaacctatatattatattatatataatatatcaacacaatatatatgcattgatcatagaagtctttaattaatgtggataactttatgatcacatggttacaataattaataagaatcgaatgtatattaatgctttatagtttattaaaaagtagaaaaagaaacaaaagaaaatgatataatataaatatatttatatttaattatatatataaataaataaatggaaaccaaattagccaaattaattaagtggaaatagcata

SEQ ID NO: 74086 - DNA, 911 bp, Cannabis sativa
caatcccattttaactctccatttcttttttctatctatatgtgtcccctttatattacgctacctactagtaaaaaactagaaaattttagttcataatacactggatgcaatgcaagccaggttgtgaattttggggttttttcctcgaaggtggaggatgacttaataataacaaattaattatttttgttggaaatttagaatgcagtgacatggaaatatatttacttgcgtaactttgtaattattaagttatataattattacggtaaaaattagtgatgcacatttctcccacgcggatggaccccgcgaggatccgctcctaattggacatggattcctcaactaaatgggaaatagaacgggaatggaaattacttattgtccccgaaagttaaacaggacggggatggagatcacactcctcgccccgatggagacccgtttaatattttatcttatatttttttgtaatattttatattttataatttatgtttacatttttttagtatattagtatcttttttatgaattttaagttgtattatagataataattagtttattgaatgtataatattttaatatttatgtagtttagtatttttgtatataaaaagttttattataaaatttatttttctattaggggacctactccatccttgcccccattaggtgattctccgtcctattcttaatagggaataagcagggatggggatagaggaacatgttagacatttatatatataaactgaaatgtatatgtttaagtattaagtatatgtttaagtattggtgataataaagtgtgatttatttttcttaattatacagtaaaaactgtacattttagattaagttatcagaataaatttttggaaatttctactggtatg

SEQ ID NO: 74087 - DNA, 1587 bp, Cannabis sativa
  modified_base (1515)..(1519): a, c, t, g, unknown or other
ttatgtttatactatattttcatgtatagaatggatagggtatattcaacattttattataaactttgaggaaaattttttttacaataaacttcaattatatcttaatttagtttaattgctatgtttttcaaatagtaatttttatttattaagccattaggtatatttattttaagtaacaagagtagattttaaaaaagtatttattacctatgatgaaatatgatgaaaaatatgtaaattgttagattatatccttaaatgtgtgttcagtttgttatgtgtaatcttttattttttttatgttataagtccaactgtcataactaacatctcgacaattatgacacttggtattccttagtgtttagttagctataaatatagtctctatgttttgtcatagagaaccaagtgtaaaattcgcacttcgtaaaaacacattcctaaatcaataaaatagtatttttttcagagctcaagtttgtgttgtgtctttgattctgtggggtacttttgtgtgtgttatttggagattctttattgtgtgtatgtgtgtgtatgtatggagatgattataggtgtttctcaataggtgatatcagagcttggagattaagaatcagattcaaaggttcaagattcttgaagatcgatccaggaagaaatgggaaatgccaaggttgacatcaaaaagtttactgaaaaaaatgactttggattgtggcgtgtcaagataagggctttgcttgttcaatagggtctacaagctgctcttcttggagaaagaaatctaccagagggattaactccaaaagagtagacggacattcttcaaaaggctcatagtgctctcatattgagtcttggagacaaagttcttagagaagtgtcaaaagaagattcaacaactggagtatagttgaaactagagagtgtgtacatgacaaattcactggctaacaggttatttttgaagcaaaaattgtattcttttaagatgacattagggaagaacattgaagatcttcttgatgatttccataaggtgatactcgatctgaaaaatataaagatcacaatcgaggatgaagatcaagcaatcatagtactgaattctcttccgatagagagttatgagtattttgtggataccatgatgtatggtaaggattcactgacattagaggaagttcagaatgcattaatgtcaaaggaattgaagagaaagatagaatagcaagaagaaagtgttggggatggattgttgatcagaggtaaaactccaaagaaggaaattaagggtcagattaattcaaataaaggcaaccataattccaggttgaagaagagatgctttgtatgtaacaaaactactcatctaagaagagattttcatgcctgaagaactacaattccaagaaagatgatgatgctaatgtagttttagatggagaagaagataatggatacgatagtgctagtgtttagactgttgggttttatgccctnnnnnaaactccatttcaatgtaatctttgttatttaaatatcaataaagaaacagaagtagtttcatcactt

SEQ ID NO: 74088 - DNA, 756 bp, Cannabis sativa
tatataatacattcaaaaacatatgatagctgcgcgggtggttacaaacattttttttttttaaaaaaaacaaattatcatcaaacatatgagtgcacttttaatgggtattacctatgaataggtataattagaaatatttgagtttttatgcttaatttttctttctaattagaaaaatctctcactttaacatcatatgagctgagattattccacaggttgaaacaaaaaaaaaaaagtttttagcaaaaaaaaaaaaagataagtaaaactttagtttcacttaaatatttttatatgaacatatttttgatatagtataaaaatagatattcttttgtatatatttttaattaagtagtttaaactaagcaaagaaattcaaatttctcttttattattcgttacaagatcaaaatttgatgatttaatatttttaaaattaatatttgtagttaaatttatttagtaaccatttatgggtaatatccattgagaaatgatccatatatatatttataaagttaaaattactttaattaagtctatttttttttttttttaaaaaaaaaaacatttaaaattgggctttggtagattcttagcttttccataagtgagatacatcacagtgacagttataatcccatgtttcagttgttttttacattgaataactgccttcacagcagttacacaaaggaaactgcttgttcagttttaaacctcaactttaaataactttaaatgatt

SEQ ID NO: 74089 - DNA, 668 bp, Cannabis sativa
ctaatacatggaaaaagcattgcagtcgtgaaatacaaagaggaatatcaaaatttgtttttctttctgtaaagagaaaccatgtaaatgttaatttactgtagattttatatttttagagtaatatttatgtaggtgttttttataattatttttgtgctaatatatttatcttgagaaattataaaagtttatttctattgcatgtttatgaattatataagttttggtaaattggtctaaaaacatataggttttagtaagttaatttttcaactttattttttggcaaattggttattaatttttttgtctttacaatgggaatggaaggagctcggcaacgaagaagcagcaccatgaatttgggcaaatcaacctaagaagaagaaaaaatattaaaccaaaaaaatcaaccattacgatgagcgattttatagagaaaaattagtttaaaacataacctcaatcctttaaaataattcaaattcgataaaactaatttctcctaaattcaatatacagatttataaaatgtagacccgtaataaatagatcttcacgatcaatcaaaattaggtataacccataaaatatgtatcgagtgactattcaatagttacattttattataaccatcatgattacatttttctgtgacctgtaat

SEQ ID NO: 74090 - DNA, 1037 bp, Cannabis sativa
gacctgggacctgaagtggaactagatagggacccgagaccgtgacccaaatctggacccggggcttggacctaacccgtagtaagtgttttgatctgggacacatacccaaactcaaacccggactcggaccaagaccctgacccagacccagacccagacccgtaccctagacctgggtccgagtccaagtctaggtttgagtgcaggaaccggaatctgactaagacccagacccagatctggaccaggacgcgaacccgaatcaaaactcagataacgactcgggacacaaacccaaaatcagacacggacttgtaccgagtaccaaacccaagacccggaccgagatttgtgactaagacctacacccaggagcccgacaaagattgggggcccaaactcaaaattagaaccagaatcaggacccaactgggattggaatccaagacccgaccccggtcttagtcctagacccagacccggacacgaacacaaaccaggatttacaatccgaatcgaaatgagaccgggacccaagattgggatatagatcatgactcatgactggggcctggaccaaacccatagtcggtgtctagatcttggaatcgtaccaagacccaaacctggtgcaatttctagactaggacccaaatcaagacttggactcgcgacccgaaattggaacaagaaccggaatgaagaccttggaacaggaattggactttgacccaaaaatgaatctagatgcagaaccgaacacagacccgaaccccaactgggatcgatagctggacccatagttgtgttaggacctgcgaccaagaacgcagaacccaggacacatgacctgggaccttgaccagaacccagacccatacaagaacccagacctagacacagatccagagcaagacccgaaccctaaaacgggctgaaaccgggacccagacccagaaccagacccaaacccagactcatacacgaactcggactggaacccgagacttggaccaagaccgagatcaggactg

SEQ ID NO: 74091 - DNA, 1233 bp, Cannabis sativa
tgtaagatgtagtttttttttaatctttttttttctttttatttttttaatttgttttagtgttgttttacagttttgctatggttatttatttgatgtcgatttctctatttttgttctatcttgctggaattaatagttgttttcaagtgttctcgtattgctggggtagttatatatatgggtgtagaagatagagtacaatagggatggctccctatgagatgttgtatggtaggaaatgtcattctccaatttattgggatgagactggaggaaggaaatatttaggtcctagttagttcagcagaccattgaggcaataaagaaaatcaattctcgaatgcttgcttcgcaaagcaggtagaaaagttattctgattctaagcacagagacatagagtttcaagtgggatgacatgttttcctacgagtctcaccaatgaagggtgtaaagcgctttggaaagaggggaagttaagccctgggttcataaggtcattcgagatacttgataaggtcgggcatgtagcgtatcggttaatcttagcaccaacattatcagttgtacataattaatgtatttcatatttttatgttgagaaaatatgtgtcagacccgactcatgtcttgagttacaaagccctagaactatagttagaattatcctatgaggcacaaccagttcaaatcctcgataggaaggaaaaggttcttcagaacaagaccatagtgttggtcaaaatactctggagaaatagtaaggtggaggaagccacctgagaattagagtccaacatgagagttcaatatccagaattatttaggttagtcttcaaagattaaataggtgtaatgaccgcatacttaggatatggattagtagggtagttagcattaattattcgcattttatggttatatgttaagatcttgtgttgtgggtcaaattttaagaaatatgcaatagaattataattttccaattctgagaattttattaaactctaggtgtattgtttatgctatatgtgaaaattaatatttttataatttttggtcagtaatgatggaaaatgcgacagatggtcggtagagtcacatgggttagtttggaatatcaagttttaagtggggttatgattgtggaccattttatccctaagccttaagattacttaacagtgaagtaagggcaaaattagaaatttgccatttatttggatgttgtc

SEQ ID NO: 74092 - DNA, 1035 bp, Cannabis sativa
gaagaacaaaagccatgcccatgtcctactttttggggtgagagagagccatcatccatggtagaggacaatgactaagagtgtcttcctttctagaagaatcagaagaaaaagctcctcctgctcctaagtcatcatgtattaattaatgtaaaaagaaagcataaatagtaatggtgaaaagtataactgtgttattgtaattttttcttaatattaacagaaaaggaccaaaccacaagtgataattgtcaaaactaatgaagatttgtaataatggtaattctgttctatgtagttattgaatagatgaattaataaagattatatatacaggaaaagaaaggacaattcactgattctctctgtttgaattccatcttatttttctttgttgattatgccaattacaactattggaccaattagattatgtcaattgttatcttccttatacttgtgtatcaagttgttgcagctatgtaataaaaataattaaccaaaaatgaaaatctcagtatatatatttatattgacaaagctcactacactgggatttaccttactcaagctaagtatgcagctgatcttttatctaaaaccaacatgttaggaccaaactctcagctgccatgagaacccctttggccaatcctacctaacttcaaaccagctgagtcctttcgcctaatttagactggttgagttcaatcgatgatagacgctctacctcaggttacagcgtctacttaggagggcacgagttcctttcaaaagcaagaacagacagtgttagattattccaacaccaatacttaaattgcttgtaaagtttgaagtttcccattcagagaattagctaataaatttcatatgtatcaggtaggacactattaactagttcacaatataatataagaaagaaataatatctcatgctaatgcaaagtaaagtaatcaagttcatcatcatcatcatcagattttgatttctaatctaaaactaatatcaatgagcagttacaatattttaaa

SEQ ID NO: 74093 - DNA, 989 bp, Cannabis sativa
  modified_base (174)..(189): a, c, t, g, unknown or other
agatttctcatctttattttttttttaaacttaaatatctcatatttttttttaaaaaaatatgaagtacaactttttgaccaagttaacaactaaccactatgaagcttagttgtgctttgtgagtgtaaccttttattttagatttcatgacttaacttagtgtgtcgcctnnnnnnnnnnnnnnnnactaaaatacatcacttcctcttattatagtcaagagatcaatcttaagcaacagtatagataaataccttccttaggggggacgcaaacaaagtcgtctaaaggccggtctatactccatcgatgtttaccaataatgttaagaccacttaactttaatttgaaaattaacagataaatagcgtttaattatgaaacttgtatattagttatgaattagtaatttacagagatttatttgaattcagaattcatatgaaatttaatatttttgcatgttttgtgttcgacaacattggaacgcgatgtttggcaattagaatcgcattttagtatttttagtatagcggggcaatatagttagactttgggaatatcgagattagtcaagattttagagttgaccaaattaactcttggtggttttgtgactttttggttaagtggagggataaatggtcatttatcccttaatattatcccttaattaatagataaaacttatttttatttttcattttattaaaattagatgaagatacaaagattactctctctctctctccaattctctctttctctctcgaaccccatagaacctagctagggtttgagtttttgcttcacaattcaagaaatctcagcaagttctaagtgttctaacccaaggtaactactctagtacgttgtttttataatttcttaagtttaaagttatggttttatgcatgaattgtgagtttacgtgttgtagttgttgttcttgtttgtagatatattttgaagttaatttgaggtta

SEQ ID NO: 74094 - DNA, 1993 bp, Cannabis sativa
ttagttatctattgcattattgtttttttttttagtttagttgagttttagcttaactcgggggcgagtaaagatgtccaacctccacaagctaaatttcctatgaaccctcttcttgaagccttaagagcagttctcgcttaacagatggatcctgccactcgatagagttatcatttttagatctttcatctgcctgagtttgagagtggactagatcccatggtagctaaaaggtggttggggaagataaagaaaaatttcaacacaataggaatacctgaggaataccaagttatttttgttgtgtcaagttacagagtggtgcagcagaatggtgggagaccttgtccaggagaatagaaactgatgggatgacttggtgagattttgagaaagttttcaggaaacaatattttagtccatctcacaggagggctctaattggagtatttgatggtttaagagaacgggatatgactgtgaatgagttttacatgaagtttatagagttatcctcatatacatatcctggtgttgttgacaaacccatggtgattgaacagttcatgcatcatttgaggcctgtgatacgtggtccaatagcccctttgacctttaacaacctaactgagtgtgtgatagcaaccttatgaattgaggctcatgtagaagggaatgagaagaagaatacaagcataggaaaaggaaatgactgaaagatgactaagaagaatcaagggcagtggtcctaaggacaataatttagtgggggtagcactagtatagtggttcatctagaaacactcgtagtggaccatacaggtgtttcagttgtggtcaacaaggtcataagaagaaagattgcacacaacaacaacaacaacaaagatttcaagtatctcatagaggacctataaggagctatgtagagtctactctttttcatggacagcccaggaccaaccagtctcagtcttcctcctatgatttcacaccccaatcaggccaacaatctcagtatcaacatcaatttaggtgacaaggttcagggttcaacatggggtactcacaaggtttccaaactcctactcctagtgggagtcaaagagggtacaatcaaggtggagggtttggtgcaattacaagccatcctagttaaagaaagggaaacataaaagcaaagtcatcagttcaagcctatgctcttggggttgatgatgtacagggtagtgcagaccagggagttattgatggtatggttcttatctcacactcttgggctcatgtgttgtttgatactagtgcatcacattctcttatatcattgatttttgctagtatgttgggtttaagttgggaaacttttagtcctgtgttgtatttgagtgtacttatgggaggacacggtgaggtatccaccatatgtaggtcagtttgtattgtgtttgagggacacaagatgtctagaaatttattagtgttgcctatggggtaatttgatgtaattcttggtatggactggttgtctaaacaccaagctattgtggattgttcacacaaaagagtgactctcttttaacccctagtggcgatttcattattcactgagccaacatgagtgttatgagataaaatcctatcttaagggcatgcttaggtggaaagagaaacttagagtgttatgggtatctgtttgcgatcgaggatgagtctagggatttagacagttcccttggatatcagtggttagtggttttccatatttatttccagagggtttaccagagttaccacctgatagggagatcaagttttgcattgatttaattcttggagctcaaccagtttctattgcgccttactgcatggcacctgcaaagtaggctgaattgaaaaaataattaggggagataatggataagggttacatcagacataatacttttccatggggagctccagtcttgtttgccaagaaagctgatgggac

SEQ ID NO: 74095 - DNA, 1415 bp, Cannabis sativa
atatatataaatataagtcaagttatagtagtatatctgtataatatttgcatataaggtactttgctctactcagatttatggtctcatactaattcattaagtatttgtatgatcaagcttgttgttatgcaccccattagaaaactttaaatgctagttgttagcataattttgttattgtgagtttgttctttgctgggttaggaaggctgcaataagcccatatcacacttgacttaaagccaaaattttaaattttattgcttgattcttatcattgacaatgatatggctaattaatgacacttgtcaaaatgaatacatgagacatgattttatccgattcttaaaattgtaaaggtatctttaaataaattcattgatgtgaacattcaattcgccttgactgttgtaaggaagaaccttaccagaagggaaattggagcatgcatgaatcttgcttagtgtattgaatttgctttttatatttgaagagatgagtctgatttattatatatttatttttaatttcaagtgttgatgataaaataaaaaagtgcaggacattggagttgttcagctatagacttggtaacaacatatgtatatatgattaatataacttttgagacaattttagttggtttttaaagatgaacaaacttaacagcaatgtataatgtctcttgtcagattttgaaggatggattctctactatatggagttcattcattcactacactattacaagatggagaaaaaagttataatgactatcttccatccttgaatgacttagaatctcactatactctacccaacttagaggaagagagcactaaagtaactaaacccagaaaaggaaattttagtgcagaagatgacaacttattagtgtcagcttggcttaatactagtttggacccaatcaatgggattgatcaatcaaaatattccttttggagtagagttcatgaatattatgagaaaaacaaaaaatctgcatcttatgaccgcagttcatgctctctcagaaatagatggtctatcattcagcaagctacaaataagttttgtggtgccctagctcaaatagaaagaaggtctccaagtggggttaatgagcaagataaggtacaacaaccaccatctttttattttattgtttatacaaccacaatatttttattttattgtttatatctttctatgatatatttcacattctatttattttcagattgagcaagcgaaggagctttatcgaagtaaccattccgcaacattcaactttcttcattgttggactactctacgacaccatccaaaatggaaagaatatgtggttgagagtatcaatgcaaaaactaaaagaggatcaacaacttcaaatggtgatatgccagagttc

SEQ ID NO: 74096 - DNA, 765 bp, Cannabis sativa
ccccacaaggtatgtcccaatcgtggagtcagaagaccaaaaactctgacaaagactcatagaatccagttaaaggaataaagagttagaacgagcaatggctacggtaagagaacctcgaaacgatgccccaccaacacaagaagagcaacctatttgacgaccacgaggaagaccctgcgagtcacgtaccagacgggcacaaggacccaacgtcatagagcaggagctgaataaccccacttgctcccaagaaaaataaccatgggaaacgagggtagttcatgttgatgaatagggtccacagaatcagggtaccacaactctgctcgccctccacgtataccatgaggaccaataagggaggaaagggacagtatgtatgaagacttgactaaggggcagttcgctaacttatttgaaaggtgaaggccagtccgaggagaaccatacgaattagaaacaaatacaacccaatgtaggtcaacaagccaggggcaaactcaatcctcgagatcacgtacatgggaaaatctaccatgaggtgagagaacaccacgccatgaatatcgaaacgagcaagaaagtgtaagtaacttgcaaagttaccaatccaaaagtgattccccaagttgattagtaagtaattatggtaatagacagaatcaatgccaaaatgtaaatgattagcttaatttgcgagatcaattgaaccaaaggcgtctagacttacacgagaatataaatagaaatgcactagatctt

SEQ ID NO: 74097 - DNA, 1151 bp, Cannabis sativa
tcatccaacacttcggcccagcaggttatagacaatatcagagcttcagttactgctattcacaatgaagcactgttacaaccaatccgtgatgaagaagttaagtctgctgtgttctctatgcatcctgacaaagcacctggtcctgatggtatgtgtcctggtttctttcaacatcattggcaagttgtgggcactgatgttatacaattagtgaaagatttctttgcctctggaatacttcctgatggtctaaatgatacccatcttgttttgattccaaagaagaagaattttgttgctatgagtgatcttagaccaatctcactatgtaatgtcctatataagatcatctccaaagtgcttgctaatcgcatgcgggatcttattgatcatatcatctctgaaacccaaagtgccttcatacctgggcgtcttatttctgataacataatgatagcctttgaggtgatgcattacttgaagcgcaaaagaaaaggtaagaaaaggtttatggcgctcaagcttgatatgagcaaggcatacgacagagtggaatggggcttcttaagagcggttatgattcgaatgggatttgctagtagatgggttgagttgattatggcttgtgtctcaacggtgcgctacaaagttgtacatggtggccacattatggaatgtattggtccatctcgtggtattcgtcaaggagaccctctatcgacttacctgttcattatgtgtgctgaaggactctccgccctcattcaaaagtttgagactgatagaattctacaaggctgtcgggtagctaatcgggctcctcctatcactcacatgttgtttgcagacgatagctatttcttctgccaggcaagtgagaatgcagctactagtatcaacaatcttctttctatgttcgaaaatgcctctggtcaaaaggttaatccctctaaatcttcaattctttccagtcccaatacggataacacaactcggcatcgaatttgttctacccttcatatggatgaagctacagaatgtagtctttaccttggtctccctaacatcattggacgcaataaaaatgctatcctcggcttcataaaaaacaaagtcattactagggtgaatagttgggatggaagatt

SEQ ID NO: 74098 - DNA, 802 bp, Cannabis sativa
cttcaaaaaaccagcagcaggtgaagtccaattggtgcttaggttgctggtgtcgttgatgacagcaggaagtggagagaatctgttggaagaagctgttttccactagttcaacacagttcttgccgtggttattacttccactgttgtagtaacatttttatcccaaagcaactcattccttgctttccaaatagcccaagacaccataagagcctcttcaaacaccacggcctgaccattatttaaaatctgctcaacccaggtaccaaaatcagtcgccacaataacaccagtaggcacactagacaagttccaaaccgatcgagcaaatgtacaggaaaccaacacatgataaatcgattcctcctcaatgttgcagcagacacaatccagttgcacaggtacatgtttggtgtagagttgagttcaagtgggaagacaaccggttattgctttccaagcaaagtgaaaaaccttaggcggtactttgattttccataaagattgccaaagattcgattccatatcagcagaccatctccctctcgaaacttgcagccattgatagcagctcttgacagagtaaaagccagaattctcatgttgccaaaaccatacatcagccacttcattaacattgagagaaatattcataatgagatcacgatctcgttgctgaaatagatcatcaagtatttccacatcccattgatccctctcaacagtcatgagttgattaaccgaagcccccacaagaccaggatgtgtgcttaacacacacggattagtctgatcaggt

SEQ ID NO: 74099 - DNA, 1159 bp, Cannabis sativa
agtttgtattggcaagtttttgtcaaaggaagtatcaagcaccataattgaattgtgtaatttttttagaattttatgtgctaggacattgaatgtaaaatatatggagaaggcacaaggagatctcattcatattttgtgcaaattggagaggatttattctctagcattttttgatatcatgatacatttggtgctatattttcctgaggaagctatattaggtgggccagtttttatgagatggatgtatccatttgaaagatacatgaaaaagttgaaaaattatgttaggaataaagctcgcccagaaggatctattgctgaaggatatatgatagatgaggcattaatattttgttccatgtacttcaaaggtgtgcatacaaaattcaaccgtcctgagcgcaatgaagatgctcatcttctatctcgatacttaatagttttcaaatctcaatgtcgttcactcgaaaagcaaacaataactactctcgacgagaagactcgcaaaagagctgagtggtacatattagaaaattgtatcgagatcgactcttacatgacataagttaatcaaatgattacatggtgcttcacgaataatattttattattctttttagttaaatttttaataactttttgtataatagagagcacctcaacataatcagacgaagggacccgaacgctaaccataatctgttacataaaaaggaatttccttcgtggtttcataagaaggtgtgcaagtatttctttctctattatatacttattcctaatcgacaaatctctcaaatcataattgttaattttttttttgatttgtataagctcgggtcattagaacatagtgatgaattgctagctttggcaattggctttgatcttgttgtgtattcatatccggcatgtatagttactggtatcgatttgttgtacacagtcgagataaagatcacaatacttaaaacagtggggtgtctgttgcaggaacagaaggttttgactcgaatggggaacttgaagaaatattgcatttgtcttttagttgtgcatattcggtagtattatttcggtgtaaacggttcaacacagatccaagaaagaaaaaaataattaccgaaaataactgttaacacagatttttgtt

SEQ ID NO: 74100 - DNA, 857 bp, Cannabis sativa
  modified_base (140)..(141): a, c, t, g, unknown or other
tctgaatttctcaaaattttgtaggatatcttaaatagctataacgtacatgaatataaaaaaaattaaactgattttttttttcaagataccgaaacaagtaagggtgcatcaatacatcccttttaaaggggtgcatnntagaatcaccctataatttataatgtgaatacataaatttaactattcgttgctaataaattaataagtttaattttttgtgttaataatatttaagttgtatttttaaaacttccatgagtacttaaccgttaagtgtcaagtcattatttacgtgttattttttgttggtatatttaaattaatttaactaatattttaaaaagcaatttgcagtgtaaatacttaaatttaattcttttttttgaaatacttaaatttaattcttagttgtaaataaatatataagtttaattttttaagtaatgatatctaagttatatttctaaaaaaattataaatacttagctgttaagtattaagttattatccacgtgttattttttattagtatatttaaactaattttttaaaaaaataataaaaatgtaatgatctggattaattaaaaattaccacatgtcaatttatttaacacttaaccgtcaaatacttacaaaagggatttaaatttaagtatttatgtcgtaaactactattttttataaaaattattaaattaaaataatgtaatacttaattttaaatttctttaaaatatgttttacttagaaagaaaaatgtaaataagaatgacagatctagaagtatgaaaatatatacatagaaatagtaatatgaataagataggtatgaaattacaaaatttaatataa

SEQ ID NO: 74101 - DNA, 780 bp, Cannabis sativa
  modified_base (540)..(540): a, c, t, g, unknown or other
aaaattaaaaaaatcgtaaaaatgtttaaaattccgtgaaaccatatttttgtaatttttttgttgtttttatgtttttgtgaaataatccctttattttatgagggaggtatgtatgttattagaactttaaatcacacaagaaatcatctattatttgaattgaattaaataaaattaatttcatatgtttgatattaaaaaattaattaaatcaactttttttttcataccaaatatgagaaattattttttttttcacttttcttttctctataatctcctcatctctttttttccccacccaaaatccaactttcaaacataatcttaaattatgtttacattcttctcatagtatatatatatatatatatatattatttttgaagcaatattaaaatatccatgtattttgactaaaaaaatacattatgaatgcatttcttttgctaacatatattttttttatttttctcttatttttgtttttcttttctatttcaaaatatctacctattaacgcagattttcgttaantaaatttgagcctcacagtaataaatacagataggaagaataaaaactatagaaaaataatatatgaacaccagattttttacatggttttgcagttaaaattttgcatagtccacgagtcaatcttaatcaaatttctgagtatttttctctttagggcctctttcatatgagttgtttcgtcccctttcttaatcttgtgtgccactatttataattacatagtggacagtaatttac

SEQ ID NO: 74102 - DNA, 847 bp, Cannabis sativa
  modified_base (537)..(544): a, c, t, g, unknown or other
agtgatggattgcagacaaacctctacccatcttgacaaagcaatagaattatcgtgccatcacagattgtaagtagaaacaacaccatgataccacccacagtggaaaactttattgtcaaaacaaaaacaaacaaaataacacgaaaacaaatagaacaaaccaaaacaacacaagaagcaatcaatagcaaaattctgatatggtggacggcaccagtgcaaagcaaacaccttctcgaaccaaatcacacctaattgtttcttttattacatcgttaatatctatcctaaagatgggaggggattaaatgttaacgtttttattcagactttgttgtgttagatgatattgcaaaagttactaattatactcttaattttgttaaataataaaataaatcttgtattttttaaaattgtacaaataagaccctgaattgattttttacaaaaataaaacttaataataatttgatctagagatgttataacaaaactgattacattttctgtatctgttcgtgttaaaaattnnnnnnnngttggttatattaaaaaataaattattgaaaattgagctcaaagtcttatttttatctttttaaaaaaatataagatgcattttgtcatttaacaaaacagaaagtctaattggtaacttttgcaaaacacataatccgaaatggtatttatcctatatataaccataatttttagttaagaaattgaaattttatggaaaatttgtttttaatgtcatataccaactagctgcgtgcttagctcaaactccaaatttaataaaaacaaatatattcatagtagcaacgaagcagcacaattt

SEQ ID NO: 74103 - DNA, 1081 bp, Cannabis sativa
agcaaagattgcacaataattaaaaaagcattgtagtgtgccttagcattagggcgttacaaaatagtattctataaatgtagagcacgaatattgtattttaaaaactttaaaatgaaggatgattttagaggatctgttgtagataaggatacacgtatgagaaattagtggggagtgctcctcctgtccccatccccgttaaggattttaatcctaatcctcgcttattttccatcaagtatggggcgggaaatcccctaataggaacggggacggagtaggagatcccctaataaaaaaataacgtttataataaaaatttaaatatataaacatattaaactacataaaagttaaaacattacacattaattattatttaataaattgattattattttaaaacacaacataaaattcataaaaggatactaatatactaaaaaaatataaacataaattataaaatataaaatattattaaaaatataaaataaaatactacgggtccctgttggagcgggaagtgtcatccccgttccctcctcatttaacattcggagacgaaaaataatttctgtccccacccagatccctttagattggaaatttccttcctatttggggcgggtccccagagagtcctatcactataggaaaaatatgtattcctacttttaccatgtttttagtacgatttttttaaaattttttaaaatttccctattattatttatcattttgtgagcaaaggaataaataaagacccttactctaaaaaaagtaaataaacaaaataaaaaaaagcataataacaaaaataaaagggataaatatagatggaaatccattaaaaggttatatgttttatttaaggggagttctatttacaccccataaaatgagaagtacacattattattaaaaaaaataaacttaaaataatttttaaaaattactcttaatacattttaaattttttgctcacattattttatattaattttaatatttattttgattttattttcgtaattttttctaaattttgtttttttttttatttttctacgtcttt

SEQ ID NO: 74104 - DNA, 805 bp, Cannabis sativa
gtaatgggttttatttagggcacaaaacccaatagataacatctccaacccttcttcagctcccaaataaagcgaccgtaaccttctcctgcgatctgctcggagtaagagtggtgtgggactttaggttctggagtaggggaatgatcactactcacttcccaatccttgaagcttgaattagaaagtccgtcactcgaagaggacagactagcgcgaagacgtggtttatcctcgtacagaagttgaagcagatcctggtcaattcggtgtttgtctccccaaaactcaccagggttcatctacaaaagacaatacacgagatgagtgtttggtcaggatatcgaacaaaaaacaggaaaatatgctgaccaggactactgaatagattataaaaacaaaaaatgcataaagattaagtcataacctaggagtttgaaatttttgagttaaaggctaactttcaagctttgaatgagcaaggtgaaaatcaaacattgcaagattaaagtcaaaacaccataaataacgaagctgtacaaactattacaaaggaaattacaaagtttcgagcctagaatttctacgtatcttctacaataagtcaagaacaactgtattttctataatagaaacccagaaagtggaagatacaaagttaacaaagaaaaagatcaaaaacttactcactgtttgaagcctgagcgttgtcttgatgaagtggcttagatactttcgctagaaatcctacgataaacttgaaagaaaactccttttttgctctgagtttgtttcgtggagaaaa

SEQ ID NO: 74105 - DNA, 595 bp, Cannabis sativa
ttattaattaaaaattgatatttaagtttaaatattttaaaaataatattttattttgatttttagggtttgaaattgggaaatttcggaaaagttgaaaaaaagacctacaaaatagggtttggtggttggctgtcaaggagggctgcacgcagcccagtccgcgcgtgcataggagaaattgcaggatgatagggcggcattcctcggcaggcccagcatcaggacacgggcggatgcagggtgcatcctgtctgaagccttgcgtgcgtgtgcttcagacaggggattgtcccccacatgcgcgcactaaatccatcttatccgagtgcctggtgcatgcgatgcaccccactcgacaccattgaaccccgattttcaaccttcatatcctttttaatttttatcataatcgagttccgtaaaaaccaaaattacttaatttttcacaaggaagccaaataaaatattttcagaatgaaaataaaatcattttaatggaaaaatttcgtaattcacataacatcatcaattaacacataaaccaacatgaacacatccaaatcaacacgcaaacaatattcatcgttttaaa

SEQ ID NO: 74106 - DNA, 640 bp, Cannabis sativa
tttttctcttgttgcctctctcgcaaagttgttgagttagcgtttaattggcttggtaaccgaacgtggcctttgtattttaaagggtggataggctggctatctttgaacttggataactggatgagaaaaatcaatatagcagctgctgctgcaacttgttattacttctggatcaatcgtaacagatatgttttttaggggtactcgcatacggatactcatattgttgctgatattgaaaacatagtgaagtatagagtctaaaatgtaaagtatagaagattggatagagtagagagtagattcttacagcagcttcaaatgtaatttactctggttgatttgtttcggataagggctgttggttcttatcttggttgtttgtattggttttgttcttgattaatgaagttcttccttcttgataaaaaaaaatgaagtgtgatataattttcttaattatacagtaaaaatttgtacattctagatgaagttataagaataaattttggaattttctactagttggtaaaatatatgaatagtgatgtaataaagttacataattattaatttttagttttgaggtttaaatgaatcatgtttttaccaatatataaacatgcttaaatatgaa

SEQ ID NO: 74107 - DNA, 646 bp, Cannabis sativa
gtatgaaaatatagaaaaagctataaagaaaaatgtacaaagtcaaaaataaaaaaaataaataaaaaaaaactatatttcacataattacctagaaaaatgtttaaagaaaaatacaaaaatatattcaaatatactattttttttgtttttctttaaaaaaaaaaaaaacaaatttaaggttttgaaagtttctttcaaaattatgttaaacaaactaggaataatcttagtgggttgtaatataatatataaaagaataattagtaattttttttcttgaatttttaagactattgattatatcctgtaacaacttggtattggaggaagctttgtagacttaaaacaaactttttgtaggggagatattgctgctgcatgtgtgtttgggaaatttagagctacaaaactctataatagcttactgcagcaacaaaaagttgattatcaaaagaatgtatggtgtcatttaagtgtctcaaagcatagatttattctttggcaagcattgaataatcactttcttacccgagactatcttcccaaacttaatctttttgttgaaaacttgaattgcccagtgtgtgagcttgatcgtgaaagccactgccatttatttttcgattgtaatctgtcttctcag

SEQ ID NO: 74108 - DNA, 586 bp, Cannabis sativa
tctttaatcttttattattttattggttgccgaaaacctcggtcaacaatatatttatatatacttctttgatataagactattgtggatgttaaacttttaagtaatatatatttcatgaaatatgtgaatgatagatattatttatttacacatatttttgtattttttaatttttgtaaaatatttaaaattaaaaaaaaattaatttttaacaaataaattaatatgtatatctatgtataaatataaaagaaaacattaaagaaaaagaacgcacaagaagagtttatgtgtcattttataaatttttcttcatattttttctaatttttaacatattttcctatttcaattgaaaaccaaactacacaaacaaacaaaaagtctctcattgtttaaaaactgtttaagttttatctatgtaggttataaataatattcttattacattcatttcctttgtttaaaaatatatatttttttttatgtgtgattgattaatatcttgcctaaggttttattttgcctaattagtttcaattttttaatttttttttctaaaaagaatacaaaatatattttt

SEQ ID NO: 74109 - DNA, 738 bp, Cannabis sativa
tagtatttttagtatagcggggcgatatagttagacattggaaatgtcgagaatagtcgggattttagaatttcccaaaataccctttagtggttttttgtatgaaagggcaaaatggtcaatttgacttttatgagttttgtctttttgtgagattatgttaagtttttcatcagattttttatttaaaaatgagctgagttgttagataaaacaaagtcattttgtcatttatttaaaaaataaaaaattttaaaagaaaatgaagctttttctctcaattctctctctcttttcgaactcacctagaaccagctagggttggtgtgttctttgcaaatcaagttaagttctgcaagattttagtgtttcccaagccaaggtaagcctcttgtaactttctttttagtttcttgaattgtaagaagtgaaagttgcttgttttgaagttttggttgttgtagttgctgctaatgtttattattgctttcagtggataaattatgcttagatatgttgatttaggcttgtttgatggctggtttgatgtttgagcaagctttgagattttaaactcaagcttgcctctctaatggcatcttttgtttctgagtttgggtactggttttattgcttgaaaaatgttctttaggatgtttagaataggcatggaaagtttggtagagtttggggatgaattgaagttgttatggaatttttggtgattcctgcactgaa

SEQ ID NO: 74110 - DNA, 893 bp, Cannabis sativa
attttaccaaaaataatactttgagtaaatttctcaataaaattgtaccatcaccacaactcatatttgaaaaacaattggccaatttttgctattagagaaaagaaaaaatgttatttttcaaaaaaaaaaaaaacaaaaaaagtcaataagtgccctcccaacagttctttaaaatttttaagaatcatcctcaaaatactttccataaagtgatagataataactaaaagatttcctaagcaatgctaagaatttttttattactttttttttaaaatatattaccaagacaatacttttattataaaattattatacataatataaaataaaaaagaaaaaaagaaaaagaaataaagagagaaaaaaaatgaatgagaatttttcagtattttatttcaatggaatgatctcctatttatataaatatgtgatgttagaattatttatttgtggactaatataataccataatcacaatcattaattatgtacctaatatttttcatacaaccataatggaatggttaataactattaattatttagaggcacatgaaagcacccatatgactataattggcccattgagttatagtccaccatcaattaatccttattaacccaataaactatgtaaccctttagggttagatgggtatgagagatatatatatattaaggatggataatttgtgttaaggttgatggttagacataagtgggtttgctccacaattgtatcttgattactcttcactctctagcatacttttatttatccttttgatagtaaattaatatatttgattataatatttaatagatagttcttacctgtgtatgagttctactttattaacttcgtctaagaactctagcatacatga

SEQ ID NO: 74111 - DNA, 550 bp, Cannabis sativa
ggcataaaacccaacattgttttcattaaaaccccaccaaaatttagccataacagactcaagggaatgacaagtggcgaccgggaggcgaaaacaagccatggtatacgtggggattgcttggatgaccgacttaaggagcgtttctttaccacctttcgagaagactttgtgtttcaagttgtttaggtgaccccaaactttgtcatggaggtagtggaagacttgttttttttgtacgcccaatatcctgtggaagtcccaaatatttttcaaaagaggttctcgctggtatctacatgaagttcgagataagggtttggtccctcagagcaatgttcggggagaaatagagtgatgatttctgaaagttcacttgttgccccgtacctttctcataaagagcaagaacttctttgatggtattgcaggagttaatggaggcctgacagaaaagaaagttgtcgtcagcaaacagaagatgggagatgatgggcgcagtgcgggccaccttgaaaccaatgagcgatctgtttctttcctgctgcct

SEQ ID NO: 74112 - DNA, 1028 bp, Cannabis sativa
gttgtttaacaattaaaggaatatagttttacatgttaaaacaaaaacttatctttatctcttacatccagacatgaaaaataagagaacacattatgtttattttgaatcaagtaggggtattgatagaaagagattgtaaatatgaagaaaaattacttatatttagtagtaacattgcttgttgttttacggttgttttaaagttgtaaacacattgtttagtttcattattttttgaagatgttactttcatgttgtttgtacacattgaatttcaattgttaaaatttgtaaattccttaaattatcaattatttttatggttttttttatcgttattaaataattgttaatagtttaaaaaaaaactcctaacaactattgtcttttttataaaaaagaaatataataatacaaatacttgatgtataaattgaaaatataataatagttggttcttaatgtactaaaacatataaacaattaaaaagaaattataatattcaatatctcgtacaagatatatatgaagttaactagagaaaagttgtaaaaaaatatataaaagcaaaattttttaaaaattgttgttgttcagcacatacaatcaaaacgaaacacacttctcaatcgtaaattcatgcacagtaattccttccttcttgaaagactttggaacattttcttgtacacttttgatgtatgcaactaacttcattctgatcaattttgaagttcatcatcgctagaaatcaagtcatgtagcaattaaaataacattaaacaaactataaaacaaatttctactataaaatatatatatattttcaaataaatgaactacaaccagagaacatttcaaacaagacaaataaaaaaaacaaattattaatcttgacaatatttttttttggaagcttcaacttatcaacaacatcagaggtcttatcacccacctgaaaatattatgatggcaaaattaataaagcaatgaactaattaaaatacaattaatagttatacaa

SEQ ID NO: 74113 - DNA, 757 bp, Cannabis sativa
atatattaatatgcatactaaaataatcctaaagtcaatatatttatatatatatatatatatatatttcctacttaaaccacgaataaaactttagaatttggtggtcaagtaaaaaaaaaatatattataatttgtattgcaggaataaaaaaatataggtatatgctgtaaatctacaactatgaattcaacatcaaatatggcaaacacaaacacaagaaaccataaaagaaacgattcaaagcataccaacatcaaaatcctgtaggaattcgtgagccaattttaaggccccaaacatcaaaattatggcaagaatgtgagatatacttatccgttttgaaaagagctttcatatactacttgaaatgcattatttggataaaaactaagtaatttatggccattttacttagcagtgtgcagtgttgaaagtgactattaggtcaagtcgacctttgagcgcccaggttgacattgacatagaatgtcaacttgggctcccaaatcttgttttctttggctttaggaatattttgagatacttggataatataatacctatccttagttcattctttgacaccagtaaagttctcttggcaattttattcaatacgcacgagtgatgcgcaggtgatcactagtatggtgtcggtggacttgcacatggcacatgtacattagatattggtctgccgatgcatctaattcttattttaggggcaaaataagatcgatgcccgaagcaaaa

SEQ ID NO: 74114 - DNA, 924 bp, Cannabis sativa
agattttaaatccgaagacccctttttcatcgttcccatgcaaccatcatctgttggatccaaatccagatataatttggtaactaataagcttctcaattacaactttatcttttcaaatatgtttctcgtattgattttactattgtattcatcttatgccaaggttataccatctttctttgtgaaaaagcacctcttcagcatcagtagtggtcctcaagatgtgattcttatggttcaggatggaaggacttggtctgctaagtactatgtccatgtcagaccacatggaatatcttcgacattcaggatcgagagtggttggaaagcatttgttcaagacaatgacttgaaagtaggtgatgtttgtgcctttgtttttagaaaaagcattggaagaatattattcgaagtggttatttttcataacaatggagtagcaaactcccctatggctatgttaccaataccaggtaaacaaatactttgttctgtagtagtgtactgtcttgatcattccctatttcaccctaaacatcacattataacaatctaggtgggaattatactaatgctcctagacaatataattgaatgcaaatatggctacagagttaacctatacaatttgttgttttcagctgcaaataagagaagttcaactacaccatccaagccaaagataaccccttgtgtgaaagttgaaccttcatttactagtgattatgataaagccagcatgatttcggaggacctaattgtaaagaaagaaatagttgaaacttcacttaacaagtcagatgaagtctgtggagaatctctagtacctagaaaatttataagaaatcaggagttgagtagaaaagaaaaggctgaagctttccagagagcaaaagattttaaatctgaagaccccttttt

SEQ ID NO: 74115 - DNA, 1544 bp, Cannabis sativa
  modified_base (44)..(45): a, c, t, g, unknown or other
tctttattaataagtaaatatgattatattgaaatgggttttanntagggcacaaaacccaatagttgtgcctttaatggtggattgaatttctgagtttgatgttgagttttactgcttgaatatgcttcattatagtgcatacaggtattctggaagttttgggaagatttggggttgaattgaattaaggggagtaattttcgggttcccagctcagaaccggaattccggttcctgggggcctatagcaaccggtcgatcggttggtgccaggaaccgaacttccagctgagaaccggtctgccggttggggctttttcctgagccctagtctttccgatttttgcattgtttagggttcgagcatcgtatttatcgatagggttatccttagttttaatttttaaatccccgatatgagttttagcgtgtctctcattaaactttgaacgttatggtctagggtcctgtaaagcgtcgagctgcgtttccactcaggctgaccggcacacttgagcacggagcgaggtaagatagcataagaatgtatatatgaatatatatatgtatatgcttgttttaactatttacactactaacactaaatgtttatgtgattttgagggtgttagtatagtgtaggatatctgtgaggttacggtgttaccaacacgagtatcagggggtacgtcgtgcatgtggtataacacttagtaattctcaagagtacatttaaggctctaccaacacgagtacagagttggtacttcggtgcatttggtacagaggtcgtacttcccttaagaacgttcttatccactcagtgagctcaatttctgagctcaaggcggcttaagcataaagccgacgttgcattacttatatatatatatgtcttgcttatcttactgagtctgttgactcatcaatttgctacctggtgtaggtaaagaaaaagcgaagctggaggaatagtgagatggagctcgacaaagattgtacatatcgcggcagtgcaacctggagggtctcggtcttttactattttgagtctgtgttttgagctgcctgttcacgaatttgtaaaaataaaaaataaacatatatatatatgtatatgctagtaaggtactttaaatcatattttgatactcgggatcccgacccatatgtttataaagttataatatagtaaaattatcttttgaatttagtaagttatatatacaggcgttacagtttggtatcatagccactaggttgttcactgtagaccgtcaagatatgtacaatcaaggccagtgtcgagctcaactcacagttccgtaagctttcctttctttttgcaaactgttttaagatatgttgcatatatgattaaatagaggttatagaaccctaattgcattcttggaaaatattttgaccactgtctgacctacgtgccttgtgggttccaaggctaagtcctaactaatggacgcccagcgaaacgttagaaggcagggtgaattggttgagaccggaggtggtcggggtgg

SEQ ID NO: 74116 - DNA, 1223 bp, Cannabis sativa
atttaatttatgggttgtattaatattcatagagccgaccttaaatatttttgtaatttaattatttttttaagaaaccctttacaagtgagagagcatcacttttgctctcacttataagagtactttttttgtattttaattggttaaataatgaaggtgcatacaattaaaatgagtaagtgcacatataaatatatatactattagttgtattagaatttttaaaattaattttttttaatcaaaattatggaaatcttttaaaagtgtgtttagtaactgaaatttattttttattttttaatttaaaatcaaaattagaaacataaatttgatgcttttaaaatttttaaaaatacattttttctctcccttactttattttatttttattttattttgttttactttcatttttatttttagtttttaagtggattttacacttaatttggtgctttaggtatttttagaacataatttggaattttgaatgtgatttggaggtttgaagtttttgctagatttttgattatattttgctacagcaaaatatgaacaaaaagcttttgtcgttgatttggacaagttcgcatgttgtagcaattctctagcaaaattttagcataagtagtacaagttaaatgagcaatcaacaatatttttgctggatttttgcaaaaattttacaacaacaggcgtaagttagaattctttacgagatgtgaaggaatttttggaaaaaaaaaaaacaaacaaaaccaaaacataatttcttaaataatattctaaccaaaataatctcaaatactttgaatttctttttctcagaaaactctattttctcatcttcttccttttccgtcctaaccaccatagctaccttgtctctaccttccccttgccttaaccacgaccaccctgaccaccatctacccttctccacctccattcgccagaaactccattatcagaccccaatcacatttctcttctcttctttctccactatcaccaaacccagaatttgacctaagcctaaaaaaccttctgcccaccttcactctcatctcatcatcatcctgaacttctcttcacctaaaccatagcctcatcaccattttcacatgaatccagttgtaccagttccaacctgcctcgttcttcatcatctcattaaagttagcaaaaaataatgataatatcatatatcattttag

SEQ ID NO: 74117 - DNA, 884 bp, Cannabis sativa
aatcatatcaaatacatatttaaaataatactcataaattaaatagaacataattttaataaaataagacaattcgttaatatatacagaacaataatatccccacaattatatagtcactaaatgatagatttaataataatttgtaaaacactgaaaaataaaatactctaagcatccatcatatattcctcattattaactgctaatagctatgtaaatgatacaaacaatccattgataattagatacatattcaacttttaaaagaagagttaattaattattaagatatgactacgctatcttatcgttctccatcaacgattctctcttatgcacaagtaccaaactgagttcttgaaaggggaaatattgggggtgaacttataaaatccaattaaaaccctacacggttagcttcttaaaaaacgagacaaaacatattatctacatcataatgtgtaaatataatgaagagagagaaactacccgtgcatatcacactgttcactagactcctaactctcaataccaatcatagaaaatgacatcctaaagcgggtaatcgtgcctgctaaccaccatgataccatagcttagattcaattcacttcctatacatttaggtctttcacctacaggtgggtaagagtgttcattgaatcacatgcaattgatttggacccaaacgatccaattcaattatttattggatattggattttgtcacccgatctaatccagttgaattgaatcatccgatccgattcaataaatgtattagattggatcggctccaaccattggatgcattaactagttttctattggatcggttccaatccattttagctatcatttaagctgatttcactaaaaaa

SEQ ID NO: 74118 - DNA, 742 bp, Cannabis sativa
tgatggtagaattttattttatttttgttacaaagtggctttttgaagaaaaataattgggaacccaaacctgaatgaaagcccaaactcgcccaaaacctagttaaatctacccgagtaaaacccgtaccagaaacttgctaaactcggtgctataacgagtgggttttgtatgtgatttcctacacccgatacttgaaaacccgaactcgattaaacctgcacaatgtgcaaccctagtctgagacagtactaactggattatgttatcttgataatctaattttccaaatcttgcatattaattattctaaacaatactacaaacgtcttaagaaaacgacctagttcacaactcaaccctaaaatatactataaactctttccattttattttctactacaataaatatatatatattatatattatatacgccgacgagaggatatgtaattatgtatatgatttgaaaaagacaattaagacaatgtagttaaaaggtcaatctatagcttactcccatccagctgcccagtactgctagagtaggaccacattattagaatgctatatataatttttctcttcttttatatatataaatatatatatattttaataaattatgaaatgattaaaataatatcctccaatcaaattacgacatctctttactaaagacaccataatgattaaaattagaaaaatgaatcaaataattagttgtttactttttaaat

SEQ ID NO: 74119 - DNA, 535 bp, Cannabis sativa
gagagagagagagagaaagagttcgtattctacaacctcaaactgagctgtattcgctgtaaaaatcatcgaccccagaagcagcccaaagccgttgattgaactcgtccttcatctcatcggggacaaatggcgttctacaaagaggacacgttctctgatcgtggtccatccaacggtccagacaggctcggtggaaaatgtgtttacagttggtcaaccacctgatctcttctcctccctcgaactcatacaggcaaaccgcacaattttctggcagttctccggcaccgtacacggtgtccaggtcccggaatttaattaccggaagtagctctcggattaggatcgccgataccggaggattatccggcgattgggctgccgacgcaaacgacgcagattggggccatacgacgtcggtttccaaaaattctgataggccgaggaaatggaagagagagaaaattaggtttcggatgaagccaaggagagagagtgtgtggaggaagagattagggaaaaagacctctgt

SEQ ID NO: 74120 - DNA, 607 bp, Cannabis sativa
  modified_base (353)..(354): a, c, t, g, unknown or other
taagctgatcacgttttccaaggcaattggcagctttcctttttatttttgtttcctttattttgtctttattttatttagaaagttgtctttcttttagtttccctttttcttggttataagttggctatataaagccttgtaaacactttgaaaaatcagattattttggaataaaaatttgagaggttttcttcttgagttcttgagaaaactattcgaacttatcaaggagtattccttgtggcgttcaacgtgacttatcaaacggatttccaccaccgtttgtagcgtcttccttcataccacggttcatgcttaactaagcattgggtcgcggttccacatccaannttcgagaattcttagaggctgccataattggtatcgagtttcatcacaactgttggtgtggttcgtatcaattgagttcagagtcggccactatattatgagccatcatagacaccggctctaaaagaggagcgtattgttaggatcccacattgaagtatggaattacagtatatattatataactactctgacacccttttctcttaaactagcttgtgggagtgaattctaccatattagttgtatcagc

SEQ ID NO: 74121 - DNA, 667 bp, Cannabis sativa
caatactttatatatatatttatagcgcaagttgaatcgcgtcaatcaaatagatactatatgagttatgatcgttttattgaagggtgctctgataccaacgcacaggttgacatgtgatgtcaacctgcacgttgggccaagggaaaatcgtgctgaaaatgtattttattatgcctaagtgatatgaaaacatcacttagctagtttatgtattctagtcaatttgttcataaattctcaaaaatgttattttttcgcaagagtcgaaactaccctatttatgactaaatcatttagctaggataataaataaataagtattttactatactatttatagttgataataacatattttaccacataaaatagtatcataataaaagttataataacactttttctatttaatatgcagataaacttaaatttttattattatatttatgtaacattaatttatctattgtagttttttaaaatctgttttatttatttttattttttattcatacaaacaacaatatatcataattacaattagttttagtataaataaaattaattaatcacatatgatcacaaatattagtttggtaattcaagcttacaaactcatattataagataatttacacccaattcaaatttcatcatcaataat

SEQ ID NO: 74122 - DNA, 675 bp, Cannabis sativa
attccattcttgaaatttgtacaaaaacttactgaaaatttccaagaaagtgaaaagaactagaaattacctttagggtttgtcagaattttcaaaagacttgtagaatttttgaaaacttcttctcccctcaccaatggatggccacgactacaagagattttttttttttggactttgtgaatttaaagtgcaattgatggatgagaagatagaatgaagaaggaatgaaaaaagaatggagataaaaaattgtaccttgagtgggcgtgtggatcttctttgccaagacgaaagaattagttcccttgaaaagtttggttagaaggaagtggtatttgaatgtgttgtttgaagaggtcatgagccttatttaaaggaaaaagggccttatggtcgtgcactacaattggccaagggtttccaaaaatacacttggcactattaacacctgctcttcacttaaaaagaaattggcactcatctccctttgacacttgtcacttgtatagataaaaatttataatttacgcatttaattatgcgaaagaatataaatttgtcatccttagtcaaattaaatttcttttcacatagttaaagttgaatttcacaaatttagagagaagttactagaatacataattgactcgtggcgacgaaggtctcaatcgg

SEQ ID NO: 74123 - DNA, 884 bp, Cannabis sativa
tacgtgaagatatcttgagataataccatatgttttcaaatagatcaaatgaaaatctaattaaattgagcaacaacaaaagaaacgtcacttaataagtgttataattaatgatattcatgcaaaatcaatatatatcatttcgatcttattttaaatttataataaatttgatatgcatgcatgatttgatttgcattaagtacttgccaaataatattaatgctatattagacattaagatacctctaaatatttgtatgtaggtagatcaatttattaaaactaggcatcatttaatttaataagttatatgtttggcacatatggatcgttaggtttatggtttcgtgcatatagcaatattaaaatagaaaaaagatatattatacttatccacaatacattattatggctctgaattttatatgttgttttaaaagttactacttctaaatcgtgatcaattcaaaattcaagaattcaattcgacaagtaattttatagtgactaatactttgaagtttgaatggtgtatgtaaattagtaacatgtcaatttccatatttattataatttaaaaaaaaaaaatatgttaatatcatatctcataaataacttctttaatatacgtagtccttaggaattttttatttttaatttatatataaataatttttatggttagccatggttttttgtacaatatatatattattgttttaaaaacattactacctttaattttctctaatttttaacattacattaattaatcaactaatgggtaattaatattaatgaaaaacaggaactgttcctaacagttgtagacaatccatacagcgcagcagaatgggcactatcagaaatgttgaaccaac

SEQ ID NO: 74124 - DNA, 717 bp, Cannabis sativa
cttaacaagccctaaaccctaaaccctgaatcccgaaatactaaaatcaaaactataaaccccaaaaccttaaccttgacacgggccagaacccatactcataccgagatcagaacctaggacaaagacctggacctggatctagacccaaacctggacccagactcaggacctgaacatggaccgaaacccagaccagaacctcgtccaacacctagacctttgctgggactcggatcgtgaccccgacccagacccgaacagggacttggaatcagactatgacccggacccagacacaaacctaaactcgtactgggacctagacttggacccaaactcgggatccgaacccgaagccgaacttgcacctagactgggatctaggatccggacctagatgatggattcgggccccaaacccaaatcgagacccagacctggaccaaggatgcatacctggatgggggacttggacccgaaactgggaccgagacccaaaattcaactccagactcgagacacgagacctgaccctggacctagaaccaaggaccttactagcggggcacaaccccgaacccgaacccaaacccaatcttaggacacgacacaagactcgggatcggaactggaaacaagaccgagaactgaattttgacctgaggctttgacctgacccgtagttagtggttgaatccaagacctctggaccca

SEQ ID NO: 74125 - DNA, 655 bp, Cannabis sativa
tttagcttgatgcatatgtagaattatcatggtttttaaataccttgatctagagagaatcataaaaaatcttattgttcatgcttaaattttgatttgtgtatataataagcatggaatgaaaaggggttgttttgtttaacactaatcaaatttctctacttcagtttgataaagtaaataaatattagttgttggctttgtatacacaaaatttacactctattattatttttgtatttaactaagtagttgcttgtagttgttgtataagttgtgatgtgtgatctttagcaatatatcaataataatttctaataaacacaaaaaataaagagtgtatttgagggtgtgattgtgatgttgatgattaaatgtgtaagaaaagaataaccaaattatagagcaattaggctgcgtttggtgtaaagtagaattgggagttttgactcaaaatgtaaatttgtgagttgacagttgagtttggcaagaagaaaataaatattaataataataatcttgttagggatgttagctaaacttggttgtttagagatttttatatattgactgccttagaagacaataatatgattttgacacctaaatttattccaaccaatcaagaaaatgacttatattaaagtcttttttt

SEQ ID NO: 74126 - DNA, 687 bp, Cannabis sativa
  modified_base (204)..(229): a, c, t, g, unknown or other
ctttaaatttaaattgtgatgtttttttaaattatatatgtatttatacacatggtacactttatttgttggaatgtttaagatatgcatttattgtataattactttgagaatatataaatatttgttccattgaaaaaaactaccccccaacaagttggaagctttcttaaagtaccacatgtattattattattattattnnnnnnnnnnnnnnnnnnnnnnnnnntattattattattatttcaaatttgaataatgaaaaaaatagacttgaacccactctagtctggtctgcagtactcgggaccggactaccactgatattaattaattaaccaaattgtagaaataaaattgagattaatacataattttatattatgtgaagactttaaaattttaatataacctatagaatttgatataataaatatttaaaataatacataattatgtgttttgtttttgctaactaaaaaaacttcattcaagagcaaccaaccaaagttctgaacaaaaaagttaaaaataaatatgtatttttagtttcacttgtgcaaccattaaataaatacatgatcaaagaaattaaatttaattaatttttaatcatataatatatatacattttttttaacaaagaaaactaaatgtcaatagctaagtgtttcactaggttcagtg

SEQ ID NO: 74127 - DNA, 899 bp, Cannabis sativa
tctaacatcccgacaaatcccgactattttcccgacattctcagacattctcaatgattctcaatgtctaaactattgtcccgctataccaaaaatactaggatgtgatgctattagccaaacaccgggtccaatgtcgtcgggcacaaaacatgcaaaaatatgaattttctatatatgacataaaaatacattctgaattcaaataaatcatcataaattaataattcaaaattaataaataattttcataattaagccctatttatttgataatttccaaactaaactaaggggtctttacacccatactatggaccgaattgttggcgaagatcatgttttttctagttcaagtgttctcgcaaatccagtgttgttataattgctagcagactttgttctactcacggactttgtcctactcatggacctcatcctatttacggatgttgtccttgactgacttgtagttttactagtgcatgagctttctcgatcattgttgcgacgagtactctctcctcctcgcgttggcgagttatgggttcttgtgctcctcgaggtaatacttgcctcttcatgccccattcttctaccttgggtgtggttcgttgtgtgcccctcagtggggtttgtacgtgccccttcccgatttgtttgggaagaacgttggcggtgcctcattggtgacccacgtgctctaggttgagtgccaggatttcccttgtttccacgaggaatttcgtattccctgatttctggtcgccttcttttgtcattccaatgagaaggttttggccgatcatttggttattcattttcagggggaccctcagtttccctggttgctcgttttcaggtggaacctcagttttttgaggttgttcttcctgagc

SEQ ID NO: 74128 - DNA, 591 bp, Cannabis sativa
cttaattaataatattgttgatcttatttttagttaacggcaatgaatcaaattaaagcgattagaaacgattgataataatgattaagcaaatagaacacaaaagttattattataaggttcaacctcgtgatagtagtaatagtctactcctcttttatttgtgttgtaagaaaagaaacaagaaattcttgatctttattgaaaactcttataatggttttagcagcttaattaagtgctctcttgaaaaattaattttggatctctaagtagtggaataactacttcactatttataaaagaaaattacatcaggtatgtttccaaaaactaataaaaattaaaatagaaaacttgattactttctttaaacaaataaaaaaaaaatggtaagttttcttttatttcttgttagtgcgaatctatcccataaaattacagatgtaattgtgactcgaataattgaagatttatgaaaagcatctcttaaggtaatttattcgcatttattatggttggtgtacacgaacttactgctggtcggatggtataacatattttgtccggatatttttagtttcttcttca

SEQ ID NO: 74129 - DNA, 1148 bp, Cannabis sativa
aaaaaaaatattatttttacatattatattttacaatataattactagaccgtctaattatcaccataataattacactagtaattactaaattactttcaaacacaactttaaataatacgtatatatatgtttaaaatctgtcaataattagtttggtcatagacaaatattattccgtttaattctccattttggaaaaaaatagcagtgatcatcttgttttgttattctccattttgttgtttgataaattagaaggtgaggatctacagatcaaagtgtcttggatttggaagtgtcaagaaggttggatcggtgtgcttcatcaaaaatacagatgttagggaccatagtagtgatgtcacaggtagcatgggaagtgtttttcatgttcatccctgtaaatgcaatctgcctatggtaccaagagggtcgggggcagcgggcaatgtcgtaaaccttctagggtcagccgggagtgtcagtgagtggaaggatctcgacaagattgttgccgatgacgccagtgactccgaccaccagggctacgctttggtattgaggcggcaaatgcgagcgtcttcaatggggtttcacaacccagatctgagatcgcaacgtgaaatctacagatcgatagttattcatggcaatatatacagttcatggttgttcgtactcgatgatatagtggtagttggttcgtaatctagagtattggagatgctatcggtcttattagtttttaacgttttttccggtggaggtggaggtagcagagcttaggaggacgatggttgtaagcggttgattagccggacgaagttcatgcacgtgatagaattgaatggtggagaaaattaagctaattaattaccttatatattttaatttattaaaatttgtattcatttcaaattattttacatttaattatcttatttcgttatcaattagatttttattttagtaattgagaggttaatttgtgcatcaattatgtctttgtaattgtattaatttcaatcacattttcaaaatgttaaataattttaagtcaatcttattttttatattttattaattattttttttttaaaatttctttatattattgacaatcaattagtattttttttaattat

SEQ ID NO: 74130 - DNA, 675 bp, Cannabis sativa
ttaattttgagatgaaaccctatatatcttattatacacacattcatcctaaaatctaacataataccacaggtctatagcaaaataaaattctaacgaatatccgatccaaatttaataatcaatccaaaaagatgaggtaaaagaattgtttgtaatttagggatagtgagtcaaaaagagtcgttgtgatcagtctaaaaaagagctaaaatagctgcttgtgattcaatgagccaaatgtgccaccatcttgagaaggaatatatattgtaaagtcccacattgatcataatatgtgagaacttaattaatatcatatataaaatgtacaagttacttccaccaattaagtttggaataaattaattgtgtatatctttccatatacatacatttatctaaaattctaaattatataattttaaaatttatattaaacaatatgagcttaatatccatcattatttgtcaagattaaaaagttaaggtgttggttaattgtttcttaggacaattaatttctattacgactgagtaatcctttttctttgggataatgtcgatttgcctcttaatacatttattttttaattaataaaaagcataacaaagaaataacagagtagtcaaactctgcttctctttcccctttccccttcttcttctttaatc

SEQ ID NO: 74131 - DNA, 527 bp, Cannabis sativa
tgctgcttactgagtggtagtgtggctactaggagtggtagtgttggtttgcatgttcatgatgatttcttgcttgaacttatgaatttcttttggaacaaagttcttggtatagaaatcaaactgtagttggggaacttgagttgtggctctcaatgaaagtaccaaaatattgacgctaccaaaatattgacgctaaaaagtggccaacaccagctcactatattagtgagatgaataatggaagtaaaaaaaaataattagagtcacacacacaatttatagtagttcaatgcccatttcgcaatggtaatggagtcacgtctacttcgagtttttatttctcacgagatggtaatgacaaaaaaaacaagctaagtgtttaagctctggtttctagagagagaaactagagagagatgctctgaacatgtggaaagttttttgaatatgaaaaataagctagattttataggtgaaagagatccttaaaaataggaaaaaataattcaaaatatgaaaaaaaa

SEQ ID NO: 74132 - DNA, 1547 bp, Cannabis sativa
  modified_base (216)..(226): a, c, t, g, unknown or other
  modified_base (334)..(336): a, c, t, g, unknown or other
aaggcccatttgccttatttaaataattatattaggtaaaatactagtttaatctaactaaaatagaattagcaacataattaattttgaaataaataaaattaatttttctttggattattttaaattaatttagaaaaacacatttagtttaaagaaaagactctagataagtaatttctaattactagtttatattttctaatatttaattannnnnnnnnnnatatttaagttgaaaattaattctaattaattattgaccaacttaatttagtatatttttcgaagaacataaattagaattaataattaagttgattttattcaagannnttaattatttatttctatttcaagaaatttacttaaattgaaaatatatttaagttaaatattatttatttaattaattttggaccaacttaaattagaatgttttcttaaatattaaattggaattaataattaacttgattttattcaagatacttaattatttgtttctattttaataaatttaattaaatataaaattatatttaagttcaatttttttttcattttagatcaacttaaattagaataatttttagaatatattttattttattttaataatcatttcccatattaattttgaaatacatttattatttaaatgtagatattttgaaatttttaattttgaaaattagattaagttgaaaattaatttcttaattaattttagatcatcttaaatcaagtaatattttcagtaataatttgttaaaataaatagactaaaatatattatttttaattagaaaattcaataattagtttatgaaatatctagatagttattttcttcgtagactttttggtatttttgtacatatatttaattaaataaaaaaattaataattaagttgatttgttcaagacactcaaatatttgatatttttcttaagagatttaattaaataggaatattatatttattaattttaaatcaacatttattagaatattttttttttagttttattttattttatttgaatgtaattcaaaaatatatttttaagtacatttgatttcaaatttaattagagatatatattcatagaaaattaaatttgagttgaaaattaatcttaattaattttggaccaacttaaattatataattttcatattattttttttggaaaattaataataaggatggaaaataaatttttattttcaaatcttcctagggtataattttataaatattaaattaaaatttatatttagagttatctaaattgaattttaattaagtaaatttattcatattaaaataaatagattaaattaaatatcaaaagataatatattccttaaaataatgagctttagtataaggataattgatctcattgttggttttacataattcttgttttagtgagattcattcttaatagatgttcattaattagcaatttaacgtcgtaaaatctcgaaagataagtattattgtaagtcttttattcttagtaacaaccaccc

SEQ ID NO: 74133 - DNA, 871 bp, Cannabis sativa
tgggattcctaagcactattataatcgtgtctccatgtaaaaatattttgctgatgaatctgtctttgtttactggttgtgccttcttcttgcctttcctagcaaatatactttgtttaaccaagtctccatgtaaagatactttttctttgtttaagcattgccaactattaaaaatacttttaaaacatatttattaagcaacatagcaaagtatgaacttatatcttcttccattggccgactggagaagcaaaaccacaaatccgaaagacacattagtatctacagaaacagtgaaagataatgaaaaagtaaatgtacaagtaactaaaaacaaagaaatacaccattctgaaattttattgtctctaaaatctaaactttgatttgatctgaaaaccacacacaaacaaagaaaagatatcgtgttaaaagacttctaacattatgaatatacatattttttaaagaaaaagtagaacacttgttgaaataaaaaggaatattgaacagtcgcaaacataatttcatactacaacaaaagatagtagtaagggcgaccaaagttgcctctaaaaacctttataatcgtccctaaaaagtattagggacgacaagtcgccactaacatgtcgctcctaatacttcgtccctaatgctcctttttaaaggcgacaaaataaatcgcccctaaaagtgattattagaggcaattttttgtcacccctaacaatattaaaatcactcctattttatgcaaattaggagcaaaaaaaaaatcgtccctaaaagtgtaatgtcgccccaattcacatgcaagtatgccaacatttagtagcattaatcgaccctatattatttaacatca

SEQ ID NO: 74134 - DNA, 879 bp, Cannabis sativa
aaaatcttcagaaataaaagggtagtcttttctaagcattgctgaatttataagctttcctaaaggtaaattaaaaccattaaaggaagaaaagaaagaaatttggccaacattttgactcaaattttcaacaaagtctttatcaaaactatctgtaaaacaatgacatcaagacacttatttatgtatataattataggtctcaattattctagcaaattcagtcaatgattattttgtttaacatggccaacatatgctgcagagtaaaatcctgtgtcaactacagattaggatctgttacaatgtttaagattatatattcccactgaaccatttataaaccagtgtcacacttctttaaatattgatccaattttgttgtgtatccccaaaagggacatacatatatcataattacattatgcaactatctaaacaagtaggttctaattgctcaactaaccatagtgattcagattccactcactaggatttactaagttcatgaatgaagaacaaagtactaaacttaatttaacaagattgactgaaatcttagggtaaactatcacaaactttgttcaattctacaattgggggtactaatactgacaagcaactagattaccatcaattctcacaaagatcttttgggtgatttacagaagttattatacaacacataagaaggaagagaacaatagtatctatcaaaaagcaaagtgtatatatatagaattttgtgtgtgtgtgttgttaatctatgtgtaagtcaaactataagaggatatatattgattatactacacaatatggttgttgcatatagttcatatattgatatgcagtgctatcttttaagatacaagaaactta

SEQ ID NO: 74135 - DNA, 1203 bp, Cannabis sativa
  modified_base (671)..(673): a, c, t, g, unknown or other
  modified_base (781)..(798): a, c, t, g, unknown or other
cagatctcagtgaccatttgtcacaatttattatgacaattttaagagttagcaacgatgctaagtgcttgtacttcccattgactttgagaggatccgtagaagattagtttaagaaattagaatcaggctccgtgcactgctggaacaagctgcaaactaacattcgaagatagtttgtggcaacaagaaagataaattttgaagtcagtgccctaaccaacatcacacaattgcccacgaaaactttgaagacattcataaaaatgttcaaggaggaggcctacaaaacaaaaaaggtggatgacggacaataactggcattgctacaagcggggatccaaacaggtacccccttttggaatgaactttagcaagaatgcgcacccagcttacaagatttcaagaagcgagcccataaatcataaacctagaagaagcccagattacaacatttggtaaatattatccagctggaggtccaagttatacttatggagtgcaatatctggtcgtagtacctcctagacctccacaacaagtcgaaggtgctcctactccgagcctacaattctaagcccctccagcttatttgcaaaatccaacagtggcttctattggaatatattttaccaagatctagatttactaataagtatgtttattaacannntaaatatgaatttttaaaacaatagaatttaaacacatataaagtttgagtaaccttacattgattgcagagaaatattatgattcctcccactcagatctctaaccnnnnnnnnnnnnnnnnnnagagtattattaagatctgagcccgattctcattcaggtgtttgaattcttcacagtattacacactatgattgagttctagacttgctatggtttggcatgcactcactcactaatggctcgaaaatttatgaagaatactatatgagatttcaaagatagaagaagaaagaatggaggctctcaaaactctagttgtctgacagaatgtaaactacgttatatgaggttattggataatgagaccattttattccttttatactatttcacttagggttaggattaaattatatgaaataaaaaatgataaaataataccaaaaataggactaagtggtcgaccacatagatgggccccactagttataatttgggaaatttacacagtttactgtgttttcc

SEQ ID NO: 74136 - DNA, 610 bp, Cannabis sativa
ggacaaacctcctcagcagctgggtctccatccacatccacaccaactgatgggccctcagcttcaatatctctagaaacaagaggataaaggtcgtacatctgaaagttggctacactggtcaatctgattacgttcctcttctccattaggagggacaacatggaatttgccctatccctcatctgcaaagtagggatggaccacttatatgtcagcacttgatggaagcagcgatgtcaaatctcatgggtatctcatgtaatgtagtagttatgggcatatgtaccaatttttgatagagacgtggtattggtatcacccaaccactgatggccaaccagactgaactggaaatacctagtctagttctccttttgagtagattttagatcaaaatagtatccaatctcatacgaatttggctatggccagcctagccccacatatagaacaaacatcacaattaggtattttatactatttagggtgatttgtgttggacacatcccgaagtaactagcaatatctcggaagtattggtgtcgcggcaacactgcaactagcggaagtaactagccattcatcgtgggtatctcacattggacac

SEQ ID NO: 74137 - DNA, 920 bp, Cannabis sativa
atgctctggcgtcccgagcgcctgtgccaggtatcattttggccatgaattatatatactaactcattagtagtactcaattaatgattattatatacttactatcttttcgacaatttctttgtcgtaatcagtgacaagttttgttctcttggttcgagatttgatccaaacatggtggcgtgggggatcttgaacatcgaggtcatttttctacattattttataacaattaaatgagtacaattacattttaaagtacattattagaaatcattgattacttaccacatcttcccttatgttcaccattccactctgatcacttcaatgtgtggattggatttttgctgaacgttccctttgcaccttactcaattcctacaatgtcaaaaaaatacattagatacatgtacttgtatttaagactttatcttagtacaaatataattagcgtacttgaaattcaggacttagtcgactttcaacaaatttcaaccaattagtaaggtcgatttctggatgcttattagggacttgtgccagtcgttgcacatcattctcttctaatgcgggcattataatgtcttttgtcattctattcttgaagtcttccattaacttttcagcaaggatcagccaatcatgtttgaactcatccgacactttaaatcccgtctagtttgaaggaaaacaaacacgattagagttaacatctgaattaatcaaaaacaaatcaaaattctcacaaataaacgcatacctgtatatctttccaaactttattttttagtgtagggttgacttctttacaattttaataggacaaccctatcgtctcacggcatctaactcctaaagtcaatactaggttggagtagtttttgccacagtactgtcctttgtcattcacctcgagt

SEQ ID NO: 74138 - DNA, 938 bp, Cannabis sativa
tatgatactttatcttccgaaaatgcagatcaagttaatggcaaagaagaattgcaggctatggctagtatgctttttaagtgtagtttgatcatgtttaagcaagcgtaggcttttgccttaggagctcggttcggagaaggtaaggaagaagaaaacaaacctgagaggacggattgaattccatcgaagaattgagaaattgagatcaaaatcaacatttgtccaacatatttaacaacttctgcttctctgctgtaacaatagccccaaattcggtggcctaatatcaagacagcaccgactaaggtgccttctgtaacaaccatgcaaagtgcaacacataatgctaaacgagctatctgaggcctcccagcacccaattcatttgaaattcttgtgctgacattccattcagtaagaagaagtaataatgaagtaatgaatttctctcaatcacaactggacattatgaataaactcacctaatgactccactgagtccaagaggtaccatatacaccaatgaacatgtgttaagactgaaatttgttgatacaaatgttaagaacttcaacttataagttaccaaatagcataggtttggaagaagtacaaacctgattgacaaaactgatgtttcgagttttggattcggaagaaagccagataacaaaaccatcatttcgaaagaccagatttccaacctgttcaaggacatagatgatgagcttcttactctatagtctatgcactaccaaatctaagatagtaagtaggtgagtgagtacacatacgttaacattacagctgaaggaatagaaagtttaagaaacttagggattccatgaaaagcttccatggagaaaccagtccatgtgtgtttacataaaggagagattctgacatatagtactaatgacaaggcattaatccaa

SEQ ID NO: 74139 - DNA, 900 bp, Cannabis sativa
gcttcaaaaatgcacctattttttcaccaggaccattaatcaacagtagcatttagactcaaatgaatctctagaatcataagtgcatctaacgataaattcagaatttttactttataaggacttatttataattaaaaaatatttataattatattataatcacccttactagatttatttaattttgtacgggtttttattattattttagtctttaattattaaattaaaagacaatacttttgttagtagaagttatagcccccacattaatagcaataggtccgtcactgggtgcatctggatagttaaacatatcatgaataattttagtatcccaactatgatggttgacatgaaataaggaactgacctctttattaagtaaatcaagattgattattgtcacaaacgggtactccatactaggcagtcaacggatactaactagtggtggtcttaagattgaattttagagtggacttagttagacatttaatataatctaaaataataaataactagctaaatttaagtggaatgatagtttagaagcatctcctattctagtggttttaatgaataaaatgaagatacaagtagaaaaaaaatgagcaagaaaattcaaaacatagtctttcatgtaaatttgaagaatcttaaccaattgttctatttaattgctatatgtatatataaaaataacaattgtatattaatatatttttaaatctgggtttagccctctctcaagacccctaggtccgcctatgatactaacgtgagtacctgatccaatagtatgtccctcattttcattagttgttgagcactccaaatactatgccatacaaaattaggattacctagatctgttgtcagaaagtcgccatgaga

SEQ ID NO: 74140 - DNA, 692 bp, Cannabis sativa
aatttaatattatgttctcgtacattttgatttaatagataacatgtgaaactgttaactactcacaacgtgctacatctatatggtgttgggtacctttaggtgtgacaatttatatcagttgttgtcatgtatataatttggttaatcgtaactatagaatatgaccctaatcaaaatgcatacatttgtcttatacactataagtgtagtaaaaaaagatacattttacattccacgcgaattttaatttgagataatattatgtttgatacataagttcttgtaaaaatagaaaatgtcctacctttgaatgtggtttgaattattgacgaaatgttaaaaacaattactcatccaatttaagtacctctccgatcttcatgatagactttaagaaaaaaaatcgaagagtaacgacagcaaatgattgagttcaatagttcttcatataaaattattgcctcttgagatataaaaatatatataacaaaaaaaaagaaccaatcagaagcaccccttatttaaaagaagaataattagcggtcaaattcctttaactttagagtttgacacgatcaacccccaaaactgaatctttgggggtaaaactcctcaaactctacttctgttttgatcttttaaatgtcaacgtagactatcacggtgtacacaagtatacacgtggtaaa

SEQ ID NO: 74141 - DNA, 800 bp, Cannabis sativa
  modified_base (755)..(774): a, c, t, g, unknown or other
atgttgtaactaattaaaatacatatacatttttttctcgattttttttttcagggggggcgactgccccccctcgctacaatgtgggtccgcccctgactaaagtcatgaactttataattagttacaatttatttatttttagccacaaattttgttgtaactaaaaataaatttttttgtatagtgactatttcttaaagtgacttgtgtattgattttgtgtgtgatatatgtactcataatattattaatcttattattgatactaaatgatatagttgtatactgtaaaaatagataattataataataaaaataataaaattgcttggccccttggctggttctgccactgaacaagtagtccgacctgtcctttagtattcttcaatatatttcttctctagcttataattatttgttctaattaatctaatctaaccctattttccaaacatggctacattacaacttcttaattgtttccatattagtgcttcaaatactaataatatatattataataaagtaaggagtactagtttaatgcatggtaattagggtatacatgcaaaagtctaatgttacttattataatagtctgtatattataattagacagattagttaacgaaaagtccaattaataatgattactaattactagtcttacagaacacaaaagtctgcgattaattaattaacaaaataaagactgatactgctctcattaggggtgttcatccgatccnnnnnnnnnnnnnnnnnnnnaacaacatccaatccgcactaagtgc

SEQ ID NO: 74142 - DNA, 1383 bp, Cannabis sativa
cacatttccagggttgtctccatgatgcagaaaatagggaccggatggatcttcataaggatttctaggtctgtttatttgagtattcagtcccgtacctggcgtttgaatttgattgtcaccattgtcgatttgggtagtggcttcgttgtcacgtcctgttccttgatcgtcggacatggctggacagaaagaagctggagaagcttctcaagaactcaaagagaagtctgtgaagggagaagaatgtcgattgaagaaacgaattcttcaactgcggacatcgaacgtcgccggagaagaacagaagacacggcgaggaagaaggaaaaaggatcaagatcgaaaggaagtatagcttccttgctctgataccatattgcggaagaaaggataaacattaaagtggttttattgaattgaatgaatgaatgtttacaaaggaaataagcctataaataggcatgaatgaaaagaggaaacagatctcctcaaatcagggagagccgttaatcaagggatcaaatcaatcaacaaacttaacagcctaaacagaacatatacaaccggtatatgtacataacagaaccactaacagagtatggcagtaacacaactaacagtaatacgatattcttgttaaataactaactcttgtaactagtgttaggaactggtctatgtcctataaatggacctgttctcattcattttaatctctagggcaacttcctttgctaaaaaatcttttcatctcaagatgcaattcagtagtgacggtgggtgctgagttttatgggaattgttctgcgagaaagccattttcatcattttaaacactaagctttaggtacatgtcatcattggagcaatggcattcaaggcaaactgaagaggcaataacgtataggaagttcaaaacacttatgcatatttcaattgtcacatattacttacatctcactatgtttcttctgtttttcattttagacttttttcaattaaagcttgtatctttttgttgctttatgtaagttattgatatgagagagctgcaaaagtggaaagccatatgaaatgcatataattaattattaagtagaataacatttgttatccaatcatagtcatgtacttgtagagaaactcttgttggtcactaaaatcaactgaaagaatttataattaataacaatctttcctaattaattacttaatggtaagatttgcaatcatatggttaacaatttaacccaaatcttttttttagaaaggcatgaaagaggtagcttccacaacatgaaacaagcaatgttggggttggtgggtggtggatgtttttgggggtagtttctaggcagcgtgaagaagaagaagaagaag

SEQ ID NO: 74143 - DNA, 1654 bp, Cannabis sativa
ttaaagttgactaattggatcttcccaatacttacatcttgagaatatgatagtacaattgagtaggagcgctaatcatatataccgaatatatagcttctataaatacatagaagtcaaacgataattttctttgagcttggctaaacgagattaaatggtggggtactcatttcaataattatattagtttattgaaatatcatttacaaggagctaagtattttaaggataaaaatacattgaagggtagaacagtaaaattatccctactcaatgtagatcatcaatagaggatcattgattatttggattgaaataatagataattaatagcttatctatatttgaaacatatagagcattctatataatcaggagtgcaattttgaatctatagtggagtcagaaggaattaataagatagagaatttacttggtaaattctagaactacttaatgggagcttaattatataggttcttggtctccgcactagttgatataatattagtttttagactcagttaaattgttttaattgatcaattagaattttaaattagattatatcttatttatgaattttcactaagcatggacttaattgagaagaaaagagattttagaatttatttattaattaagagactttgataggtctaacgaatatataaattaaatggtaattttactaattataattgttaaataaataaaattggtatttatatagtatttgagaaagaaatatatgttatttaataaagtggcaaaattaaaacccttagggctcacaatagggttcggccacaagggtttaatttaaagccattttatatttttataccattttttggtcttctgcgacactttcgtttttaccgttgttgttgtcgttgttactgccattaacgttgtcagccatgacttcttctgccttagccctcgctgcacttctttcttgccttttgtttcttctatttcttttgcatgtctttttactttcaggatcaacaagtagtattacactttgtccttgacgtcgcatgcaccctcaatacctgaaatagagtaagaaaaattcaaaagaaatagattagcaatgagcagaaagaattaaccaaagtagaatttaatctaattattgtaatatcaatatttgatcaatttcccagtaacaatgccaaaaacttgttgctctatttttattcactatgcaagtatacgtaatctattgcagttttaaactcacacaggtgaggtcgatccacaaggaattgttattgagtaccactaaattagatttatgtttcgatttggtgaaatcaataaaaaaagttgactaattaaatatctataaattaaaaagcaagaaaataaaaataaaaaaagtgtaattaattatggatcaatgttaagaatatggattatgttagttcagtttcccaatttttatgttaattattaattctctcccttttggtgatgatagattatcaaattaaccttaactcttctcagatcactaaggtcctaaatcatatatcatttacttgcatctctaaagtaaattaacatataacttgcgttaaattcataatctaaaaatcacataagctatgtaaatactctcgttttacatcaaaactta

SEQ ID NO: 74144 - DNA, 503 bp, Cannabis sativa
aaaaaaaaaaaaaacttaaatgataaatatattgtcttaaataattaatttatttgagaagaaattaattaaaattactttaattaattaaaaggatttgaaaggtatattaaactaaaattaaatttaataataattaattaaaattattttaattaattttaaagcttacggcgatcctacaaaataacaaaaatacccttgcagcgatggagattagttttgtagtttattttctaatttcaaaggttgtaaaattagaaatatccaattaatacctggttcatcatcattatttatttattattttaaaataaatattcattaatagtttattaatcatatgctcatgcattagtgaataatatgtcatacatagacatctcacacagttttattattatacatctcatagtagaaatatgatatataagattgtcgtatgtgtttatgtgtttactattttttgaaactaaaatcatgtaaattggctaagattaatt

SEQ ID NO: 74145 - DNA, 785 bp, Cannabis sativa
ataagagttacagagtaaaaaaaacagagtaaatatagtgcaatatagtgcaatctcttctatattcttaataagaagtgcagcagattggaacagaagtatatgtttggaagacagatctcctttatgaaaagccaagtgaagaatagaacaactgatggaagctactgaagggatggagaaggaatctgcatcacgtgattccctttttagttatatgtaaaaaaaaatgaactctctttgagttttcttctgattttgtaacttttggtttagctctttctttcattttagcttattgcttcaatgtagatagcttaaccacagacaacttatatgtaatatatataatggtcacataatgaaatcaatgtactagtttgatcagatcaaaggtagctgctggttggtaatttttttagcctagaaacttttggacagttttaagaaaaaagattgagttaaaacacatattctcgttactactgaatgctgctgcaacaacatgaggataccatcttgtttatgaagacaattcgtttcatggaacttacttacacacatgtcaaaattaataagctgagacattggattggacttaattataaaagaaatgaattatcagtatcttgagttgcttttgagggaatttgtgtttggattcagtttttataattatcatattcttctttatccaattcatgtgaacatgaagctgcaacgccattaggacaagtgttgaggaaacaagtgaatgaaagagagattgtgaccaaaattactaa

SEQ ID NO: 74146 - DNA, 1143 bp, Cannabis sativa
ttccataagtaacttctacatatattctctatttcatgaactacctttgatagaagaagcaaaatttgactccagtaagtatgtatggtcataagaacagagctaatcagcacacttctccttgcaaaggacaagttccgagaactccatgttttaattcttccagtcatcttttcaacaagaatcttgcactttgttgctgaaattttcttggcacatatagggatgccaagatacttgaaaggtacctcttccttagtgaaacccgagacattaactattctttgaatctctttctcctccatgccactataatagattgccgatttgctattattaggaagcaaacaagatgtctgagaaaatagcttcaaaccttgtagcatgagatgaatactgctgaaatcacccttacaaaataataatacgccatctgcaaaaattaaatgtgttagcttttcatggttctgcatctttcacgatgaccaaatttcttcttctttcccactactcccattattctgctcaaatactccattccaagtacaaataggagaggaaacatgggatctccctgccttagccccctattggcttcaaaaaaaccatgaagagagccatttcaaggagggagaacctcggagtagacacacattgcatgatcaactgtataaacttcttagaaaactgcatagaaattagcatctcctcaagaaatccccactctagtgtatcatatgctttctgaaagtctaatttaatcatacagttgggccttgaatgtttccttccataatgccttagcaaatcttgtcatatcattatgttatgggcaatatatctaccttgaacgaaacctccttagttctgagcaaccaaatctggcaatatatgcttgagtctactacaaattaacttggtaataactttatacaagacattacaacaagctatgggtcagaattcactcactttgtttgggcatttgatcgtcggtatgagagtaagcactgttgagtccacttctttcaatatctgccccgattgtaaggctgataggattgcttcagatacatcttggccgaccaaatcccaattatcctaaaaaaaggagctgctaaatccatccggaccaggggcttt

SEQ ID NO: 74147 - DNA, 1432 bp, Cannabis sativa
tatttcttccactaaggatgctaccttgcatacaagaaaagcaatatagacagcaaataaaagtagactgttaaactaatcaattactgcaaaagggcaaacaaataacaaatccaaaaaaaaaaaaaaaacaattcatacatcaacttcatttgaaactgacatgaactaatattttctttttatttctctaggaaacaatgtcaacataacaaggaaaatattctgcagaaagaactgtctaagtaagactaaagaatgcttaaaaatacagtatttaaggtttttatgttttttcccactttctttgatatacataatttttagtaaaaacattatttccctttcttttaaatatttattttctcttatttttatataactacttacttaagtttttattcccttgtcatccatagaaattggatgggaaaggacaataaatttgaatacatgtataaataagcatataaataaaatgcacaaccacatctaatataaaggtttaagatatgtaacctcaatggtaagattaaaaaaaaagagtatttaagatcttttgtactaggacaagagccaacagctatggcaaaatagagtgttaatgatctaccaaacctctataagccatgtcatggcaaaatagagtgttaatgatctaccaaacctctataagccatgtcaattttgtctaaattacgggatatctcaagaattaacatgaaagccattttagtccttaattgataggtaaactatctaagaagcacaacgtatataccatattactacttcaaatttcaaacagaactattagcttgctcaaccaaaattgcaagcaaagccatcttattatcctcctcttgttcttttccattgtctatttcctcaaaatttgacaaatttgttactttcttcctgagccatattactagagagatcacaataaacagtattcaaacgaatacaatcaaattttgcttctaagttcatatttcacaaaaactaactgagcataatttaactttcacatttaacaacatcaataattaattctatagttgattttttgttcaatctgtgtatataatataagagcacaaaaattttaacaaaacaatacaaagagtaaataaaaacacgcgcgcacatatatacatttacatattgatttgtattttccagtaatttatctatactcattcagaaatttcaaacatatcaaaaagattttataatataattgagaaaaaaaaataaaaagtaacttactctgccagttcgagagctgcggtcctgtggaggcgatggagtgtggaggggttcatggactcacggagaagagcggaagctgggagagagaaaccctaattaggagatataatcaacaatttcagaaatagtgaagagaaagatgaagatggaaaatact

SEQ ID NO: 74148 - DNA, 685 bp, Cannabis sativa
taggtaaaagtagtcctattttttaaagagttataagtattagtttagataattaatttaggtataaaaaatgcatagaaactcaaatttcccatatatacatctaaaatatagtaaatgttagaatagttttttttttttgaaacggaatgttaggatagtttatatataaaccttaaaacagagatacaccctttacttgtttcttaactgttttcgtgtgcgtgtcacagtcagtggagagtactgacccatttttcttcaccctatcctgtgtcttactttgttatgcccgtcagagatctgatctagtaatatttccataacaaccaccaggcacgagcccaacaattaatgtctctccaaccaattgtcgcgtcaaatttttaagctacctctttaaataaatagtgtgagaaagagagttttttggtgcactccagctttttttttttttttttttctttcaatttttgatagaagcgtatttaatatacattagttcagtcatacacacccacccgaaatactgtttgattttttcttttttttcttcatatacggttattcaaaatgtgtaaattgcttatgttttattccacaatgttcatccaaaacccaagaaatgttgcaaaaaccaaaataaagacacttaggaattgctggtttcttattgagtcccata

SEQ ID NO: 74149 - DNA, 779 bp, Cannabis sativa
tttgtcaagagttagtttcaacttcttgtgtttttattaagcgttctgcaaacaaggcggccaatatttggctcgttctgcttgtttctcttcagaacgtagttatagtggggggcttgtccttactgatttgcaagctattttgttagttgatttgcatgaataaaagtttacaaactttattttaaaaaagaaaaacgcattaaattaaaataataaaaaaataataatatattttttaaaagcaatagaccagaaaaatatgtgcaggaaggcacgttaaaaatttacattaaatactccacacgctttggaaatattctatataaatagccctaatgaaaagacatattattgtacaactttgatgatgggtcgtgggctaagtgaagatgatgagaagaaaagtcgtttgaaaaaatgagggggcatagttacctattatttaacagaatgtttttaatacataattagtccatacaaaaacatatagatacctctattaatttgtatataagtatacataaaacagtatctttgtaattcttcagaaattagaagtctttttttagaactttagtatacgtactatatatgattaactattctgaacttcaacaacaatttaatccaacaatattatttggtatctaacactatctttttctcttataggaaccatatatgagtagataaaataattttaaagttttatttggtaaataatcccaaaagaaattaattattgttggtccatataatggatttccaaatctttt

SEQ ID NO: 74150 - DNA, 827 bp, Cannabis sativa
  modified_base (117)..(117): a, c, t, g, unknown or other
atattaactcggtatgttccaccgttactactccttgaacccatgagatcccacaatatatagttcataattacatccatctgttcctcctgtgagacctcctaaacaaatctactnactcaacttattaacaagttaagtattcgtttctgatagatattcatttagagcacttcttatgtctacttattaacatatgcttatcttgataccttgaaaatctttactgattgtcacatgctttcctccttgtaatctctacaacgactattgattttgcatcctactatgaatctttctagcgtactttgtcctcaatcatatgctttccaagatgactccccgaaagattttccatcttgaaattcccccaagttaagtatgtttaaatccaaggtaagctcacggtgggttatcagaaagtagatgcttctttgtcgttcccacttgtatttcttatttttgtccttccgttatttaaatccaatttccaccactcccttcattaacctcttacaattcctcatcgattttgttcacttatgcttgaggaatttttatcttattgtcaacttgaatcttatttatcttcactcattttaacttgcatccatttcttgagttcttagctaataacaattgatcaaagatcattccttgatctcaaacctccgcatctgtgtttggtagaaatcctaaaattccctttttaacacatccaaaaatatacatgaatattctctattttattgacaatcccttggtgtgaaatccaacttgtagtgagttccttgttgatggtgttgattcatcaacatctaagactc

SEQ ID NO: 74151 - DNA, 1644 bp, Cannabis sativa
atagaagaggtttctccatgccattacttaggtgtgtaaaaaaagaagaagttgtgcgtctcttgtcttaggtacatgatggattcggtggcaaccacacagtaaggaaaagcctatcaaagaaaatactaaggcggggatatttctagccaaccatgatggaagattcaaaggcatatgtaaagaaatgtgacaaatgccaaaggtttttgaagatcccccgtgcacctcccaacgagctaattcagatgcaaaattcttggcctttgatatctggggaatagacctgatcgggcagtttctaaaagggaagggcggggtacagtatgagtggtcgcagttgattatttcacaaaatggatcgaagccgagcctttggcaataatcacatctaaaaagtattggactttgtggtgaagaatataatatgttagttcagactctcgcacaaaatcattttagataatggcaaatagtttgacaaccagatgtttacagatttctgtaagatacatggaatcataaagagtttctccgtagtggcacacccttaatcaaatggtcaggttgaagcagtcaataagacactcaaagacaccatgaaaaaatgacttgaagaagctaaagggaactggccgaaggaactaccagaagtattgtggtcatacctaacaaaaaaaaatagcaactggacaaacacagtttgctatggcacatggttatgaagctatgttgtctgcagaattagaacctctgtcccacagaagattgacctatgatcaagaagctaatcatgatctcgtagcagaatcacttgacgaaattaaagaaaacaagcctcaacaaacctaaagttagctgtgcaccaacaaaaggtggctcgatacttcaacaagcaagtgagggcgaggaaattctttgtgggagatatggtcctcagaagagtattcctaaacacaaaagatagcttggctggcgtgctcgaacctaactgggaaggaccatatcagtagtcaaagttacagactcgagggcgtataagcttgggcggtatgacaaaaatatagagctcattctactaccaaggtattggaatggggaacaattgaggaaatactaacagtaagtgtacaaggtcggacgacgactttaagtacacaatgatataacatttacttttaagtagatgaacttctgggcggatcacactcaatggtttagataaaatgactagtactcaggtcggatgaccatctttaaagtataaaaagtgcaattgtttatgtttaaattagctaaagaagttagatcatttaatagcttttataaatgtaagttaccacggcaacaaaattgttctgaccaataaatgaataaagatattaattatcattctaattgtgtcaattatgttagcaagttatgaatttaccattaatgcgtacaaaaggtctgatcgaccccaaaggccgaacaaacaaaaattgaatttgtgaaatgcaagtgaccaagagtcataagtcttctctgtcacttgggaggcatctatacccgtacaaagcattggtaaatataaaggtaaatagcaagctcaaaaaaataatataacggtttgcacgtacaattacttaaacaagggaaaat

SEQ ID NO: 74152 - DNA, 1375 bp, Cannabis sativa
taaaaatgccatatttttctaactttgttatgaaatcccatatttcatgtaattttcacatgtaaaaatggccaaattagattagtaggagaagcccattaacactggtctcacataacaaggactaataaaaaaaaaatggggattttactaaaatactgagttttggtcaaatatttataattttactgggcaaaaattacttttatactgttttgggtttttttttttcttttatactgtagacaccgaatatcaagaacaatgccttcatcttccacacccacatacagaaccaccatagcaacacgaacacacctgaaaaacaaccattaatttcggtgagattgagccaaactagtgaaattgacgtcaaataaataatcatggcaaaacaactgtaatcaacactaaaacaaataaaaaaaaaaagaaaaaaaaaagattaaaaaaaaaactaactattttatatacaacctcaacaccatatgcaattgcgactatattttcaagtccagtccttgaaaattagaataaaaaaattactaaaataaatctaaaccaacacaaaaacaaatgtaaaataatgaatcagaaatagcacttagaaaaacataaaagcactacacacctcacaatttttttgtcaatgagctcgtcaaatgtatttataagagaatcaaaataaaaaaactacaaaaacagcgatagagaaggaaaaagaaatgtatttatagtctccatcttccacacttacggacagtttcaccacatcaacacgagcacctaaaaaataattattaattccggcgagatagagcaagaacagtgaaattgacgtcaaataaataaattatgacaaaacaacactaaaacaaataaaaaaactaaacaaaaaaacaattaagaaaaactaaccatcttctacacaacctcaacaccagatacaatagaaactatatttgtaagtccaattctgaaaaatcagaataaaaaattcactcttatttttcctaaaaacgtgactgaaaattttaaaaactaaagagaaaaatgagaagaagataaagatgaagaagaagaactgaacaagaaataaaataaaaaaatgtatatgttaatggagagaaaagaaagaacttgaggaataagagagtgaaaaaaaaaaaaaaagataataacttatgaattttgaaacaaaaaagaaaaaaaaaactccacaaaaaagaagatgaacatgaaaaaagaataatgagaagtaatgagaaatagaataataaaaaatagggataattgcggcaaaagtccccaaaaacttgaggttgatgccgattagtcctcaacctcaaaaattggcggtgaaaatacctaaggt

SEQ ID NO: 74153 - DNA, 862 bp, Cannabis sativa
  modified_base (27)..(41): a, c, t, g, unknown or other
gggattgcacagcttacccggtatttnnnnnnnnnnnnnnngggactactgactgtcacaattgactttcattagtgagtgtcatacattaataaatgacaaaaaaaaaaatattgttgttatctttttttctttctagccaagtgaaaagattcatgaaaataaaaattaaattgttgttgtctctttgaaaattgaacatttggtcaaattaatggtatgccttcttctccaattatatatgttgtcaattattactgcccaaataacgactcacacaataatatttgtaaaatgatataagaaatgatatgttgtcggatttaaactcaataagcaatatttatatatatatttatagaatattgatatgaaaataacgataaggattagttgaataatttgaattcgaggtgttatggccgttttctattaattttttttaagttctcatattcaaagataaactatatataatgtcaacttattttgttattattatgagtcgtcacataacaaaattcattttacgtgtaaccattttctgatctctctctaatattatatatattcatgtaaattacacatgtttctattcaaaaaaaaaaataaaattacacatatgttttactataattaatctcaaatatatatatacacattaattgtgtcgatttttttttaaagttcttgtcaaagtaattaataatatatatatatatatttatatactagatagatgttacgtgacaagttacgtatgttaattttattttagtttttagtttttttaatattataagtttaaaattaataatattaataatattgaaagcataatagtgatttaaataaaaacaaa

SEQ ID NO: 74154 - DNA, 874 bp, Cannabis sativa
aggcgatgtgggagattacacagcttgcccctccggtgtttttcccttacggatcacaggactactgaccaattcagaaagaaactccacatccaatcggcctttaaggagaccaattctggtattacaactttgaattctctccttaaaattattagttaagctccttccccacacaccaagagggccatgaatagctgccactttgtcaacaatgttacccgatacacaagcttcccattgctcctggataatagcataacaattagaatcacgcagccaagcattctcaaaccgaaacaccctcctagaagctgcctggaactgaaatgctggatctaaaaatagaggacaatgatctgatgtagaaaaggccatgttaatcaaccgtgcattaggaaacaaactcatccaagaaggggtagccagcgctctatccaacctcaattcgatccaattgtccgtgcccacaagctcaagatccacaagaatacaatcagagatagtttgttgaaaactatctataagccaattaggataaggattaccaccttttttatcatcttggctaagaacattattcaagtccccaataatacaccaatggatatcattttcttccttcaacaccctcataagattccaagtattgccccgcaatgaccgattaggttctccatataaccccgtaaggcgccagatatgagggctatcatgtcttaccaccatatctatatgattttgtgaatacccgaccatctgagcatcatccttatcctttcataacactgctaatccaccccctcccctgggcatcaaccgaaaaaagaccctcataaccaagctgtgatgctagaagctccaactgagcttt

SEQ ID NO: 74155 - DNA, 990 bp, Cannabis sativa
acatatttttactaaaatatactttctgagagaagcatgttgaatttttattcggttgtatatataggaatcgtgtcgggactctggagatcctatattgttctgtagtcatttcatttagtggtttatgtttgaaactgcattttgataggcaactagaatgagggacaaagtggttaaataatagaattagttaatagaggggtatatgtgtaatagtagtattgagcacttgatgtgatgaaatagagtagcatatttggaataggttaaggaggagaggaacatgagaattatattgtaattgagcttttgctattgggagagttgaggtctctctaatacctcattattctagtgtgttctatctctttaatcagtaacaataattatcagagttgcttattttcatttacttccatctctgttttttttgcctattgatttgaggatccctacttgggggtactctctatcacatccattaggcaagaaagctcctaatcgttatatttgatgctttaaatatggccactgtggctatttaattttaatttacttgctctgctcggagtggatatttgaataaatgccagattcaaatactgaaacaaagttttggtattgcaggttgtttcacattgtggaagccttggtagttcttcttttgcatgcggttacgtccttgttgttgtcactcaagaggtaaataaaagagttcattgcaggttgttcttcatttccattctcttctgtattcttctcaggtgcccttttgttttggttttgctacaagtcaggctacaactgaccagaaattttaaataacaaaatataaaaacaaaattggtctttaatggatgacaaaaaatagttgaaggaactaattgacccaataataaatagaaaataatagcaagaaaaagaagaaggaaaatgtttggatggaatgcctctttatttacaattcaattaattttggcaccatac

SEQ ID NO: 74156 - DNA, 1015 bp, Cannabis sativa
attgttttagagaattcgttgttttagagaattcgtatttagtatgttaatctatttagtatgttaatcaacttagtatgttaatcaacatagtatgttaatcaacatacttgttagtaaatctagatcctggtgaaatattcccaacaagaagtatgacactatgtgctttaatctgaatctcctttatcttctttttatcttcacccaattctttcaattcttctttgtctatggcccgcatgaatgccttgatgaaccagtagagccttcattttaattccccatgtgcctaaaaacttgtctacctcaaaacatgttgaagtcattgcgatccagaaatcttgatcttgttaagatcttgagttgttcttggtgaactcgaacctggagctttgataccaattgttgaggatgactcgaccaagaacacaatgataaaagacaaaacagagttgatcaataagcataatgtagaactcaatctacatcaaataatacgaactaaaactatcaaagataaagcagtaaatggagatagattttatgtggttcgaacacgaataacagaatattatcctacctactccacggccagaaacagccctttgggctttcatctttattgattgagaattttcaccagagatttcactaagaactgtcaagaacaattcatatatattcaaatgaagctttgcttcaattacaatgagacactcatctctgtctcactcaactctgggttttctctcaatttctctctattctctctcaatgacttgatctgaatctctattgttgaagctcgaaatgtgaggatcccttttgataggtcttggacattgttgatgacataattgtcataacagaatgttagttaattctgttacgatatattcgagctggtaagtggttttgatccaaaagtgtgggaaattcaaatgtgtagccaaacacaatagaggacttaaccattttaagctactcaaaatttaatttattaacaaaccat

SEQ ID NO: 74157 - DNA, 986 bp, Cannabis sativa
aactttatattaaaatacacccataacaacattaacattatcttaataatttttattacttaatagagtatatacatatatatagcaaaacaacaaaatagtcaaatacataaaagtgtaacccttttcgggtaatagatagatatggtcttatatatattataacgacttatcaataaaaagagtaacatatatgactatatatagtttcaacaagaaagccctagctagtaactaataaccaatcattattaggttgcctactattttgcccagtgtacgaatcattttcatttcaattatagtcaatttatatatatatatatatatatgtatataatcacttgaaagtttcagaagtttccttaataattaactagctttaaacaactattttatatatgcatacatatatatagtctcctataagaaaattttgttggtgaatttgcttacgtgtcactatgttatttgtacgtgtgggaacaaaataaataaaattattacaatggaattgacaattcatcaaagagccaaatacaaaattaaaaattatttacatttaaaattgacaagtcttgatcagaaagctgtatagtctaattttcattctggaatatataatatatttatatataatatttctttaacaaattaatgagattgatctataaatttctagaacatcatttcttgccacatttggaaaacactatatatcaatatatacactaggattattattattgtgtagaaatacaaacaataatcaaagaaaaggttaattattactttttattatttatatatataccaattataaccacaacttttttttctcatgatcatatcatacaatatatcaagtggtagaatatccacgtggaaacaaactaatgaacaatgtaaaagctcaaagttgtgtatagtagagagaaaattattgtaaagaaaatctatttttattttatttttcatcaaaatac

SEQ ID NO: 74158 - DNA, 1025 bp, Cannabis sativa
ttcaagaatcacattcaaccaatcaagattcatcttcaacatttcaagaatcaaactcgaactttcaagaaccatattcaagcaatcaagaatttggtttgaatgactacaacaaggtttgaggtggacaagttcgctggttccaataattttagcctatggagaatcaaaatgaaagattttttaattcacaaagggatctatgaagcacttgatgctgaagccatggaattgattaaagacaggaagaggaaacttgaaattgaaggtaaggcatacaatgccatcctccttaatcttggtgatgaggttatgagggaagtttaaaatgaagacaagaccttgggtctctaggacaagttgacttcaatctacatgaagaaatctcttgcaaactagttgtatcttaagaagaaattgtacacactttgaatggatgaatcaaaggaattgagaaagcatttacatgattatagcataatcgttcttgatttgattaattttggggtaaaatttgatgatgaagaccatgctataatcttgttgagttcacttcccaagatgtatgggaactttattgatacaaccttgtatggcaaaaacactctgaccatgacaaaggttaatgctgcattaaattttaaagaaatttagaagaaatgaaatgagaaaagagatctatggagaaggattactcattgttaagggaaaattctccaagagggaatacaagagaaatcagaactcaaatggctacagaagtaaccattcaagattcaattttaaaaactccattagagggccaagctctaatggagccacaaaaaagtaatgttattactacaagaaagagggccactttaaagatgattgtttgacttcaaaggctaaattgaagagagaaaatcatcacaagtctaaaaggcatggagtttctgttgttgcaaatggctatgagtcatctgatgcacttgtagtgtcatctgatgcacttgtgatgtctagatcagattcaggtggagatt

SEQ ID NO: 74159 - DNA, 1069 bp, Cannabis sativa
gatgcctcagttattcatactgtttgagttgaaaagttcttagaacgtaaagacaaatttgttggtatgtgcttctttaatgttttaactctctcattttaatgatttgaactctcctgctacctacttcaagtaatgaaaaatacttagaacataatttcgagttggaccgtgttagctttttcgaaaactatcactaatatgacttcttatttaggtgaaaatgcaccatttgactacattagtattacccctccttagacaagttgactatggggtactcatggaccaaatttcaaattcagccttaattggagaagatacatttgttgtagagactagagagatgttctataacatgtctattttgaatgcttgctaagtaaagttagcatttatctttaagtttttaatatgtgttctttttcaaaaagtagttatctttgtttggcttaggatttcttgttttgaacttgaaattaaatagataatcatagttggttactaatttttctttctttccttttttaaatgataaaagcttgctaatagcgtgttagacttattagtctttagttaaatctggtccctaattgataaaaagaaaaatatattatggaaaaatatcattcattggtctctaactatatttagtttttcactctagtttgttgattggatacaaattttaattaatgaaaaaattatgtgtacataaggatatatacttgtcaaaagccaaagaaaatttagtatgtaatatgctgctgaaatgtttgatgtatgtgtactagctcatttgggattgataaattaaacacggtatgataccatgacaacatatatatttattaatatgagtaaaattttaggattgatcatttaaattctgtcgtacatatattgaaaaatcctaacttattaatttaataattattggattgactttagccaccacccactttcaaagcctcatttcaataatatagttcattttctttctttaagtaatacataattaaattttgcaatcatcttgcaatacacagatttaactttgtttatgatt

SEQ ID NO: 74160 - DNA, 951 bp, Cannabis sativa
agcactccttgatatcgccaaagtattacaatagtcaatgataggagtctttgtaaattccatttcatgcgattctccattagcatattgcattctgagatacctagacgtttcaaagtaaagggcaataataatcccatttctgaaaatgactccaaccttgaacaactatatatgctccacttttcaagggagggatatgtaatgtcaataccattactatttgatggaaatatagtcaccaattcatcacaatctcgaatgatgatatcttccaaagatggaaaagtacagataggtaatgccgcatttatgttcctacaatgctctaaaaagatttccttcaaacaagggaaaatctcaatctgtattgggaaataatgaccaatccaatgtagttattcccacaagctttaatcttgataagagtggaaatggattattattccaagaaattccactaaattcaaaacgcatatcaagacaagaaatacgaagatatctcagtgaacttagtagtcgaaatgataaaaatgacaagcaacaattttcacattctagatcaatttcttccaaataagagtaggatggatgtgttacccaactgtctggtaactttgtgccattatagccgcgtatcttcagtttcttcaagttttcatgtggttggagcgcgttaagtacttctctttcctttattgaatcatctgcttttccatcccatcttaaaataagctcactcaaattctttttcttctttaactcgccttcccaaacatcactcacttcctcgacatattgaaggcctaaaatcttaaagcttccatgcaaattcgactccaacttacccaactctttgatcctacatccatcattttcacacaaaacaaaatcactcaatgtttgaagattcatcatattgcaaatcctaggtggcatctcttttaaagg

SEQ ID NO: 74161 - DNA, 831 bp, Cannabis sativa
gtccgatgcatatgcgggttgggaaaaaatggggctgagttatgagaggggtatttttgggttttcgataaaagtgtcatatatttattagtttgaaatgtattggtttaagaataaaatattaaggttttttattgttgtgatccactcttctgcaactactgtcatcgttgctgtgaagcaagacctttttttttttccttgtagcctgtagaggatcaatagatggagttttctcacatcttaatatataatgttaattggttcagtgaaagggtaataaagcacgtcgtaatatgtgaaatttttggatgaaaacctctcaaaccataagctcctccacgattctcctatctctctccccctcgctctagtcgacgctaacaccgaagatgtccagatctggttggagaagctttggtcaaacgcctcgtagatggccttgggtgtcagctcgatattaatggatgcatgcacctaaattagtgtcggccacagtgatatttaaaaatccattttcttgatccgcaattaaatttcttgattctgtttttggaaacgctagttggtcttccctcatacctccctcctttgagtatgttacacaggtaagttttatattatatacttttatatttatattcatattctgattatttaattttgtttttataaagagtttctcttgttttttgtttcgacgtgattttttgtgttatcgtcaagctaggtttggttattaaaagttttgatatgtattgttacaaatctgtctatcttctcttttgatctcatctttaagttgaaagagtcatcgccattagagtttcc

SEQ ID NO: 74162 - DNA, 776 bp, Cannabis sativa
aaaaaaaaaaaaaattcttaaaaagaaatagatcatcaagaaatgaagaatatagttatttacatgataaatatccagagaaactacttatttaaaaatctagagtttccatctcatcccattatacaaagtgttaatgtgggttttcgttaattgatttaacactacaaaattgcccctgcaaaagtcaaatacagcgcctgcaaaagtcaaatgcagcgcctgcaaaagtattgtggacgaatttttgagcgtcctcggacgtccacaattgcgcgtctggaaaaaaccgtgcggacacaatttggagcccgtacggaaagagaaaaacctttgcaggcccactaatagcgcctacaaaagttattaggaataaattttatttttcttaaaaatacctttgcaggcgcttttagtgcgtccacaaaagctgataccacttttgtggacgcatttaaagcgcctgcaaaagtatttttataaaaataataaaaaaattatttaatacaatctgcttttcaaaattaattctaatactgatatttttataaaaaactaatattgcattcatttcttttaaaagatttaatacataatattgttttctaaatttgtaaatcttacaaattgtaataaaatttcattatgctaactaaatttacaaataaaactagaaaaaatattcatattcatacaatattttcataaagtttcacaaattacatcttaggcattggatgaagaggcattattagcatttggaggctggtagttga

SEQ ID NO: 74163 - DNA, 1104 bp, Cannabis sativa
agagaatgagagccacaagaagcctcatcactatctcgcgatccaagaggacgactctaaccgcaacccccaaccaaaggcaggcatgacacatctcagcagagatacccatgacacatctaaaaccctagaagaaactaaggggggagagaggggaaaaccttattagagaaaagaaaggcttctttcttttacatatgacaaaggatataccattattgttcaccttaattagcaaaagaaaaaaaaaagagcactatatttttaaaaaattaaacatggtaccaaattaaattaaaaaaaaaaaactaaaaaaatgtggtaccaaaattaaaaaactaaaaattgttatttaaacacaaatagaagtgtttggcattattttcacaaaattatttttaaaaaaaaaaacatatttacgtaatagatgaattattatagctaaaaggtttagctcatcataaataatatgtttatagggcactgaagattctttgatgttttatagcatctacaatagttgtatttttttaaaggtattaaaagctttcacaatatttaaaaatataatattttattttatatctcttccatatttttttagcatttttattttgaaaaatactcaaatgataagcattattcacgtcctattacaacatcttagtcaatttctacgtctgaaatcttatgttagattttttcaaatttttttcatagcggtattcattaaagttacaatattatcactgtaaatttttgaaaattttcaaatagtttacagtaccgaaaatagaaattctgatattctagtttaccatgcatgtttaaaaaacttttaacatatttttagcactgtaaactattcaaaaaatttaaaaattcatgggcatgatgttgtaagtacaataaacaccgctaaatgaaataaaatatgaaaaaaaatattctgacatgtgttttcaggtacggaagttgactaagagattataatagcagattgacatatcactcctcagaatataatatttgattttaaatctcttccacatctttattagtactcttacttctaaaaacacgtactcttataataatgtatta

SEQ ID NO: 74164 - DNA, 690 bp, Cannabis sativa
ctcgatccaacagattgaattaaccatgccctccctgccttagacagcagtcatgatttccacccatcgattctagcaagggcttttttcactagataatccatttcatgggatctactggcagaccgaaagagagggagacccaagtaggtggcatctttcttcatcttgcgcattcccaggaggttcacaatattgaatgcacgggtcatgggaactccttttgagaagtacaccattgatttttggaaattcacagcttgcctggaccattcgcaataagtgtgaaggcacttgaggaaagccttagcttcttttttcatagcttgtccgaacaacataacatcatccgcaaacataagatgggttattggctcagcggatcttgacaccttaaaaccacggatctttcctttatcattagcatccaaaattagccgagataataaatccgccacaagaatgaacagggtcaaggaaaaaggatccctctgtctaagcccgcaatgagggataataacaccatttctcgctccatttaacatcagatttagctttttaatttggatacatctcattatccatcccaaaaatagatccttagcgccatgaaattgaagggcttctctcacaaaatcccaatttatcttatcgtaggctttttccatatccagtttaatcatcataaag

SEQ ID NO: 74165 - DNA, 737 bp, Cannabis sativa
tctttattgatattgaataatacggattacattgaatttgagttttatttatggcataaaacccaacagctttcaccgatgcttattggggcacttgccctgacacaaggcgctctatcacagggtattatatcttccttggcaactctctcatatcttggaaatcgaataagcaagcaacaatgtccaaatattctgcagaggctgaataccgctccctagctaacacgacatgtgaaatcctatggctcttcaacatcctcaaagactttggcatctcacatccacaacctgcaacaatatattgtgataaccaagctgccctccacatatccgagaatgtagtcttccatgagcgcaccaaacatatcgagatcgactgccatattattcgagaccaggtcactaacaaccggctcgagctcattcatgttccttctcggcataatgttgcaaacataatgaccaaagcattgttccttactcaacacaaattccttttgagcaagatgagcatcatcaatatctactgctcaccttgagggggcgtattaggatgtccacatcacattctgttaatgttagttaggattactgttatagttagttagaactaacgaattgccagcttgtattagtcctctatataaatactctgtttccataattattcaacataataaaaatttgattacactaatactttgctctaaatgaaaaaatgaaaaaataaaaaa

SEQ ID NO: 74166 - DNA, 2290 bp, Cannabis sativa
  modified_base (176)..(177): a, c, t, g, unknown or other
  modified_base (2245)..(2246): a, c, t, g, unknown or other
atatatatcagaattcgaaacccaatgtattataaaaaatacattttcgaaattccacattaaaataaaataaaataaaactgaaaaaataattcaagtttatgttgttctaaaattaaataaattaattttcaacataagtataattttcttatttaattaaatatcttaagaannatatcaaatatttaagtgtcttgaataaatcaacttaaatgttaattttctatttaattaaatatatttagaaaaataccaaaattctacctagaaaatatctatctatataattcataaactaattacttattttttaattaaaatataatatattttagtctataatataccctacatcacctatgtcgtgggattattatgcaaatttactagtagacctagtgtagaacattgacacgctattgagatggtcatgagatacctcaaaagaaccttgaaccttaaattacattatcagaattttttaattttccttgaaaggtacaatgatgatgattggaacactttattagatgactccaaggcaaccagtggctatatttttagcatagatggtggagctgtttcatggaagtctaagaaacagactattttggtgcaatctacaatggagtctaaaatgattgtactagttactgctagtgaagaagcaagttggctgaaaagcttgctagctgagattcctttatgggaaagacctattccagctgtgctgatccattgcgatagtgttgtgactattgcaaaagttaagaatcgttaatacaacagtaagagactacaactacgtcgtaagcacagttagagagtttctctcaataggaattgttagagtggatcatgtacgcactgatgataacttggctgatccttcgaaaggtttagctagagagaaaatccttaacaaggaatgggactattgcccttaaattgatgaatcactcataatggcaacccggcctatatactggagatcccaagaaataggttcaatggataataacaagttatgaagtgattaaaaagagatcatgctataattattcaaaaagtgaagcatgaattgctgaagcaatttaaggttgagttaatagaagctcttaatgagttctatactccaagtggagtggagtgccgagctacaggagtactcttgatagagtcacctatgtgaatatgagagtggggccgcttcgtgtgaaattttgggtaaaatttttagagcgttcagtatactgggatagacgtgcatggccattaacgcacgggcttttgactacacccttgaaaaggttattgcatggtatgatgttagagatagagtttaagactatacaggtcactctagtaaaatctaaatcgtattcactatgtagatgttcaaatcgaaagatacctttatttatgctcaatcttattgttgaatgatattgttagatgaaaatattttttaaaaattcaagtggaggattgctggaactttttacaaagttaatgaattttttacaaaatgagagtgtcctagtatgtgtgaaatagaatgagtcccacatgagatatgagcccttgtttataagggtatataaggtacaactttggcacttaggacaaggccccaaggggtacccaattttgtgcaaatgggtgaggacacatacttggcccaccacgtgtgcgccacctattcgattcgaaactggttggtgtggtgtgacactttattttttacaaaaaaattatttaataaagtaattattatattatttaatttatttgagaaacgtgtttaattgaaattgattgcttgatcgtatcagctcgtggtacacgttcaacaactactctccaggattcaaaaaacattcttcttcctgttataatttttcattctattggtctatataatgcgattgaattaaagggagaaacacatcttttcataccgagaaaaaaaaactcaattttcactaccaaaattttccatccgcgatatatattttcagggtgtatttgacggtttgttataatgcagtggttttccgatacagtgtacgaaaactgagttgttttatccttgggacgacccacaatatccgtctgcttgcacattcctgggcagtgccagaacaacttaaagagatcgacgtaatttgtaactcaactcaaaaatttcattcgataatatcgtcactacaaaaaattgctacttttagtgacaactttnnagtcacaacataatttttttgtgaataaatgtgacttttagtca

SEQ ID NO: 74167 - DNA, 626 bp, Cannabis sativa
gtagggacttgtggtattaaatataagaaagactgctgagttagatcagtcgctattggcgagttcagctgttacccaccagaacaacttactgctgaagcatctgaggggaccagtggcgaggccaatacgagtggcttgacaggaatacgcgcttggagcctcgaacacatcagggttggagcaattatccccctgcgagactactacaagaacttcctaaacaaccttggaattgccccattccagttgaatcccatttcacttgaatcctcgcaagtttgaaggttttgtacaaaatcatgaactaggagtgctccactgccctggaaatagagtgtctttattctgtcaaggtcgttcttgagaggagcaatgcagcagggggtttttactatcttgggactcacacaggtcgttcttgaaatcgggtacaccccatgagcgcccgcagacataggtgatcacccgtgtgcacgcgcattaggacagcttcctgtccgaaggaacacgcatgagcgtgtctgaagaccctattccgcgcgcgaaaatcctactgtgcaggatccgtgcgcccaatcagggttgtgtacccatgctgcgtgcgcggatggtatgcactgcat

SEQ ID NO: 74168 - DNA, 828 bp, Cannabis sativa
ttaacagttatattttgaatagtataatttaagtgtatatattttaatttatcgttatgagcatatgtaattttttgtgaagaacgaatacacatgtttcgaagattatgtaaatttttggagtgaatgaatgtacgtgctattttgttttttagtgatatttttgtatttgattttttttatcgattgcttttttgtgtagttgattattgttgattaattcacgtttgtgatttgcaggttgctaagattaagctgttggttgttggtcgtcattgtttgtttttcagtttggctttgttcttgatgatcgacgatggcaatcagacatgagggagataatttccagtgaatcaaagatggaggatttgaggtttgaggatgttttcaacactcgattattgatcaatcgtgagaaaaaaattaacaataaaaaattgaagaccacagacagaagatcgattaagaaggagaatagcagagagagaatcaccgagaggaaattagagaataatgtttgtttgaaaaaattatggaattttgtaaggtaaattttatttatacatgttattttttcatattattaggagtgatttttttttttttccatatttgttttagttattttttaatgccataaaaaagtaaatactatcatattttctcatatttataaaaattctcctaaagttaattatcataatatctttgtttagttaacattatgctgtcttgtttgggttattttttttttatataacaacatttttgttaccttcaaaaagtttaagctagcacgtactgtatagtttattaataaaattagta

SEQ ID NO: 74169 - DNA, 793 bp, Cannabis sativa
attatagtttaaatttatgttaaaaacttgtacataagataaatataaattaaataaacattaaagtactaaacaatattgtgcagcagagacataaaattcaacatacctatcagcttctttttgacaatagggaaaggctctcttggtccaagactgtttgggataggttaatcattcccaagcacaagtttattctatggcttgtgttctggggaagattaaacaccaaagagaggataggtaaatacaacacaaccatggatttgacatgtttactttgtggacaagaagaagaatcaagtaatcacttattctttgagtgtgagtaaagccgaagttgtttaaaggggattaattcttggctgcaatggagatcgacatcaactaatatgcagtagttagcaaagtataccagcaagaacaaagcagtaccgactgctacgaggagcattttgagaacaattcttgctgggctggtgtatcacatttggaaagccagaaatgatgtcctttggcataaaaaactgtggcatacaaaggtcatcatacaacgggtacaacaagaatgtaaactcaggattttggggctgccaaccaagcttactgaagaggataaacaatggttgttaggaagctaattgtaatagatttgtaagcacctactgtagcattgtaatgatgagttgttcagactaattgaaaatgtaattagctaaggtagagcactaagagacatgaggaaagtgaattgaggaagggaaatttgattttctatacttaaaaaacctta

SEQ ID NO: 74170 - DNA, 986 bp, Cannabis sativa
gcccaaaccgaccgatgtacagtcctagtgtgatattgtatggtattgtatgataaacatttccttactgagcttttagctcatccccttattttccccaaacaggtattagacagggaagtacgtatagtgagcagggtgagttctggtaggattactttcccccaacatgtgtagcgttatctggttatggttataaaataacgtgtatgatattattaaaacttggttagtataaattaatgatatgtgtgatattgtatggtattgtataataagtatttttttactgaacttttagctcacccccttactttcccccaacaggtattagacagggaagtacgtatagtgagtagggtcagttctggtacgtatactgtgaacggctacgatgggaaaacgatctagaacgccgacggtgccttgattttattttaagcagttgataaatctaaacacagtggaaatgtattatttgaaattatttacttattgtaatttgttttacaaataaaagatcattcgctattgcattttgatttttaaaacccactgctatatttcaagtatttttttttatcttttcaaattatgcatttaaaatagtatttttgtaaagtaaggaaaaatagggggagttacaatttcggaagattagagttgttgctaagcatactccgcaccatgtccattaatgttcggtttcttctttctgcaacacaattttactcgggtgtaccaagcatggtgtaatgggtaataatccaattttctttaagaaactttgcaaatagaccaggtacttgtccatcttttgtatataccataatactctccacctctactaatttcattatcttaatatgtttgttgcattgtttctctacttcagctttaaatatctttaagacatttaaagcttcacatttattataaagtaagtagagatacatgtagacgtgtgagtaatcatctatgaagga

SEQ ID NO: 74171 - DNA, 584 bp, Cannabis sativa
tttttttttaagttcaaaaataacagttttttttggctgagtttaacggggttaaatacccaatttgtttttatctataatttcctttttccaaatctcaaacacagtttatagcatgcaaactcatggaatttttccttcccaaaaatcaactatgaagaaaagcaaaagtcgtgagtacaattatacatggtattggaatggaaactttgtttgttcctcccaagcttaattgatttcgtttgcaatcacatggagatgtattaaagcgttcccaaactccaatctgaatgcaaaatctcaaatctgaaaattacagtgtatatagttttggtacccacaaagtctacatcatttttattttcagtatgtaatcttcaatcgacagaggaagacaaaaaaaaattcatacgattgaaatttttggcgattgggagaggggaaaaaaattcctacgattggaatgtttaatcccaatttcattaattgaacgcgattgagggaggaagataaaaaatttctacgatggaaatgttgggaatttcagcaattgaatgcgattgagggaggaagataaaatattt

SEQ ID NO: 74172 - DNA, 822 bp, Cannabis sativa
cctcaaccccaatgttggtgggatgattccaccttttggtaggtcgggtattagttcttcctcaaacccttcttctttcacctcctattccactgatttcattttggttgctgatagaacaaaccttgcttgctttgagtctatgagagatgcctttcccactcaaatcaatacccctgccccaagctgtggaggtctagctcttggtagcaatactatgaagctggaagttggtgctcttacaggccagccagatccttctatgaaaggaaagggtttggcctcggcttcaggggttaaacgcccttcctttcaaacccatcaagctattgttggtggctccttgaggtcttccctcaagcgagctcgtgctggtcacaatgaagatggcccatctgcaacaactttagaacctgaacaggcaggtgatgcggagcacacccgcccagaaaaattattttattaagctagaatgcacgtggtttagggagtacacgtgcattcagacggctctcccttttggtgaaagatcacaaacctctactcctttttttgatgaaaactcagcttcctatccatgtagcggacaaacttagggtcaaccttggctttgaccatgcttttgaactccctaggaagtattttggagggggacttatgcttttgtggaaggaattgtgtaggatgttaatatttttaactttttcatgtaatcatatagactataatacaactcttaatgataatgaaatatttcatttcactggcttttatggtttcctgctgcctctcaacgtatttttacttggaatcttcttgata

SEQ ID NO: 74173 - DNA, 613 bp, Cannabis sativa
ctcaccactaagctagttttaatagcttatcaataagtatctgtttaaatcttatttttaccattgttaattatttagaattttataaatatatacaacattacgacatatactattatggaaagaaattgaactaaatactttcttgaataccttaacaaataagaaatgtaccaaaacgatatatattttaaaggatatactatacatttttccaacatattttaggggcactatggccaacaagtaatcctcatttcatgaattggaccaggctagagcaaggaaagtgattgcttaaacaaaggcagtaaccaaaatactcaatcattgaagattattactattcattttcctttgagtctcagttgacacttccacttctttcattccatcataattcagtttaagaaaaataaaaaataaaaggcatcacttcaaaattattatgactaaattataggtaagaaaaataattatttctacaaaaatatcataatattaatttttcttttcgaaggaacataatattaattgggaaatttgattttctatacttagaaaatcttaaaattttttccctaaaccaaaaatttaaaacctaaaaaaacta

SEQ ID NO: 74174 - DNA, 639 bp, Cannabis sativa
ataccctttcggagttagcggatattacagaatgaaactcatctaagataaactccatgaaatcagattctgtaaaacaagaaagttttagaacctcgtcagttttatcatcatcatcatcatcatcatcatcatcactcatgtgtttactctcttctttttcttcatcccagttaaaaagtctcttcagccggcttagctcatcattaggtaatttgtggattaagtcgtttaaagtgaccaaaggagataatgatgtagttggatagtcaatgtctttattaggaaaatcccaagcatcttctcccaaaacttttagtttcacatctctaatatcacattttaatacattcatcacctatgcataatcaacaaacatacaactctaattattttttacatattaaaaactcaatcaagaaatatataacaaaaacaattgtatctacattaattaggaataataaaatatatacttccagtcatatatattacacggtcttttgatttttaatatatttaattttcaaattctcttcgtatattaattttgatggattaatgattaaaatatagtttatttttaagtaattaattatgtccatttctattttcttcttttttaaaaacaaaatacac

SEQ ID NO: 74175 - DNA, 1030 bp, Cannabis sativa
caagtgtttaaattaatttttttttgtgaataatacagtatgtgtaaattattatcaaactatatataaaagtaaatgaaattataaaatagtcaaaaaagatttatattttatagtacttagtttatatccaaaaaaaaaaaaaaaatagttactttatatatagcaatttttctcttttaatgacaagtttactacacattatttaaaattggaacaaagtaatgaagaaatataacggaataaataaagaataatcggaatcaatatttgtaatatgttttccttcaaaaaaaaaaatatttgtaatatgttgtttactaaaattgtttagaaatggaatgatagtgatttatcttgtttactttatcagcaaacgtaatcagaatgtttaaattgactaaattacccttttgagttaaactataatatatggtagttattttgtaagacatataaaattgtcattataaatttaatattaaaaataaaataaaaataaataaatttcattacccttaatgacattccttacaaaattgatggaaaagttctcctttttttttttcttatttaattaatttctctatttcttaaatttaataaattaattaaacaaatgtaaatgaaaaattttctttccattaattctcattgtttattccaatatttaaaaatgtgtgttctgtctgattttttttattttttggaaacccagaaaaaagtgttcagtctgatctaatacactccttccttattctgaaaagagaaaaaaaaagttttgttacaggaaataaagctcaactgattcaacttttgacaaaacaatatgggtttcccgatactgatcattatggtgaaagcgatatggtttggtaacccatcataatccattatattaattaagaaccaactttacttttcaattatattaaaatttgtacgtacacacatttaagaaacttaactaaaacaaaagtggtaagaaaatatagatagatatcaatcatagcattattacgaacaatag

SEQ ID NO: 74176 - DNA, 1117 bp, Cannabis sativa
atattctatacttgttttgtttattttttactttgtgtgtaatgaccacatagttaaatcatgtgtattagtagataattaaggaatttaattaatattttatgattatgtgcttcttattagaaattagggtttattgtcagaattaggctttatgaaaatattttcttaattatggagatatatttgaattttaagtgtattacatgtgttacatataaaaatttatgcttttcatattttatgcttgataacagtgtaatgtgacgttttggctattagagtcacttagatatagtgaagtatcttagaattagcggggcaagatagttagacatttaattttttttatataattttgtatgttgtaattatttaggaccacatgtaaatttttttaaaaaatgtgaacggtttacaatgtcaaaaataagattcaaaccaatacttagcacatttataagaaaaaatagttccgagtataacaaaatatttaaattttattcttacaaatatattaatatttaaatttttatttttaatattgtaaattattaagaattttttaaaaatttataaataatctaaataactataaaatacataattattacaagaattaattaaacaaatatcatatatactaaaacaaatacgattgtaacgaaacctcttttagaagtgtaatatagatatttctcaaaagaaaaatattaagtattattgtgctgacatattgccaaaaaaaataaaaatatgttagatatatttatttgtgctgaataacatgatttaaaatttattaaatacaattacatccttttaaaaagtgataaatatgtatatttaaaagagtaatattataatttaattaattaattttttctcaatttcacatctaatatcaaataccagcatttctcttcctctccatcttctctaagctttccatctatctattttctttttctttttttttttttaaaaaaagaacataaatgaaaattttcattaataggcaaatagtacatacttatcaaactgtttacaaaaataataataaaaatcctaataacactttcaactaaatattttcttaagtggcatttaattgaga

SEQ ID NO: 74177 - DNA, 502 bp, Cannabis sativa
ctggtaaaatatatccaacagaaggctgcacgcagccctagatgcgcgcggaagggaggtctccaaccgagaaaactcggcgtgtgcagcatgtccctgggcgagctgcagggtgcacacgggtgtgagacacggtatcgtgtccgaaggcatgcgcttcagacagggtcacgcgcgcggattccctccttgtccgagtccctgtgcactcgatgcaccattgaatcccaaaatttcaaaatttcataactttgtcaatttttatcagaatcgagttctgtaaaaaacaaagttgcttaatttttcacaatggatccaaataaaatattttcagaacgaaaataaaattattttcatggaaaaattttgtaattcacattcaatcatcaaataatcacacaaaaccaacatgaacacatctaaatcaacatgcaaacaacattcatcgttttaaatccatatttcatgaaagtaaatcagtaccatggctctgaggccagtt

SEQ ID NO: 74178 - DNA, 800 bp, Cannabis sativa
tgccaccaaagaattctcattagtgagcaagcgccacccttgtttacccaaaaaagccaagttataatcccttaaattccgaaacctaagaccaccagcatctttatgatgacaaagctttctccaactcatcccagtaacacctttagttgaatctttagcttgtgatttccaccagaatttggccattagcccctcaagactagagcatatttctttagtaagaagaaatacattcatagcatagctagggagagactgtgccactgactttatcaggacttctttcccagcttttgaaagaaatcttgtctcccaactttgaatcttcttgatcatcttacccttgagaaatcctagtatagtgttcttactccttcccatggtgcatggtaatccgaggtaagagctattttcggaagcaggagccataccaagtaacccacacaaataagatcgatcatcttgctgaacattgttgctgaaaaagactaaagatttttcaaagtttattttctgtcctgaagctcgctcataaatatccaggagccgaagtatactagccacctccatttcgtttgctttgcagaaaatataactatcatctgcaaacaatatatgagaaacaccaggagcatttctagctacacgacagcctgttaaccactgctttcgcacaaacatgttgaccagcgaagagaatccctcaccacaaataagaaacaaatagggagatagtggatctccctgatgaatgcctctacttggaaatataggacccatcactctaccaccatgag

SEQ ID NO: 74179 - DNA, 1375 bp, Cannabis sativa
cgaagactcgtttgactcattgttcagtaagcttttaattaattgataatttgttaattatctaggttcctgattatatgaattgtgttaatattggaaatgtgtgggaaggattatgatatatggaaatacttatcagtattgttattacctggaatgtgaccgcaggtgtatagattatgcacccaaggcggactggtagaggtaaccgtgagctagctgggctcggggttgctggtgagagcgagaaccctccaccaccaccaaactgagaaagtatatatgctgcgatgcaagagactatccagcagcagggtgaacaaattagagaattaagggagcaacgatctcagcctactcaaaaccctaatcatgatcctctggcacctctggtagtgccaccggatgcagggaatcatttggaaccgttgtatgagtggttcaggaagcaaaacccgccagtgtttgagggtggtgctgatccactcaaggcggagcagtggatgagtatgataacattcatttttgattttatgcgggtcaaggataatgatcgggtcaggtgtgttatctatatgctgcgagatgatgcccgtatttggtgggagattgtgtctcagggtcatgacctgaataacatgacttgggatgccttttggaccttgttttatgagaagtactataatgagtctattcgagcagcaaaggcagaagagtttatatgattgactcaaggaaacatgacagtgacagagtatgccactaagttcgatcgactggcaaagtttgcttcatatgaggtggttactgaagctgctagaaaagcaaagtttattcgaggattggatgaacatatcgcacgggatgtgattgttgcttctaaacaacatggggtttctcggacttatgcccagatagttgaactggccctagtttctaagggtgcaaaagatcagatacgaaagaaaaatattgccagaagagattcatggaagcaaacatcaggtgttggttctggtagggatactgatctcggtgaccacaagaaaaggcctagtgaatcatcagttgtaggcccaaacaaaaggctccagggtaaccaaggcttccatcgtggtgggaacgaaaactagcagacttttcttgaatggccgagatgtaaaaggcgccaccagggcgagtgtcaggccagggcctgtttccacagtgggatagtgggtcacatgaagaggaattgcccacaactactacgaccagagcaaaataaggatgatacacctgctcctgcctgggtatttgccctgacccaggttgaggctgatgctggtccttccactgtgacaggtcagtttctgttgctggtactttattgact

SEQ ID NO: 74180 - DNA, 867 bp, Cannabis sativa
aagatagttagggtgttacaatcatgatggaataaaatcgaattaggagtgtgagccatgtattcagaaatagaaaatagattcagttcgaaacttggtatgtacaacaccttatggagagtaatctgggaattaatgtggatagttccaatgttttggacaagaacaagttgtccatttggtagtaaaacatgcttaggaaaggaattagttgtaaatgtggaaaagcatgctagattagaacacatgtggtgtgtagcaccactatcaattatccaaggtatagtatgtgaattagaattgttacctgcaagattagaagctgcagcaggcatgatgttgggttcagtatgggtgatgtggcttagttgttgactgaggagagaaatcaaatgctgacattgagtagataaatccgcattgacagtgagtccatccgagtctggtttggggttgctggaagaggcatggtttgccttagctttgcccttttcttgtttctttttgtgtccataaccaggtgggaagccatgtctgaaataacacttatcgactaagtggcctggtttgccacaattggagcaagatggccttggtttcttggcccttgaggggtttgtagaactggcagcagcagctagagaaatcacatcagtagaaccaagtgatctttgacgttcttcttgaacgatcatagcaaagacatgggatagattaggtatggattcattgagaaagatttgatctcgaaccgaggcaaaggattcgtttaaaccaatcaagaattgaagcacttgattctggttgtagtaatccaagaatattttcattgcaccacaagtgcaagtggttatgggttgaaattct

SEQ ID NO: 74181 - DNA, 584 bp, Cannabis sativa
gtaaatgtcaaaggggttcatacacacaaaaaggatctagttttgaatacaagacttctgtttattggttcctatgaaagtttaattggggttttcattgacttgtcattcgagcaatgtaaatatgtcaagagcccgttggtggcaagtaatataagtggcttgttaccactatcgctgctgtcaaatatgctgtaaagaatttgattggtcatgaaaatgatcagaattaaggctccacactgattttaaacaaactcagaattcgtagatgggatgtcatttaaaaggaatgaacatttattgtacggtattcattcccaggagaattttgtgggtacatatagattaaagaaaaaagtggagtaaaataattcgccaacattttataaggagtgacattctatctcataaaaattgaaaacatatgttaagaaccatcaatttgtagaacatacggttctcatcaagttgaactgcattttatttgatgttttaaaatataaattgtcttccttacccaaaatggaaaaaaagagcaaagtacagaaaagtaaaataggggctggtggaagttactcgta

SEQ ID NO: 74182 - DNA, 671 bp, Cannabis sativa
atatataattaaatattattataatatgtataaagttttaattgtatacaagcagtcctattgtaagagtatacaccttaaatcttaataaccacacgatctataatcaatggttaaaaaaagttccctaccggtagggaacttttgttaggtcctactatagtcttgccctatatatatatataagatacaatgatgacaagaaattgaataatcagaatataaaaaataatatattaagggaaactcaattctttccatgagtcaccttgtttatttatttttataataacattttgttttaacacaacaatttaaaaatttgtatacatacatatacattaataatataatttttaaactttttattaaataaatattaaaacacatttataatattaatttttatatcctcttaataataataattactaattaggaataaactaaaaaatatatatttttatagaattttattttttattaataaataagattgttaataataatatataattagatgatataatttcagtattattatatattaactttaattttttaaattatcatttattataataaatagttatttttttattataaagtagaatctctatccaagaatacacttgagaccaagtaaattatattctaattgagagattata

SEQ ID NO: 74183 - DNA, 1118 bp, Cannabis sativa
caaaaaagtcttgaattattatggtggataaaggtgcttcgctaaaagttaatgcgagctcgattattccttgactggtgacactgtcgccagtaaatccgcaaatatttacaatgtaatgtcttaatttgttttcccatcttcttcagtgtttccctgtagaggatgttcactgaacttctgttgtccaccaacacaccttttatcctcttgttagcgagctaagtggtgattaccaatgggtggttcttcctctttgctctcttggaaggttctagagcaaaggtagactgctcattcttcacttccttcacgtacctcttatgggaattattgctttttcctacaatatgtggccatcctgagataaccaggatatgctctccctcaataggaggaggttgtaatctctcggctcttgggttgttgggaggattgggctggttatgtccattgccctattttttcacatattgcttgaagtggcctcgtacgatgagactctctatctcatccttcacctgacgacactcatatgtcatgtccctgatgtctttgtggtacttacagtatctagttagatctcttttacgcctcgcgtgcctcatgggctcaggtttactaaatgcaaccttgtgctcatgcacgagatagatattttctcgagtttcattaagcttcttataaatggtgtaaacttgcacgtacttattgtacttcttttgtttcttcttgtctttagatgagcccttagagtcgtccttcttttttgagccggaggcccctgggttatcagctttagtcgagacagtacttgttgaaatagtgcttggtttgattcctaagccagtttttaacaagttcatctctttttgagcttcttcctttcgaacaaacacctgagccctctcgttgaactcggtgatatttttcactagacaaccctataggtcatcccactgttcacctccagcagtggagagattagtagtgatccctgcctgaagggcagtaagctgggtgctatcatccttatttcgtactctcacagcagccatgctaaaacaacttaagtaggccttaagcgtctcgccaggctattgctttatgttggtgag

SEQ ID NO: 74184 - DNA, 681 bp, Cannabis sativa
tatgggagattccattactaagaacagagaacaattgaattttctcaggatatttattgaagttagaatgtttcattaatttcctgagcttatcacttttcataatgaaatcaataaagagattaaagttagggtgaagtatgaatggatcccaatggtgtgcaatgagtgcaaaaacttggaacatattgttgtggtttgcaaaaagaatgtgaacttgcaaattactaactaagacaaagctaattttagtggaaaagaagcaagagaggaaggtggaacaagaaaagagtaaagcaaaggtggatgattagaagtttcagaaagacaaacaaaatggaagaagcttataaaggtcacccaatcaattgtgatttctaataacttcaagatttggtaggaagtggaaaatactcactgattgctgtagaaagtggagaatgctccctgattcaagctttggtgggaagaggaaaaggttctctcactgagggaaataaggacatgaatcaaaaatgggggagattctcctattttaaatggatagacccataaattggaacgttcagggaatcaacaaactcaataagcaattacaggttaaacatttagtctttaaaataaaagtgggtttagttggtgttctagaggtgagagttaaagctcataagagcatgtttg

SEQ ID NO: 74185 - DNA, 976 bp, Cannabis sativa
aggagatacttctcagacggtcattcaatccctccccacctatgctataagtatttttctcattccccttaagatttgtaacgagattgaaacattaatggctaacttttggtggaaaacaacatctagtaaaggtaatgggataatttggatgtcatgggataggatggctgttcacaaagatcttgccttggctttcgtcgtctacatgattttaatcttgcaatgttagctaagtaaggttggcggctacttatctcaccaaactctcttgtcagccaagtttataaagcaaggtactttcctcgatctaattttcttgatgctgaacttggtaacaacccaagctttgtctagaggagtatatggcaagcaaaagacattattcagattggtgccaaacgcattataggatcagggactaccacaagtatcctctctcatccttggtttcctgacaactccaatctgtttgtcacaacaactcacccgagcttgcataataagatggtaaactccctctttaaaattgataacttttcttgggaccgagagattgtttctgatatattcaatatgcgcgatgcatctttgatttttgggctgccattatgtgcctctgctggtcatggataggggaaagcaatggcactttctcggtaaaaagtgcttatcttttgctgcagaaatcaaagaaacagcatacgagtattgataattctggattctggcgctcactttggcagctaaaaatccctctgaaagttaaaaacttcatgtggagggttgtttcgagtgcccttcccacttgtttacaacttgttaccaagcatgtagacatctcttcgaactgccccatatgcaaaagccatccagaatcggtttctcgtgccatcatcagctgctccttagcccaatcttgctagaattatgcacaccccacggtaattactgcttctaatatcacagtaggaat

SEQ ID NO: 74186 - DNA, 698 bp, Cannabis sativa
tcttattgatggtaatagcctacctccctttagctgtattgacttgtgagaagatgaacaagaatattttgatctctctcaaaagctcttacaatgatctttgtgtgtttcactcttgaatcaagatttctctctttgagtgttctctctctgaataaaattcgtgtccctgaatagtaaaatgagtccactatttataaggattaattacatcaaattgattttcctaaatcaataaaaaaataaaatagaaagttagtttattttttttatataattataataagcaaaaaggaaactaggcaggttgcccttctacactaatgatacgaatctatcacgtgaatttagggatagtgtcgtgacttgcaagcttaaggatatagatatatctctaaaattgtccaactcgcactccctggtcgatacatacgagccatctgcttgatggaagttggtcggatgtctatgcatattttgctcagatgttacaactctatttgtgagcttgagtatcaatcttccctatgcggctcattatgagtaggattgccggtctaggtaataaaatgtgttccccatgtcacctaatcgatgccacatcgttgtgtaaaaatttggataataataaataaacttgatttttcatcaaaaaatcttaatttatttaaagtatttaataaatttttaattatttt

SEQ ID NO: 74187 - DNA, 846 bp, Cannabis sativa
ataatgggtacacaatattacattgtcaagttttgacaaatacttgaggaatacactcaaaactctcacactcactagtgtggcaatctcaccatctctctacaaaatattttttataattttgtaagaactcgctttttctcattctcttagatttctcttactaagaggtattctcactatttttctctcaagagcctcactcttcactcttggaatagcttgtgatgattgtaatgggatgaacaaatgaaagggatggagctctatttaggcctccttggaagtatgaacaagacacaaaaatcaatcttgcattaaatgcataattaaaaatgtgtatatgcctctagtcaaaaattactattgtaactttttcacatggtgaaaaacaaccattacccatcaaaattgatgacaattttatcaattcatcccttattccaatattcatttcaataataaactaaacatcataattaatttttattactattcttatttcattacattctaccaaatcaaatgtcacactaactcctacctcttacttgtctaaggccactctataactaaatttataaatgagttgtttacagtgtctcactaagtttagtggatattgtagaccaccctatttttttaaatttttttttataattaaataatacttttaaaaaaaaaattaaataattattggatttaataaatatttagtattaaaatatttttattatattaataaaataataaaataataaagagtataaaatttagtagaaattttaatattatgattagaattgaaaaaaacaaatcgtgctaaaataataattttttagtgtt

SEQ ID NO: 74188 - DNA, 1143 bp, Cannabis sativa
actcggataccagtgccacacactggaaagatgccccaaggagatgagcgccaaaaatgaaacgccacatacaggacaggaaaagatgttcaaatgattcctcccccactccacataagggacaactagtgtcctctatatggaatctttttccaatcacagctctaaccgggagggcaccagaaaggatacaccaccacaaaactttgtgacgttccaaaacgttactattccataacttgttccagagtttcggagcgacctcgcagtgaggcgctctttccaaggcctgaaccagataagcagatttagacgagaaacgaccggaactttctagcgtccaaacccatctatccgatccatttccggaggggtggcctcctttaagaatgtcggagactgtttcgttatcaaagaggcgacgcaactttaggacatcccattgcccattgtctaacaataagtcggccacaagattggaattgggggcaagaaccccattctgtttggggcagaatcctttacgatgcggaatccagggatccccccagatcttagtattctgaccagtggtaaccaacttgcaagcacctttcctcaagatggaattagccttaacaacgcttttccagaaccaagaatcagaatctttatacctgcagctgagaaggtcattcccttttaggtatttggctcttaagactctgcaacacaaagattggcatccattaaggatattccatccccatttggccagaaatgcctggttcatttctttggtttttcggaaacctaagccaccaagcgattttggaagacacagtttatcccaagccttgagatgaatcccatgatttcctttctcgaacccccaccaaaaatctctgaccataccatcaatcttattaaccatgcgagcagagagttttgttgtttgcatagcatacataggcatagccaatcccacagatttaatcagagtagcacgcccagctttggataaagttttagctttccacccctgaagctttgacgtgagattgtccagaataaaattgaaatcagcatccttctgcctggatctaaacagaggcagacccagatatttgatacaaccttcgggggaatcaatccccaaagctt

SEQ ID NO: 74189 - DNA, 797 bp, Cannabis sativa
gcacttatacattgatttaaattatttgaaaaactttaaaattaaaaaattatttttaaaattttaaataataaaataaattattaatgaaacttgtcagcatatatttatctacattactcatgtgtgaataatatatagtattcatattacatttagtaactatcacgccataatttataattttaataatttgatcaatgttataattagtgtgatttatcaaataataataaaataaatcattttaaaatttaaaaatatatacattttaaaactatgtttttgaacaaatatcttaaaactaattaatgaaataaaaacaatactattagagttagttattattgttaattagtgattaattagttggtaaagttagttagtctttcttcctaactaactaagctcctctccctatatatatagacgaccctgtattcattttttcaatcaatgagaaataacaaatttcaattcttttcttctttctgtttctttctctcatatggtatcagaagtttctctgcccagtgcttccatggctagaccttctactcgatcgcaagatggtgctcctccatccttggtcaacacaccagcagctgatatcacgtccgatccacctgctgctgctcctaccatgaacaattcagttgttcctcgaagaaatatcaatgccagacctccatcgcagagtgttacgtgcagtctatgatggcacgttacaagctaagagatgcccacaagttggccaagtggtggcgcatgttgtggtgcatgcaggtggcatgctg

SEQ ID NO: 74190 - DNA, 557 bp, Cannabis sativa
  modified_base (290)..(291): a, c, t, g, unknown or other
aatcaaaaggaggattagcacgaagacgaggatggacttcgtgcagaagttgaaggagtttctggtctattagatgctcaggctcccaagactcaccagggttcatctacaaaagacaacacgcaagatgattgttggacggagtatcaagcgaaaaaacaagcaaatatgccgaccaggaatactcaacatattaaagaactatcatgttcaagagaagtctaagctcaagaagccagaaagtttctcttgagttagggcaaaaaagttcatgaagcttgaaaaaagcnnaatggaaaacagacgcaatgtagttctaaacgagccttacgattgaaagctaacacaaggacatggaaaagaagagtcatagaagtttcaaatcctagggtctcctacagtgttcttgccacagcaaagatacattcaaagcacaagcatgcaaaggaaaagcataaaggggatcagaaacttactcaaagattcatgtgtccgtattcaagcaagcctgaaatcgtctgtaaactcctcagcaactttgaagcctgaaaactctc

SEQ ID NO: 74191 - DNA, 1259 bp, Cannabis sativa
ttttaaattaaaaaaaatcatcttacccacatatctctctaacaaaccatatatccccaaattatcaaatccaattctctcgctttggtttacgatattgggtgactttttaataataataaaaaaaaaaatcacaaactcatacgtggccattccaatagtatacaatatatgtagctgataaattttgatcgcaataaaaatttaccaagaagaaaaaaaaggaaaaaaactgcaattgcttctcatctctttcctttcctcccgtctaatgtatttcgaccattatttttccagatccaatccatccaaaaaagagtcaatgcatttgaggctttcggctacgatgtagaaaaagggaaaaatctttttgcttatggaattaagccatcatcgatgtttatgtcaaggcttccttactcctttcaggtctgtccattctaactttaaatatcactcctatcggtttctttgtcattttgatttttgtttctgaaattgattgaattcttgtaagtgtagaaacattgtcgaaccatttggaggcgtggttataaagaagatacatggcggccacaacaatcgactcttcctaaaaagttttcttttgctgttcaaatgaaggaattttgacttgattctaatctcatctgccaaagctttctccatcggttctaaaatctaactttatttctcaagttttcttaatctttcttagcagccaatcagagtagtatttcttttgactaagtatttattgtgtttctgtaggggtcttcgattacttactaaataatgccatgcagtgaagctattctcaaagcatatgaaggttgaagaacaggtagtcttcaatttcttggttcatcattttggttgatgacttattactatatcttattcacgaatctgcttttaatgagctagagcctagatcagagagttgattgtaaggttttaaaaggttgtgattagtgtaaccatataaattaaagtgtgaatgttcagatgatgtctagcagggggatggtgttgcgattagtcaagagttagtttagatatttgggctctgttgtgcgaacattgtgatagaatcttgaatttacattgatctagaatttgttataaatctattttaaagtatctagatttttcttataggaaattggtctgcttgctaaggatatatggttatgaaaatatgtgcacctaaaatatgcacacaaatttaacacacaagttatttgacagtctttaac

SEQ ID NO: 74192 - DNA, 662 bp, Cannabis sativa
agttgaattgaatatatatttgaattaatgcaaggtcgtctatatatccacatccttaaaatattttcaagtgatgtatcatatatgttatattcctcgaaacttcccaaaaatatatgattatgcattgtcttttttttcttaattttatttgttagaaatacttaaaattaataaattagctatgaagatatatattagtagtgattcttaagaaataagtatcactctattctcatttttcctattaagagaaaattagagaaatccaaggtcgaccctgaaatatagtggaatatatgaaaaaaatacttttggatccttatttagaaaaaaaggttgtatttttcaaaattattaataaaaattataattttaaaaggggagaaaaatttaggcccctacactagctaggccctaggcacatgcctagcccacgtatacctgggatatagattaagatcattaataataaatggattaaggtacgcttccgctatttgagttattctctttgaattaacaaaaatacattctttaaatctatgaatatacacttataatattatgtaatatgtttgtttatagaattaaatcttgatattgcatattatataagtgataaaggaatttaatattattgatcgattataaagtagaac

SEQ ID NO: 74193 - DNA, 824 bp, Cannabis sativa
aggaccttaatgatctgagaagagttagtgttatttttataatctgtcatcacttaaagggaaaatattgatattttacattaacaattggataattgaaataacaggatttatattcctaatccttcattcatagtcgattacatttaaacattgtttcttttattttcttttaattttctattaattattttttcaactttgttttagattcaatcaaatagaaacacaaatctaattaagtagtactcaatatcaattctctatgaatctacattacttgtgtgagtatttaactacaataaatacgtacacttgcgtagattataattctgagtaacaataagtatgttgaagtgtcgtcttaaaaaataattaagaaaaaaaatcacaaaatatgttaattttggtcaaaagaggtggggcttgacaatagaatgataataaatctgtcaaaagataaagtcgtaagaactatgaattttgacaaatatattggaagttttcttaacctagaggagcactaacagagattcttgaaagcactcacctgagttggaattagacaaaaaccaatatcttggaaataattaaatctctttcaattggaagtggaaaacttggttgattaatatagtataagattgtatggttattctatcgttaaaagtcaatagtaagtaagtagttaggctacaacaactcatggtagggttgaacttattttaaagagtttccagtgcatttatgatattttagcacatataaggtatagttttagttaaaagtaactaatcagcattggaatataattaggtttcaaa

SEQ ID NO: 74194 - DNA, 1202 bp, Cannabis sativa
tatttctggccgaccatgattgaagattcaaatgcctacgttaagaaatgtgacaaatgtcagagattttcaaagatacctcgtgcaccgcccaacaactaactcagatgcagagtcgttgtcctttcgccatttggggaattgacttaatcggacaattgcctaaaggcaaaggtggagtaaatacacagtggttgcagtagattatttcactaaatggacagaagctgagccattggcagccatcacatccaagaaagtgcaagacttcatggtgacaaatataatatgtcggttcagattactgtacaagatagtctcagacaatggcaaacaatttgacagtcaatccttcactaatttctatgcaaaccatgggatcataaagagtttctccgcagtagcacatcccctagcaaacggtcaagtcgaagcagttaacaagacactcaaagacactttaaagaaacgacttgaagatgctaaaggaaactagtcggaagaactcccaaaagtattaaggtcttattgcacaactaaaaaaatagtgactggacagattccatttgccatggcatatggttatgaagctatgctgcccgtggaattagaacttccatcccacagaagattgacatatgaccaagattggtggctcatcaaacctaaaattgaagaaaagcgagctgcagcaaacctaaaatttgtggctcatcaacagaaggtagctcggtactttagcaagcaagtgaaagcccagaaattctttgagggagatatgatccttaaaagggtattcttgaacaccaaagacaacacggaaggtgtgctcagaccgaactgggagggaccacatcaactggttaaaattctataatcaagagcatacaaactgggtaagtacaacaaaaaaatgcaactcgttctggtaccaaggtactggaacaaggaacatttaagaaaatactaccaataaaagtaacaggtcggatgaccatttatttacgaaacgaaagaacatttactcttaagtaaatggcattctaggcggactacgcccaaaggtttgaatgaaatgacaaagtactcaggtcggatgacaacttctgaaagtacaatttctattttatgtaatttattttgtttaaattaagctaaagatcggattagatcaggtcaatagcttttatgtaagttactat

SEQ ID NO: 74195 - DNA, 1077 bp, Cannabis sativa
tcattgagtattaaagtgtcattgtcgactaaatgtgtagatatcttaagagatatttctaatatatcaaggggctaattaaatataaatacttaaaattaataacctagttatgaggtcatatataggcagtgagatctccaaaaaacaagaatcactctattctcatcttcccccatcaagagagaaaactagagaacactaagttttgtattcttagaagatcattaccctaaatcaccacaaagatcatctctattagatagattaagatcatcactatctatagattaaggtacgcttccactatttaagttttttttttttttaaatcaataaatgtattctttagatctatagttatacacttataataatatgtaatatgtttatctatgaaattgaatcttgctattgcatattttatgagtgaagaattctaacggcagcatcttgggcgtggtcgacggaagaagagagggcgatttatgatattgagcaactgagagagacgacggagctttggttgcaggccaaaggagagagggatgacacgtaaggtggagagagaatcactgggcttgggcgcaatcgggaatggatgaggtggaattggtggctcgaggcagttttcgacgaagcatgtggatatgtttaagattgagatggtacgactgagagatcgagagggtgggtggtgagttttgatggctggttgacaagatggggttgggagtgggaggtcaggttagggtgaatcaatgctggggtggagatgaagaagacgaagaagaagaacaaagaagaaaagaaaaaaaaaaagaaagagaaaaaagaaaaaagaaattatttttaaataatttatttttattttttaaattaaaataataatttggactaataatgcttcaacatgtgataattctaaataagtaaatagatcagttaaaattatgattaacggatctacaaaaaatgtgactttaaaaactattgttattatttttcgaaattagagactaatttgcattaatatacgtttttttgaggatttttatcacaaatttctctttaaat

SEQ ID NO: 74196 - DNA, 1169 bp, Cannabis sativa
  modified_base (98)..(111): a, c, t, g, unknown or other
taaaattagataaaagtcattaaatttaacaatcttaatagttcaggcggaatttttaactgctaaaaaagttaagggggcatgatttagtacatgtnnnnnnnnnnnnnnaaaaattactaattagccttatttcaaaataataacattctgcatgataagtttttgttaaaatgactgatattaattatgaagctgcactttttaaatattttaatttattaatatttgaacaacatatagtttgaagtttattttatatttttaaataaatcataatggaatttatttaaccaacttttctctatcaaattatgagagaatattttaattgattttttttagtattgaaaaattataaaatctcataattcaatatataagaaaattatcaatgtagtattttaaatcaaataacatattacattagattatattaaattatttataattaagcttattaatttttatttcttatcatgtattttaattaaatcaacgttaacatcataattattattttttatttttattatatttattaagtaaaaattattatacacgtaaaattataaaattgatttaatattttttaatgaaattattgtattaatgtaagtgaagcttcaatagtaatcacacacacaataatattatattagtgtaaaattttaatactgtaagtgtgtgcgtagcaccaatggtagactgaagattcaatttgaggtagggcggcatataatttttttttattaaaaataaaataatgtgctaaaattttcatcaaaattaatggaaaagtaaaacttgttcttttatagcattaaatataatacaaaacaaatatataatctatatataacatgtatataaagatgaatgagtgttttggttttagttcaaaagatagaagagttaataaatatattaagtcaaaaaaatcataaggttaaaagataaatattaaattatttaaattcaaaacattaatactttgaagagtcacacacaaaaaagaaaagaaaagaaaaaaaaaatgaaccataaaaaaaaaccacaaaaaaacaaaatagttgaaccaaaaccaaaacactcattcatctttatatagaggaaattacattttataccccttttataatgtccttttttatttttaccctattttt

SEQ ID NO: 74197 - DNA, 787 bp, Cannabis sativa
ttggcagggttggccacatccatctaatttatggagattctagttgtggctggaacatgaacatcaggatcaacagtcatagggtcttgaggaagatctgatgagacaagttgtagtcggagttctccttgagtttaaccatggtgttatatcagataaattgacaactcactcttaataaaagcactaaaccgttaacctcagatttggccaaccgatagcagagtcgtatttattattgatgcttaccatgtgtacacaataggaataggaaaataaaagagacacaatatttttatagaggtttgccccccttagttagcaggtaatgacctactcctcttttggttgtatttataccagagataataccactcagaccacaagtgttgtggattctgaagtggctctcaaaagattacaatatgagaatccagtaggcaaatctcaagtgagagagaggcctttgggcgcgtagaagagagagacaggtagagctaggattttagacttagatcttaagagctttagggagcttagagacttagagaaactagggttaggttaatgctctttatataggagagcttacaagagattaataaccaaatatccctcaaaaataagaaatatcaagtatttgttacatacttaaataatagatattaaatagggtaattatcccccaagaataggggaataactgatattactcccctactttcgttggtcattgaagcccgaatcgtagcttagcttgttgtcttggatgaaggctacacaccaa

SEQ ID NO: 74198 - DNA, 738 bp, Cannabis sativa
aaagtttaaaaacccctttagtctcagttataaatcgaggccaaaaagatattatataccaaaatgaaaataacaaagccccgcctctttcactttttatctcccgcctctattatttttttttttctattgaaataaacaaaacccaactgccctaaaatacccatcagctagccccttatacagaaccaaccccataaacaaaccaatctcattctactctcgtcagaggcgtcgcccaaccccgatttgttccctctccgaccatgacgacaaccacgaagcatctccgcccataaatccgttcgggctacgaagaggttagcatttgttcccaacttatctatgctgatttttctgagttaaaattttccatagtgtggaattcctttgattttttttgtgtttgagattttctatattcaaaaaaaaaatatattatcaaacttagctttttagtaaagttaaaatagaaactgaaatgcccagaattatattcttatttatacatatatgtatagaaaaatactttcgtattaagtcggataaaacgataaactataatctcacattttataacgtatattatagttctaatatacatgattatacattaagatatctgaaataatttacagtataaaaataaaatttgtatgcatgcacatacgtatttttcattgtacacgcgaaagaaattatttgacaaatttcgattaggatgccatgcataaattg

SEQ ID NO: 74199 - DNA, 1007 bp, Cannabis sativa
agtaaatacaaaggaaatactacatctcctaaataaatctatatttagttttttagtaaatatagataccaatagtttagtttgctccttttttttttatcatttttcttactaatatttactattacattaattgtatgtaaaatatagatttttgaattttgaaagaattctaaatattaaaaccatgataaatttacatggtatattcataatattttgattagattacttcatattatatattataaaaattatatgtgaatttttttgatatttatatgttaaaatatttatataaaaagttataatatatattatgtgttagatttataattactaaatttaaaatttgatatttacacgttaaattatttttcttttagtctatatataaaatgggtggtgtataacagattaatatgtaattgtttttaagtattattattgagtaccagtagtatctaatactttttataggtgatgatttatgattggttattagtgagattatttaaaaattgtttccttaattaagttatatgagactcaatgtatttaattacacaaataacagtatgatatcgaagaaaatgctagacactaatagtatcttttaacaattttcttaattttaatatatgtttatctagggatgtgtgtaattttgtttatctaatatttaatgaaagaatttttttaaaagatttcacataatttaatttaattattattataaaatattattaaatatttacaattcactgtctgaattggtatcaaacaaaacttgccactaaaatatttatattagtttatcaaagtaatatatattttatattttaattaattacattagtgatatgataagaagaagaagttgttacttgttaggtagtcactaatcttcttacaatcctctttaattaactacttagttataatcgtcgagaaaagtcagaccgtgcgcataattaattaaaagacctcgtaaataatagtggtag

SEQ ID NO: 74200 - DNA, 961 bp, Cannabis sativa
ttagagaagtcaaggtgtcgcatgtgtgttccgctcctaaaaaggtgagcccgtaacattgggcatagggccggccaggggtggccgaccagcatccgtttgagtgttggggtcttggtttgtgcaggtgctaacttgaccttccttttaatgtgttgtattgcgacgtgggactggttttgtccaaggtgttgtttgtttgtaacttgcctttgtagtatgtgcttgaattgcgatgttagattaatttagttttcattagaatcttggtttatgcttgattattggaattattttggtatataaatgcttggaaaaacatttcaatttgattgggaagcttggtggaaagttatggtattttgaggttgagtttggtgccttttcgagcacctaaaagtgagtttttttggggtttaacataggagccacagcatggtctttgagtgtcgcggcccgctcgaggttttcaggacagaatgtgttaaaacttattttgatcatagcttttgactctaaactccgttttagactttcttggtaccgttctaatcttgtttcaggctctatatgttaatctgtaaatggaatataaattatgtgtatgtgtgaaaataaatttgggattaacccctattggtgaaatcccaagaatttgttactaggattactagcacttgttcaggagcatccggggatttagaatctctacatacttgggataccaggtaagacagtagttaccacgtagagttaagcgtggtgacgctcatatttgatattatgattgtgattaaatgagggacttggattaaagttattaccctaaaatgtgcggttatattgcctagggttagtactctagtgattaaatgattttgaatacaataccatgttttatttgttgaaataaagaattatgcattcaaagcataattaggttagactcggtaattagaac

SEQ ID NO: 74201 - DNA, 2324 bp, Cannabis sativa
  modified_base (305)..(312): a, c, t, g, unknown or other
tatactaacaataataataataaaaatatatattactaatatatatgtgtatattatactaaataaattatatattacaattaaaatatatataccatcttttaaaaaaaatataaatattatatactaataataccattgtatataataaaatagaagctaattaaatattatttaatataaataatatatcatacaattaaaatatataaaaacaataattaaatatatgtagcatgttaataaaattatatacatacatttaaatatttgtattatcttaacaaaattatataccactattnnnnnnnncaaaataaaaaagaaatatcatctagaataataatgtaccatacaacaaaatagaaatatactgtacaacaaatctgtataccaacaacccacaacaactgatgtgtgctgtctctctgtaattgagagttttcatatgtttgtgcggatctttgtttttgttggactctgttttgcttttgagtgatcatttctatcttgctgtgttgctgttgtttattgaccaccatggcttcaagcagtgagattatgaaggatgtggagaaaaaatggtcaaatatctgtttagatgaagaggaagagtttgttacaaaattggaaaatgaggaattgaatgaggtagaatacgatgatcgttggtgtctcattgggaggcttctttctggaaagatttcagactaccaagtcttccaaaatatcgttgttgatttgtggaaaccagggaaagggatgtatgtaaaagacttgaacaaaattgatttttattccaattttaccatgaaattgacactgacagagttatcactcgtagtcggtggacttacgatcgtaaacaattgcttattgagagattacagccaggagataacccaagaaccaaaccgatcaaccatcttgatttgtgggtccagatacatgacttacaacctgggttcaaaatagagaaagtcgttctacaggctgaaaactacattggaaaatttcttaattcgatccaaataatttcaaaggtgtatggcgagagtacctacgggtacgcgttcggttgaatattgatcttcctttaaaaagacgaatgaagttcagaagacagagaggagataccttctatgctaacttcaaatatgaaagagttcccaccttctatttcgtatgtggtgtaatgggacactccaaacgtttctataaaaagctttatgatctcccagcagaccagattgataaaccatatagtattgacaagagagccccctcaagacgttagaattttctggttgcgtctccatggttgggttctgcaaagcaagccactcagtccggcgacgtcgatgacaaaggcagtgattgtgaagttaatgcccctccacaatctaaggatgcattcactccagtatcaaatcctggtaaatctgcatattttgatcataatgctctagttgattataggtgtgatgttaggaatgttgatctcaatgtagttaatggagaaaatggtccatcaattgtgattaatgagaacgattctacctttatgtctgatgctgaacttaccatattggaccttaaaaggaaacgtgtggaaaaggtttccaatatgggttcacatgtggaaaacgtggcttatatggatcaagctattgagtcaagtaatggtatttttgcaaatactgaggagatgtcaaaaaacgggtttatggtgggctctggtgttcaggcccatcgcttattatgaatacacttagctagaattatcgtgggcttgggaacccacgggctattcacttcctagctgacatttgtgtccaaaagaatcccaattttttttcctatgtgagactatgtgtaaaaaagatgtattggaccgtataaaaaataaattgggctttgatagttgtttcattgttgaagcccaagggagaaaaggtggttttgctcttctttggaaaactactgatgatgcctatcttcttggatattcagataaccatattgacattgaagttcatccccctggttctgcacgatggaggctcactggtttctacggtgagccaaaccaatccctccgtgactgcacctggtagctccttaagtctattgctctacactcgcctctaccttggtgtatcataggcgactttaataattgcttctcaggatgaaaaaagaggtggatgaccctatcctccttatcttattaatggcttccaagaggttctttgtcactgttgccttcttgatttgaagctctatggctatgccttcacctaggaacgtgggagaggcaccag

SEQ ID NO: 74202 - DNA, 1068 bp, Cannabis sativa
aaaacttggtcatgtctctcttgcagacatcttttttcatgggcgctggcttcttgtacggggataatgactgagtggccatgttaacactttctatttcctccgtcaagatggtaaatgatgtgtacttggcttgattatcccagggagcttgctcgcttttgccagtgaactttcttttcttcccattctcttatctattgttgttgttggaacgtttaccgttttagcttgaattacttgggtaatgggggagttgggcggagattcaagtggaatgagcttttgactttccaggctttttcttaccttctgctcgctgaatagctttcaagttttgaaccttgcacggtcgagaaaatcactcatcaagtctaccggaccgttcttccttatgtccttcgaaagttcactgaggacttcaatgccccctagtatcgcggacaactttccatcttcagttacccgtgaaaccttagtcgccttgtcatgaatctgatgatgtaggcttggagaggttcgcctggtctttgcttgactttgaccaagtctcctagatgcaacgaaagctggagagaggaggagaattgtgcatggaattccgaggagaaagctttccatgagttgaactttccaggggccatcttgaaataccattgctgggcggcttccgagaggctggcaggaaaaatcctgcaacacacgtctcctcgtaccccctgcagatccatttgcatctcaaaatacttgaggtgggaaagaggatcttctcttatagtgtacatcttccaagttggcattttaaacttgtggggtaacgccaggagattgatgtcgggagagaaaggggttccacgtgctcgatccaactcgagatcattgtttctctgtccggccatgccttggaacatactttttagttcgtccagttgtgcttgcacagctggactaacctgtttggcattttgaccgatttgagcacgtcagtatctttctgagtgggaatttgagcacgggttccgagctgcacgatcggcgtgccaagctgatcgtctactcctctccttc

SEQ ID NO: 74203 - DNA, 771 bp, Cannabis sativa
aacataccatgatgccgtttctcttttgttctatcttatatgcattcatattagggtactgtactttcattttagtttccaaatttccaagtttcgtgtttatttattggtaagaggattacttaaatgtaggggatatcacaattcagagaagttattgggagttcaactcaagcagctagagttactgcactgttttagggccctaagaaggttaatgagccaaaagaattgaatttttctctagggggccaaaaattcctaaaataatttttgccgaacttgatcgaaaacaccacaggttaacaatatgtcaacctgggcgcttttccaaccctaagtgtcaacctgcgggctgggtccctattctgcccctctaaaaattctgtttggtccttgaaaataattgaatctcaatattttctgaagacgaagaagatgctcgaaagaattcttgaaaaactctactttaaatggtccaagttgacaaaatgtcaacatgggcgcagggccaaccccaagtgtcaacttgggtggtggccctgttatttgtacccaggaattgttgtttttcctccgaaaggacctatttctccgtttttgatgaagatgaagaagatgcataagttatatatctgatttgatacttggaaggtgcctagattgatagattgtcaacctgggcgctaggtgttagtggccccgcgcccctagtgctcaaaagtcaacttactccgattctaattctgatgcctcaaatatatttgtggt

SEQ ID NO: 74204 - DNA, 1217 bp, Cannabis sativa
  modified_base (1056)..(1076): a, c, t, g, unknown or other
  modified_base (1171)..(1191): a, c, t, g, unknown or other
tttaaaaaactagaaaacagaaaacatcaaaatgttgttttcaattttcaaaaacaatattttttttgtctaacatattatattttatattttgatcacatactcggatcctagaccccaaaccatacctgaacctagactccgatggtgctaaaatattgattttttttttcgtaagaaaaaatctaaaaatagtttttaaaaatttgtgccaaacaccattaaaattttaaaatgacaaaaaactgttttttattctcacttttaaaaactgaaaaactgaaaacttagccaaacaatctcttagttttcagtagatgtataattttatcagttttctttattcgttgagaatttttttcttaaaaaaaatttgtatctacaatgttaatgcatctgtatcgatatgggcatggaaaattgtattgatattagttgaggaaattttcttggggttattttctgggttagagggtggggggaaatattctcactatagaaaaaataatttggttttgagtaggaaattttttagttttgagatgacagtggggaaatattgaaattttgatttaattttttcttcaattatattaattatgtagtttaatatttttgtaataaatcataattttttatattataaaattttaaattaattttttttaaaaaaataaaaacaaattaaatgagttggaccaactagaagttgccaagtatttatctagttggcatttaactgagaagttaacgtgaggtatctcatttgcaacaaaatattgacggaatgtatttttgctgccaaaaaaattacttaggtattaatctgcaactaaaagataaacttgggtatttaccctgcaaataactctatataaattatagggtgattttacaatgcacccccttaaaagagatgtattcatgcaccttctacttgttttggcatatagaaaaaaaaattagtctaatttttttcatattcatgtacgttatatctatttaagatatcgtacaaaattttgagaaattcgtaataatttacaatatagaaannnnnnnnnnnnnnnnnnnnntttacacgcgtataaaacaaaataatcacgcgtacaactcactgcttgaatacaatttttggcgtgttaaacttttctgaatttcttaaaatttnnnnnnnnnnnnnnnnnnnnnataatttacatgaccatgagaaaaaa

SEQ ID NO: 74205 - DNA, 980 bp, Cannabis sativa
  modified_base (709)..(713): a, c, t, g, unknown or other
taataataataagacttattaacatatatgttataaattaaaatataattatatatctataatgctgttgttaagcattattgtaattaatgctaaatactatgatgtggtaagctaacaatttaggattctaatccatctaatttgtaggtttttatgattttatttcattattgaaataataataaaaaaataaaaccatattttcaatataggttttgttttttatttcttaaagaggtttattgatttcccttattttattttatttgcaaatcaaataaaatagtaacaataattaataatgaagacaaactcttcatttgctaggctaaacatattgttgtattaaataaaaaaaattgtaactcatatgaaataagttacaatgatatttattattcctattaataaattaatatttattatcagtactattttttataataatttaaaatatatatatatatatatatgataattttacattttatttttagaagtttaaaagacatagagtaatcaaatctatatataggtttaagtttaatgaaagtttcaaatcaatggattcattaatcaattcatttctctattattggaatttcagttcttatgtaaagagtacaatacatgaatataatatatgtacctatttagcatatagctttttagtcttgagattgaagtttcacactaaatattttannnnnggatttttaatttttttttgtttaatcttgatattaaagtttcacactaaatattttattgttggatttttaattttttttgtttattttgcagataatatgctcttaatccaattgggaacatcacactcaaaatattatgagttggactccgaattttcatgttgtaagttttactaaccaaaagtttttggtgagataaattatgagctaaatatgaaatattttggtatttggcaatgaattagtgctattatattgtatatt

SEQ ID NO: 74206 - DNA, 551 bp, Cannabis sativa
tgcagtctctctggaaacaaaggtttatgtggagcgcctcctttaacagaatgtcccttgttttgggaaaatggtggcttatcttataaaggaaaaattgctgtgggagtatcaagtgcttttgttttctgcatgcttttgttagtggtatatgtcatctgcctccgaaggagcagacatgactatgactttggattacctcaagatttgatgtgtaagtatgcttcctaattattttaagttcattattcttccatttggtgttagtagatgaattctagtctgctctgcacgggctacgacaaagttatacatatgattctttacatgagatcctgatataaataatggggttcatttttctttcaaagcaaaaacaaagcaacaactacttttggcaatttttgggaaaatagctcataacttgtatcagtgtagtggcagtggcattttattttttaggtgtcgtctacctttttatctaatgttgcaagagagatgtcttgctcctttggttaggtaccctctttgttactacgtgattacctggt

SEQ ID NO: 74207 - DNA, 971 bp, Cannabis sativa
gatttaaggtagttttggacggccatttattttgatttctgttgcaaatttgattaaggtttcttcatgaaatatgttaattatgatgtttttagattctctacaaaatttggtaacatttggatcaggagtggatgatttatggtatttccaaactcggacagggaggtttcgggccatccgatttaggcagttttaggacggccatttagtttgatttttgttgataatttgattggggtttcctcatgaaaaatgttcattgtgatgtttttagataacttgcaaaattttgtaatgtttggcttagaattgcaggagttatgtaagttttaaaatgggatagtggagtttcgggccatccgatttaggcagaatttgggggtccatcttaagacttttctcaggatccagattgagtgttttctcaatacttagggtatttccatgatatctatcaatagggaaaattttagttgtcaatttaagtccccgaaagtgttagagcaacacttattggttttttggaaatgtgacttagggccttcgattaccagcagctattttcactaaggttgaccggcacacctaaaatcaaaattgaggtaagattagtataacacacatacatatgtacatgtttatgtatatgtttgccacatgtatggcatatccgttagaacgatagttggtgtatatatgattgcatcttgatatcgtgaatgtatgtgtttgtcaattcagaaagtatgaaccaatgctacaaacactagtacgccagattactgagtgcatgtggtattatagttggttatacttttgaaagcatgaactagtgctaccaacactagtacatcggagtattgagagcatgtggtattatggctagttgtacttatagtatggattgatgctaccaacactagtacgactagagtactgagtgcagtggtattatggtcaattatact

SEQ ID NO: 74208 - DNA, 781 bp, Cannabis sativa
actcaaattatttaaattaaattagcataataaaataaaattattaatttataaaacaatcattataaaaaaaattataccttcttcaacatgcgtgtccattacatctataaatataccaaaaccaacaacaaagcaaccacatagattaaagagacaccaagtaactagcattattacataatgtatccataaacaaacttatgtatcacaacatatgatacaattttattttttactcaaatcaaagaagcattattacgtagtgttagtaactaaataaaattataatatggagagtaaaacatatgctatatatatatatacattattatagtagcaaattacattagtcaaaatttatattcaaaacaacagtagttaagaatcagtttatattcaaattaatttttatttaaattataatcagcatattattcaaagatcatagcaaaaacttacagtaaaaaaaaataaccaaataatatataaaaaaaaataaaaaaaatatgtagtctaaagaaatattatatttatcagaaaaaataaggatgagatatgaagaaaatggcaaagtccaaagaaatgaagatctcactttggggatttctcgatgaaatccataagaaccggagacactcaatattaaaatataaatacatacatttataaacttatgcagttgggcctacgaaggttggcctgagtagaaaagagacaccacaataaagatggagcccataggagaacatacatacatacatgaactagaacacattca

SEQ ID NO: 74209 - DNA, 669 bp, Cannabis sativa
aacagtataagaacaaaacaaactctctcctcacaaagatgaaaatataaaaaatgcagctcaaagaggtgagaatcgtttggctgatctctatgtcttattaatagaacataacaaccctagagacagccacaaacacaatttttcaaatgtacaaaactttcttaaaatatttcctgatttgcagcatcataatcggactctgctgcatcagatcaggactagaaaggaaacttttccaaaatgaccaagatcacaatttggacttcaaaacctgccaaataaagtttatttgatttgctaaaaacctatcaaaaccgaattcatcaactagaaaaaagaaaagtcaagtttcccaaaaataagcaactttccatatagagaatttcttctcttccaagaaaaatttcgtaaaaagttgcaaccagctgggaatagaattttccataaaagaaatggagcagttaaggcatgcatttattacaataaagtcaatttagttgctcaataaaaatgcaaattaattaaaaaatattttgtcaactaatttgccaaaaagaacttaacaatttggatttttcatagaattataagtggaggtacaatttttgaaactaaaattatttttcgtaaagaccaatctgtaaagattcattcattttaacaagg

SEQ ID NO: 74210 - DNA, 710 bp, Cannabis sativa
cccaggtgccacagacatgataacgcactctttccgttgcttaatgtcgcaggactgaaggatgccaccaacgtaggccccaatagacctaaccttggactcgatgagttctccctcgaatcttacattggggtcctgaggggtctttcatttacggggctaaggagatatgatttcaaactcaaggtcacctggttcaaaagcaacagtgacgttgggtaaaaacattggtcttgcgagtggaatagaagataaacacaagggttcaggccaggcagcatctcgcaaaaagcgatgcttaccctcaggaatctcttgcaaaaaccggctataatgattggcagtctcttcttggttcgacttaatcaaataatctctaatcctgccatcgtttatttccaatttggtttgagtttcaaagtttttgggtttatatgggcaagctatatgtttgggacattttggtattgcagattctggagaataaatttctgaaccagactgagacatctctataaacaaaagacaataccaattcctagacgaagtttatcaaatcagaagcttggggattatgataaacctaaactatggctaaattctatcacccaggagatacgaaccctaattgataaaccaaactaagtaatgggatgtaagacaagtcgtaactcaaataaacataaaagaagaatgagatacttactgtg

SEQ ID NO: 74211 - DNA, 1087 bp, Cannabis sativa
tgtgtgtttattgttcaaaagggtaaggaattttgatgccaaaataagaagaaaaaaaaaaaggtaaggaattttttattttattgtttgttgattttttttttatactttcaagcaaagtatctcttcttaagttaagatacatgtacaatattatgatgagagatttaagatacatgtacaatattactaggtcacatattattattggggtattttaatatcaatagtatatattaatttaataaataatataaataactcataactaattatagaagttgtcaggttaatatgatgttacataccgtatcacacttattttttgcggatgatagtttattattttgccaatcgaatgaacaatctgccattgctattaagaactcacttaatacatatcataaggcttcgcgacaagtactcaacaatgacaaatcagtaatgtctttctcgtcgaatacctctcaagctgcacagaatttttttgctcatactctccatatgcctattactgaatgccatgagcgatatttgggattgccctcatactccggtcgggacaagcaggagctattcagtaatatcaaagaaaaagtttggaaactgcttaatgcttggaatgagaaaattttttctgttggtggcaaggaggtacttttgaaagctgtggttcaatccattccaacatatgcaatgagttgtttcaaacttacaaagaagttttgtgatcaattagagagcatgatggccaacttctggtggggtagcaatcaaaatggcacaaaaattcattggaaaagatagaaatctctatgcaaatctaagcatgaaggtggtatgggattccgatcttttgttcattttaatcaagcactcttggccaaacaagcatggcggatatttgatatgcccgattctctactaagtcgactcctcaagcatagatacttttcaaattgttcgtttctggatgcaaacattggtcactcgccttctttgacttggcaaagtatctgttggggtaagaaattgcttctcaaagggctacggtttaaaattggtaatggtagaagtgtggatagtg

SEQ ID NO: 74212 - DNA, 711 bp, Cannabis sativa
gtatgtaatggtttctctcactgtcagagttcccaaaaacacatcctcttgagtgagatatgactgaaacattagttagtttgcaaaattatataattaatttggtgttgtacttgtaaataacattaagtttttaacattatcaaattaaatagtatagatactacttacaattcctccacaatttcgattattctctttgtttcctttgacttgaattttgccaatcattttaacatttgaagatagtcttcctgttaggattgaaagaaaaagttcattaataagaaatattatttaattattgtatatatgatagagaaatgctaaaaaacattaatggtgtctaacattcttctcggtgtcatatcacaattggcgtaagtaagtattgggtctcatatattaacttttaagaaatatcgctaactaatagtagagcgctacctttaggtgatgttaagtactactggtgtccaattattaatatgtatgtataactgaaaatctttaaaatgatttatctttctttatatttagttacagactaatcatcttttttttaaaatttttttcattctctcatttttttttaattaattaattaaataaataacattaataatatatcatttaaatattgtaaaagaaaactataaaatagttaattatgatgtaatataaatttgaggtagaatagagaaaatagtg

SEQ ID NO: 74213 - DNA, 875 bp, Cannabis sativa
ctttttatcaaaagctgctaggcaacaattttcaatgtagaaagttggttcaagctagtgttataaagcaaggccctgttgtttctaggggccaagctgaaacacttactgctgatttttcggttgatgaagttaggaaagccatttttgatataccagggaataaagctccaggtctagatgggtatgggagtttcttttttttttagcataattgggagataattggcaaggagactgttgaagctattatttctttccttcaatctggtcagttactaaaaaagttaaactccatgattttgactcttgttcccaaaatcaagtgtccaaacactacgggtgattataggttgattgcctactgcaatgtgctatataaggctgccaccaaactcatttgctcacagcttaagatgattttacttgattttgtggcacagaataaagggggatttttttatggaagatttattggtcacaatatcatgatatgacaggatcttatccaacattatggaagaaagacaaagaaatcaagctgcatgataaagttaaacctccaaaaggcatatgacaccattgaatgggattttatagaagagatgctctatggcttcaaatttcctacaaagttttttaacttagtaatgacctgggttcgaactcctcgtttctctttgatgatcaatggatctttacatggtttttttgaggccaagtgaggcttgaggcagggtgatcaaatgtcgccactcttatttgtgctgggaatggaagatctctcacgaatcatgaggaagattgggaaaaagcatgatttcatttttcatgagaggtgtgggggcctggagttgaatcatttaagcttcact

SEQ ID NO: 74214 - DNA, 556 bp, Cannabis sativa
agctaacattttttttaagatctttaaaaacatgaaccgtcacttaaaaatatactattttattttatattttttccacattatttttaatactttttattctaacataatcaatgataagcatttttaaaaattattaaaataatattatattattatttagtaaatattaaataaacaaattttcttaatttatgataaaataataataataaatttaaaaaaagaagatgtaaaggatgttatgttaagacattttttgtgacattctttttcatttcaatagtaagtattaattaaaaaatattaaaaatatatctatgtcatcaagtatcattcatagcatcttcatcttaatagacttaaattcctattacttagaaggcactcgtgtccttagggccagtttggcacagttgccctgtgagaaaaagtaactatagctgtgctatgagaaaaaacagttataattgtattgtgaaaaaaaaattagtatttagtaaatataattttaaaacagctgtgagttaaaaaagttgtatataagtgtttggta

SEQ ID NO: 74215 - DNA, 720 bp, Cannabis sativa
aagagcattatatatatatatagatgaatgcaataatttaaacctttataactaatatatgaacgttatatatgtatatatttatagtatgatgatgatgcataatggatgtgttaggtttgtataatgaagtgacttttcctgatttagtagcatattacatttccttctaaaaaacgagagaaatgaaaacctcatatagctataaaggtaatataagttaaaattattatagtaaatctcaacatcatttacccaaaagaataatgtatcaccaaattgattttcctttcataataaaaggacatgcttttcctcatattattggtctagcttgtgtaccatttaaaggaaccataataatgagttgccaattatttagtttctatacacatatagataattagttggacattgctataacaatttttacaaaacaataaattaactctgtattatagctagacattaactaattcattcatctaattctatagctttgatgaaaatcaacgttaaatatatatatatatatatatacatatatagcagggccctgatgatcaattgatccaatttagagattattactgttaaaatatttctctctctcttttctttttttctcaaaaaataacgttgaattctttaatatatggagagtatcattataattcaaaaaaataaaagaaatagagagactatatatgattgtacaaa

SEQ ID NO: 74216 - DNA, 925 bp, Cannabis sativa
  modified_base (443)..(446): a, c, t, g, unknown or other
gacatggcggccgcaataggaataagtccttgtgttttggaaggacacccaattcttctccttatttgcttcgacaacgttagaaatgtcgaaggcttgacccgcaattgtgggcgtgtccaggtacactgaatttgcatcccaaaatacaataaaaaagtaaactttactatcacagtcaagctcctaggtgaggctgcagttgcagtggaagaaaatttaggtgagatgttggggtagtttgatcattgattttgaatacatgtatatttttcaaagatggtattttcgaaaagaataaataaaatttaagtacttttacattgtaatctagtgacatgcacttcatcgtctacttgttttgacgtttaaaagaatttttagtcccatttttttttatattagtatatattataattttttaagatattttataaaatttnnnnaaatttagaataatttacaatatacaaaataaagtttaaacagtttatttcacacacgtataaaataaaatagtcgtacaacatattgtttgaactctgtttttaggatgttaatttttttttcgaattttttaaaaatttaccgaatgtcttaaataactataatatacacgaccatgaaaaaaaaaaattaactaaaaaattattttggataacaaaacaaagagaggtgtgatacattccttttaagaaagtttattgtagaattttttataaaattatatccccaaacatatacttgtgacttatttattttgtacttgaaataaataatttgaagataattttttatattgtaaattattcttttcaaaaccaccaagaggtgagagagggatgagaaaaaagaagaagtcatgaattcaaacttaggaccttaaaactattaaactattaacagattgtaaaataccattacg

SEQ ID NO: 74217 - DNA, 900 bp, Cannabis sativa
gccaagtccctctagacaagtcccatcagaaacttcacacgccaactccatggcgcaccatcctcctgatggaaattgagcaagtcactcattgcagggtaaaatttggtgcgtagcctcgcaagccaactgcacccaatgcagcaccaagtgcactcttgcacaagatttcttcgcgaagttcacaacattgaccctccggccctaccgcacacccacggcttcatgcaaaaggccccattgacccagtgcatacttgctcctctgagctactttcacgcggttaatgatctaacaatcacccaaaaccaccaatttgccctctggctcctgcttgtgtcggctgtcaaaactatgtcacaagtctatctcccaaaatcaaccctgcatcctctgatggctcgctaacttttgacaaatttgataacacccagtcttaccgctatctcccatcggcatatgttctctgaaccatttggcttacagtgtcccatacaacaccagtgtccccataaacacaaaacatgcccaaacatgccgcaaactagctcagtcttgatctcagcctacgcccctacatattgtctatctgcagcttgcagcaatcatggaattcttcgcactgaataacccatctgttgcagtgtttccctctagattcacacaacaaaagtgaacaagtaccctgattcttctaacacatgaattagtgggatccccacttcaacttgggaaaaacttctctcttagaggaatatccctcaagatatagctcgcaagctaaccccatactcacatacggttcctccattccaaacgtcactttgatgaagatgttgaactaatgcctcggtcattctgactcttcgcccctcgacatttcaatgttgccttagtacc

SEQ ID NO: 74218 - DNA, 875 bp, Cannabis sativa
aataaaaaataataatttttgtatattcctaataaaatataaaatgatcgtcaatataattaaatattttttctttattttacacatctttgtgtgcattagagcacacaattataaatagtagacaaaatataacacaaactcattttttgtggcaaatttagcacaaattttaaatcttcaattagagatggtctaatgttaatattaacttttataactaatttgcaacttgtacattggagcactaatacataaattaggccaaatataattttatggtatattttagactaaattaaacctaaaatatacactatccatttgagatggccaaactaacaaaaaatcgggactatatccataataattaagatttccattttcatatcaatgttatagagaaataacaagagtattaatgataggacataaaaataaagagaggaaagaatacgatttcaaggatgaaagaaatatagaagaaaataaaaatatgaaagtgaaagaatgaaaagaaaataagttcattccatcttggtttttttttttttttcgtgaataagaagaaaagaaaacttctttacatcaaattttgatatgaaaaaaaattatcattttgattaaattttctgaaggtaatttagtaattttatataaaaatagttttatttagggggcttatatttaataagtacacttcattttattggcaaatttgactaatgcatttattagaccaaaattattttcctaaacttaaactattcaatattggctgaatatgtcattttttttcttctaaaactctattctactcctcccatttgaacaaccctctctctctttctctttctcccttctctctctctctc

SEQ ID NO: 74219 - DNA, 860 bp, Cannabis sativa
  modified_base (783)..(785): a, c, t, g, unknown or other
aaaaaaaaaaaaggttaaaaatatagtatatgggataattcccaaaaaaaaattataaaaacaaaaaatatctcttcaatataataaattattttcttagttattttatagtttgtttataattatattatatttggcatattcatttcaaaaaaaaaatattatatttggcataaagttacttttctagatattttataatttatttatagttaatttacagttatatttttataattttaaaattttaaaaatatatttttataaataaaaattttagttcgtaaaattttcttttgattttttttataacaatacagtacaataaacttcgtaaaataagccatttcgaaaaaacataaattaagtaaaaaaaattgtattaaaaaaaacaaacacaatagtagtacatttttttttttttttgagagaaaatacataagaatagattataaagaatgataaaattatgtaatattaaaatatagaattttaattatgttaaaaaaaaattgaaaggaaaatagaataacataagtgaaaaaaaaaaatggaagaaagataaataaaaagaaaggaatgaaatgggaagaatctttaaagagaaaaataaagaattgtaatggaaaaaaaaaatttaaggaactcgatataaaatacgcaaaattataaaaaatttaataaaatttaccttaaagttaaaagtaaaaacatgcctattattaaaaaaaaaaatatagcataattatattaatttacaagggtgactattcaatggttacnnntttattgtaaccatatagttacatttttctttgatttgtaatagcaggttactaataggtaaatatttctttttt

SEQ ID NO: 74220 - DNA, 1204 bp, Cannabis sativa
aattacctaaataattaggggtcaaccatattataggcgcaaaaaccttgaaaggtaccaaaatcattaacaatggtgcaactcaaccatcaaattggtactgaattaagtaataataatctgctaaatataaatatataaactattaatagagtataaatacaatagtttaaatcaaggaaaataaattaaaataaaaaatatttatttatttatttaatatattttaatatttaaaaacaaaaattaatagtttgactaacaaaaataaatatattttaaacaataccataaatataattaatatagttataaatactgaattaagtcatcgagaaatttcttttcttacttaattggtgttaccgataatttttcaatattaaagttaccatgcttaaatcacgcgccaccttcgcttccagcaaaatcaacacagaaatctaagccgcccatcctcaagggtctggtgaaaacaagactaagaacggtcggtgaatggtgatcgagccttagagaaaagtggttgaggaggatcccaaatctctatgaatttatacagcctctgtcaaactagagccaagacacaaagcgaaaaatacttgtatgcatgtaatatattaaaatatacagagcactcgagaaaccactcatcaaattatgagtgctagaaaaagttccaaaataacaaaccagtcccaaattcaccaaaacagaataagcctgctctatagcccatagatcgaaaaaagtgttttgcctcattatcagtaaatggaaacgtaccattgctacgcgtacaatgagtgcagatttgctacgcgaacaatgagtgcatttgaaaaggtaaagtaattaaaaacaaaagaacaatagagttttgagatgtggttttttaatgtgttatgacatgggtattgtgttgattaggcaaaatttagaaaacaatataattttataaacttataaactttaaaaacttatttgttacctctccttataaatatatattttttattttttaaattatttttaattggtcatatcaagtactatgcatttctaaccattaaaggctcgtttggtacgccgtattgtatcgtatcgtattgtatcgtattgtgttggattgtgttgtgttatattgtattgtattagtattatttattaggagaattatctcatatactattttttttaactt

SEQ ID NO: 74221 - DNA, 537 bp, Cannabis sativa
aaatcatagacaaaggattaccaagagatatacagaacattattatttatataatatatataaaaaaaattacccacacaaacacaaacacacacatttccatagatataatacttttaataaaatttaaggaaacaaatggtgctttgtgtgcaattattttttatttagtgataattaagttatataactatatgtattagaatatttttagattgctacgtctcagttctctattctaaaaattgaaattgataaattagattatttgaatattatattttaatcaatatatatatatgtctaaaaaaaatatttttaagattgtatttgatcaaaatattaaattatttataagaaaatctgtattaattaaaaaatttatgttttaagtaaagattaatgctattttgaatcctaacttttaacccttattcttttggattttttatttatatatataaattaaattttggattttatattttgtgaagctaaaattttaaccatacatttttttatgaaaataataaaaaa

SEQ ID NO: 74222 - DNA, 830 bp, Cannabis sativa
ctctctctctctcagatatctctcacaatttttcatattaacttctctctctactgtgttttgtctctcccttattcttatcttgtgaaacgagaagagtagttctctatatatagaccaagggacccaatatacttgctttcatatttgaaagttaagtaagttaaagactaactaactaactgaatgttggttgaggatttaaagaataataccacatgtataataatccattttaattttaatttttcattattacagtgaatcatattttgatatttttaaagtgaattttctcacaaaagttgaaaacttttttctgtttggttcttttcattcctcacacttttattagtattcatcatttttgtagcctttcaccacaaaactatttttttataatccaattttttcttatacgtaataataaaacttagaaccctaagaaccgggcttccgattgggaaccggtctgccagttgggcctttttccagaactctagttttccccattttttcactactacaaaaatgggttttctcgacgtttttatatagtcgtttaaagtattcccgttggtttctttaaccgtcgcctatacgatcgtcgtaaaatgggcataataggcaacggttcaaaaccgtcgctaatgtgggtttcccgacggtttaaaactgtcgcctataactgggtataggcgacgatttataatcgtgccctatactataggcgacggtttcgggaatgtaaaaaaaagaaaaaaaaaaatacaaatttaatggcagaaaaatctatattttctcccttttttttttcctccattagcttt

SEQ ID NO: 74223 - DNA, 611 bp, Cannabis sativa
tgaatagttctggatattgagtcctcacgccagactcttattcccaggtggcttcctccacgttgttgtttttccaaagtaccttgaccaaagctatggtctagtatcgaagaatcttttctttcctgtcgaggaattaaattggatgttactcgtaagataagtttgactgtagttcaagggctttgtaactcaagatatgagtcaggtctgaaacatatttcctcaacattgagatatgaaatacattatgtacagtcgataatgctaatagtaaggctagttgatacactactcgcccgaccttctcaagtatttgaaatggcccaatgaaccttgggcttaacttgctcctctttccaaagcatctaatgcctttcacctaagaaactcgtaggaaaacatgttcccctgcctgaaatgtaatgtctctgtgcttcggatcagcataatttttctgcctgctttgtgaagcaagcattcgagtcttgatcttgtatatagcttcattggtcctttaaactaattccaaacccaagtacttcctttctccagtttcgtcccaatggattagtgaacagaacttcctaccatacaacatctcataagga

SEQ ID NO: 74224 - DNA, 1683 bp, Cannabis sativa
tgtcaaattcggccctaggctcagattccaggccctcaagattgtggttttctccccgagtttgcttgtatctttgttatttctgatgatagaaaaaatgctcaaaacgcttttttagaaaattgattggaaacagcctaggttgaaaatttgtcaacctgggcgctgagcctagtgtcaagtgtcaacttgggcgttgggttcagtttcaggccacttggaagtttcgtttggtccctaaaaatacttgaatcttaatctttgctaaaaatggagaatatgcctaatagaatttttgaaaaaactcctcagaattggcccaggttgacaaaattttaacctgggcagtgggccagccccaggtgtcaacctaggtactaggtcgttgttctgacacccaggatgtgctgtttcttctccaaaatcacgtgtatccccatttttgatgaagacgaagaagatgcacaggttgaattgttgatatgatgtttgaaaggggctcaggttgacagattgtgaactgagcaccgggtgtccaagtgctcaaaaatgaaagttctttgaatctaattttgatgcctcaaatatgttcataacatgtctagttcatcttccaatgtaaagtttgatccatttgcactaagatagtcttggaaactgaaaccctaggtgccaagctttacttttgaggtgctgattcatgtattttcagctctcgaggcctggaattggttgctccatgtcttcatggtacagaatactgaaagatagcactactacaaaaaggagtttttacatcggtcaacgcatctggtcaaactttttgaccgacgcgtaagtcaacctacagtttttaactttagttatccactgtcataaataattattaattagcatccattatctatccgacgctaaaacaaaaactgaagcaaaagatgaatataaaataatatgtacactattagcgttggtctacaaccgacgcaaaaagccattatatacactattagcgtcagtgcacaaccgatgcaaaaaggcattaagaaaatcacttatgggcttcaacccattttaaaaaaatctaaccctaaaatataaatctaacttctaatcttaatttttttctcagccgcccctctgtcatctatctcgctctaacctagttccctctcttcacccatcatcaccttcatcttcttcctttcttctcagcccaacccaaagcatgaacctctcaaactctaactctctctttctcattttttttcgcaagtggcgttagagctcatcgttggccatcatggagcacgggaccgtctccatcgccctcgcccccccctctctctcttctcgagaaaatggagttttcaaatgtgagattcattatgtttttctcattccccatctcgtgcccccaactccagctccaatctctctctttctcatttgagttctctctctcgctctctgattttttttttttgcaaacagtggtggtggtctagtgggatggtggtgcttcgatgtgcttttggtggtatgatgggttgttgtggtggcggtatttattgttgttgggttgttgtgacggtctgaagggttatggtggtctaaaggtttatggttttttttaatctttttttattattttgcttcagttcatagccggagcgataaact

SEQ ID NO: 74225 - DNA, 697 bp, Cannabis sativa
tgtgtatggctgtccagaatcagaaaacaaaaaacataccttgacacttattaatccgctgcatgatgtctcccctcttaagccttggatgttggttggtgatctaaatgagatttttttctcacacacataaaaatggggggccccttaggagtgacaatcacatgagtgcttttcgaactactcttgaccaatgtaatttgcacgaattgcctttccatggggatgattttacttaggcaaaaaattggaaaaatccagctgccttgaaagagagactagattggtgttttgtgaataaagtttggttggataatttaagttcacctaaaatcagccaccttgattactatggatctgatcacagagccattttagttgacatcaacttctcaaaccagatgccacttgaaaaaagacgatctcgttttcgttttgaaagactttggttaaacaatcctgaaagttcggacattattatatctgtcttcaacaatgtgctcacaaccttcagcgatggcacataggaaaatttggcaacatgaagagagatattaaggaagcacaatcaacagttaaacgtctacataatgttgtccaacctggtcctgatcattctcaatatgtgttctcggctgaagctattttagatgaactgttagccaatgaagaataatattggcagcagagatcaagg

SEQ ID NO: 74226 - DNA, 975 bp, Cannabis sativa
aattttgacaagtaccaaatcatgttctttgaattttatggccgttaaaaattcaccttaaattattaaaattgttgaatttaaggacttttgtccaattttagtaaagaaagtctaatatgaattaaagttcagaagacatgatttggtgcatgtcaaagtttgagggacataatttggtacatgtcaaattttaaaggacgtgatttagtatatatcaaagtctgaggaacatatttagtgcatggacaatgactaaattagtaaaattgaataaaatctgatacaagtttttatatccaacaatctcaatagtctaaaaaaaattaacgataaaaaaaaattaataaaatataactttatacatgtgaaaaatgaaagagtaaagtaaataaattcaaaaatgacaaataccaaaatgcttgatgctccaacacacatttaaattatttaccttttaaagctactaaagctaatttagtggtgagggagggatgagaaaaagggagaggtcatagtttcgaactcaagatctttaagctattaaactaattgattgtaaaatactattatgtcacactcaaaaaaaaaattaccttttaaatattaaatgtaatcgacaacattgccttaattgagctaagggccatagatactacaaaactaacaaaagctaaaatcgcaaaagactaaaagataaaatataattattatatttatttatagttattttgagattaatttcttgttgttttttagttgtaatttatttttgattaaataaagtatatttttataattttaaatctttacaaacttatttttgtaattaaaattttagcataaaaaaatagtatttttaaaaattctaaaaaacaattaaaagaaaaattataagagcaatttgcggcgaaacccccttatgttttgatttttatacacttaacccccttatctttatttttggtggcaaaa

SEQ ID NO: 74227 - DNA, 1157 bp, Cannabis sativa
gaatactcctccaggcaaaagagggattatgatcaggaacagcatccaaaatagaggaattaggaaagtatctagctttaagaacttggcacaataaagagttggggtttttaaaaattttccaatcctgttttgctaacatagcttgattaaattgaattaaagaatgaaaacccaaccctcccagttacttagattgacaaacttttttccaagatttccaatgaatttttctagaattgccagaagaatcccaccagaatctagccaccgcagcttcaattcctttacataatttaacagggagtctaaaataagccattgcataagcaggaatggcctgaatcacagccttaagaagaatctccttaccagccttggagaaccatttattagaccaattagtcagaacagaaagaactttgtccttaagaaaagtaaaagaatgatacttagattgagaaagacattgaggcaagcctaagtatttactaatgaaaggcctatctttaaggtcaaaagtagtgaagaaaaggtttctaatatcttgagggatattaggagaaaataaaatggaagatttggcaaagttaatggcctgaccagaggcttgagaatagagctgaaagatatcccttaaagagctacatgaatccctatcagtagagcaaaaaataagactatcatctgcaaaaagaagatgagaaatagaaggagccctcctggaaattgctacacccttaaagagaccttcagattgatgagcacgaagaagagaagaaagtccctccgcacaaagaagaaagagatagggtgataaaggatccccttgcctaaggcctcgagagggcctaatcgaccctttgacaacaccattaaccaaaaaggaaaggctagaggtagtgacacatttcataataagggaaacaaaattgatagggatattgaaatgaagcgtaacactttcaaatagtgccaattaaccctatcaaaagtcttagccatatcaacctttaaggcagcccaaccatatttaccatgctttcgagagttgatagcatgaacaacctcttgagcaatcaaaatattatcaaaaataactctcccagccacaaaagtactttaaaaaggagatataattttatcaagcaccattt

SEQ ID NO: 74228 - DNA, 1052 bp, Cannabis sativa
tacgtgtcatcgtccggttggtccgcgtattttgggcaaaatcaagggcaacatttaccccccaagccttgtttggtgataaagtaaacaaggcttccttggatgcctcaagttgccttatcagcttcctggcacgtgccttgggcgcgtggtgacactttaatgaccatcattactgcagttatttcctttttgcagacaacgattcgtttcttgtccatttattgatacggtgcattaaatgggtgtcagacgggtactcaaacattttcaactgccttgatgagcgtttaatccaaccgttggatctgtagaattcgaatcgattgccctcctgaccgtacgatggtggttgatcagagttgtttcacaccatttcaacaaattttcagagagaaaagagactttaaacaccattgatttcctactcatattccttcgacgttgccagtcttcgttttaccggcgataaacaccaacccttagcctttaaacttcaggtaagtcctttgtatatcgtgtacttgtttactgttcgtttatatagcactttttttgatttctgggttggatgtttgaacttctgggaatggttttgttcgagtttctgaatgatgtgttacattcctcctttttacgttagattactttcttttactacgtttttgctgagaaattatcctcatcccacgtaatgaccactttagggcttagagtagaccttgcctttgtggcctttctctgttccctctttttcttctcttttttttttgtctgcaatgtcactacctttgggatcttgcactcgactcttgccaaggaaaacctcttggggttttcttatttggtaagtgtccggagggggcctctttccagcagttataggacccccattcccttttttgaacattagggtttggtttggggcctaactgttggatttttttgattttttcagaaccaaaatgcctgtttcggcatctggttccaaatcatccaagaaaggagaagttcgcttggccaccctagaggaggtcatgcagggccctgtg

SEQ ID NO: 74229 - DNA, 786 bp, Cannabis sativa
cgtgtaccttaccaccaaacaaagatcttaaataattatctaacaagtaacacattactataattattaataaagatctctttattaattcattaatccaagtggaaggtttcaagcctctattaatgtaatatgtccatgatctagaacatataatcatctcttaacaagaaaacttatacgaagaaaaaaaattcaataatcaattctttcatatcactaagtaaacaaccaacagcattcttttaatacatatatcctgtttttcaacatgtttaactactattacaaaattctataacattttaacctttatcacatactaaaattattactttcactaactatagtacttaaaattattagctatcaagttttagccaaaaaatgatacattttcgaaatgcgtagatctataatgtttctctagttgttgatgtctctgcaattcaatctttttctattatcattacatttgagcttttatagccaattccgcaaaattactttatcacatcttgaaatattaattttgtctaggctctttaaatacttaagctttgaaattcaatcataaaaggttaattttcacacctcagggccagtttagcacagctgtgctgtgagaaaaaacagttgtagctgtactgtgaaaaaaagtaactgtagctatgctgtaagaaaaaactgttgagtgcttggtaaatataattttaaaatagctgtgagttggaaaagttgtatataagtgtttggtaaatataattttaaaatagctgtgagttg

SEQ ID NO: 74230 - DNA, 1128 bp, Cannabis sativa
atttacaaatttaatttaataatggacttaattatattcatattatatatttgtcctattacacgcaaccaacactaaaccatcaacatcctacatcctcttccattactcttctttcattttctctctttcttagaatgtattttctttgtaatatttattctaagaaagttatgagcctctaaacttcttaaggttgttaagatggaagatgaagcaacatatataactaaataatacttatggtgtgtttttttttttttgacgcggatacttatggtgtgttgatttcccattatatgctttatagcacatattttcacttcattcttcattgtgtaaaaaatataatttactttgattaagtgtggttcattagattgttcataataaatatctttgattttttgtagtttcattaacttgtttcacatcacaactaatgctttgaaattatacttaattaagtgaaaaattcctatcttatgaaaatactttgtgcttaaatgaaaaatatattttaaaaaatgatagtttgattgagctcaactatcaaggaaatttgggagtcgataaactattaaaaattattaataaatattatgtattctaacgtcttaataatcttttctccaccataatttattcataaaatccatattatgaggccgaagagttgatttacatgtaagagagactttttaaaattaaaattaactaaactctaacctagctccaaataattgatgagatttgtttcaggaaagaaaataaatattttaatgcctttttttatttttccaaaagcaatgtaattttacccaagcaatgtactattttaaatcatacacaaaacaatgaaaaattaagtttttttattaacattaaccgaaaaaatatatacacacattacatttaatagctcaaataaacattaacaaataataacactagaaaccatttaacaaagaataacactacaaagtaatatgattcaattattaacaaataataaaacaatgaaattgttaaaactattaataattatgtggatgtccaaattttttatttattaccattaattgtaatcaacatttctcttttcttagtttccttttttcttagttt

SEQ ID NO: 74231 - DNA, 620 bp, Cannabis sativa
agactataatggttagagagagaaaggaacttcaactctcagtgtgagactgacttgtctttgcttgacttggaatttattttaatttatttttgttgcgtatgatgtaggagatcgaatcctctctatcattgaaacttcaaaatgaaaagtgtttttctttttccaaatataaataaatttatatgtattttttctattttaaatcatttgtttcttttatgtgttttgtttatctcattttagatttgggctttttaaagaaaaaataaattgcataataaatcaaaaatttgaataaaattataaaaataaaataacacgaaaaaaaattatttttactctttgaacattttatttaaaaaaaatacttctggtgtaaaaataataaactattttttaattgttttatagtttatttatagttgtactgtaattgtcataaggttgtttttctagttagtttgtagtttatttatagttgatttatagttattgaagtttgaagtcttgttgttttttagttattttttttttcttttgctgagcaaaatatatttttgtaattttaaaattttacaagcatatttttgtaattaaaaattttaagtcataaaatt

SEQ ID NO: 74232 - DNA, 1587 bp, Cannabis sativa
  modified_base (64)..(77): a, c, t, g, unknown or other
ttcagcgattatattagttcactggaatatcatttataggtagctaaatgttttaaggataaannnnnnnnnnnnnngtaacggtaaattaatccctattcaatgtaacttatagcgtatttgccttctttttccttagaggttggacaactctatagaggatcattaattattggacaactctacctctcggatcaattgggtagctttaccctggagcattagctgccttctttttctttaaaggttggctagcatttttcatgttgttacgcagagcaatcgcaacagtttttctcggaggatctcccatgatgctttcttggacaattgtagtattattgtcctaaggaatatgatcgtcaagaatttcttcatcatgagcaacattctcaggttcaagcctagcctccagtctggccaaggttgcttccattcggcgagagaagtcttattgtgcctccaattttaactttatctcagtgagttctttggtcataacgattgtaggatctggcttgtaataatatcactcatcatctttttctttcccatcgccttcaagatcttcgtctttaggatcttcctcttcgtgatcctcattgatgggattttcatcaacgtatttctcagtacgttgagtctttttagtagggcgactggttgcctttgttggatctccatctactcctatttttgcctaggctgcaagatctgcgtcattcataggagtgtcttcatcacgaccactgatttggtttcgggtgagtaccgtagttgtagtataaaacctttgatggtatcattactttcttcagctctcaatgaaagcactaaaatatttgccgatatttttgaaaacagatttattatatgtgaaagctgaaaaattgatcaaagacaaagaaaataacgatgaggatttttacgtggttgggatgttaacgaaccttagtcgaagagtcaatattattacttgaaagctaaaaaaggcttaaggtttataagaatgtatgaactctataatttgcttgagcaattacagaatgagtttctaaccctttacatgaagggttattcgtctacttatagtgtttagggtttttattcattaacattttctcactaataggaaaattacaagtaacatattgacttgggcttatctggtgaagcccagcccatgagacgcttagtgtatgctaatgtggatgccacatcacattggcagttaccgaaaatcgtgtcatatctttgtcgagaataaagacacactaaatgtttgattgctaattactctctttccatatttaggataacatgatcttcgaatgagatcattgagagttaattcctgatatctcaagatcttgtgattaacaagaatgcttataagctggacattcggatggtcgatgtttgcttctcccaaatgcgttgtctaatatcttttggatgtatgtcatgctggatgggtcactcgcctggaggagtcttcaacttatctggaaggactgactgcttatgggttttgcccaatatttcatttgggcatgttgttgggcctggagtatttacactgtagtt

SEQ ID NO: 74233 - DNA, 1261 bp, Cannabis sativa
  modified_base (26)..(32): a, c, t, g, unknown or other
  modified_base (317)..(330): a, c, t, g, unknown or other
taagtggttgaaataaagtggcaaannnnnnnctagtgaggcccattagtgtggctggctacttagtgatatttgcccattattttattctttatttatccatataattaaatcctaaaccctagttaaaatactataaaaggtacatgatgctctcatctcatccaacaacaacaactgactattcaaccaccctaaacctagttttcattctctgacaattaataaatgagagacgccttctatagtgatttcgagcctcctttgttcttcaccaatttgcccatagtggtagagtgtcatgcccacacatagcnnnnnnnnnnnnnnatcatagtgcggaagacggtggtaaccaactcgaaggagagaaagagatccaagctcagatcttgttattactctgtgacaaaaaggaacaagggttagagatttgagctgaaggagtcattattatttcgttgcaatcaatgtaaggttttctaaacttttatgtgtttaatttcatcgtattaaaaaaattcatatttagggtgttaatgaaatatacttgttggtaaatctagatcctagtaaaataaatcccaacagttggcctcagagccatggtaatgatttacttccatgaaatatggatttaaaacgatgattttgttgatttggacgtgttcatgtttgtttatgtgtgatttgatgattgtttgtaattatgaaattttttccatgaaaataattttatttcaattctgaaaataatttatttggatttcttgtaaaaaattaagcaattttagtttttacgaaattcaattccgataaaaattgagaaagatatggtggtttgatttttcgggtccaagaggtgtcggagcttggtgctcgcacgcaataggagcttcgaacaagacactcatatgtgcgcatggcttggacaaaccgtgtttgaagacacgatatcacccgttcaaacacgagtgcctcacctaggaggctgcaactcatgcgcgtcccaccctgcacacgttgaggaaaactgcccatgacaccctgcttcttccaccctgcgtgcgtggaataggctgcttgtagcctgtttctcgatagcaagggtgatttcacccaaaatgcgattttttttggtgatttttcacctaatttcttattttttgaaaccctaaacatctaaataaaatattatttttaacatttaaacgtaactatcaaatttacaaattagtaatatttaattttttaatagatt

SEQ ID NO: 74234 - DNA, 966 bp, Cannabis sativa
  modified_base (929)..(940): a, c, t, g, unknown or other
tacagaaaaatagctaagtctagaagctttaatttctagagacagaaactagagagagatgctctgaccttatgactaattttctgaatatggaaaatgagctagatgagctctaattttataggtgaatgaggtcctattaaatgtgaagaaaataatccaaaaatatgaccaaatacaaattggctatttttgaccgtagatgatgatctaatggtaaaaattaatttatgagattgatagttaatttttggagttcaagtcgcgacaacaggacttacttcgggtaagttgcagcttaaatttataacttccttgggggtgaaatttggagtcaataacttcagaattgtgattgaaatgtgagatatgtcttgataaatcattgaaatagcttcaaaatacaagttgaatcacgttaatcggatcaatattgagtgagttatgaccattttactgaaggttgttctgggcctagcgcctaggttgacaagtgatgtcaacttgatgctgggtaagtgggaaaacatgtcaggaatgaattttctaatgactaagtgatattttgacatcacttagtctatttctgtgttctggggaagctggtcactatttctcaaagatgttgctgttttgcaaaaatgggagactcaaaactacccaattttcgagtaaatcaccttgtcggaaatgtgaaaatatgaagttatgaattttaatgttctaacttcatggctcttagttattgtaaaaaaactagatgaacgggtgagacgaaatgagaatcgcataagcaaattccagtgcactaggccatttgtcaacctgggtgttgggtgcttattttaaggcttctgagatgtcggtttgatactttcaaggttctagaaattgaggatgaggtaacttttggaaatattttaccaggnnnnnnnnnnnntaccatgtatgtttcattaacatcct

SEQ ID NO: 74235 - DNA, 1059 bp, Cannabis sativa
  modified_base (893)..(893): a, c, t, g, unknown or other
tttttctagtttgtctgggctttataatttttttttcaaacatatataactatttgttaatggataggatttcgatctgttgattgccgagaaaatttgtagggaaaaaaataaatgacaatagtaagtattaacttttgttttcagtaaaaaaaaaagggactatacatattaatctcatttacattgttttcacatctttgatctgtgtatatatatatatatatattttatctgcgtacatgtatatttttgaagtgcaatatattttctgtatatgatctatatagattatttaaattaatgtatatataaaatatatatttttttatttatacatgtgtatatatatgatgtatatagttttggtagatgtatatatataccaaatatatgttgttgtatgtttttttttttattttttttaatttatttttgtaattaaaagtatttatttttgttactttctgattaaataaaaagatctttagcagcttcaaggtgtacacaaaatttcttatgtgaaaggtatatttttattaatgtgtattttttttttgtttaattttaattttaatttttatttgatttaattaactttattgagtacgttaaagatgtaatattatcataaaaaagtgagaataatgaaaaaaattaaaaaacgtataatctattataaatttgttttataaagataagttttaaattttaggaattaaataaaaaaatagtttatatttcaataaataatataaatttttaaataataatatttttcaaaaaaataattaatttatatgtatataatcctagaaagtaagtttagtaatttgttattttttaaatagattaataaattacttaaatatttttttttttttgaacaaaangagactttttattcaaaagaaccaaccaaatacaaaagcaagctggcggcagcagccaacaaccacacaaaaaaactaccagctatttacaacatttatagcatatctatctttcttcttagaactagtacaatgaaagccaataattctagtcttgaccacattt

SEQ ID NO: 74236 - DNA, 1173 bp, Cannabis sativa
ttttttgtggtgtttcttattatgttttgttgtgtattgtattgtaatgttttttaatattatttatttgtttttagtgtttttttaaaaaatttatttatgtttttgttaaacttaatgggttgttttgtttatttttttaatgtattttttcgctctttattattaatttaaaactgtttattattttcaatcgttaattatttttttattatgttttatatttaaaatattacatctgtatatttttaataaatcatcttctcattgatgttattgttttgtttatttttttgtttttttttttcatgtgtgtattttaaaaatatatcatatattaattttatttaaacataaatatcttgatcatatgttgattttaaaatttaccgtataatgatatgttattaaaatagctctaaattaatatggacccttttgctattcctagtgcaaatacatagactagtggaaatattgatttttaaaaatctacgaataatgatattggacatagttaaacaaaaaaaatcatgattatatatgtattattgaatttcaaaaatattccatacaattattatgtcgattttggccgtgatttgtatgattaatacaaattttattgtttattaatagtatttgattatgttttgtaaatattaatatataattttgttaattagtaggcttactcattaataccatataaattagtcataaaaatagttacaaaaatctaattatagtaagttgactcattaatatatctattataattaaattaagaatttgtatgaatttatgtaaatatgtttttaaatcagtatatatttaaaattatgttttttttgcacattttttgtaataaaattgtttttattgtatactaatgaaaaaaccccattcatataatatattggacgcgtatactttttattttatactggtaaaagttgcattaagaatatgtttgatttgatggaatgaggattataatggaatcattattaccattataatattgtttgttttaacttttataattttataatgactttacagtgtaatgaccattacattatatattgtaatccccattacattataaaactaatgttgtccctgattttgcccaatatacgtggaccaactggacaaggacacgtggat

SEQ ID NO: 74237 - DNA, 1026 bp, Cannabis sativa
accgtattttatgtaaataacatctcgtaaaaatatttaaaatttcgtgaaaccgtatttttgttatttttttgttgcttttgtgcatttgtgaaattaacccttaaataatcacgggtgtaattaaggtggttaaaaatctttcatggtttataaagttagtgggacataatttgataaatattaaattttgatagcataatttgatacataaataattactgaattagtaaaattaaataaaatttaagatgtgtttagaaaacgacaatataatttaaaaaattcaatagtttaggaaaaaaatttaaggggcatttaatgaacaaaaattttaattaatttttttatagtcattttttacattatattagacaaaaacactatacaattaatcagagcacatatgacaacatgtaagaaatgaattaccagctataatagagcatctctaatacaatgctaaaaatatagagtatagttatattttagcatatttaacaaaaactactatttcaatgatgatctaaaatgagtgttaaatttgatatatactaaaagttatatcaaatttaatataaaatataccattgtgttaaatttaactcacaataaatattattttttaatttactataatatctctaattattatgattcattaacttttactaaattttactttagtttttaccatattattattattattatttaaacacaataaaaaaaaataaaaataataattttatatactcactaaaatttcaaataactatcaatataattaattatttttcacttattttacaaaacaaaacaaaccaaaccaaatgtttgatattatagcatcttatcaaaatgaaatggttaactttggaatgtataaagaataatagtaataactaataaggttgtaacaaagagcaccagtggtctagtggtagaatagtaccctgccacggtacagacccgggttcgattcccggctggtgcaaatttagctgtgatgatatttgcacttct

SEQ ID NO: 74238 - DNA, 1079 bp, Cannabis sativa
tgcataacttttactacaaccaccaaaacacttaaaaccacttctaaacagtcctaaataaccttaagaagcttttcctaacctttataaacttcttcaacatgttatactacaaacaaccattgaaaactaacaaaaaccctagaaaactaacaaattttaggttaggttttaccttgagtttggagctaggggttgaactccttgatcaaattcagcaagaaagatgcttgaaaatggtagaaatttctggttttcggccctggttcagaacccatgaaggagagggagaaagagaaggtgatgtggtattttttttttttactttactttttgcttttggttccttttcactttgcttttcctttttgttcgcttcctaagaagctagtcatcctaaaaaggatgagccacaaccacctatccctttcaaaaagagtgactaatctcttagggtaaaaagactaaaatttccttacttccttgttaagttatctcgtaaccctaggggtaaaatggtccaattctgttatttcgttaaaccttgatattctaagatattaaataatattgtcacataaaatactcgatacaaatttgtattcatgtgactaaatttccatccgacccatttcaattgttattaggcataaaaatgtgaaaatatgaaaattcacatataacatgcatatcacacctatgattcaataaaatcttcagaattgagaaataatattcataacacatattttcatgaaaatatggtctataaagcatagaatgcataaataatcacatagtcaaagattaattagtgctaagtgccccactaatcccatgtctaagtataacggtcattacaattatcccccgataaaaggatttcgtccctgaaatctaacctggataactctggatatatagtcctcatttcaaaatctaactcccaagtggcctcttccaccttgctcttcttccagagtaccttgacgaaggatatagtcttattccgtagaactttgtccttcctatcaaggatctgaactggttgttcctcataggatagatctggtgccaac

SEQ ID NO: 74239 - DNA, 644 bp, Cannabis sativa
gtgggctcacccttattgtttgggcgatcgatacaacatcatgaccaaaaatgctgtcgaaaagcttcaacaatgtgacaaaagagtttaggaaatatccaattactattttggttgaatttatcagattcacactgcaattttggtccgttgatcacctcgaaaatgcagttaaatgtataacccttttgaaaaaatcatgaaaatggaaggttcaggcacgtcctaattgaaagaggtggtgatgtgaacctaattgaaaggacatgcacctgcagcgtgtttacgttattgaaactcccttaccttcatgcatgtgtctcggcattgaaaataaatacgagtgtgtacactcttttctcacctttttattcgaaagatacgtggaggaagacttacgatgataccatcaatcttactggtgacaaggatgattgaaggcccgtatttgaggcgtagtctactattagttgtaataatatgttttttgaactggatttgttatataaaacttattttgttctagttttcctttaaaattaggttgttagaaggtgggtttttgatatgttgaaaaactagtgtttttcttttatcgacaatttatcgatggtttatcgacgatttctcaacattttttagat

SEQ ID NO: 74240 - DNA, 848 bp, Cannabis sativa
aattttatctccaccgcttcttaccctctttcttcctctctttgcattttctatcaaatcgaatctaaatttttatgtgtgggagttaatcattggttggttttcgttaagttgacactactaaaaacttgggtattcttgattgttttaaacagtcagtaaagtattcatgtcggtctcgaataccatcgcctattcatctgaaaagtgggtaaaataagcggcagtgcaaagccgtcaaaaaaaaatcccaactatacaaaccatcggggatgctgagcattttaggcgactgttttaaatagtcacaaaaacagtcgcctataccgttattgccgatggttatgcacaatcagttagctgtgcaaaaccaaaaaaaaatagatttttcaaagacgatttttttcaacgttggattacagaataatgaaaaattgtaaattttctactatctttttcccaacattgcttgtacatatatttcatatttttacaataaactagaataattaatctaacatagtttgtggtaaaaatgtttgtaatataactgacttaataaaaattagttacatgaaactaacttaattaatttaacaaatatttttaactaattaaataaaaaatatacaattcatatattatataaaactaattactcaaataaattataaaatataaattgagatatatgctcataattttctttgttgctccccttcgactctcataatttggtcgagcgtgtaggggtacaggtcaaccagtacaaaaaataactacttttagtgataattttatagtcacaacataaattttttgtgactaaatgtgacttttgatcacaa

SEQ ID NO: 74241 - DNA, 766 bp, Cannabis sativa
  modified_base (411)..(418): a, c, t, g, unknown or other
  modified_base (522)..(526): a, c, t, g, unknown or other
attaagcggcattagtaagctctcattgatcatgacctgatatgacaactcttagtttcgtaggctgttcagactagatggacgccatgcgaaatactaggagtccgggaacctcggtctggtcaaatcaaggtcagggaggtcagtttcccccaaatgctcggggccgaggtagaggtcccagggacagggctcgtggtcagggtgaggttaacccgccacaggctgcccaggctgcccaagccactcaaggagcccagaattggaaaaataggtttgcagaaatgcaagccagaattgaggaacaaaataatgagctcctgctgtgcctgtaccagaaattccagtggcacctgcctctgttgtccaggccgaaccagtggtagcggtaaatagaatggaacctctgtnnnnnnnnttccgcaagcaggcacctccagtttttctgggaggtttgaacgtcgtgaaagccgagcagtggctaactgtgatcaccaggattttgaattttatgggtgtcannnnnaatgacagagtggtgtgtgccacatttcagtttcaagaggacgctcttgtctggtgggacatggtgtctatgatacatgatgtcacaacgatgacctgggaaaagttctaggaacttttcaatgcgaagtattacaatgaggccgtcagaagtgtcaagaggaaagattttacccacctgacccagaaagaaaatatgagtgtgacggaatatacaacgcagtttgatcggttggcgagg

SEQ ID NO: 74242 - DNA, 700 bp, Cannabis sativa
ttgcctccaagatctgacaacaaaagggattgatcgtgagtcaaaggttccaccccattttgccaggaaggcgagattcatttctctagttttacggaatccaagaccccctaaggacttcgagaggcaaagcttatcccaagcttttagatgtagaccacggttacccctttcggacccaccaaaaatcacgaaaccattccatcaatcttagcaacaagtcgacttgagagtttggtcgtttgcatagcatacataggtagggataagcccacagatttaatgagggtagcacgaccggttttagatagtgtcttagctttccaaccatgaagcttagacgtgaggtttttgataatgaaattgaagtcagcatccttttgtctggaccaaaagataggtaagccaaggtatttaatgttgccatatggggatccaatacccagctgagacttgattcctcttttcatgccattgggagtgtttttgctaaagaaatcgaagttttgagtttgttgacttgttggcccgaccaatcgcaaaacttctctatgcattgccaatagcctttaacttcttcccagttcgcttttccaaccaaattaaatcatccgcaaaaaaaaaatgtgagaaattatggggcctcctctactgagtctgataccgttgatatttcccttacattgggcgtctaccaaaa

SEQ ID NO: 74243 - DNA, 950 bp, Cannabis sativa
aactttgtggtttatatacaattaaatatataatattcttttcagtaaaaaatatatatggcattaataattatacatatatttaaaagttaattattaaaagttcttattttattctttctaaaaatttactacttaacagattttgaatgggtcagcgggtatttaaattaccttagactaatccattttgttctgtaatatgactttaaatactattttttaaatactattgtttgtttcgttttttattttaataataaaaataaaggttctttctttttttttttttaattttaattttaagtatctaaaacaaataaaaaccaaaaattactacgatataattataagaagaaatactgaattttttaagaagaatcaataagacattcttaaaggggtatttcggtaaaccccttatctatttagccattcacgagagcttttaagtttatttttttatgatagtctacattgtagatatttaggatcacgtgtaaattttcaaaatattttaaattgtatgtattgtcgaaaataaagttcaaacagttgtttactaaatatatataaaaaaaatagtcatgattgcaataaaattttgaaaacttatttttggcattgtaaactattcaaaattttttaaaaatttacccgtgagcctaaataactacaacgtacatgatcattaaaaaaaatagactgaaaaatactctaaaatgtcgaacaaatagagaaccaacaaaaatataagtgtactatacatacccaattattttttttatttgtaaaaaaaaaaataaataaatccttatacttggcccctccttaaagtggcgccaagttccgccactgtacgtaatctaattatatgtcgttacgtgtttttgaattgacattaaatgaccaaaaaatactataactataataaaattataaaataaaat

SEQ ID NO: 74244 - DNA, 826 bp, Cannabis sativa
tggaatgtgtgagagaaagagagagagtcagacttagaacattaacaacttaaatgagacttaaagagacttagtgacttaacgtttttagggttgagttaaggctctttatataggagagcttaaaccctaattaacaaataaaataagtatatatttacatattaaattggtaaagtctaaaagattaaaatgccccttaaacataggtatttttcatctactttattaggttgttaaggctcaatttgcagtttagctggcaatccacgtgtaaggctgtgcaccaagatcctgccaggtccaatcatggccggacaggcacctgcagaaagcaggctggccggccttgtgctgtccagaggctggccggccaaccctcttgaggtggctggtctgtcacttgtcgtcccatttgagtgcttagactcccgttggctaaggtgctgacttgacctccttgttggtgagctgtactgccacgtggcgctgatattatccacttaatcatgccacctcatgtgggcaaaaattggaatctattctacccagttttttcgacggtcaactagacaacggtcttagagatcaaaatgaatattttacccgacttttaaaaacagtctggaaaatctaattttttagtagtgttattttctaatgtaaaacaacaaaaaatatatatgaatagtttataatttaatgttatagtaaatatactaaaaaaataatattatgatataaaatttataaaaaaaaaaaaaaaaaatagtgcatttatgcaaagctagccttaagaaaaaaaaaaaaattcagcttttttttt

SEQ ID NO: 74245 - DNA, 737 bp, Cannabis sativa
atatgcacttagaatatgaaaaaataatgggtctcatgcatttgaaataattatgattaattagtagaaccatctgttaaaagatcaacacttctatgtagatttttttattattttagtaatattatagaataatctagaatcataaaaaattaatagtcataaggaattttaagaaaattttaggttataataaaatgacaatttgctagaacattctagcacaacaatacaccatctttgagtagtataaataggagaattggttttttgggggtgtgcggtgagttgagtgataattctaatgcacaagtgtaatctaagtatttcaaagagtgtcccaaaagtgtgagttatatacaagagtattgtaaatgtgtctagtatcaaaataagagtgtgagtgtttggtgtattgtggtttaataaaaagtgttcaagtcttggtgtaattacgtttacaataataaaagtaattatgttttccccgtgttgtattgttcgacacggttatgttatcattactctaatttaacatagatcgagtattggataattttatgggataaatacataaaatattattttttgtaaaaattttacatttttaagttcaatgatttttttacatttttatggtgttctataaaaacagcacaaaaacaacatgaaaactatataaaagtaacaggaaaataacattcaaacaacactaaaacaacaacaaaaaataacat

SEQ ID NO: 74246 - DNA, 1351 bp, Cannabis sativa
ttaaagtataaatgtacaaaaaaaaaattaaaaaattactaaattacaaataaaaatatatatatatatatatatattaaaattttagggtaaacatatgccactgctagtcttatactggatctgccactgtatatatagccacgaagatacttggagtccaaatagagaaatcacccctacctgaaaataggaccagttctaagctatttatgcctaaataaaaaaattatgaacctttatataaataataatttggttaattgttattaaataatattgtttggtacaatggtaaaaggattcttaaagttcaattaagttctatagacaaaaattataaattaagttaaattttggtatttttggcaagttcttcttatttcaagttgatcatagtattaattaagtattttcctcttgattttgtacaaattttgttgggtgtgtaatctgaaacataaacttcattaagaaaaattcgttgttacagaagaactcaaaaattgtagacaagtatctgtccaaacccaatctcctaaactagtagcagaagttgccagtatgtgggcaacaccattcgctgatcgcgaaacgacgctgcaagaactaccaccaacagcaactaataaagaacaaatatctaattgttgttatatcagtcctaaataaacctacaacctaaatactaagatgacatggcatgtattaagacacatcaatttggcctctctagtttgcttctgttttttgttatttttaattagttaatttctgttatgtaactacctttgtaatcaggatccttaagctataaaaggaggccttgactcatttgttatttagtgcagaaatcagattgagagaaaaacagagagattaatgtatggtgaggttttattgtatcttgtagcaagaaggatagagatgaagaagagaggagcaaagaaaccaaaaagaatcaagggtcttcaagggtgtttcctaagtgctctaagtttcatttgaataagatcaccattgtatcaagttcaagttatcttgaaccaagtcttgtaatctgccattaatcatagtgaaaaggattccttggagggagttcaaggggaataggctctctacaaattgtagaggaaagttcgaacccctctaaattttcttgtgtcttttatttctttctgttcttaatttcttgatgcattactcatattcatcttactggtttttattttctggtttaagtgtcttgttgatttcttaattcaatacaaactgaggttgttaatttgtaacactaataaaatagactgaaaactgaaattaatgtggaacttattaatccaaccaattg

SEQ ID NO: 74247 - DNA, 1731 bp, Cannabis sativa
  modified_base (45)..(45): a, c, t, g, unknown or other
tagaaagttcatatttaggctgttaatcaacatacttgttagtanatctagatcttggtaaaatatatccaacaggtagacgatgcattagtaaattctttttaaagggttgtattgtagaagcacccaagaatgtatatctatagcatctatatatgaatacatgtttaaataaaataaaataaaataaaaaacgacttgcctttgtcgtttggttatttttaatactattttttggtaaataatttcttgtacttattattggcaccttaaagtgttcaatttcatatcgatgtggtactcaataattagttagtaattttttttgtcttttgtgttttattttttatgaatgatctttgtactattttttttaaatgattttttgcactattattgatatgtggtacattaaggtgctcaatactatactgatgcacatacacaataattggttagtaattttctaaatcatattaaattaaaatttataagaattgatattgaaatgcaccaataacgatatgttacattttgtggtgcttggcatcttaatgtgtcccttaacatttccgttattaatatgtacatatctttattatcttccattagaattttaaatttttgttattgtatatgtttacaccaaaagtagtcataatgacgtggacatcaatgtttgacatgtggcaagaaagatgacatctcgaggttgagcgggcttgagtcatagcaagttggcatgggaggggtccctagccctgcgcccaagttgacttcaggaactccgagatggaagttcggactttcataactcatttccaactcactatctttcagtattttataccatgaagacatggatcaatcagatccaggtcattagagctgaaattaacattggtagtattttctataaataaaataaaaaaatcgtaaaaatatttaaaatttagtgaaaccgtattttgtaatttttttgttatttttgtgtctttgtgaaataatccctttaaacttttatatcaattaagagtttttcgcaactaaaccctctcaactattactccactggcacttaatcctctaagctcaaattttgacggtaaaaatctccaaattactaaactattaacaaatttaaggtatcatccatttttcacagttaacagccaatataaactgtttatgtctacacccttgtacatgtggcacatttatgttgatacacctaatattatttaaaaaatatataaaaattatttcaaattttataatattttttatttttttaatatttattttttatttttataattttatttaattttaaaaataatttttaaaaaataatattaggtgtaccaatataaacgtttcaaatatggaagagtatacacataagtagtctatagtggcagttaacttgatgacaccttaaatttgctattggttcactaatttgaagagttttaccgctaaaatttgagcttggaacgttaaatgtaagtgaaacaacaattgaaaaagtttaaccgccaaataatctaccaattaagtgctccctatacgttcgattacgttagattggaaagtaatctaatctaatggtcgtagtaaatctgcatgaccggtcatgataggcactaaatttgtccttatttatatatacatataaggaacacttcttaatgagtattacacatgaatagttactaaataaatttaact

SEQ ID NO: 74248 - DNA, 801 bp, Cannabis sativa
tacaatttattctcatgtccagcttcgcatcactgtacttttggctcttctaacagttacgtaactcttactctacaatgttgagtatttaatcatccaacataaacttaatagtattttaagtacaatagtttttatcttgtaaatgaatgcctaattgtaaagaataaagataaaataatataccatctcaaaaaaaaaaaaataaaaaaaaatatattcttgcaattttaaaattttgtccctatttatatatatttaaaattttttagggaagagagtgtcatttttgctcctaaatgtaaatgttatttttggacatggcacagaattatgcaatcaaatcttggcaatgccattcaaaccaacactaattgctgattctttcgagcaactcgatgttacgttgctcgacaaatgggtaaggcaaactactaacacatcaatatatatacagtattgctattagtcatcagtagtacttaatactttttataggtggcgctctatgattggttatcgatattccctaaaagttattttttttttaagttatatgatacctaatacttaattacactaataacagtatgacaccgatgatggtgttagacacagtagtaccttttagtaattctctacattatatgggagaatggagcgctgctcgttcaatactgcaaccagtgaacgtgttgttgatcactgaatactgtggccaacaacatattggcaatgttgtgggaactcgtgcctagagaacccagaagcaacttcaatgatttttgaagcttgatagtt

SEQ ID NO: 74249 - DNA, 866 bp, Cannabis sativa
aaataatgaacacaaagaagaataatagttcagtcagatcatggtctgcttagtccactgttgcaaaaatttttctatcttgtcctattcatgttggatcacttcttcatatacaaagcaagtgtccctttagtttacacaaaacttaattggttatagaacagttttacattaaatagaaataaacgtacatagaataaatgaagaacagtttaaatccattttactaaatgcaacaaaatatgcgacttctatagtgcaagttgcatgttcatctactcgcacaagctcccaggcttagggtgtgttttatcacaaaagaggctatcgggcctcgtacttgggtatctgcgtcctaatcaagttgcatatgtggataccttatcaacattgataacataagacatgcgagtccttatcgagtcatcaagtatgctagatcttttggaccaactcgttatgatctttactaagtcgcatcatgagaagtctatgtagtcatcgcagatatcttggtatatgcgcgacttgtataaccctttcttggtccttccttactttacgcaaggcgtaataatgcgactagactctgtcacggtcacatcatctcgttgagtttggttcaggcgaggtttattttcgaggagtcccttcttgacagcttagtaatcctcagggggtgtgagtccacgtgtcattcttatgggagtctggtcttgagtgtctaggcgaagaatttgcactataacagaacctcatgattctcaacatggtatgagagccatatcccttgcgagcaagtaatcctatccgatccgcacctatacaaataaaaattttacttttttttactatacacgtatttt

SEQ ID NO: 74250 - DNA, 1325 bp, Cannabis sativa
tttattatttttgtatataaatgtataaaaagaaaagtttgagtctattgatttctattaattgtattaataatattttatatgtatataaatgtattaaaataaaagtttgtgtctattgatttccattagctatattaatattaaattattttaatattaatttccattagcattaaatcagtatttactaattcacaattattatataaaataataagagataaagttataacaatcatatttaatatactattattgtattaaaaaaataacagctaatcatttatgcttaatttgtgctctattttaatataatctagtatttctatcttcatgattttctttttcgctccttttatttacttttctcctctatttctattaatattattttagagattaaacccaaaattcattatgggcgacaaataggttaggagagattgctaaaatggagattagattttttgaataaattagttttttttaaaaaaataaataaatagtaattacgcaaataatatatttttagctagaaattaggaaaaattaagaaaatttggttcctaacatggaaacttgccacatcaccatccctaacaagagcattatatatatagatagattgtaactataaatattatatcctttaattttgtatttacttacctttattttttttattttttttttggtagatttaagcatgtgaccaatttgagaaaaaaaaagcttatttataatttacaaaaaaaaaaaattaggttctactttagtttattggaatatatcaataagtatcagtacaatcttagtaagatcttttttttttcaagttcaacaacaaaattaaccaaaaggaagaaaaaaaatcaaatacaattttatagtaaaatctttatttttaaatttagcaacaaaactaatggaaaatatacatatatatatattgagtgtagatttagtaaagttataaaaaattcaaaagttaaatttaaatattttagaaacatataatttattgttattattttatcagttacgtgtttagtgatttttttttttattttgaatctacgtttagtgaattgaagtagtatttgtttttatatatttcaaattagcaaattctacaatatatattataaaaaaatgatatgatacgtaaaattacaagaatatatattttggtaaattagttaattatgcgatgtttttattttgttttatttttttttcaaaatttaataccaataatttgtatatttaaacctgttgagaatgatagtaatgatacagtgatgacaataattttaaacata

SEQ ID NO: 74251 - DNA, 941 bp, Cannabis sativa
  modified_base (690)..(691): a, c, t, g, unknown or other
ccctttgtttcgtgcgactggcttctatggtgaacctcagaggagtttgcgtgggaattcttggagacttattcggcagcttgtgggggaatcgactcttccttggagtttaatgggatatttgaataatgtccttcatcatagtaacaagagaggcggttgaccttatccaagctctttaattcagggatttcaagatgtggtttcagattgcagtcttattgatatggagttggtgggctatcctttcacttgggagaaagggaggggtacagaggcatggactgaagtccatttggatagagctctcatcaggcatggttggaatgatctttttccggatgcaaagttaaaaaatttagaaatttttgcttctgatcattgtcctattttgttgaatcttaatttatttagaaagtggttagtttaaagaaatttcagtttaaaaatgcttgggtgcgtgatcctatgtgtcgccaaattgtgtatgataattgggatgttcatgagtcgaattctttgagctcaaaaatcaaatgttgtagtactgctttagccgaatgggggaggggtatcactggtaatttcaagtagcgaaaaaatagttgtcataaaatcctaaagcttttgaaaaataaaagagatgttgaatcggtaaacaggtacaaggaggctcaaaatcgtttgttnnaagtcctcgcccagaaggaggtcttctggaagcagagatccaaagaattatggctgcaatctagtcaccaaaacactaagtactttcatgcttgtgcgagtactaggcggatcaacaatcagattttgtctcttaaaaatagaagtgggatttgggtggattaggaaaatgccttaccgggtgtcgttgaagattattttagagagttgttcacagcttcggagattgattggggtagggtcacggcttg

SEQ ID NO: 74252 - DNA, 603 bp, Cannabis sativa
aaaaaaattaatatcatataaaatatatataaatatgtattcttctgttttttacgcattgtttttaaaaatttaaaattttaaatataaattaagattcttctaaaatgaatattataattagatttcattaaaaaaaattataataatatttttcttttttaaaaaaagaatattataatattatttagttgtggatacttttatttttttaaaataaatagtataatattgaatttaatagctttttcatggatatttttacttcttaaaatttgaatattattgaatattgatagattattaaagttaacttttatttaaaaaaaatgagaaaaaaaaataaagttgtttaaagaatttttaggcataaataaatatatgtagatatttttttggaaagaaatataaatatatatatatatttttaaggtatttttataattgaataaagatttgaaatgatatataatagtgtagcattgattgattagtaatacaatggttcttatttatcaaaaatatgaaagccacctcttgatttaaaacacttaatttctatgtgtaaaaattattagaactacatttacatatataattata

SEQ ID NO: 74253 - DNA, 1212 bp, Cannabis sativa
tggttggcgagggttttttcgtgggtttgggctgttatgcggtggctgttctttgtgttcagcaagtaggtgtgaaatgaggaagacgatacaggctctgataaataactctatggcgtcggttatttggtattaaccgatgccatagggttaatctaaagccactcattttaccccaaccccaaaccgatgacataaatataattaaattctatacctacggtttttaccaaaaatttcctttaaatatcaattttaaaccaggcaggtattttcacacaatttagtttccttttttataaaatggtttgaaaaaactgtctctaaagcccatacttgtagtagtggtatcatatttttttatgaaataaataatttaataataataagataatatatataacaaagtaagaaaccctaaacctaaccacatctctttctctctcaccctctctttgcgcctcattctttctctctgattactctgtctcaatttttttttttctaaattactcaaagttttaaccttgatgaactaaagtatggcgtccatgaatggcctctcagctactcaacaccccatcccttgttgtttttcccctcaatatataaaaccaaacctattataaaaaacggtggtagtataactctgtccacagattttagcggagaaaacgttgaatctcaacgcccattaagttataaatatgctttctattcatttaatttatgtatattggtatttttttgttttttaaatttttttaagatttttttattttattaatattatattgtgtgtgtgctataggtggtcagattttggtcgcaatttattgctggattgcgtttataaggtaaatatttattaacttgatatataatatacatgtatatattttgtgttttattattaaatatgtgttttatatatattgtgtgtatatatattgtgtatatactatttgtgtatatatttgttgtgaatgagaatgaggtagtagggatttaattagtttagaattaaagtttttaaaattatgttagcgtgatatataattggttaaatatgtatatgtatatattttttttaaaaaaaaaaataactatagagtttagtaactagtaacttgttacattttttaataactagtaagtaatataataattaaaattctaatttggttgtatattgcattatattataggttg

SEQ ID NO: 74254 - DNA, 536 bp, Cannabis sativa
ggacagttattttttactttgtttttgcaataatattatattatgttgtttggaaggtatattaatgttgtttttgtatttattttatactacattgtttataggttgtttttatgttgctttcattgggctccgtaagaatgtcattttttttttttaaaaacaaatccataaaaaataataaatcatatatatggagagagagagagaaatttttgccggcataacagaatctacttttaccggtacatttttgcattagcaaaagttgttcacaaattcatgttgatactgaaactttttccagcacaaaacagaaagtgttggcaaaaatgacttttctcagtgcataaatgttctggtaaaagctagactttttccagcgcaaatgtatattgataaaagctagacttttttcagcgcaaatatgtgttggtaaaagtcttacttttatgcattaaagtgctgggaaaagtctaatttttgtcagcaaaaatgtgcgctgaaaaaagtaagacttttaccaacacacattt

SEQ ID NO: 74255 - DNA, 672 bp, Cannabis sativa
ttagaatagtttacaatataaaaagcggtgttcaatagtctatttcacacacgtatatatatatatataataaaagagtcaaacatgcaataaactgcttgaactttgctttctgtgtgttaatttttttctaaatttttcaaaattttacaaaatattttatgtaaatgtaaaatcaaacaaaaaatttatcaaccaaataaaagtgtatcggtgcgcttcttttttaaagaaatgcattatatatttttctaatagtcatgatagctttagaaaaagtactataaatacttaaccaaattgaagaagaaaagaaaaataaaaaaaaaatatatatatatcttagatttttgaaaaaaaaaatgaaaatgaaaaaaaaaagtttcatatgtattcactaaaggaaaactcattatatatataggttgacgttttgaatgaatagtgtatatatgaattctttttaaatatgtaggatttaatattttaaacttactatttttttaaataagattgaatccatctaatattttagatctagtattagataaaattaaatccatccaattaaaaaaaagagtaaattaattttcatatatacacctacaacattataaatttaattacttatctaaatttaaatttagcgtattgtttttcatgagttttgaa

SEQ ID NO: 74256 - DNA, 923 bp, Cannabis sativa
tcctcagcttcttcatcagtaggattggcagctgccttttcaccaacaacacctcgattgggttctgggacctaaaaaaacaaagtcagaaaataaacaattgcaaaacaaacattaaacagtcaagcaactaaaataaaacataattttcttgcaaacaaattatgatacactaacattgattttacgaacagcctctaaacaagccaacacaacttgatcatcatcaatttcaagttggcttaaaccatcaaaaaaatcatccccctttaaactggactcattggccttaaggttctcaacatcactgcctgaaacaacctcagattgattcacatcaggaggaagaacatcattaacaaccttatcatctccatcagtatcaccaccatctttaaccaactcatcacattcattggagtcggatttaatattttcaggatcaggcagttccttctcatcatcctcagcatcatcatcatcatcagaatcttgtgttactaactcatcagatgactttccctgattcattcaacataaatgcaacttaaataaaatagtaaagaaactaaaaacaaagcatgtaaaaacagaaacaataaactataattaaatacctcatcagaaagacgatgatgaaaggcattaactttctgttgaatatccttagttatagtcattacagacttgaaattaagatcaacaaaacacctcaaggaaatgaagtcttcagccaaggattcttgattcgaaatgaccagctccaacttagatttcatcaaatcaatgtcctctaaatcagatttcttagaagatgaactactttcaaatgtttgcttagatataccgcagtcatcaatagattcatcaagaaataaaccgtccagttgaagcttctacctctcttcatcagtaggacatat

SEQ ID NO: 74257 - DNA, 682 bp, Cannabis sativa
ccacgttgacttttccggtaactttccagcgacttttccgatgacttttcggcggtcgtaatttttccggcgacttttctggtgccggtgacttttttagcgacttttcaggtgccgacaacttttccggcaaaactttttgttgttttataaatatgggatttctactttttttcacaaaaagatggcataaaaaaacccatataaatgtaaaaaaacaaaaaaactcataccacttagctttatttatttatgtcataaaaaagtaaactcttaaatttttttcatattttgggtaatttttggtatgaaaaaaagtttcaagttttaacaatacaataattagtgggcttaggttgagccttcacatattggacctaaataaattataaaaattgatatttttataatatgcggtgcggtgcagtttgaatcgcatattaataattcaaaactgcaaaccgcaccgcacctcgcagtttaggtaaaattcaaaccgcgaccgtaccgcaaagaatttcaaactacatttttttacggtgcgggcgatttgagcggtttgagcatgaacacccctgagtaatcttcttacacgagataatcttgttaagaagcatgtttatgttgaatctgctatttgtcaaacttgtgagatggacctagagaatcatgcttatgtatt

SEQ ID NO: 74258 - DNA, 1139 bp, Cannabis sativa
atgttgtcaatttttatatagagaagatgatgagttttatatatattattatagttacatataattaattatattaggattattattagcaaaaaaatttaaaaatatagtgggttttgtatatattaattgctaaacaattataaatagctaactattaagattattattacaaaaactatcattacaaaattattattacaaaactattaaaatcattatatataattataataattgattattcatctattgtatatagcacatgttaatatatattattataactatattattatattatttgaatctatcatttttggtatatatattttttttttgcaaaaataaaatataggaattatattgaagaattgaaagaacagagtaaagataatataaaatatatttacataaattatgtaaatataaaaatgcaaaagatataaattatgaagtcagtataatatagtaattaaataaaaataaaattatataagaaaacttcaaaaaataattgaatttaacaaagaaaaacaataatacttaaaaaatgtagccacaacaatgtggttctacacatattcattatcttcttccagttagttcaatatatagctttatatgagtacatcttatagataaatttgaacaattcttcataatcgtaagcatatataataaagagaaaattgagacacattgcatccgatgtaaatatagatagtactatgtaggaggtatatagccgttgaacaaagaacatatgaagaataaaaataatatatagatggaatcaactttaccatcatcaaaatcttgataccatcctcctcttcaaatttctcatgaccttcaacatattcaatctcaattctgtatttttcaagcacagtaagagattagaaaagaaaagataaaatgtaaggaatccataaacaatcattttatactttcaatagtaacatcaaatataatttatatagtataattttttttttgaataattaattatattgtgtaagttatggaaatgaaaagacattattaatttaatttattattgagtattatatatgtgagagttagaaaaatgaaaaagacattattaattttatttatgagatttgattgataat

SEQ ID NO: 74259 - DNA, 771 bp, Cannabis sativa
catgtaaagataaatgacttctaaactttcattgataacaaatcagaaatcagattagattgaaatgggttgattagattgaaatgggttttatttagggcataaaatcccaacatgaacacccctaatcctacccaaaataatatcgtaagcatataaagaaattggggttgaggctttgtaatgggaaaaagtttcttcttgaaaagaagaaaaatatgggaaaaaaaaagtagaaataaaatcatttttgagatacactcccttagaaatatatacgtattgaagagaaaagaagtattttgagagggattaacatgaaaaacataattaggcctcttgaaggtatgagaaatagagaattgagaggtgaagaagatagagtcttattaatctttgttcacttaaatgatttttacaagagccaaggtatatataagcaacaaagtaaagtcggcaaatgaagtaataggcctaacaactaattgaatcctaactaactttacaacagaatcttgatataaagctaatgatctaatagcccccctcaagatggagtatagatattgataacacccatcctgaatacaatttgattaaaatgagtaggaagtagagcttttgtaaaaatgtcagctaggttctattgtgaggaaacatgcgttagttgaagtagggcttgttcgatcttctctcgaatgaaatggcagtctatttcaacatgtttgttagaatttattttaccaggatcttggatttactagcaagtat

SEQ ID NO: 74260 - DNA, 1784 bp, Cannabis sativa
gccccatggtgaaaaagaaaaagggaaaatggccttagttcagtttaccttaaaatctgcctctggccacactttgtggagatcccaagctgacatcataggacagcacacatcatatcttccctgaaaagatagtttttactagttacatttccttgtctgaggtaaatacacaactattaggttgagccaacaattgaaattacaataagaagtattaagtacagcaataatcttgaacatttcagaagagcatgtcacaacatggatgaaaaagtaaatatgaacctgaacaattgtagcgtctatgtggcgtatcttatcaatgttatccaataggtatgaatctgaagaaaagaatcccttgttggtaaaataatgattttcaatccttgcaaatgcctgggaagagcaaattaaacttatagaaccatgactaacttcagtcatcataacaaattaaattacagaacctgtaatctgaagtaaaaaacaatagaatacatatgatagattgaatctatagccatccacaattgaaaacatttcccaaataaaaaggatcaaagttcatgaaaagatacaggtataaaaatgataataccaaggaaaaatagtcatcatctcctttcttgatgttttcatcatttggaataagacgggcagtcatcatttcccattttgtccatgccctagcagctgcatactaaaaaattggtagtgtaagaaaaataatctaaacacaaatgtagctgtattatttttgctatggacttgtgttttccaactataagagacgaatagtaacaaacttccttcttttatatgaccaaccaaaaatcgtacttcaaatgtctgcagcagcatcattgattgaatttttattgtgatcgcgtgataatataaagacatagttaaagtatgcaaaacaagccaagtcttacttgtgtttccaagtcatcagagtttagtctcttgctgtaagcatctacgaaacatcctctctctttctctggaataagatctctaaatggttcccaagctgtgattgacaagataatcacaatattagcctcaatttttcaactatactaacagcacaaggtagtttggtattggtaacacaataaaacaagccaaacacaatttcacaacatcccaagcctgacaattcgatcaaatagtgtagctaagaaaatcatttgtataacagtaacctgtccatcatcttgaccattccgatatcaaaactcaacaattttactatcctatgtaaaatcccataagcaaaatcagtacaaacaaaataacatgtgatgaaatgtaaactcagaatgtatcagtgaaattcagttacagcaaagtattcactaggcagtactcaccatcaggataaatagcagcagcaccaccctcataaaaccaatcaatctctttctttctcagtagaaagatccctctaaggactagtccagtaaccttaaaatcagaacatgcaatgtacattcaaaaaccaaaaactacaaaagaaggggaaaataaaatacaaccttatccaacaaactatgcaccttatccggatgcgtttgactataagcaagggcaagtgtgcttccccacgacccaccaaaaacctgcataagcacagagaatacattctcttaaaaaaagagccttttttgtttttgaaaagtaatgaccaactctcctcttcaaaacaccatataacctgccattctgggattttaaaatgttccctaagcttttcaatatcatcaatgaga

SEQ ID NO: 74261 - DNA, 828 bp, Cannabis sativa
agcttatgcttctcgacaattaaatgagtacgagtagaggtaccctacacatgacttagaactcgcagcagtagtatttggactaaaaatttggcggcattacttatatggcaagaaatgtgaggtatacactgatcataaaagtctgaagtacttcttcaccaaaaagacccaaaaatgagacaaaggcgttggctataattggtaaagaattacgattgtgagattctttatcatcctggaaaggccaacattgtagttgatgccttgagtaggaaaggacagagtcagatgaatattgtgaagcaaatctccaggcagttagtagatgagatgacccgagctaagattgagttcattgtggggcagttggctaatattaccatgtaatctactcttctagagaaaattaaagtagcacacttgcaaaatccagagttagtgaaatcctgagatagggtttcgattggaaggattagtgattttacaatggatgacacgggaatgctacggtttatgaatcgtgtttgtgtgcctatggatgatgacattaaaagagaaatcttgaatgagtctcatacgactccttactcagttcatccgggaacaacaaagacgtaccaagatcttaaggccatgttttggtggcctggaatgaaaaatgatatagctgaatatgttgcaaagtgtttaacttgtcagcaagtgaaggctgaacaccaaaggcactgcagccactgaatcttccagaatggaaatgggaagacattgccatggacctcgtggttggattgcccaagactgcgagacaatacgactctgtgtggg

SEQ ID NO: 74262 - DNA, 779 bp, Cannabis sativa
atatgtactaaattatgtcccttgaactttcaatcatgttagaatctttttactaaaattagataaaaatccttaaacttaacaatctcaatagttcggcgggaatttttaatttaaaaaaagtttaagaaatacgatttagtacatgtcaaagttgaaaaattactaattaaccatttattaatatatattttatgttaacaaaacaagttaagtattgataataaaatgtatgttttaaattatcaaaaaaaaaaatatatatttgttatatgtcaaaacagcaaatcaaaagaaaattttaattagttttaaatttttttaatgaatatatacataaatataaatataggatattttttaagtgggagaaccacttttgttcttgctaatgcattttctttgttttatgattggttgtttttaggagatgtataggcttaaagtcgattatagagcagtgtaattttacttatttctcatttttgtaattattttttatttatattctaatgaaacaaacagtatagatcaaaattgttttttcacttcatcttcaatccatatttctttttaaaaacaaatcatcttcttcaccaacaaataataatgataccaaagcaaaaaagttatcgagaagaataaacaaaatatcataaatcaagaaattcaaaatcagaacataatgagaagaacatatataatcataagtcaagaaattcttttattttatagacccaacagttcatagaacttgtacctcaatcacattgattcta

SEQ ID NO: 74263 - DNA, 684 bp, Cannabis sativa
accaagggtagctagtccttatcaatttgaaaaatatccccctttctcttttttttttccttttgtgtgccccctaagtgtccaatgccatccactttacctcggaggcccacctgagtgccttctttgatttattgtagcacactaaaagtgaacttgctatcgctatgaactttttcttgcataggggaactttacttagagggatatcttggatatttatttttatgggttgtatagcagaggctttacttggatgtacgagcattggagttattgtctagtagatcctactagggtctgacgagcttcctgaagtacattttcttgtgtctgtttccaagagtccattttcttcctcaatgtggatatatctttctgctctctcgtagaagtctttaatgtcatccaattttcttttaaacatattcctccataatctactcctagggtgtattccagcagatatggagaacttatgttcatcattggaaattcttcctaccttggtgagtttggcattgaagcgttggatatacccccttaagccttcattctccccttgctttacattggtgatacttgttataggcataatacttgcagctttatgttgttgaaggaattcctctgaaaattgtttccaggatgtaatgctctaggtccaaacctcttgaaccactt

SEQ ID NO: 74264 - DNA, 638 bp, Cannabis sativa
attatttattgttattattgttacgttgatatttagttataacctctcaatcagaatataatttacttggtcccaagtgtattcttggatagtagttctactgtatatatttgtatgttttgttttaataaaattgatttctaataattcaaaattggtccatcaactcaagcattaagaagattgacaagttgggtaatagaactatttaaataatcattttggtagattttttttttatctaatttgatatctaacaaagttttttggtttaattttttttcattatcacatacgttatagttatttaaatttacttataaatttttaaaaaattttaaataatttatagagctaaaaattatttaacacatatatatataaaaaaaaatagtcctgcatgtaacaaaatatatataaaaaaattatttttgatattgtaaactattcgaaattttttgaaaatttatatgtagtcctaaataactataacatacacgattagaaaaaaaaaaaaaaagactaaaaacctcttttatatgccaaaataaataaaaaaatctactgaaacacacttttttttaaaagtaccagataagatgtacccaaactaaacaatttatagctttatattttaa

SEQ ID NO: 74265 - DNA, 550 bp, Cannabis sativa
tttgtgaaataatcccataatccctaataatataatctagtccattataatcacaaatatatataaaaaaattatgttgatgtggtttgttaaattgttaataataaaaatatatatataaaatattttcttaaataaaataaaaaatgtaaatattatttattttaaatattttttttcttaaaaataattttatttttttgtaatatataataaataattaaatacattttagtacaaaataatttattatagtcttttaattaaaacaatttttttaaaaaagttgagttgtaccaaccgtagcttttaactgtactttctacataaattcatttaaaagctactttttaagtacctaccaaatattttttttatcataacttttttaaaaagtaacttttagtttttccaaaaactatgctaaatagacctttaatatttgtgtcaatgaatcattttatccattttattttaccacatttatcattttaaattattactttatttctgacaaattttactctgattttaaattatcatttataat

SEQ ID NO: 74266 - DNA, 910 bp, Cannabis sativa
  modified_base (290)..(290): a, c, t, g, unknown or other
  modified_base (861)..(861): a, c, t, g, unknown or other
caattgaaccgaactgatccaatttaatccaattacaaaaaattatacaattagattggattaaatgctaaaagttggattctaattagatttaatcggttacgatgtcaatctaaaaatctaattaaaatttgatccattctaattatatttatatacattaaaaaattatttatatttatttatataataaaaaatatagtatatattaattatatttttattaaattttatttttgtgttaaatttgtaacagttgattattttgtgtatttattttcatgatgttntgttctattttattacttagaaatgttattgttttaattatttgaaacttttagttgcattacattgtaataataatatgtttacggagtattaaacttaaataaaagatgatctttaatttttacttattttcttcatatttttatgttaatattaaaatttaggtatgtaattagatatatgtaattaaaaaattaatccaattcaattaataatgaaattggattggattaaattttaaaatttaattggattggatcaagcgatcattaccacatctaactacagaggtatcataaatataagagcagctctaatgctggttgctcatcaagattgcttgaccactaaagaaaattgtatgggctactacaattgctactgtcaagcaatggtaagtgaattattttttttataatttttctgtcaaaaaggtgtattaatataatatttaaaatattaaaagtaatttaataatatattaaataatagagtatgggtcaattctcatgactttcaaaattgtttagcattggagtaattttaagagtaaagtggtcaaaaataatntggatgaaagaaaaaataaaatataatattttaagatgatgtgaaaatt

SEQ ID NO: 74267 - DNA, 1549 bp, Cannabis sativa
  modified_base (1167)..(1168): a, c, t, g, unknown or other
agagagagagagagagaacattgtaagcacttgaaaattaaaggattatcaatcgtaccgatgatttggaatccatgattgtaaactgttgatcttgaagcttcaatagagaaattgagccatttctaaggcgagctcgaaagaggaagtacccaacaacattttgcggaacctctataaatttagtgttatctctctattattttttttattactttatatgtttgtgtgtatggatttaggggtttgattttaatctgggaaaggggataaggctcgatcttgggtagatatcagtcttcgagtttcttgagaaaaaacacgaagctttgctagggtttgattcaattaggccaaggatgaagtgtttcggggatttgagagagttatgagaattttgtgttaggatcaaaacgacagtgttttgattgagtcaacttgtgtttgactcagggtaaaatgtctattttgacctcagttaaaagcttgattatattttgttgtgtgtaggttaaattggtaaattcctacaactgtgaacataaatcattttttaggggtaaccttaagaaaggttattatctagtcatcttaagaaaaaaataatttatggcataaatatttaaatttaactatcggatgtagataaatacttaaatttaatttttgacaataataatacataagttatatatttcgggaacttctaaagtacctgaacgttaagtatcaagttattatctacgtgtcattttcttattggtatatatatttaaatcaatttttaaataaaaaataaaaaaattaatgacatgaattaataaaggattgtcatgttacaatttacttgagatttaacgatcaggtacttacattagtttcagaattataacttacatattattaccgctaaaaattaaacttaaatatttacttacaaccaataattaaacttaagtatttataccgtaattaacactagaggtgctcatcaaaatgctcgcacaacaaaaaaatgcggtttgaaattctttgtggtgcagtcgcagtttgaatttttcttaaatcacgcggtgcagtgcggtttgcgattttgaattgttaatatgcggttcaaaccgcactgcacattataaaaatattattttttatatttatttaggtccnntatgtgaatgtccaacccaaagcctactgattattgtactactgaaacttattttttttttcatattcattttcaagccttatggtatttttgataagtgttgctcaagctttgttatattggtgatagtttaattattggtgatagtccaaactataaaaaccacaccgcaccgcaccattttttgcggtgcggtttggtttccgctgttttttagtttcgcgatgcagttgcggtttggaaaattaaaaaaatcgcatgtgtgaattaatttaaaaagaaatagtcaaaagacgcaccaccacatgtaccgcaaacacccttaattaagactcttagggcttgtttggaacgccgtattaggccgtattgtattatatt

SEQ ID NO: 74268 - DNA, 981 bp, Cannabis sativa
tgcatatccatatctattaatagcattccatgtacataaaaaatgtcatataacaaccatagacactaaatcaaaaactatattatcatgaactatattgaataacaaacaatatcacagtcatgaatttcccatcacttagctggaaaaaaaccaactatgtaagaagcaaagcttctccatttccactcttcggctagaaataatatcaagcacaaattataatacaaaaacaaagaacaagttgaaactattttaattgttagtgagtttcccacaatcaaagtcaaagctaaaaatagaaaagtgataagtggtctacactctacattctctctatttttcaactattaattatttcaccaaaatttcttggaactgtttgtttcaaaatgatagtatctatcctaagcataatcagtgaagagaactaataaagcaaatgagaactttattggccaagctcgaaccgtatgattaagaatgacattgcactaagttaatccagttcaatttttgatgattaagtatgacattgcactaagttatattcttagttagagaagatagtgaaaaaccctctaatataccacaacaaacaagaagttcataatatgaactactacttctagctacctagcaacatatattgagaaaacagagggttttttttttattattattgatgttgttttagttatagattttgaaatttacagaatagtttagtatttgaaattgtgttttgattgagacatgtttaacccttacagaacatgccaaaataaaaaattatataaagctaatttttatacttttattgtaatccaatatccaaatatcactttgaaaattcaagaagcatggctacatccctgcttttaattatacttaatttcaacatttagaaaaataatacctttaactactgttcatttttctgaggccaaaattgaagatggtagttgaaaatttatggta

SEQ ID NO: 74269 - DNA, 752 bp, Cannabis sativa
cataaccttaataatttttcccatatttttgaaaatagccctaaaaaaaaacccaaatattagtgttgatgatcaaaattgttaaccaagagtatacacattcctttttttttcaataacttaaaacaatatacaaattctaaataaaataataataaaaaaaagaattattttatatattattttttaacgtttttttttagtttacggtttgggttgctctggtagtttctatgtggttgctatacggattttagttgcgatttatggtgctctgttagttgttataggagtttttgtgtagaattttataaaaatacacaaaaaaaaaaaattaaaatgtaaaaataaaaaaaaactccaataaaacattataagaagcaatcaaataaaataaattattatatatatttatagtaatgcatttcgtaccacactgaggaaccacttacaaagttaagagctgtaattaggagtgtgcataaatagatcaaatccaatgagaatcgaccaatccaataacaaccgaccgtcaaacattggatatccagttataatcagattgaattaaatgttatttttaaatatacaattggatcggatcacatggtagatgagtgtccaaaaaccaatacatctaacatccaatggaattaatagtattttcatttagtttgaatgagtaattagattttatactattatacgtaatatttatatgtatatatgaaaattagcattaaaattttact

SEQ ID NO: 74270 - DNA, 700 bp, Cannabis sativa
aataatcttgtttattaattccatcattacttcactataaatatggagttattgatataattaattccaatgattaatcctccttgtgtcgatttgtaattattttttggtcaaattaccgttttacatttctaattacttctttatcttttagtattgttaattcactagtaaaagtataatttagatccaatctaaatttgtgcacaacttttcagttttagaattaatacctaaagggaaccaacatttaatccgctaggaaagttaggatttcataattgtagatcatgttcccagtcatccatattattagattctcaaaacagaagttgtaagaattattttctctgagaaactttaacgagtgaatcaaagaaagtaataacatgaaagtaattacaataacatcaactattgatcatctttagaatatgaattagatcttaatttataattttatttatatcggtccttcttatatataatctctattatgtacaataccttcatttagatgtcatgctatatcagcaatctaaatcgatattacttgcatcgaataacaagcatcagtgaaccgcactagcaaccattgattaaagattcctaaactttaatatgttattgattgttttattcatggctaagtaatattaattctttgtataatacaagtcacaacctcgtgtatgaataa

SEQ ID NO: 74271 - DNA, 1250 bp, Cannabis sativa
agaattgcacaagaactttaccgaatcttctgcaccgggaacattatcgagggtaatatacttgagcaagaactcatccttattattgttagtgattttcaatgctggagggactcccattttaatttcattccaatttgtaaaagttaatttaaatttggagtactctttatgattaggatcatcatcatgatcactacatttctccaattttgatgagtatccgcccaagagtgcatcctctgcatgcatgcaacaaattaaattaaatacgtgtaattaactataaaaacaattatcacgtcattaattatgtgtaatattatttaattatatgcataatgacaatgataatgataatagtagtgcgtgatagtgatgataattaatacatacgactgtagagctcgacggtgactagatctccagaaataggggaaagaggcgcagtcatatccttaaacttgtccttttccactaacaccactattccctttaccgttgtggtttccgcaaacaaaccacgagttaatcgatgcaacaacactttcattttcgttactattatcatttcggaaaacagaccaccagtcagtatgtgtagcacttgccctaacaacaccaacattttccttaacaataatagtaacgtcatttttgtatataaatagattaatgtctagttatgaatatgatatgatatgatgtaatttttcaacaatggctcttatttatagggattagggtgtacttacatgcatagtacataagtgattgtagattaattaatagtacgtaatataatatttgagattattaattaattaatccatatattactatatttaatcaacacattacctgtacagatccgttattatttgagatctcatcagctaattaattaatgatcattaattatgcatggtaggaatgatatataagagtcattattaattgttataagcattaatttcgatactaaacaattctaattaaagattaagatattattgccttaattattacattaattgaaacagacatgcatacatattttataatattattattatatgataattttacaaagtggagagtacgtgcatcatatcaatattattgtttaattattttataataattaattaaaataatgttaatatttaattttactatatatacataagtgtgtgacgtcatatgtcaagtgtctacttacgtcatttgctgatctgtaacttattagt

SEQ ID NO: 74272 - DNA, 820 bp, Cannabis sativa
agacgtagctccattactgtcacaatacaaggagtgaactactataaatttgatgtgtctctcttacaattacttaactacttattcattctcaccaatttaacgagcgggtgtggctcaaaaatctagtccaaatttttgagtcaacaaggttaatttataatctatcattaaataggagaaagaagaatggttaattagtattaacaattgggtaatcaaagcaatttaaattatatccataatttcatatccattgttaaatattttatttgtttgtttaatttaatttttcttagttcatttagtttcaaaatttatctatttgattgccaaataaaaataaaaattcaattgattattacttagctacagtcctcgtgggaacaatactttactttcattattattacttgtaaacgatatgtgcacttgcgtagcataattttcgcaacaagtttttggcaccgttgtcaaggaatatcttagttaatatcaatacaattgaattctattctattttgtttctttttatttaattttactaatattttactgaatgtgttttacgggcaaggttatccaaatgtaatatcaagataagtaccttgtgaattttgcccaacaacgcaatgagtcattctattctacttggggagatttaaggagcttggagagagatgttgtcctaatttctcaagtgggtgttttactctgttcttttataacagactttatgatgaaacaagaagcttggtggattatggagcagaggtaactggagagattttgttaagtaggagccatgatgtaatgaatc

SEQ ID NO: 74273 - DNA, 576 bp, Cannabis sativa
acaacatcatcccaatgcagcatgtaggttcgggcctgagcacaggcctgtgcttagggcccacctagcttagaggccaaaaaaaatttatctccttttaaaattatatattttttttttcaattttaaaaaataccacatttctttttttctaaatgagagcctaaaaatacttgtttcctatgacccactaaatttcagggccagccctgatagcatgatgcgattgattaataatttcttatatcattattaattaaatgaaattatgtgggacgcaatattaatttatactaataataatatgctaccttttttggtgtttgacgtctcttagcattctctttaaaaaatacaagatgagattttttttataagggtatctgatgaagtttaaagtaataaaagttacacaagaggagggggtttttttctatctataaagtttattgtctattataagggtatgattagttaatttatgaacttaaacattaaagttgcgactgatatgagagagatgccctaaataaacttatgttttaattttccaaactttcacaactctaaattacc

SEQ ID NO: 74274 - DNA, 706 bp, Cannabis sativa
tagtctttatttattgacagaaacaattgcaattttttgtggccttatagcaagtttggagtatggctttccagcttagtttttgaggttaagaatttgttactttttgtatttaactgaaaataaaaaattgctgtttagtactgcttccaaccagttactgtccgtcaacaaagaaaacccatatgaagttaagaagctgtgtgtgtgcaagtgtttattgtattaggatgctttgtagcatcatgaaatacctgttttaaatagtgagactctggataaagtagaaatttatggctgaaaattttatggaataaagatgctgctggtgcgagaggaaagtttggatcatcttctaattgatatatttgagtttagcaggggttttcaagtgaatattggtagcccttagagttttcttagttgaaggaaggtactgtttatgcatgtgatgctttgtagagttgctccttgatgggttttagaggacatagttacagaggattgagttgtatttagccattttaatctgtagaaatgcatgttgaaagctattgtcactagcacccttacttttcacatgtttcagtgtattttgaaggactaagttgatgatcgcagtgcaaaagttacaataacaaaaacttatgaaatttccttgtgtgtgtgtgtgttcttctgaaaatttagtgaaaagcatatgatt

SEQ ID NO: 74275 - DNA, 1204 bp, Cannabis sativa
atttgtttgaaaagacaacatatgagatagatcggtcggaattcgtcgattagaagatctccacgaatgcttaagtgagggggagttatttcacactgcacttttttttttcattgatcgagtttttgacccactaggttttctagtaagattttcgagcagttattatagacatccaaggcaaagtgttgtaaaattatataataatacatatatatggatgaccataataatcgggaatcaattagttacctaaaaaaatgaaaatcactattaatgcttaattatattttcttttattacattaattcagttttttacttttacttttattcttgtataaataaaaattcacttcattaaattaaattagtatagaaattctcattcaccctattattttcttcttttcattatttttttcttctcttattttttttttcaattctatattattttataacattttattattattattattttaaaggaaatattattattattattttttgaattaattattattattatttgttagactacataacatgactattttgacaagttgtgctcgtgttcacacgcttttactatgacgtcatgcgtgacatctaaatttgctttatttttttttaattacctgaatttgtttccttttttattcgaaaatgacccaaaaattgttaaaatcgtaaacccgggagattggacccagcaatatcatattcatccacctggacggctaagttaaactttgtgagaaaatcgaactcccatccctatatttactatttattctacttaattattaatgtaaaattaccagcaaaaaaattattacggtaatctttcgagaaaaaaaaaattattactgtaaaataattacataaaaactaaagtgtcgtttggtaatatttttttaatcagttttttgtttttaaaattttaaaagtgaaaatatttttcaaaaacatgttttataaaattgtttttacttttcaataattgagaattaaaattttaaaaacaaaagaaaatcactttcaatatttttttaaacagtttttttttctcaattaatattttggacttcgatcaaactcgaacccaaatcctcccacgactctagcactgaacccgtcctctgaccttaacccgaattcgacctcggacctagacccaacgtaaataaaatcaaaaa

SEQ ID NO: 74276 - DNA, 923 bp, Cannabis sativa
ttggtgataaaaacttagaaaaatttctcttcataagcataaatctatccatattcaatggctgataacaatcaaaacgatgttagtcgtcctgaaaaaaataacccatcatcttggcaaagagcccatgggatcttaaagacccaacacattagaaagaccacgttcgaggaggaatgatggtaatgaggatccaaactcagaaaggaggaatgaggatgtcaataactctgccaaatacatgcctaggagtgaggatgcctatgatctaacctaatatgtgaaattggtagagttagagaatagacaacttcgacgaatggctgaatctaactgatgaaacgctgagttggaacgagaagctgctgctgctagggctacacaaggaaaagttcctcaaaatcaacctgatcctactgtaaggagaccacaaggaaggccttgaggctccaggaccaggttgcaggagaaaaactaagggaatcccccaaatacccaagaggaacaacttgggaatacaagggatgtcccaatggacaggacaaatcaaccgaatcctaataatgcgaggaattaagaacaacgacgagatatttcacaaacttcccatagatttgctaaccaagggaatgaacaaactaacatgccagaatcatctgacatgaatgaagaaacaaggcctcctagactagggaatcatggattttctcatgataatgagagaaatcctagaaatcaacccaggataagtgatcttcctccgagacatcctcaacgtccatcctgggcagatagagataatgtacacacgtacttaaataaaggacatgtgtctattctcttctaaataaaactcccatgcaatagagcttatgagagcacatccacatgaagatggaagtgctctccttctttttggagag

SEQ ID NO: 74277 - DNA, 912 bp, Cannabis sativa
tgagttagagtgttaatcttaaacatggataaatataacttctatttgttaaaagtgaaatgataatttcctttgaacttagttaaaggcgttaaatgaagagatctcattttagtaattatattagtttattgaacaccatttacaaggaactaagtgttcaaggataaaatacattgagatgcaatagttttagtccttacttattgtaaaccatctatagaggatcatttattatttttatataaataatgtataactaatatcgtatctatattatgtatatagagcatttcgtgaaatcagaagtgcaattctgagtatagtgaagtcatgatgaattaataagttatgaaatttatttgttaatttatagatctatcttattgagagcctatattttttgggtccatgatcctatttaggataaataccaaatagtaagtcccaataattgattatttttagtaaattaagattcacattattgattctatcagttatgagaatttttatgctaagtgaaaatagagaagactaaaagagaaataaataaaatggtattaatcttgatattttttttttgtcaaagttaataaaaatatttaaattatattttatttaataattattagtgattattaaattaaactagtatttaaatataaaaaataattaattgtggtataaaaaggaaatacattttaggttgaggactttagctaaatcaagagcaaagtccatagtcaaagcccattgttcaagttgaaacgacgattagggtgggatagctatggcattccttagtgatcaaagaatcacttcttttatttcttatttattttaaagggtaaattgcggcataaatacctaatgttttagattttttacacttaaatacctaatgtttat

SEQ ID NO: 74278 - DNA, 1731 bp, Cannabis sativa
attatggcctccaacaccaataaggcttggtttgtacttatgttgtttgttgtgtcaaatgtgtttctatgggatgttgaggcagctggggagtgtggtcggaccccaataaggtcagctgcggcgagtatgagcccgtgtcttggggcagcgaagaatgtcaaggctaaagttccgccagcttgctgtgctaaagttggagcgttgataaagagtgctcctaagtgtctttgtgctgttttgctctctcctttggctaagcaagctgggattaacccgggaattgctattactatccccaagcgatgcaacattaagaaccgatcagcaggaaagaagtgtggaagtgagtataaatttatatacatatattataattattactctaataattggcaagatttattttatttttaaatgttaattcatacttcgatcatttatttgataatttattaagaatggaaaaaatcataattaatttaattttatattgaaagatggttttgggggcgctttttggcgccagcaaaaatctctattgtaattggaaaattatgtcattttttttttggttgatttttttatttatttatttatttcaaatgggtgtaggttctattttccactataaggtttgaatgaaatacaatggtgatggagtaaataatttcatataatatattgaaagaaattgcaattaataattttatgaatattacgatatcatttcgtcatatatatatatattatttttttaaaagaaaataaaaaatcattatagatgtaatagtgaaagcttgatattgatataaatatcatatgaaaacctaatatatttctcataatattaaagtatttttttttcatatagtggatgagccacattcattttaaataattatctatattttgaccttttcgtttgcttattaaaaagatactatctcatatatgtttctgaaatggttttctttattgtaaattttattaatttttaattacaactaataattgaataatcaattattattatttcactagtactgattcgagtttgcaaaatctttgactcagtcttcatttgtggaatttatttatttcaattagtattttgtcaaagttaatgatcatgaattaaaagtccctttcaatgtatataaaaagttatttatattaaatataataaaaagtctttccacttaattaagataaacatattggatcgaattttctcaccattaatacttcaaagtcttaatacataatcattggcatgacatactttatattaagattagaatatacattgttttattaaatttatatatttattttagggaatagaaaatatatatatataatctaaactctaattgtaattttttttttaattttctgcagagttcactgttccatgagaagtaaacgatgactggtgtcaatgcatatatataagtataagggaatgtcaaataagatcgagatcttcataaataaattttcatatataaaatatgttatgttatatgatatatttaatgtaccaacttctttctatatatacttatttttattactattaatgagtgagtttgtattgaccattattattattatggtgtttattttaatttaagcgaataattacctcaataatctttcattctttttagatattcatatgagttatgaattttagaaatatcttttcgaacccaaaatctttaa

SEQ ID NO: 74279 - DNA, 1268 bp, Cannabis sativa
  modified_base (877)..(881): a, c, t, g, unknown or other
gatacaatacgatgctacaaatcgacacgacacaatacaaaaaatatatctttaagtatgacacaatacgagaagcaggaaagacgctatacgtaaacacgaataaactagctcgaaaagcactatacgcgataaaatcaaaaacactggacgacatattaaaaactttattataataataataataacaacaacaacaacaaacaacatatgaatttatcaattataaataatttaaaataataataaaatttaaataatacttaatattataattttataactaaaactattaaaacataaaagaaattatatattaatttatttatagggtgtgatataaaaatatatttataaataaatatttaaaaatatatacatatactttagtaattataaaaaacagaaatatgaaaaagtaaagtacgaatttaagtcagaatatgaaaataggttgacctatttaagaaatgctggttggcacaaataaaacggaacacgaatctgagcacgatatgaaaatattaggcctacatgccttgccgggtgtaacgtgtgtgccaagatgacacgttacaagttaggtgatgcccacaagttggccaagtggtggtcaagtagtggcgcatgttgaggtgcatgctggtggcatgttgatgcctagtttgtattgcagtggtattttcgtaaatatctttaatattgtccgaattggggcgggacttggtagttgctgtttatttgggtctatgaatacaatggtgcaatcggatttgagaagttatgtgatttggtatatggtttggccatatgtctacagagccataatcgtgtatgttcctggtagaaggctaaaaacttagaatgctctttaagnnnnnaccctggtgtcagctctccactactctttggcaccttggtgctaagtgagctactactagtcagcgggactaatagggcgggcatatgaggacaacgaggggactcatatgtctccatgagttgtcgccatgagttgaagtactcatggacattatcgggccgacccggtagtgcgtctaagaagctgcaagaggttaaccggtacatttccatcagcttgccggaatgtcgcttacacaagatgtggcctaaacctccaagagacgttgtggtgtgtgttgaccacgagtcttaatatgagatgacataggtagtcatttgtgggctagcttgcatacgcgcatgggacagatgcattggcacgtcagcttggtgttggcatcttg

SEQ ID NO: 74280 - DNA, 1047 bp, Cannabis sativa
  modified_base (272)..(282): a, c, t, g, unknown or other
attcttgtgttaagatattttttcaaaatagggtgaattggaaatttaaactaatttcggtaaattaaaacttttaacacaaaactatgcaattaatctcttaatcaaataaatgcaagtaatatggcaagcaatgatgtatagcaaataatcaaacttgtaaagtaaaaagtttaagggtaagaacttccaaactctcaatttttacaaggttcggtagaattaagtcacctacatctttggtcttcaaagctattgacctagctttgagnnnnnnnnnnnaggcaagttaacgggcttgactaacccttacaactgaaaatttttcaccaagttatttccaaacatcttacaatagttttgcaccgccaaggactatcaaccactttctcggattattgtagtaacaatctcactctacccaggttatttacaataatggtgccaacttcacctcaatcacaatatggaaatgtgcttgaaatcacaagcaaattcactctagaagtatgatgaaacaatggaaaacctcaagtgattaacaagcacactttaaagaattaaatacaatttttggctgaaatgtgtgaaaagagtttgttagattttagacttgagagcccattaaaatcacttgaatatgttatgtgtatgaaataaatgctcgaccaacttaaatttttaagtaaaaatcgactttatatagtgttggggtaaaatatagctgttagaaacgaaaaacaagactgccactgggcaatccagttcactatttcccaaacgataaaccgatttcagggagaaccggttaaccgtttaggaattggttaaccaaattcctggcagtggcaaaaagttcaatatattttgcactaaaatggccataactctttattcgattatccgattttaaaaattctaattttgttcacttagttaaatgatatgtgatttaaaaagtcaattgaaatttttctttatattatttggtgagaaaacttgttgcccaagttagtgggctagaatttttacttaattttttttttt

SEQ ID NO: 74281 - DNA, 978 bp, Cannabis sativa
cttggcctcccttgtgtcatgggaagaaataaggatgccattttggggtttttgaaagataaaatgcagaagcgaattcaaagttgggagggtcgttttttgtctaccgctgggcgtgaagttctaataaaaatcatagcgcaagctttgccaagttttgctatgtgtgtgttcttgttgcctctgaaaacttgttcacatctagaaagccttatttctaggtattggtggagttcaagtagtaggaaaggtgtgagctggtttagttggaggaaactatgcaaaaataagaactctggtgggatgggtttttagagtttgcgtaagtataatctatctttgttgggtaagcaaggttggcggttacttctgcaccaggattctcttgtgggtcggatatataaggctcgatattttcctaactgctcattcttggaggccgagttgggtggcaatccgagctttatatggcgcagtgtctttgagtcacaatcgctactcagagatggtgcccgtaggagaataggaccaggttcatctactgaggtgctcaacacaccttagcttttgtctgaggctaacctgtatgtggtgtctaatcatccggcactggccaattgtaaagtgtctcagctcatgaagccagatagtagacaatgggacttggagcttattgaggacttgtttgattcccgcgatgttgagctcatcaaacaaatacctttgagtgttaatcttcggagtgatacttggttttggaataaggatccaactggttttttcactgtcaaaagttcctataatcacttacaggcggtcaatggtaattggaactcatctatggaggatgatgtttggaagatgctgtggaagattaaagcccctcctaaggttttacattttccttggaaagctctttcgggttgtttgcctacacgtactcagctttatagtagacacgttcctgtggatctacat

SEQ ID NO: 74282 - DNA, 893 bp, Cannabis sativa
atgttatttttccattgttttagcatttttttccttttttgttgtagatattttgggtttctttttcaattatttacgtctactgctcattttaatttatttgttgttgttgttgttgttgttatgtatttggtatttttttgtttcttattttatgcatattttttagtgtttttaatggttgttttgttgttatatggcctgttcttttgagtcatttttttttaagaaaatagatgaatagatgttatcccaaacccatttcttattgatcttctcatttcatcatcttcaaaatgttcttcttcttaagtttgttttttcttcatttgtttgaaagattgatccacatttttctattgttgtttccattagttcttactcttctcatctccatcatcttcaaaaaaaaaaatcagttttttaagcttctttttttagttttttttttgttttgtgcatgttcagtctcagatatcaatttgagattttgttcatcactccctgattttgttaaatatatggtttgttatttcgtatgtactattcggtgtttagtattatatacttgatttttatattttttaatagttgttttttgttgttttgaattattttttttaatgtatttaggattaggaaaaaaatttcaaggtaaaggttccctctcgtgatgttatagtagtccctactggcaaaagagttttgaggtataatttttttttgtgattttatttggttattttgttttgtagttttattgttattttgcagttgttttagaaattttttatgttattgtttcaggattggaattttaaaaatttatgttatgattggaaaaatagttattttctagctgttttggtattgctttggtggttcagtctata

SEQ ID NO: 74283 - DNA, 833 bp, Cannabis sativa
taattcaatatataaatataaatacaatatttttaaattaaaattgtattaagattttaggtttttcagattttcaaactaattatttgacattttttattaattaactagattatataatattttatttttaaacaacttcagttaaaaatgtgatatatatcacgtacgtcgtctgaaccattccgctatattacacatctctcagtaaagaacacataagtataagaaaagaatagtaaaaatgatttttttaattagtatagaataaaaataacataattataaaatatgtctattttaaaaataaaaaaatattatgttaaaattaacgttaaaatattatctcttattaataaataaacctaaaaaattaaacaatcttttattaaattaaattattgagatttttgttagtttaaataattaatattattttattactcatcaaaaataaccaattttgctaaaaattaggagaaaaaaatgaaacaaattgttagacttattagcatctcaattccatttagtcttaaatattttctattctgaaaagagacgacgatttcttcgttcaaatccatctccgtgaatggagcttcagagatcagtgatgatgaggctctttctaaggtttctgctactgtctttcgcacctatctcatttcatggaagatttgtggtggagaagaacagcttgagggtaacatcatcggaccgaatcaggggaacaaatgacagcgccattggaaactttggaatacctcaatatagtggtagcatggctgggaatgttttgtacccaaaaaataatcaaaagggttgtaaggagt

SEQ ID NO: 74284 - DNA, 874 bp, Cannabis sativa
agataatcaaatatttaaaatgcaaaataggtgaaaatgataaagaagaaaatcataccttaatcgtttgagttgttgtgtttggacgattctagaatgggcgagagtcactcggttttggcgagggtttctggcgagaggttaatagcagaggatatatatcgagggtgtgtataatatgtgtgataatctgtctcgagataggagaagtgtttttagagaaatactttttatcccagttattataaaaattggggtaaaagggtttcacactaaaccatttattttcaactaaccatcgggataaaagatttccctaaaaaccctaattcctatttggctaatccataaaaatcgaatcttgaacttaggttttacctttaatatttttttaacattctaccaaacaggaccttgtctaaaaaaaatttcctgcatatttgaggtgccaaatttaaaaataggataaaaagtttcaatatatcttttatcctgttttttatttttgttaactaaaaaagtgggataaaagcatgtctccttttttgtattgttttaaactgaaaaaataaattaattattaagaatttggggtcaccttgtaatctgctgaagttggttattagtgtatatgatattttttatttatatataaccaacatcattgtgtatatatgacgtttgttatttgataataaccgatgctatagtatacactttagcgtcaatagtttttaattttatagcgtctttcggattgatagtgaattttgtcaaaactgacactgaaagactctaaaaactacttttaaagctcaaatttatagtattgacgattgatataataaattctctaacatgtactaggagataa

SEQ ID NO: 74285 - DNA, 1371 bp, Cannabis sativa
ttaaataaatagtaagttttgggcaaggaagatatgattggttcttttgaagttgaacatgaaactcaccatttggcaaatctcttgtgtttcttttgcttattatgaacaaataacagtttgtagcatacaaaagctgtcaagaaataataacaaaaagctcaaactctcttctttttagaaagatctttgattattacttgtattgttgaaattaccatttgatgatcactttctgcacttccaataagtgtactcttaatttaattactcttcaattttgttttgcagtatttgatttgtgagggtgccattagcattgcctctaaaagaatagtatgaaaattgccacatttatttgacatttgagttcacaatgagagccacattcttactataattctaaatctagaataaaggcaaaatgtaatatgtggtacaactaattagatgaatatggttagtgtggtcaatgctcccacatagattacatactaaaatagtagttaattaatgacttataaaacccaaatcttttgagtaaagaaatcatactattcttgaccttttaactaaacagaactacataatagtttgatattaaattagaaaagtaataattaatagctgagaaatgtaaatatatgcacaattatgtaatcgttaaatttcatatatactttaggtgatgtttagttaatagttccattacggatatgtttggtttataggaatgggaattataatgacaatcaacatgtcaattactttgtttgctttcttttttttaaattttgtaatcccattacattattgtaatggttaatacattgtatgaagtaatccaccattgtaatagccattacaatgacaatccattacaaaattaatataatattataataaaaatatattaaaagaaattcaaaagtttattttaccttttatttaaatattttatcattatgacagggtgttgggagggacggttggatggggtgaagttgttgtgtttggcagctgatttgttaatgtttgtaaggtgcagcctttggatcgtattgagaggcttgctgtgcttctttgaggagtttggagagctcgtaatgacttggtttggaataataaggctttgtcggtagagagggtggtgaatgctgcaattacttaccttgattcttggaagaatgcttagctagaaagtagaattgtgtcgccaatttctaggccgattacttccgggtgtgagcaatgggctaaaccttatttttgtgaagttaaggttaattgtgatgttgctgtctttgagaatgacaatagtctcagtttggggtggattgctcggaatcataatggtttattcattgatgc

SEQ ID NO: 74286 - DNA, 1101 bp, Cannabis sativa
tcttaccttctttctaggattgcaagtttgacaaattgaccagggctttttatttcacggtcaaagtatatataacaaaaatgcttgagaaatttggcttagatcaaactaaacattctcctgcaccttgttgcaccactaattgatcgtttagagacgagtctggtgagtcagttgatcaaaccatttataggggcatgatagggagtcttctttaccttacaactagtcgactagatatatactttagtgtcggtctatattctttgtaccacgccaaacccaaacaatcccattttttgatgtgaaatgtatattcaaatatctaaccggtacttttgagtttggcttatggtacttgagggataccaacaagtctattgttggttttagtgacttagactgggctgggagtctaaatgataaaaaagcaccactggaaggtgttttcatcctggcaataaccatgttttgtgggtgagtaagaaacaaagttctatttcactctttactgctgaagctgagtatattgcggctgggagctgcagtactcaactcatttggataaacaaaatggtaattgattatggatttccacaagactctgtggttcttttttgtgacggtacaagtgctatcaacatgtaaaaatatccagtctaacattctcgaaccaaacatgtaatatcctaaaaagtgtaattatgtttaattgaacatattttattaaatatataattatataagtcttagagtaaggttataatcttactaatgataattatgagataattagtgactcatgggaaaatgattaaatgagcgtaatttattaattatagagattttattagaacatgtgagtattatatatacaatttttttgaaataaaatatttttgggttcgacgaccgtagaaactcgatggattggccaaggatacaacgacagtaatagaataagttatggattgtactagaatgttttagtatgcttgagttgttggattattcaacgtagatggctttgaccaaaatacccctaagttataaagttggttatttgtagaattaagggtagaatagtccttttattaggtt

SEQ ID NO: 74287 - DNA, 1043 bp, Cannabis sativa
aatctttattccttgtgggggcgtttctcattttgtggtgagagtacgacttacactaatttgataaatgtgccaattaaaatgctctcatgacttgagctactccattttggcttttttacgcatttttctttttctttattcaaccttgattgatcatgtcggcaacatgaaaaataagaataacgggaataaacttcctcagaaatttactattatcatttctctttccacactcatcaatcacatactacccttttttcttctcttttgagttctttctttctgtagagtcaccaatattatcctatgtaaatgaattcatgtcaccaatttacactggagctctaataatattttattctagaggaatatatatttgatgctactattaatgggaagactgttattaaataacagaagaaactagtggaagaatatcttccaatgaaaaataatagacttatccatcccaagagcatgaccagcagcataacctactaatatatagttgttctatatacatgatttacatcaacccttagaaagttagatagcagagaggaaatatcatgaattatctatatcataaaaaactaaagcagaatgctgcataatttggcaaccatcaaagcatctacctctatggaattcggaaacaagccatggtgatgatctatcactatcaaccagttaagtgaatctaacaaagacaacgcttctgtaaaatagattgaatcggatactattaattgaaatagttacattcaatcaaataatataaaacttagtagtattactataaatttgcaaggattatcaaaagctaaaatgcagagtaaattaaaatgaacaccacaaatttacaagtttcacccggcttagaaacacattctaggcggctagtgcttgagtttcccgaatcaaggtaaataacctccaataagaatcaatgtcaagatacaaacttcagtttgtaaatcaaatgtttgtaaaacaatacaacaaagattcttataataatttaatctaagatcttgatt

SEQ ID NO: 74288 - DNA, 1190 bp, Cannabis sativa
ctgggacctgaaccaaaaccagacggagattcgtgacagtgatccagatcttgactcgagattcgggtaacaagacctgaaccctgacgaagaaccaaacccgagcccagacctagacctgggacccaaaattagaactagaacaagaatcgccgaaccaagaccatagaacaagaataggaccgcgactagtttccagacccagacctagaattgaacacagacctagcgccagacgcaaactgtgactggaactctggcccagaaacggtcgtgtacccagaccggaactgagaactgagacccacacctagaccaaaatatgggacccgaccccaaacatagacttggacctagatagggatcgggatacgaacttggactcggaccaagacccagactggatcgaaatgctggacctagatctagaccgagatcctgacccagaaccgaacttggacccacactcgggacccgaacttggacctagacccgaacctagacccagatcgggtccagacctagacacaaacctggacacaaactcgcacctgaactcaaacaccgacacctagaatcagacccaaagaaagacccagacccggacgcaaactcgaaacaaaaccaggattaaaactaaggacttagaccgagaactgaatacagactcaaatcgggattggatcccaacccaaacctggaacagactaaggacacagaactagggtcgggacctagaaccgcaccccagtctcgatcccgaacacaaactcagaaatcggacctgggacctgaaccacaaccagaccgagacctgtgacagtgatccagatcttgactcgggattcgggtaagagggccttaaacaaaccagtagtcggtgtctagattagggaatcagactaggactagaacccaaacgaagaacaaaacccgaacccagacgtagacctgagacccaaaattagaaccagaacaagaatcgccgaactaggaccctagaccaagaataggaccgtgaccaggttcaagacccagacctagccccagacgcaaactgtgactagaactctggcccagaaacggtcgtgcaccaagaccggaactgagacccagacttagactaaatattggactggatcccaaacatagacttggacctagatagggatccggatacgaacctggac

SEQ ID NO: 74289 - DNA, 823 bp, Cannabis sativa
tcacgttgttcatgttcgtgttgtggttgttggtggtggtcgtggtcgtggagatggtggtgtttacctctcaataaatccaaaaattcatacaaatgttcattttcacccattgtattataattaattacgtacttcctaatgaattaagctatatagatcaatctatcttataaatatagctaccacttttcatcaaattaatcctaattctatttatattcaaattaatctgttaagatatttatttgaatccttattctaatcctattattactctatatatattaactaattatatacacgtaggttgattaaatttgaaatttgattttttttttaaaaccgtatttctaatttaatttattttatttttgataaataaactttattttaacaaactgaatttgaaattaacaaaaaaattatatcttttttatttattttcgtattgatctgatttcaacctaaccctattttttccaattgttagtgtagaatatatgtgtataaattcctaattagttggtgggactaagatgaaggttgattatctttgttctttttacatattcacaattttaaaaattcgatcaaattatgagtacatgcaagttttttgagatgataccactgatattgctttcaaacttaatattctagaaactaaatgttacttatttcaaaaaaaaattaagagagatacaaaactaagtgcatgtttggcatcataactaaaaaaatagttttttgtttttaaaaacagaaaattgtttttaaaaacaatttggcttgtttggccttattttttaaaaacagtttt

SEQ ID NO: 74290 - DNA, 888 bp, Cannabis sativa
tattactaaaatactaaatcatacgaaaaatgtgattctattggcctaacgtcaccttctaatgttgttgggcataaaatatgaaaaacataaaatttcatatataacataaatagcacatctagaattcaaatatatcaccataaattaataaatcaaaattagaaatctaatttttgaattaaaccctaattatctactaatttctatattaaaattaagcagtctttacaattatccccccgtttaaaggattttgtccacaaaatataacttgaacaactctggatattgagccctcatgttagactccaactcccaggtggcttcctccaccttactgtttctccaaagcactttgaccaaagttatggtcttgtttcgaaggtctttatcttttctgtctaaaatctgaactggtagctcttcgtaagataaatctggctgaagttctagatttttataactcaatacatgaatggatctaaaacgtattttcataacatagacacatgaaatacgttgtggactgcaaaaagtgcttaaggcaaagctagatggtatgccaccaatccaaccttctcaagaatctcgaaaggccctgtaaacctagggcataacttgccctttattcctaaacatttagttcccttcatcagagatactcgtaggaatacatgatctcctacctgaaattctacatttctacgtttcggatctgcataactctttttcctactctgagaggcaagcattctggccttgatctgttctattgcctcgttggcccgttgtactgactcaggacctaaatatttcctttctccagtttcatcccaatgaattagagatctgcacttcctgccatacaatatttcatagggagtc

SEQ ID NO: 74291 - DNA, 734 bp, Cannabis sativa
  modified_base (705)..(709): a, c, t, g, unknown or other
ctcaatctaagtgaccttattttcttaaactaaggaggttttgtcaaaaccatgcatatataacatatatatgagttgcttaatttgttagcaaaaattattacacaccctaataatttaattcaacatcagaagcaaattataaagttaaaccaaacccacacgtcatttccgtcttatttctctacttaattaatatttcaaggaaaaaaataataggaaagttgacattggcccgtgttaagagtattcaattagtctaatagttagttacagttaattatatttttactgttgcttcaactggtgtattctgttatggttgttatcaattcggttacaactgatcttgatcagttgaactctatcttcttgtataaatactgtactaactgataatcaatataatgaactctttcactcaatctttcaatctctttcttctacctttctctctttctttctctgttctttgttcttgttaactttcatgttcaacaatgtcaaggagattcaactctcctaacatggtatcacagccgtggcctcctctcgtcgctaatatggccaacgttggtcttggagaagctgcaaatggacgaggaacaaccgttaatggtggaaatcaagtcaacaaccaaaattgaaatcgaaatacccattctagttgagaacatactgcttctaagactcaataattgattnnnnnttaatcaattataattctgaagtta

SEQ ID NO: 74292 - DNA, 846 bp, Cannabis sativa
taactaaatgtaagcataaaaaatcaaatttcccaaacagaaacagagaaaatgtttctaagtagaacatgttagaccatttcaaaggaatcaagatagacattaattatgtccagtgttatttcaaaaaaaaaaaaaaattaagtgtaaaaattttattcaatattttttttccatgttttcatattttttttttatttgccattagcaatttttcattatacacaaatttgtaaaagatgtgtgaaagtattagactatacttatgacatgtcatttagttgctttaagtatttttgttagtaattaattacgaaattactttataatatacttattgaataatttttaattataaaataactaaatactttataatagtttatgaaattagttgctatagtaaattttgtttaagcttatgattttctttgtgaggtgttaaagtttacaattttgttaatcttgaggtttttttatatcttttttgaaagcgttttagttaatacaaatactaaagaaattaaaatgatactttttacacttgaggttagctcaagtggccataggtgagtgtgtgagtgttggaggtcctaggttcgagttaaaatatggttgtaatatataaacgcttaaataaaaaaaatgatgcttttaagtctaaaaataattaatagtatggctgatttttttttttcttttttgaaaaacaaaagagagatgtataattcttttagaaaaaaaatagagacagatatgacacatatgatttgagatactaaaaaacgtggtaatgtatttgcgggagaaatactgagctcatatatataagttgacattttatcc

SEQ ID NO: 74293 - DNA, 1144 bp, Cannabis sativa
  modified_base (1090)..(1097): a, c, t, g, unknown or other
acacttaaactgttgcaagtattctttttttttttcattgattttttttttgatgaaatactttcaacttgcaaacattatcaaacaagataagatgaagccaatggctcttacgtgtatgttttttggatatccagaaggaataagggctaaaaactgtggtgccttgaacccggacacaagaaatgcttgattagcagagatgttgtgtttaaggaagaataaatttccatgaaagtcaaggtcattcctgaaactgttcaaacaacactgcaagaagaaaggcagattgaggtggaccaatcacttaataactctacataggtagaagacatagttgaggatgagagtagtcatggtgatataagaagctactagctagcaagagacagagaaagaagagaaagcaaaccacctaataggcttggctatgctgactttattgcctatgcactaactattgcaaaggaaatggatagctctgaaccaaccagctatcatgaagcagttaatgggaaagatggaatagcttggttgcaagccatagatgaggagaagtcatctctagtgaagaataagacctagataatggtcagaaaatgagaggggtgcaaactggtaggctgcaagtggattttcaagcacaaagagggaattcttggtgttgaatccaccagattcaaaggttagttgcaaaggggtttacacaaaaacaaggtgtagattttaatgagatattctcaccagtggtcaaacaagtctcaatcagggcaataatagccaaagctactagatccagcttagaagttgaccaaattgatgtaagaactgcattcttacatgggaaacttgaggaaccagtctacatggaggttctagattggtttgacaaagaatatggaaaccaagttttcttgctcaagaaatctctctatgggctcacgcaggctccaaggcagtggaatctcaggtttgactcctacatgatcatgataatattcatcaaaagtaagtatgatcactgtgtctatttcaatgatcacatttacttataactatatgttgatgattgttggaattattttaccannnnnnnnatttactaacaagtatgttatttacatcctaaacatgaacttctaaa

SEQ ID NO: 74294 - DNA, 1271 bp, Cannabis sativa
  modified_base (1198)..(1213): a, c, t, g, unknown or other
aaaaaaaaataattgacaaaataaataaaacattaaatagaatgtaattataaaattatttaaataaattgaaaaatatatttttatttaaaaaaataaaaaaaatatattttatgaaacatttttgtttttgttgaaaatatttttacggtttaaaataatagtttttttttttcttttgatggaaaacatcaccaaatgtatattgtacgcagttggttggatagctttacgctaagggcatctccaaccagacttcaaaatactaaatataagtgtagttttacattatagtttgtctatagcgtcccaccaaatttaatgggttattgtagaccacactatttttgttttttaagtttttaataattaaataatactttttaagatacaaaattaaataattatatatatttagtattaaaatattcttattatattaataaaataatagaataataaataataaaaattttggtgtaatttttagtgttgtaattggaattgaaaaaaaaaaaattagtattgaaatagtaattttttggtgttgatttaacactaaatttaagttttaccattagagatggcctaagtcttgtatttggttgctcttttgaatttgaattcctatgaaaacacttatcctgaactttaaaagtggcattcctttgggagtaatggtctactagattgttattaagccgaaagaatagaaatagaatgtacatcacatgattccttttaattatataaaaaaaagttcatttacaaataattgttaaaaaacacatttttgtttttttcaatcttatttatttattttcttttgggctatttataaaattataagaaaaaatgaaaagtttacataaatatggcattaaacttaatgacactaaatatgacattttttaatcaaacaaactaaatatatatatatatatatgactgttaacgcagattttcattaaccaaaatttgagcttcacgatgataattcaacacagaaaagataaaagctatagaaaaaaaataatatatgaatataaagctttttacgtgattttgcagttaaaattctgcatagtccacgagtcaattttattcatatttttgagtattttttttccaggacctctttcacaagagtttattccgtccccccttttttgatcatgtctgccactatttataattnnnnnnnnnnnnnnnnttacaaagctgaccaaaatatgtttacagccattaacattaaaatcgtggtatttgat

SEQ ID NO: 74295 - DNA, 815 bp, Cannabis sativa
ttattaatctatatatatatatctaaagtagaagtataaaacggtgacgtggcgctttaaaatgacttaaaacatgtttatctattttctcattttttttctaattatttaaaacatattcatcaatataaaaaacctaaaatatctatataaaaataattaagaatatatcaatatatatagtctcttataaatttgttgcctactattttaaaagttttggtactatattcttacagttttttccgtttataattatatgatgagttttattcatttttatcaattatttttgtagatctctattttgagatactatattctcacatttctttccgtttataattatatagtgagttttattcaattttatcaattttttttttttttgtgaatttctattttaatttagtcttttattaccctatattatttgacaataactcttctttctttttttattttacatcacaaattatatgatgagttttttttttatatagatttgtcaattttttttgagatctctattctcggtgagagtttttttaattttttttggtccttactataaagataaatggtattttaaaaattatttaaaaaatatgtatattttttaaaaggtatttttttatttgggtccctaaaataattgggccttaggcacaggcctagctcgccgagttttttatctcacagatttgttaattttttttttgaaatctttattcttgatgaggatttttcaatttttaatctttttatctctattttggttttggttttggtttagtcttttattaccttatatt

SEQ ID NO: 74296 - DNA, 921 bp, Cannabis sativa
aaaccagtttcttggtatttttttagtgatttttccggcgacaatgccaattctgacgaatttttcaacgtcgacagcaactccgacgacttttatggcaccgaccgctactctggtgattttttcggcatcgacagcaaactccaataacttttccggcatcagtgacaaataaaaacattaaatatgagacttgaaaacataatttacatatatatgacatatcaagtaccataaaaggacttaaaaacaataaaaataccatataaattagttaaacttaaatgtgccatatttatcataaaaacttttaaaatcccatagtaaatgtaattttctcttcaaaaattactttgtatatatatattgctttgtatggtaataacagtacaaagcttcctccttttcatcaatatattgctttgtatcattattttcaaaattataaaaatacttaaaattctgtataacactatatttgctttttttttttatttttgaaataatcgaggaaattacactctataccaattttttgtttcatattttaatttttaccttcattttactactctttaattcatatccacttttataagttatattcccattatgtgcattaagaagtttaattttgataagttttgtgagattatatttggtaccttgattataaaagagagtatttatcatttaattttttttagagttatatttaattaatgtgtaataaaaaggatcatggccaatcaatcttggataactaaatatgaactagctgagactgtttttctcaatgagggtttatttgatcactctccagcaattttatctctacatcctcaaatggtggtgggtggggggggggggggaagcctttcaaatactttaggatgtggaaatcccatcctaagtatgatt

SEQ ID NO: 74297 - DNA, 784 bp, Cannabis sativa
aaaaataactcagttaaaaaaacgatctcacaaactaaatatatatcgttatttataatatatcataatattaatggtatttaaatttatttattaattcaaaaatgttattcaaattaatataatggaagagaataattaatcccacatttttttaatgtatctacattactcttctcaaggtacttatattactaagggaataacatttcaaagtttaaacccttaaaacaaacaaggtaatgtttcatattaccattcccttactagcattaacctattccaaacaccccctaagggtatcaaactcttggtttgaactactatccatgactcatgatcttggctgacgctgactccttgatgatcaagattatagttcaagaataagagttgtatatcttcaagtccatattctctcacatttggctttatattttttcgttttggagttggtgaccttaatccttctccatctacttgtaaattgcaagagagaaattgttaatttattgctaaaagcattatggaacttggaattttgtgtgctggttggcataccactagatagtaagtatgttgttataaaaagatgaaatgaaattgatatataaatatatttgaaaagtttgacacataaaactatacattttaaactcaggaacaagatgcttattaatatgcaaggtggggttttggaggctatttccattccagctttgggacaggtattggctactccacttgactttctttattatttgggtgtttgagtttcgccatt

SEQ ID NO: 74298 - DNA, 1022 bp, Cannabis sativa
tcctttgaaccaaaaccatagcgttggttaaagtactcttgaagaatagtaaagtggaggaagccacttgggaatcagagtctgagatgaggactcaatatatggagttattccggttagatttcgagggcgaaatcctattaacggggggataattgttatgaccgtatatggttaacactctggattattaaataattaaggtttatgtatgagacttaattattatttataaaatgcatattgtggaaatttatttaagttatttatatctatttattatgctatttatgtaatttctcaatttttgtggctgtgtccggaagctgtggaaagcgacgttgggcctttagagagtcgcattttatatattttagaatattattagcgagatatcattgttggatattggaggtgttggaattttcggggtttgaaaatgtctaagttaccgttgggagtttgtgatttttttatgttggttagaagcgcaaaaaggtctttgggcaagacattatttgtcttatctaggcttgttttagtgctggatataagctaatgttttaaaagaaattattttatttacttaggttagaaggaatcaaagaaatttacagaaaaatcattttaccctttcttcaactctctctctcttttctttcgattctcttgggcagcagctggggttggtgtaatttgagtggaatcaaggaattttagtgataatagagtgttttggccaaggtaatcattccttccctgcttcctttttgagtttttgtaatttaggttagatttttaatatgggattaagattctagatggttgtgtgtattgggttaatatgttgtttaattctggagttagaagtaaattattcttgcttatttgagcttagatggaggtttgtgttgagaattgttcaagtttaaagttagagaacctaagttaggtctctaatggtgttttcataaattgagttgtttgttgtggtttgatacttgatatgtgttatttggggt

SEQ ID NO: 74299 - DNA, 858 bp, Cannabis sativa
taataataataagatggaaaaaagaaagaaatatatataagacctggagagcaactttggattgattgaaatgaccatttcttccccaatctccaaccaccaaaatgctaagtgagccatcatctttgggtggatgttcaaacctttcaagctcaccaaaactacttctaattatcatcaaacaattaataacaatcaacaataatgacaactttctttgatgatcatgaacattatttcccaaattaaccatgaccttttttttttgcactacttaagaatttgtagtagtaaattaaagtacaatgacataaatgtttatgattcctccttcatatatttttgtgtacatttcatgaccaagtctatgaattgtttctatatttggttatgggatatacatccacaaatactagggagctagtggtgtatttcttacttggattatgcttcacaaattgagtgagtgacaatgcaaagttcaaggaagctagatagactattttaagaaagtaaacatgatttcacaaaaataaataaataattaaactttgaaaaaaaaaaaatgaatggttatatattcaaaaatgattatcatgtgctgaagaagcaaagccaaatcatcacaaacaatattccattattatttaggtaaagaggagcttgtatatgcatatacttagttaagatcacttgtccaacttcatattaatattaagagaaatggtcaaagaattaatagtttctagcacttttttaattgttttattactattagtgcaattatatatgagaaacttacaaaaatactggaattttggttaatttttacaaaaatactgtcacacggaaattttt

SEQ ID NO: 74300 - DNA, 524 bp, Cannabis sativa
cttaaagttgcagaagatggatggcctaatttttgattccaaacattaacatcttgatttaaagtagtagagaatgcagtggaaaaacaaattgaagattaggcaaaatcattttgtttatcaatgttcgacaaagtacaagaatctactgagtgatcagtagaaatattacaacaggtagcatggataggaacattttgaatacaattcaattgagacactgtggtaagattacattgtaatgcaggggaagaatgactagattcaccaagcacatatagaccatctttaactggtcccttgagaagaatagctcctatgagtttgtccttgacaaaacaacaatttttgtgaaattcaagatacacattattatcatttattagtttagatacgctaactaaattctttttaatggcgggaacattaagaacataattcaaatgtaaagggtgtggagtattgggagatagaatagttgaccctatgtgagtgataagtaatttcttaccatcaccaacatc

SEQ ID NO: 74301 - DNA, 1266 bp, Cannabis sativa
ttaatgatgtgtcgtgttgtatgtcgcgacatactgtagttttgtatttttctttataatttttgccatttatatcgatattgtttgcgatgtttatcgatatatttagacgtagtgtctggggaagtccaaaatgacctttttcgacaaacagcgatgtgtcgcgatgtagttgttgatatattccacgataaattacgatactttttgcaatatttctcgacatattttttatctgaattaatttttttttcatttttgtttgcaaattcaactatgtttgtggttgtattgtatgatggggcttgggaagttgaaggtttcaactggatattcaataacccaaaaagtaagatgttaatgtttaaggttgacactaatttacaaagatgcaagaaattttgtatgaggagttggatatagaccctcttgtgtatgaactgaaagtagaggtgtgttacatgtacatgaaaggaaatatgataccgccggaggtattagtgaaagatagtcaagtaagattgttcttaagaatgaaggcaaaaataagtgtgcagaacttgctgccactgtttgtgactaaggttaaaaggcataccattttggggcctactctgccaactgtccccccaagaagtgttgttgggagttttgtcccgaaaacagatccagtagtaggtttgaatgagcagacccctactaataaagatgaggatagggttgataatgtatttgaccagaagtgatgctcccttttacaacaatgatcctctggtaaatttgaacaaggatggtgatgcggagttgcaggttgatgaagttatagaggtacctcctttgaggttagaactacctccactacctctaaggaaccagaggatggaccaagaaagaagaacccctcgtagtgaaactcaccaaatcccaggcactagtagcaaccgaccaggtcctcctcgtagtaccgtaccatctgattttgaagtttgtacaaaattcaaacctattgtgtggacaatggaaagcatagagaaaaataatatttatacaacttcttttagcggtgcaccttcatgggaaatatacgttggcaagtgttacacaaacaagactgaattgaaaaatgtagtgggaagatttacattgaaaataaattttgagttcatgatgaagaagtctggcaccgatgttttttacgcaacttgtagggattcaaattgcaaatggagagtgagggggaggaagaaggcatgttgtgacatgttt

SEQ ID NO: 74302 - DNA, 845 bp, Cannabis sativa
gtaatacatttatgtcctagaaaataagagtagtaaattaaacttcctattttggtgggattggttgaagatcgactccaggctaacaatcccacgaatctcggtctagcgagttaatacaaatgagtaggaattctagttgctattttcgtggaaataatttaggaaagaatctagagaagatctattttccatcatatttagttgtgtggacagttcattctgctcgacatgatcaattgcacggcatatcacgagatactcactccgtctaaagaatagttgcaggatagttttacttagatgaatcaaactctgagatggatttggtcaacgtatttgggagatatgctctgaccgactcttaacttacatgccacatgttaccttatgaagtgtcacatcatcttgtacaaaattttggacatcactttggataaacgaaacaatgcgctctaggttgaatatcaacccagacacctgtagctgtcatcaggtggtgtttaaagccaaacaactaccttgatgataaattctcttgattccaagtcccatatactattttgggtgcaaaacaagagttatgcccaagaaaaaattattatttgagtaacgaaaccatgcgcaacagattaaatgtcaacttgggaactccctatagccatgggggtgtcaacatggcgtctttcaagtgtttctcccactagatggcttcatttttttttttttgtctaagagcatttatctccgtatttgatagaagtaaaggagatgtctgagaaatatcttcacaaagtattttagaagcgatgcatagtctaaggatgaaatgtcttggaatttat

SEQ ID NO: 74303 - DNA, 719 bp, Cannabis sativa
tgccattgctggaaggcatatgatcaaccaagtcagcattgatcatctataggcaaagcgacatagtgttgtccaaattagcatcaaccctttgtaaagataagaatgataagaagttatgcgtttatcaattgttatccacacgtggttaaatgaaacgtgatcaattcccacgtttcagaaaacagttatgtatttcaaatttaaatgtaaatacctaccaacctatattcctataaataggagcagtatctacaaaaaatggggacagaaaaactttgagaaaaaagattactaattgtatattgtatcaaatactcagaaatatttgaaataagatagactcgtggagtatgcaaatttaactgcaaaaccacgtaaaatacctaatgttattattataattattatactttattaatcttcatatatatatatatatctgtgttatatttattacacaaaaggctcattattggttaacaaaaatttgtgttaacaattactaattggattagatcgatttttttgattcgatattcaattacacacctaaaatttaatattaacataaaaatatgaagaaaaatacataaaaaattaaatatcaccctttattaaagttcaatactccacaaacatactatcgttacaatgtaatgcaacgaaaaatttcaaataattaaaacaataatatttctaagtaataaaatagaaca

SEQ ID NO: 74304 - DNA, 1096 bp, Cannabis sativa
ttggggtccacattaaaatttaattcacaaataataataaaataataaaaatcagtgctaattgccttttctaatccatattactagagcggtcattacattcaccattttggtttttccatctgcttcttctctagttccctctactggtatctagggggagtcttcccatttgagtattaacaggtatgatcaggtctagggggagcatcttgatgttgtaatgttcttatccctcctgtagagccctcttaccaaggggagttttcaagatgggcgtgtttcattatgctcaatgagggggagatattgtatatgggttggtatattggtgactattatgtgacagcttcgcatcttggtttttgttagtttttcttttatgttataggctgcattgatcataatttgtcaagggagagattgtaagaaccatgtttttgtgtttgtcaaattatgagttttctgccatctagacagtcaatagttccatctgagtatgtctgctactggtttatgggttagctttgatagatcaatattttcatgttaaaatattttggacaattgtcaatgagttattagtgatctatcaaagtcggttttgtgtgagttggtgatatacattgttgattcttgaatattctaactaagtcccactcattttgattctttgacagaggtttttctctgcaagggcagaaatctttttcttcttcttctttgtttcttgtcggttcctcccatgttgaagagtgcaaacttctgtgatgaagtgataatggaagctgtttcatctgaagggagtttagagtcatagttgaagggatttcagctcaatagaagcaagaggagcttttcttcgaatttaagtggacttagatttgaatcttggttggttaatcaagatcttagggtaaattgttgtaagaatcttttagaaaataaaattaatcagtaaaatgtaatacgagaaaaagttaataagtattatgatgtgatcaatgcatgatcaatcacctcgcaaacaacacaatacaaagaagttaaacaagaacagaaacgaacaattgaatattgaacaaaactactgtga

SEQ ID NO: 74305 - DNA, 745 bp, Cannabis sativa
  modified_base (681)..(694): a, c, t, g, unknown or other
cttgaacaaatcttaaaattattactgatgaacaactaaattatttaaggtaaaaataaccaatgttattataaggtgaaattaaaatatttctatgataattttttatataaaacctaattaaaataaaatgaatacaccaatgtaaaactcaatgtataacaacacataatttcatgagttataggaaatttttctaaccaatgtactacaaaacataaaggcacgaaataggtacttgatattttgtactttttttttactaaacatcatgcataaactataaatgtactcggtacgtgatataacgtactccactaccaatgcacaaatatatagaaaataagaaggactgaaaagacaaaaataaccacaatctgacaacatagacccaccctctgcaatactattctactatatattaactaccaccaactgtcatttgattaaacatttttgtatatttttgtatttttttatttttaaattaaaaaagaaaattgacaaatggcttacaacaaccaattgtcaaataaataaaaaaaattacaaaaaatattaaaaaataataaagtacgtagaacccactacacacgcaacggaatacaatccctagttttacaatatggatacaaaatcaattgcaaatattattaatttagggtgactattcaatggttnnnnnnnnnnnnnnaccatatggttacatttttttttaacctataatagcaggttactaataggt

SEQ ID NO: 74306 - DNA, 806 bp, Cannabis sativa
  modified_base (147)..(154): a, c, t, g, unknown or other
aaaatattgattaaaaaaaaaactttttaaaaaaaaattgaaagtgattttttttttatttttaaaatttagattcttaattaaaaaattgtaaagtaaaaataattgtatagaacatgattttaaaaaatattttcacttttctannnnnnnnaacaaaaaactgattaaaaaagtattaccaaataccccctacacctttacataactcttcaatatttttaataataatttaacatatatattattgattttcttgacaaaaaatatgcatttacttttatgtaatttttttttatcaaatttagtattttttttaattagcaaaaatagattaattaatttttctttttctttcaaaacgaattttttccaagctgtttttttaattctatagtggcatttggtaacgtttttgttttttaaattttttaatcacaaaaataaaaatgtgttttataatcacttttgttttttcaattttaaaaacagaaaacgaaagtgtgttctataaatttgttaacgcagattttcgttaactatgttaaagcctattttgtgattgatttgcacaaaactaatagtagtaaaagaagaagaaataacacaaaactgtttacgtggttttgctgttaaaattctgcatagtccatgagtctatcttattagatttctctgatacaaaactagggttctttctctagaagatttttcgtccatttttcagtgtattttgcccctatttatagttacatagagaggcatttaattacaatcaaatttataccccacaacaatattccctt

SEQ ID NO: 74307 - DNA, 652 bp, Cannabis sativa
aatggtccatttgtgttatattaatgtatttctatattttcctgtgagatgcggttctgcttgccattattttatgtactaattacaaacatataagacagagacaccaagaagggaatcatgaactatttcattatgaaaagatgtttgaatgatgactatttcaaccttcaaaatatattagtttggttcaatttattgattctgttaccctttccctctcagtagacatttcatatatatgttatataaaagggtgatatgatgcattgctgaattcccctcttcatcaaacagttgatattgagcctgagtagttaaaaaatgagctaagaaattgttattcagtttctaattttcagtggccaaattataatattgcttgctggggattattaaagaagagggctcgttggcagtagtctattatttggaattgtcttggggttccaaagcataaatttaattttttattctctaaagaatagattgcgaaccccaaatagattgtttcagtttgggttcattgctatcattttagcttgcaatgtatccaacagcttgcaattagtctattaaactaatttcacttcattattttttagggatttgataggctttaagttttttttttccttttccgttaaagttt

SEQ ID NO: 74308 - DNA, 772 bp, Cannabis sativa
  modified_base (712)..(713): a, c, t, g, unknown or other
ttgattgctattagtgacaaaccaaaccatgaaacaaaacttcaaacacacacatatacactattttatcaatattaactgtatttgttttctcacctcactttttatcactttaccccagatagctcttttcttgactggtgcataatttcttttaaggccttggatatagaacaaaaaggtaatgagggcgggtgacattgatgtaactgcaaaaaaggtatcttgattaatggagatatgctcaaaactctgagttagagtcgtcttggcttagtgtacaggcaagagatggggatgagcattagattttggcacaggttagtagtattaaggtcaatatagtggcacagcatgcaaatgatttcttgttgaaggttggacttcttttcatcaaggtcaagtggattatgagaatttttatttttatggttttaaagtataagtttttaaaaatatggtagtttctcaaaagagttgttttatgagaaaaattttaaaaaaagttaaaatatatatataaaaaacagaataaggtacctggttatcctgccctttgattatctttacctgtacctggttatcctgccctttgattatctttacctaattatttcatatttttttaacttttttttttcaattttctcataaaatattgttgttacaaattcacttacataacactactcacagggtttgacaaatatanncttacatcaaatacaacaaagatcaagactaaagaacataaaatcagttacaactgaaa

SEQ ID NO: 74309 - DNA, 607 bp, Cannabis sativa
agtaaaataatctccaacaattggccaaaagaggaagattcattataagtctttattccaagcccatctcatctaaatctaactctatgtgaatacctatataataaataaagagaagagaataattgaaatatttgagaaattttatgggtttccatcaatggtgaaaaaacgaagaaggtaggtcattaaagatcttgcaaacaaataggggtggaaaaatatttggttatgcaactaaaaaatcatcaagttaaacttcgatgtgtatctaaacttacttccccggaactttaaaatagcattttgatgaaaattgtaaggtctataattagttactagcagttgcctaagtccttctaaggatatgcctttgaggcagctaatgacatgttaaatgtcatcccatctacgtctgatcccaatataacctcagatgccctaatcatgaatttaagcaaggctagaattgataactaagatatgcatgtttagctattctaaaaatattaggggtggaccatcctgtggtcattaagacaagaaagtgtttgtttctacaaatactacttctataaatctgaaaacaaagtagccaagtagagga

SEQ ID NO: 74310 - DNA, 654 bp, Cannabis sativa
gttataacaaaaaaagtcatcttccattacaacaagtattaaacataaatacacaaacacagattaaagaatacacaaaaagaaaacctttttaaacatgtcaagagtctgaagaacaaaacaatataatagtaactaaaggggtgagaacgagaaaacataattgatgagaatacaaaccaaagcatattactgaaacaatattatatatctcaaaaacccattttaacttttctcccagaagtttgggagaagcaaaaaacagctttatacagatatctaaaaataaatcgaagaaaaaacttctaggatccaaatattatttattcaagtgtgtaaaaacccaatcaaacagacagagagagtaaaaagaggaaatactgttagtctttttagttagtttcactcttgttagatcagattagttacagatgttaatctctgagctttggaacttttgtaaagcatccgagatacaagaagctggtataccacaccatctgttgaaacataaagaatctaacagtaactagcttacttaagaaaaattgaatcaacagagaagattagcatagtcatgaagtcctcaccctcggctcctcttgattgtccgctatacaatccagctgctgtccaatactttgtaaaattctt

SEQ ID NO: 74311 - DNA, 1110 bp, Cannabis sativa
tttttttttttttccttatattctatcattctttaatttttatttttcatgttcgtgatatatatatatatatatatatatttatactatatataaacaaaacaaaatacatatgattatacatttatactagtcaatagtatgtgttaggttaattcacttttgctttattctattttttttagtaagaaactatttttttttatgaataagccaaaaaaaaaaaaaaactaattagatagtcaacatttactataaaataaattaaaagaataatttatagtggtacatattatctattagaagaaaaaaaaatgatattttaataaatttaattgtctaaaaaaattaacaaacaagtaaatagaattatacattttaattatcataaaaaaattaaacataatttaatagttaaaaaaagaaataaacgatatgattcattttaattatcataaatatttaaggggtgttcatagattaatttagtttgaatttttattttttttttcgaaccaaatcaatagtattagttttttaaaattcaaaactgaatttgaccaattaaatactcaaatcaaattaaaccaatccacttaaaaacgaattgacttagtttgaaaccgttatcttacctataatattattttttttacactttagccatgtaagactatttttaatattactatgtagaatactaactaattataaaaggttagaatgctaattgctatttgttgtcgtagatttacattatagcctagtcgtattacataccaagttcgaatcatatcctccccaaagtaaaaaaaaaataaataaatacaatagtatttagtgctattatgattcgtttgttacgttgtattacaccgtattatattatatagtattatattttatgtaaatttatattcggtattaatttttataagcatataaatatataatattttagtataaattaaaacttaacataatattatataaaaatatattatataatttaatttaatataataaaataggataatacaacataatacgaacactacaaaaaaatttacttttagttaaaacaaaacttgtgactaaaagtgaaaaaat

SEQ ID NO: 74312 - DNA, 804 bp, Cannabis sativa
aaaaatttatttttataattttttctttttctttttttcttttcttttctttctctttccttctcttttctttcttcttcttctaaccactccgcccggagccatcacgtcctgcttcccactcaggttcgatccccaaccaatctcgtaaccactctgcccgaagccaccacgtccgccgcgcccatatcatcgtccattgatcatagacggatcgacggtaagagacttcgtcagcgacgaactggagttcaacaagagcgtggatgaacagttcgtatcactagatctgaacaaggatgatgttctctcctgaactgagctctgaaaagctttccaaacgatgaggctcatcgagagccactttgggatcgacgtggccaccacggccaaacaactctcccatctctacgatttcatcttctacaagttcgactactaccaaagcggtaccgtcgatcgagaagagttcaggttcgagatgaagaagatccttctcgccatagctgacggccttggctcgtcaccgattcagatggttctctaggacgacgattcgacgttcctcaagcaagctgcggatcttgaagcttcgaagttagaagaagaagaaggggcgttctattagaagaagaaaaagaaagaaagaaagaaaagagaacgaaaagaaaagaaaaaaagaaaaagacgcattatcagcctctatattattgatattgctagacttaatggcgacagcagtggcagcagccatacgtataatttcattgacctaaaggaagcaacatcaattaggaacatgaa

SEQ ID NO: 74313 - DNA, 902 bp, Cannabis sativa
attaaaatacggaatttcaagtgtaaataggcagaaggatagcctccaactaaaaacaagtctcatccacccttaatgtaaatttagctaaatcgtgagcatccttattggtcgttcgcttaacatgagaaaccgttacattagaaaataaaggacaaaagactagtaacataaaaaaatcaaattgctttatttttttatttttttttgaaagctttatattacaatattaatacataaatattgctaaattataatgtaaaaaatgtaaccattcttaaattttaatgaaaaaaagacatcactagaattgatttaaatttactactcttgaaataaaaataaaaaaatgattccttttctagtaattttctagttagaaattaaaataaattgaaacttgtttacttctacttatcaaaaataagttatcgttaattattttttgttactacagttattgttattcgcgttttctaatagatggcacgtgtacctttaaaatccccaaatcaatttacgtacctgttgaccgaggttttcggcaaccaacttaataatatatatgagaaagctgtaggaagtttaatgcacaggatttttacgtggttggggcattaatgagccttagtgcacgagttttttttatttatgagagtatttattaaatagaatgttcttgtagttttttctctctttaactcttataaacccaaaattctcgacccccgttttagtgtgtttgggggatatttatagtgtttttctgaggtgatccctacaaccgaactattttactttctttgcagtttcagtaggggcacatattcccagcagatacagaatgggaaatgcatgacctataccctaggaatttgaggagttaggtggatataatcctt

SEQ ID NO: 74314 - DNA, 852 bp, Cannabis sativa
ttacctagaaaacccacaaagctcaaaaccctaaccaaaacgtttccaaacccaaccaaactttccagacctgcataatacaccccaataaactttttccatgtgataaaacaatcacccatactcagaatcgaatttcaccattaatgagtcaagcttgagttcaaaaactcaaagcttgctcaaacaacaaactaccaatcaaaacctgcccaaattaacttattttaacataaatccactacagaaaacataaccaatcaccagcagcaagaacaacaaccaaaaacacaaaaacatgcatattccattattttacaattcaagaaaccaaagaaagagttatgaagaggttaccttggcttggatttaactttaagctgctagaattagcaaggattgaagaataaaagtcaaaaccctagctgacctaggagggttcgaaaatgagagagagaattgagagtgtaatgcttccttttccaagttttttcttatttttgaataaatgaagtaaaaccttgttttattaaatatctcagcccatttgtttaataaaaaaaatctgattttattaattaataacaaaccactaaagacaaaagactaatggggcacaatgaccattgtgcctctcccacattaaaacaacataaaagggtacttaagggtattttgggaattctaaaattccgactattcccgacattcccaatgtctaaaatattatcccgctatactaaaaattctaagatgtgattccaatatccatacaccgcgttcgaatgttgccgagcacaaaatatgcaaacttttgaaatttctatatgtgacataaaaatgcattttgaa

SEQ ID NO: 74315 - DNA, 778 bp, Cannabis sativa
aagcattaaaaatgctcgctttgagtcgtaaagatatattatcgcatatgtatacaaagaaaaaattttaatggtataagcatatatatatatcatacaacaatcaccaaatgcaggaaaaataatttaatagaagaccaacactaccatatattcacaagaactaatttagggatgctgttgataccacatgaatactgtaaaacttaatttagtcctaattaattcatgagaatcaaacaataagatgaaggaatagcggaagcgtaccggagtctattgaattgcttgaagaagggtatgatctttcaattttgtatcaaaacctttgaaaccatattttcctgatgatagggatttaggttctctgaaaaatgacgatactatgcaaaatagggaccaatacctgttatattaccaattgttacaattgttagtaatatttattaattatttctaatttggcttctcatcaaatcagaaactatctaattgtattaaaatcatgacaattatgcccttaagtcataaactttattacaaaatagaacacaaaaatttgacttatttatttgatgaccccaacacacatttttatatatacaattgtgaccccaattatttctaacaggtctataatgaataaggactaattaccgttttaccattcaatgtcttttatccttaaaacgcttagctacttgtaaattatattttgagaaactaatataattaccgaaatgaggcattaatcatttaaacgtgtttaaccaagctc

SEQ ID NO: 74316 - DNA, 672 bp, Cannabis sativa
  modified_base (507)..(516): a, c, t, g, unknown or other
tccggtacgcttccgctattccttcatcttattgtttgattgtcatgaattaattaggactaaattaagttttacagtattcctaacatgtggtatcaacaacatccctaaattagttcttgtgaatatatggtagtgttggtcttctattaaattatttttcctgcatttggtgattgttgtatgatatatatatatacttataccattaaaatttttgctttgtatacatatgtgataatatatctttacgattcaaagcgagcatttttaatgctttacgattgaagttttttatgtatttatattgacttgtatgaaacaattaagcaattgatttataatagatttatatatgtactgccaattatgttttgtggtatatatattcataaatcaattacagtttttcaaatcatgcatatgcgattaatatatattgtttgtccttttcactgttatgggagaatgcaattaacattcatttctttattattattattattnnnnnnnnnnttattattattattatattaaaattattatatattaaaatagataataattttaattattataataataataatacagtaataattaaatttaaattttagtttaaaatttattaaagatatctaatatttcgttaaattaattgaaacaaaatat

SEQ ID NO: 74317 - DNA, 1093 bp, Cannabis sativa
tattataaaatataaataattaatatattaaacgagtcccggttaaaacataatatgattcttgtctctgtcccattctttagacaaaaagtagggtccatgcccataaataatttcaagtcaaaaagaaggaacggttctcatgaatttatatccaatatataatactccaattttaaaattaaaaaaataataattatatttaaaagaagaaagaaaatgaccttctttttaatatgctgtccatcttgaagtcaacaatattattgcattattagtgaaattaattacttacctaccttcttcatttaaagccataaattttttgtcaaaatgtaaatgaactaggaacaaattgggtattttataaaaatacataaaatcatgtgaaagtaataaaaaataataaaaaattaaaaatgaaataataagattacacaattaaaatatatgaaaagatcgtattttttacaaataaaatcttacaaaccataaaaatatttaaaatttcgtacaatcacatttgttttgttatttttatgtatttatgaaatgatcccttatatttatttatttgtatataaattaattatataattagtggtagggattttctcgtccacaccaaaagggtactataactttggatatgatcatatgaaaaaataaaatgaaaaataaaaaaaataaaaaaaaaaaagattttgaatggaaatggaaattgacaaatttcttcactattcattaatatttgataagacaattgaaagcaccatcatcgtcatgaagaaaactttctccaaccaattttgtccaattttttttcttgattttgtaataataacttcattcaattattcaatcttaatgaattttttttctttaacaaacaaggattatgggtctatcacgtgtggctcttctttctaaacataaatatataaatgttgtgaggcttttagcaacgttttctttaaaaaatttctcataaaataaagcgttaattttacaaatgcacaaaaacaacaaaaatacggtttcacagaattgtaaacatttttatgatttttttaattttatttacataaaatac

SEQ ID NO: 74318 - DNA, 879 bp, Cannabis sativa
tatatagttgtatatacatatatacacatatgtttatatatatattatacattagatttatgattttattaaataaaattgtgtgcagtactctctttcatatatttaaaatacttttatgcagtatatatacattgtatacgaatatatatatatacatgaaagttttatttttcggtctgttgctcgtcaattttcgtattcattttcggtatttattttgaatcttatatgcatcactacattcataagatactataggtcgattttgtgcatcaaaataattttgaacactatgaaagttgtaatttttttttttctagaatacttgtttggactcgaattttttttatgaatttaaaatttaattttgatgtgttttcgatgcatgaaatccatatgaatgtcttaatttttgcattaagattcatttggaattgatttgggttgttttagtcatcggaatagaaagttccaattgagtttgggttgtgtccaccgtgatctgcgtgcagaataacaggtcaaagtgacccgactggaggttgaaggtggatccatacgacatgttgtttttcatgtttaaaggcaaccttcattactgtaatgacatatcgtttaaggggacatgatttttcaaaaaacaaaaaacaaaaaaaattctgaatttttataaaaattttatttatttgaaatattaattttatttatttaatttttctattttttatttaatacatatatttagaattgatatgttatttagtataaattaaaagtgaaaaaaaattatttggtaaattattacatgatttatttagacatgtaataattgtgctaatttttataattaggcatttaattatatattaccaaatt

SEQ ID NO: 74319 - DNA, 1144 bp, Cannabis sativa
atttagtgtaattaagtttttatgccatatatatcaaaacttatctttattttcccatatttttgtaaatagcccttctttatatttgtccaccactttattgtgttggaccaaagttacaagagtaggctgcaattttttttttttggctatcatgtttaattaattatttttatacattttaaaaatttatatatatatatataaatattgaccatcataaatataaaccaaaccttaactttaagtatttagctatccaattataaaagttttagtaagagtattattagtaatgtctaatacgatctaaacaataatttcaaaaagcctactattttcttgagtaaaaatgtgagtggaactattcacgaagttatttgtactattttgaatataaatgaaactgatgagaatagtatatacttgagtttcccaagtacaatcggtcaaaccaagtctattgtattgggttttcttaaagagaagaagcggaagcgttatacaaagttaaaatggtaaactctagtcacgtactggtacggaggtcctaattcgtaatgtggctcaaagctttctaacttttgttatgagcgttttcctttttgcctgcgggaacgtgtcatgatttgaaacaacaaatgactaatttttggtggaaggatcttctacgacttcccatcaaggaattttggggatgatttgagagaggatggtgcgtagtaaggaggttgggggattggggttccactctcttcatgatttcaaattggttatgttgggtaaacaaacttggaggttcctgaccaagcctgatttggtgagtgtacaaagctcggtactttaaaaataagaactttctttctgaagaacttggtaataatctaagttatatttagagaaatcttgttgtggtaaaagatttgattcagaagggggcgcagaaggaaattggtaatggagaggagactcttttatttgatgctccgtggcttccgaatgggtcaattccgagtcaaggaaatttggatcctgattttggttaatgaaaaggttagtagtctttttgtggtgggtgagaaagcttgggatgttgatgctgtcaaagatttgtttgatcaggaagtggcggtcaatattcttg

SEQ ID NO: 74320 - DNA, 1110 bp, Cannabis sativa
agtatggagtcataacaacaaatttcataaaaaacaatgtagtagtacaaaaagataaatgaagttgttaaaattaagtaaaaaaatcgtaatacaaaattatattgaggagttgatattgttttgcatattgcaatagattactattttgttctttttcgttgctttgtaattatatttttgttgttttatagtttgtttcatgtgtttttgttaagttgttttagagttatttttttgaaacacattatttttgtaattttgaaactaaaacacagtatttttaaaaacttagtacagtaaaaatatataacaaaaaaagtgtgaccgaaaaaaaatataaatatgacaaaacaaaattaaatatttttgtaagattttttttttcttattacgcatacataaataaaaactttataattgaaagtttaaaaacaaatcttaaacaaaaaaagaagcataatagaattgtggtcttaatgtatacgataattttttaagtgtctggctctgaatccgtcccttcgcttctatgtaggtccacccctagttacagcgatctcccttatgctagatctaaccatactacataagttatttaatacagtgtgatatagtatggcactatcgtttgcagtggcgccttcaaatatacgctaaaaccacactgtttcataaatgagctgcacatggataatgatcctaaatagtagaaagattttgactttgatcacgtggtgtatgtattttttttttattaatgtttcttttcaaataaataaataaataaataaaattatgatgatagtgttgtttgggcatcaattaatggactatattatattataaataggtgggacaaggattttcttttcaaactttatatcgatccgttgcatgctttagttttgttatgcggtaattacaaataatggagagggtgaaaagggtattttttttttcacttgaaaagtttaaaatatgaaacctctccccaataatgcatttcactttaggtaattatatatgcattatttaaataatgcatagttactatattatttactttaggtaattatttattactcgatcatgtacggattcgtaaaa

SEQ ID NO: 74321 - DNA, 975 bp, Cannabis sativa
  modified_base (865)..(876): a, c, t, g, unknown or other
  modified_base (904)..(907): a, c, t, g, unknown or other
attataactcttggagtagtcggttttgtttcacaggctaaaatcttatagctctttacaatacaagaaaataaataacaacattaaagactcaaacaaactgtcaacaactcaagcaaatcaagtaacagttttataactgtttctcaactaattatcacagctcaacacaacaaataacatacaacaacaacaatataaaaggagagcaacctgtctatttcagggtgtgatttttggtgaagcccatgtgagttgcaacagtcattttatgaagaaataaacctcaaaaataagagagaaaaatagagagagttagagatataagtgttgtaatatcaaagcctaaaacagagagaaaagagagaaaaaattgagattatctgctaacttctgtggctaggattctcaaagaaccttgtaaccggttttgacatggatagtgaagaatcaagcatctttgaaggaagcttgacgaagacgtacctctgattttagagggaactccgaaatcaatcaccgtggttccttgctcttagttttgtgtttgattttttgggttactcttctctcataaccaacaaagatcattttagatctttgttgctactatttggattgtttattttgtgtgtaggtacggttaattgaaagctctcacaaagcttgaagaggaagccattgaagagattaaaaggagagaaggggagattggctgctagggtttgaagagggatttgttggctgctagggtttgcagcagcaaacaattggttttatactgcctaaaatgacagtgttttgatgtgcattctcttaatccgcacaagagaaggaaaggtaattgattaattaaaatcaattnnnnnnnnnnnnaagcaatattatctcaactagtgagggnnnnatgagcctatataaccgagctttcaataagtagatctagaattcagcaagtaaattccctaacttatt

SEQ ID NO: 74322 - DNA, 1161 bp, Cannabis sativa
aaaaagaaaaaaaaaatattatttataattattttttaaaactaatattacgtagaccactaaaaatcaaccacgtggacagtccactatgacacttgattgtgatttttgacgtaggggtacagagcaaaacagaatgggaattcagtaggttttgccaccaaaattttggtttttatggttaagtgttacaaaacgtaaagttcagatgatttagtcaccaatatccttaaataatatgtatatagcaaatatataacaatataaaattattctcaaaatcaaaacataatataatgataatattaataatattttttattaggaagctattatatttgtagagttttacttcttaaacaaaaatattgaatatttttaataattttagcggtttgatctggttaacacgcacaaataaaaaaaatacaaatatgatagatatttcaagcttattaaacacattatagtctaaattaatattaaaatcatcaaaaaaaaaattcataataagtaatcattaattgaaccaacattaagtattaaataaatattcattcttagaacactcccataatcttattagctaatgtaaatgttaaatgtaactaaaaattcagtacattagctcctttattttatctttgtttacctttattatagtagcttaggtatatttagctataactatttatgctttaaaataatattttattattttatcaatctttttaacttaattattttaattgaaataaatatattgagaatataatatttaaataatataaagaaaaaataaattaatctatggtgtaatgttaaaagttgaggtaaaaaaaaattacaataaatttagcaattgttgaaggtgaaaaatttacaaatgaatacttactaaatttggaaggtgaatattgtttggttcacctcgattccctctgaatattctgctaacacttcatttgctttttcctccggttatctttgtttggattgacggaagccttggggtttattttgcaaaaaaactctttgatgcttaagtcagtatagattctactttagagagagagagaaaacacaggaaaactagaatttgaatccagggagagaaagagagaaagttcagtcgattcaatgaataacccattgatcggt

SEQ ID NO: 74323 - DNA, 1130 bp, Cannabis sativa
aatatattagcattattgtaagttcataaatttattaggagtaaaattggtatactactcaatatagatactagtaccatacttttataatagtaagatataaatagcataagtatttaaagttttaagtttgtaagcggtttaaattcaatatttatttttagtcgtataagtagctaatatttgcaaaactttaattcttttccagttttgtcagtacaaattctattttaaatttattataagaacgtttgaaagtaattcatattacatatttttttttagacgatctgggaatatcaatgtgatttgcttaagataataacagagtcgatactcagaaagaataataaaagagtgtataacacttgcaaacttaaaattttaagtaattattctcaattttaccaaaaactttagtttatttaagaaaaatcctaaatcaaatataatataaatataatattactaaataaaaataaaacctaaatccctaatcttattcgacagccgcatctctctctctctctctctctggtttccaccgtaccgtggaacttctccggccagaccaacgaaacgccaggcgccgtcaatagagcttctccggccagaccaacgagactctccaacacgtaagttcaaagctagctttaccaactccatttcttttttctttcagcaaaataataatgtcttctgactgagtttgtgtttattttcttcaacatagttgagcttctaatgtatcaatagtcttttctgaatatctgaatgttgcatgtatatatataaaagagcttaacgtaagtaatatgaatgtgtgtggctttgaggatttttttattcttctgcacaattgattattatataattatatgtttttaataatcagtattgatggaatggattgtttttttctcgcaaagttagtattgatgatttgagtagcatatactgtattggatataaatttacatgtaaagtttggacctcacactgacaatgaccatgaatactataatattttattttccattttatgtatttatttatgtgaaaatctcaaaacccaaaatctcaggtctccggcaaccaacgtggtcacagtaacaccttcttcaccagtc

SEQ ID NO: 74324 - DNA, 648 bp, Cannabis sativa
  modified_base (167)..(169): a, c, t, g, unknown or other
aaaattgcaggaaaaaaataaatgctgagatgtttccgtggttgttctgcacagcacacactcatcatcattcaccaattgaaacctgtgaagtctttcttttgttttcaacctgtctaacataagtatttagccacagatcttacaacataagaataataatttannnttagtcacaacttttttaattttagtcacaaattttattgtggctaaaagtaagattttttgtaatatacgtacgtgattgtgagtgatcccctaattcatttaatctgaccaatccaatttatttttttagtaaatagttatattaagggtaggttatagctcattgggctgaaaaatattgatagatcatataattgagttagacaaactctaattctatgtaacctaatataatctattttttgagagacgtttgagacaactttcgtatataaaatatattttatattcataaaatatataaaaatttataaaataataaattatattattacgataaccttaaaaagtgaattgactaaaacacatcacgacatgtaatttatagttaccctacgacttttgcaaactagtctaacgtaaaaatcaatcactcttattaacacccaaatgtaacgtccccgcttcaagcctcca

SEQ ID NO: 74325 - DNA, 856 bp, Cannabis sativa
agcagccatacaagtaaaagtcatctagttgtaagaaaaagatagtaatcatccaaggaacatgtgttgaataagtaagaaattacatatgtgataacttataatcataacatagtaagactactacaacaaaatataagcactatcaatgatgaaaatacaaatacttacatatgtaatatcaaaaagttccaaatcagcatctttgggcctcacaagaccaagagctcgatgaaacaaaattgtatgaagtatgcctgcagtcgatttgaagacaatgtaatgaggtaaaaagaaaacacaaatgaaaaagtattaattcaaaggtagacatcataactttaaagactaagaagacctcaacaacaaagaaaggccactgtgcattgttatatcatctaaacacgatggccaagtttctagaaagtctccgaagtattaattaccttggacagccaatttgaaacatcccttcttttaaaagaactaaagggtgacaattcgaaaaaagatgaagatatcagatcattgcgtttgaaattaggagttctacaagagactttgaatgacgaaaacaggaatagaaatctcaaacaattagaaaaccctgaaactgctcattgtttgatctcatcctcactgacgataatccaaaatccttggcagaaaatgaagacatcaaggcaatcataaccgatcaaacgtgtacattgtcagcaaccgaagagaaatttcgaacaaagattgacgaattgctggagcaaaaccttgaattttggctaagattcagcagcttcttccataggagtgccacaaaagggattgaacatcaatatttgatcgttcaatgggattt

SEQ ID NO: 74326 - DNA, 592 bp, Cannabis sativa
  modified_base (302)..(303): a, c, t, g, unknown or other
atatttctataaatatataaaaaaaatactagtttatttttaatatttttacacattctaccttttttcttagaaaaggtaaatcttactcatttatttaaatttttttaaaccctcatttatttcaattaatatcaaaagaaatcattacattgattagaaatccagaaaagtaacaaataaattttgacccgtaaccacaattttggcatcttaactatagtcacgtttctccaaaactaccatatgcataaaactcagaacaacccaaaatttactaaatcattttttttttaaaaaannaaaaaagaaaaagaaaaaactagtctcgtcataagaagaaattaagcaagcttaattcttcaacgtgttttggatatcaatgacaaatcgatatctaacatctcctttgctaaggcgctccattgcagtgttcacgtaatcaattggaatgacttcaatttcagatccaatattgtgctttgctgcaaattcaatcatttcctgtgtctcttctattcctccaatgcaacttccagctactattttccttcctgcattttaaaatatttatttaaattttctcaaaatt

SEQ ID NO: 74327 - DNA, 762 bp, Cannabis sativa
tatataacagcattgaattattacaaaattaactgtgaaacttaatatgagtagtaagtttatatatcataactgtaataaacttgttccattgtcacgtaccaattccattataatttataatacccaaaccactggtggtatgtgatggctatgatcaatgacggagctaagggtaactttttgttctacattttattttatataatgtatttttaaattattttagggatttttttattttttacacttcaaaacagtttttttttgcattttacaactagctctgcaacttaaattgcaatataaaatcgtatagaaacttctattgcaattagcgctgcaaccacataagtattttcctattattttattataaatatatatagatagagatattgttccctttcaaaataaagaaaaaactatatgtatattttatatattatacattagtacaatttttattgaacaaaagaattacccttttatgttctaatccttgctccaatccaattagaaaaggatttcttattattgcatttgtaatgtactagtgtttgtagtttgtaccctttaaatatcaccaaaaaaaaaagcgtgggataagttctttttcgtcctttctaaatgagaaatgctaagttaaggtactccaaggacaaggacaagtgtcgtattgcttttattttaagaaaaaactatcatgatgcttttttttttgtttttgacaggtgtcatattgctttttttttttttttt

SEQ ID NO: 74328 - DNA, 739 bp, Cannabis sativa
cccagaaggataataatgaagatttactaccaccaccggtggacgggcatttacaagtcattattggaggctcacacatagctggagattcaggcaaagcatgaacattacagcacaagcaagaagaggtgattctggccatcaaagaaagggagccaaaaataccaccgacaggagaatccaccataacatttaatgatgaagatgctgtcaagattaatttcccgcacaacaatctgttggtcgtggaagtccagatagccaataaaatggtggcccgaactatgaaagataattgagcctctgcaaatatcttgttcaaaacaccatatgaaaaaatggggctccaactcaaagacttaaccccctgtcctcagcccgtgtatggtttctctggccagagtgttgcacctctagggcaaattcgtgtacccctcactgttgggaaagctccgaagagaataactgtaatggcacaatttttgatattggacgtttcatcagcctttaatgtcatgttaggctgaccaactttatatgacctaaaggttgttacgtcgatatttcattcgcctgagaggaaatcaacaagttgcacaagaatgttacaacctttccctaaccaacgctaaaaaggaagtatcctctagtcagagttcggacaaggggaaagacattgccaagttgggaactgcccaaggcggggatgaagatgtggatccccgacttggggaaccaa

SEQ ID NO: 74329 - DNA, 938 bp, Cannabis sativa
taatgaacacacaaaagattgaaataagtgtgaatggatctcatgcactgacttgactaataacaattaattgcccattaaaaaataaaatgaacgttccactgaactttcctatatagctataggttactttattactatgtatatatactaagggagttggccaaagtttatatagttatatctctacttaataatatttaacttatcagtaatattgttaaagttctaaattgagatgatgaggaagattttatcggtagtgttggtggtgatggtgacattattggtggttatagcgccaataccaatggtgaaagcaatgagtgcaaagcagtgcaaagaggagaggactcagttggtgaacgagtgcaggccagtgatatttgggcaagacccctccaacaactgttgtcaacgtgtgagggttctccacgtggagtgtatgtgcccctatgtcactccaaagtttgccaaactcattaatcttgcacgaacagcaaaacaaatccgaagttgtggaagaaacattccccacaacttcaaatgtggcagtgagtatatttaatcttattatatctatttattatactctttcggttgtctttgtaccttaattagcttatatatacatttaattgattaatggagtttataatttttcctgctgcaggtgctactttgccatgatcatcagaaaaaatgccccacatcgaacaccttaagtttgctttcaatttatctctgaccaatcatgttattgggttatatgtatgtgttgtaataacagagagaattgtgttctctaaattattggttataattaagcatatgaataaaatttaaggacttttatctaattttatttaattttactgtttcagtgattgtttatgtactaaactatgctccccagattttgatatcaaccaaatcat

SEQ ID NO: 74330 - DNA, 1051 bp, Cannabis sativa
aatagggatctaatctttctcctccaaatcctgtaatcaccagatccatcaaaacgatcaatgtcaactttgatattgctcatattaataaaatcaaaattaaactgagttgagttttgagaaattgattgagtatcctgaataggatcattcaatggaatttccacaacttttccactatccacaacagcttgttgtgattcttcttcttcttccagccttggtcaatcttcttgattccttccttgagttgaatgatgctcgaaccagagctctgataccactgtacgattttcttggctttccaagaatgcccctacaccaactcaagaattgatcagaaatgacagggacaaaattgtcccaaaaaggttaattcacagctttaacaaaacgaccaagaaccaaggtcgtttatccctacacgaaagatggtttaaccaaaacgatttgtcgttctgcatagaacaaaaccaagcacaaatgagctaaccctagctcaaaatcccacacgaaccttagagagttcaacaaaactctctctctctctccttctctccttctctccttctttgattctcaaaccctagaatcagatatccttctcgatctaaccagatcgatttcccagaaaactttccccagaaaattaccacgaacacatacaaacatacatgatcaaacataagtattgaaaagaaatagagaatccaaacacagagattatagaggttcgccctaaatcaggggtacatcctctttcgagctcgccaagaagaacgatctcagatctgcactattgatgaagaaattacaatcaggtgagaaattcaagtcacaaacttgactggtatttctgattttctctcgatttttcttttctgagttttctttttgatttctcactaactctctctcttttctttgcatgtacacctggaacaacaacgagagctcctctctcaaatctgggtcttcaacattttggtatctctcaactcgagagaatggtgagctcctttccctcttttatagctttaggttgtgtgta

SEQ ID NO: 74331 - DNA, 845 bp, Cannabis sativa
aaccagtgagcaaaccactttgctcataacttcacagcaaactagagaagcattcagcacataaaataaagaggtaaggccataacgaatcaccttaatgcaaaccccgttgagcagcaatagttatattaatttggtgtgaattttacacttttttaatgtataatgttttatttttagtgtaataactttaacaattaatatcaaatatatttcaccaaataaatatattttacttaaaaaaaaattactattttctattatttacattaataacatgaaataattagtttatgatataattataataagaatataaaattttaaaacaacttagtaaatttaagtttttattaaataaattaaatattacacattttttttctatatataaaaacttattgaaattttgtaattaattttaataatattaaaagttatgtaaaaagagcttaccaataatattaagaatatcaagattcataaaatataatattagtatttttgttattagtattagtatttttattattttttattttgtacttttaaatatatatattagtgttttaattaattattagtttttgtaataaattttaattttgagaattataatataagattattttttaaaataaaataaaataaagattaagagtaaaaaaaattacactaataataattggtatataaattaatgtaaatcagtttagtatataatctagtatgtcattgaataaaaattaataaaatttcatactaatttagtgaaatgatgtattattaaaaataatctaggtactcttgccatgcttcgtgttgtggaggaagtcccctcttgg

SEQ ID NO: 74332 - DNA, 1225 bp, Cannabis sativa
attgagctgagatttcacaaaacactcttgcattaattttctcttggtatcagagcctacggcttttctatcctctcaccatgtctgcagaaccccaaaacacagggaacaacaaccctgcacaatccaccccagccacagcagcatccacggttatgggtgctggttcaagcttttctcagctccaaaaccctgtctcaaaccacttcagtacccttaatcagccattttctctcaagcttgatagacacaactatagtctatggaaaactatggtatcaaccattgttagaggccatagacttgatagctttcttaatggtactaacatctgtccacctgagtttgttgatgcaggaactgtcatggaaagcttggatactgctgattctcaagttataaatccagcgtatgagaactggatcattaatgatcaactcttgatggggtggttgtatagctcgatgactgagactattgcaaccgaagttatgggagtggctacagctgcagaattatggaaggctcttgaacaactttatggagctcattccaagtccaaaatggatgaaactagaaccttgattcaggttactagaaagggaaacacacctatgacagaatatcttaggcaaaagaagaactgggcagatcttcttgccctggctggagagccttatcccgagtctcagctcatcacgaatgtcttatctggcctagatgtgaactatctcactatagttcttcaaatcgaagccagatctaagacatcttggcaagaactacaagagttgctgctgagttttgacagcaagatagagaggttacaagctatgtcttcgaatggaaagagtttcaactcattgatggatccccaagccaactttgttcaaaaaccacatgttggaggacaaggaagaagcactgccagccatcctcaaagccacggtggcaggaactcaggcagaggtggtggaaatcgtgctagaggtagaggaaggttcaatggcagatctggagggccaaaacctacttgccaagtttgtggcaagtatggtcattcagcagcagtttgttacaatagatttgatgagcagtacatgggttcagatccaaataacccaacacacaacaagaacagcaacaacaacaacccatcagcctatattgcaacaccagaaactgtggagagtgatgcttggttcgctgatagtggagcaagcaa

SEQ ID NO: 74333 - DNA, 714 bp, Cannabis sativa
actgtgcaacatgaattgaatttcttgaagagttaacggttcagatctggaggttaaatttaccacaacagattcatattcttggccaaggccaccaagaacatagagagcaagatcctcatctgaaatggcttgaccagcagctgcaagggagtcagcatatcctttcatttttaaaatgtattcatcaatggttgaggatcctttcttggtggattggagaaggccacgaatttggaggagtctagcacgagatgttgtggcaaagagctatgcaaagacagtccagatctcggacgaggtacgacagttgatcacataacccaacatatgttcagtgatagaattcatgagccaatgcatcaagaattgatcaagacgaatccattgagcatagtctgggttagggttgttacctgcagtagtttgagctggaggtgggttggttccaagaatgtaaccatcgagattgtaggctcgagtggcagcaagaactaacgatcgccagaacgtgtaattcgatcgatccaggcgcagagttagtggaagaagattgttgttggggaggaaatgtggaatttcagttgcagtagctgatggagcttctagtgtgttgcttcgagtagattgctcggttcctttggacgccattaaagccaaagcatctgataccatgttgtgatatgaagcaagagagaaaactatggaatgaag

SEQ ID NO: 74334 - DNA, 802 bp, Cannabis sativa
tttcctagaaattcttcgaagaatctgagagagaaaaatttctttgctctagtttttcaagaataaaaatgactaaaatgattaattagggttttaaattttatttataggcagttcgaaaggaagacataatcatttcaaaatttaaatgtcttgaattccccccaaaagtgtacgttatgtactcattgcggatagaataaccgtcttcatgcgcgagcattaagatgcgatttgaggcaaaactgtcaattagcattaatgaactgaaattgaagatacccttggtcaggctcatgtcggttcgtctatcgacacctaggagatgcatcactcgtccagacaagactctagatcgagtgaagtccacctgcgaccaggaaggtcctgcacaaacttgggggacaaatgttatccagttttttacaaattgacgtggcaagaggactgagcgatacgtgtctcatatttttgatacctgggcggaggtaaatgtctgtagcagcctgcacataagtcgtcagcatctatgcttgttgattacccgagcatagttgtaaagaaggcatatgactaggtagaagtctgttatgccgagctacttaccagatataattacttcagaatgatcttgttatgtccagacacgaagacaatccctttaattgtgggattgagtcagagaaatatggaaacctgttccaatttcttattccgtgtattgtaattatgtaatcattgttatttcctattttatgcattgtaagcaaaaggaaaaccatccctcatgcattaagcccct

SEQ ID NO: 74335 - DNA, 1057 bp, Cannabis sativa
ttttgtcacagcttttttgaaaagcagcttttagcttttccaaaagttgtgccaaacaggccctatataggactatatatgttgggccaaattaatttttttgtcatttattatctagtctcatttaatttaatgttaacaaaatttgaattaacaaatattattttaatttaatttaaaaaattttaacttttatttatttatttagtttataaaataaatatatatttttttttacgttaagttacaccaaatgcagaaacacaaatataaaattaagtcgaaattgttgaaatgtcggtttggagtgggctgtgtagcttaagatcatcatagaaccatggtagaagctttcaagaagggaaaggttgggtatgtccaacccgaaattactaagatcataggcatcaaagaagcgttgagttggattgcgactcatccctgggataatgtagtgttagaaacggagagtttggtgtgtatccaagcaatccaaagcaaagtctttatgtcctcacagtttggtcttattgttcaagatattaggaatttacttttgactttatcttttgttgaattatgttttgttaaacgatctgcaaacaagttagctcattgcttgacaagagactcttgtttctctacaggttatgtgcttcaattggaggattgttcatctgaagtgcgttctattgttttgaacgagtttaattaataaatctcctgattaattcaaaaaaaaatatataaaattaagccaaatatgggtgttctttagtaacatttgtaattaattttatgtttattttttttttgaatttttttttatgtttatttaattaagcataaaacatgaaatttacccaacaatataatatcatttgcttataaattttttaaatcaaaattaacctaaaatttacaacatccattaaacataatataataatgttagaaataattggggtcacaattgtatatataaaatgtgtgttgggtcattaaataaataagtcaaatttatgtggtctattttggaataaagtttatgacttaa

SEQ ID NO: 74336 - DNA, 996 bp, Cannabis sativa
agagggtttcgtggctgaaaattataaaaattctatccagctcttagctccatttgacaacgtagcgccagaagttcagttaggcacatttgttaatggattagtaccatcagtaacgactgaattaagggtacaacgtccaagaaatgtgggtggagcaatagaaattgccctagaacagtcaagaatcattcaagaattgggagaagaagtggtaaacacatccaacgctcaagatatggaggggaaaaggagcccaagagcgtctattaaggcaagaaccagtaacattcactcagaacacaaccatggtgttgccaaagtgccacttacacgagaatttcatggaaatcagtttttcaacaaaagatcttttgaaagaggagaatcaggaactcgttccagacacaagaagcgattaagagaactaaaaatgccaacatttgacgaggaaaattttgatggcatggataataccgtgtgtgacgaaaagaacattgttctaactgagcagatggtgctgtcgctgatgaaaaccgagctagttggagcagtttgcaaggatggacatcaacagaacaatagagaagagacctcaaaggaaatttcgatggagtcgatttaagaaaaaacacttgtttgttgcaagaaagacacatttattctctgccaaagcagcacctacacgatggacagctgccgcctgaagagaagaagacgccactagtcatgctacaacatctaataagattttcgagtttaatcatcttcgttgacgaagaaactgtatgagtggggtgcagaattcattaggagtcttctacattcaatggatttttgatagagggaaaaccaataaaaaaggaaaatacaaaccgatcaccaagttcaccagcaagacatgaagtgttgatcaagtggcactttctctaagattttaaagcaacagaggaatatatctctaccattaaagaacaatttctaagctttcacctt

SEQ ID NO: 74337 - DNA, 912 bp, Cannabis sativa
ttctatgatgtcaagagcataactaggtgtttcaagcctaaaaacatgaattattaattggtttgaatttttgtgaatcttatttgtaaatataaagaatataggtataattgtgatgtatgcccaagcctttattaaggtgatgtgctattgtaagtgtaacaccctattaacttaggcatgttattgtattttattaattattgtgctaacttttactaatcaaaggatatagtataaaatcttatttaattaatactttataataataaaatacttttatacataaacatcgtagatataaactgtttacaaaacttaggatcccaaaattaattttttaaatgtgaacaaaatacaataacaaaagtatcgcccaatgactaacaaaactgagcccatattgtcccgaaaatttgaacactataggtctaaccatccagatatgtacaattttcactgagctccaattagggatgcacatatccttcatggggataggccccatgggcacccatccctaatgaggcagggatcccctgtctaaatggtgaacggggcggggacggagattattttttgtccctgaatgttaaatggggcgggacggggataacactccctgcccaatggaaacccgtttagtattttattttaaatttctaacaataatttataatttatgtttatatttttagtatattagtatcatttttatgaattttaagttgtgttttagataataattagtttaatgaataataactaatgagtgatattttaatttttatgtagtttgatatttaatatgtttaaaattttattataaactttatttaatttattaggggatttcctgccccaattacaggatttcccgtcccatctcccgatggggaataagcagggatg

SEQ ID NO: 74338 - DNA, 755 bp, Cannabis sativa
  modified_base (240)..(242): a, c, t, g, unknown or other
tttccagagtaattattagggatgcacaccgggcggaaaattggcggggagtgctaccccgtctccatccctgttaaggattttaatccctatccccgcttattccccaccgaagacgggacggaaaatcccctaatgggggcagggatggggcgaggaatctcctaatcaaaaattaaagtttataataattttttttttttgaaaaaaataatatattaaattacataaaaattaaannnttacacattaattattattcaataaattaattattattcaaaacacaacttaaaatttataaaaagaatactaacatactaaaaaaagacaaacataaattataaattataaaataatactagaaatataaaatacaatgctaaacgagtccctgtcggggcggggagtgtaatccccgtccccgctccgtttaacattcggggacaaaaaataatccacgtcctcgctcagtttcccatttagatggggaatctctgtcccattaagagcgggtccccgcggggcccatccccttagaaaaaatgtgcacctctagtaattatagaaaagaaagatcacgatcagactgggtattccaagtacaaattacgctttctttaactcaacacttatcaacctaacaaaaatcctcttttcccaaacccattcaatttcttcaccaaactaaagggagtcatatatttggaaagtatcttgatatttaaattttgaagcacttatccctcaaacta

SEQ ID NO: 74339 - DNA, 1059 bp, Cannabis sativa
gtgaaaattagaagaaattatattattaatttcttcggcaaacattaatccgcaatacaacttatgaattattattcattgatcgaacagtacatataaaaatataaacatagaattggttgtatgtaggtagttaaaaataataagtgaaattaggcccatttgtaaataatatcaggtttggtgctaccaatagagtaagtatatctgccactaatagagttctcgtaaaataacaattatcaaagtacaatagagatggctccctatgaattgttatatggcagaaagtgtagatctctcattcactgggatgaaacaggggagaagaaatatttagattcggaatcagtacaacagactaatgaagcaatagagaagattaaagctagaatgcttgcctctctgagtaggcaaaagagttatgcagatccgaaatgtagaaatgtagagttttaggtaggatcatgtattcctacgggtatctccgatgaagggagtcaagagttttgggaaaaaaggcaaattatgcctaaaatttacaagaccttttgagattctcgagaaggttggacaaatggcatatcgtttagttttgcctccagctcttttagcagttcacaatgtattccatgttgtcattctacggaagtacgtttcagaccctgcacatgtactaagttatgaaaatcttaagctgcaaccagacttgtcatatgaagaacaaccagttcagatactagacagaaatgataaggttcttcggaacaagaccatagcgttggtcaaggtactctggagaaacaataaggtggaggaagccacctgggagttagagtctgatgagggctcagtatccagagttgcaaagaccgcttgactttaatatgggaatattagcagataattagggtttaattatgaaacttgtgtattagttatgaattattagtttatggagatttatttaaatacagaatgcattttatatgttaggtaagataacagactataacaaaaaactgttatatatgtaacaaactgttggaatttatttta

SEQ ID NO: 74340 - DNA, 535 bp, Cannabis sativa
atgtaacacctgaaaaatgaattaacactcaaaattaataacgcataacctatgtcatgatcaattcacaattttatttgagactcttaccatacttcaatcattaaaaattaaaaagattataataaattagcattaaaaaattaaatatttaaacctatgtaatgactatccatccaataattttataggtcatatatttgagactcttctcatacccccaataattaaaactacataatttatgtaattcatatattaattgtacatctggaactctcttaccatattattaatatatttgaataaaatgcataaatttttcactcatattgaacaaaatattttaaatatatgtaagttattttttattataacacaattactatcatagaccaaacacaaataaaaagtttttaagactctaaaattaaagtgaaaaaaactaataataaaaaaaatacatttttaaaatatactttattatttacgcaatataaattttgggatatgattttgtcccgtgatgtacttt

SEQ ID NO: 74341 - DNA, 852 bp, Cannabis sativa
  modified_base (709)..(726): a, c, t, g, unknown or other
gccgctgacattgatttatcccgccaaactacctcatttcgggcataccaaatcgcccaaagaaccatgagcagctcttcctgggccgtgaatgagtgctgtaacaaaatgtggttaaaccactcccaaaaagactccatattattattttagtatttaacacttaaaaataagatgaaaaataataagtggtttgtaggtggggatagggagtgatttattttttgatgatagggaataggaagtgatttttgtttatgtccacatattatttttatataattattaaattaaaatatatgagatgaaatatttaattatattctaaaataatttcataacaattcgggagttattctattttagtgaataatactatggtgtttggtatgaggtttagacttgacgtgaatgagaatatcaaattaaattaaattttaataatcaagggtttgtgtttttaaatatagtctactttttaaatattaatcatttccaacacttaggtcgcgtttggttagaggtaatgcaatgaaatagaatggaaaggaaacaattttcttttcatttcttattcaaaaaatatcattggaataccattccatcggaatgacctttctatcattttagtagaatgattatttcatttttaaatgaaagaaaaaaccattccaatgcaagattttaaaaaaaatttaataattttttnnnnnnnnnnnnnnnnnnattttaaattttattccattccttcccattcccattcctatccttatattttcatttatctcaaccaaacgccaccttagtgtctaacaccacctaaaaataacgtctaacaattaaataaaaata

SEQ ID NO: 74342 - DNA, 591 bp, Cannabis sativa
acctttgagaccatatcctgaagaaggtttgtcccctgtgtcagacctggaaaaggcgcacagcaaaaaagcaaaccactttttgtccaacatctactatcctgacacccactattcacaatcggtggcgcatgcctagttgtcaccatcaaatggtatgaatccgtacggatgacaaacagcctatgaattgggtctcacctacccaacccaatgtcaatattataacgtattgagtaaattgcggtaaaattctcaatattttcacctcactagcatttaacccccaaaacttatttttagcgaaaaaactcctaaaattcgtgttctgttagcaattaaactaagtaacatgttgaattgtccacgtatacatagtttacacgtgacataattttattggttcatgtaattatttttttaaaaaaacaattattttccatttttttcttttttttttctttcctcagatcgtgtcttttcatttttggtcaaacctcttccatattccaccaccacaatcattgtaaccaccaccacccaccgttatttattcttcttcttctcctgtccctgacatcctcctcctcc

SEQ ID NO: 74343 - DNA, 644 bp, Cannabis sativa
tgaacatattatgttccttaacccaggttttgtcttacaaccctgcatcagtataataatatgaacgattataacagcaacagaatcaaacaaataacagtgtcacttatgacttaaccatcaacaaaaataaagaagcacggtaatagtctctaaaatttatctcagaaacagaagaaaaggatgtccaaaacatagtacagttcacaaataagctaaacacaaatctctgaataaataactagcataagacatctgctataaactattgagacattttacacgacccaatttgatttgactttgaaaaaccacatccaccataaataggggtataatcaattcaacagcaattagtaaaatgggggacactactgtttttccctgaaatttttgagctatagagaaaaaccaatccatacaaaaacacattggctggtatagtctaaaaataaataagcttggaaataagtctccaaaatttatttcaataacagagcaaactaataacattatacatcttgtataaactaataaccaattttcacacaaccgcatttgattttgactttgaaaaaccacatccatcatgaatagggatataatcaatagcaataagtgaaatgggtactaatcttaagcta

SEQ ID NO: 74344 - DNA, 517 bp, Cannabis sativa
taaaaaaaataaaaaaacctaattttaattttcgccaaaagcccctaaatcatttgggtcggccctaagaatagtgttagatattacttttatctaataacaatgctcttgtctaagagagctcttgttattaggcactgtcatgttcaacattactgcaaggtaatgtcttcagtagttaataatttttcgtaataattattatattgaaagagaaatacttaaagatacaagtggtattggtacctagcaccctttaacgtgtcatatcgctattactataattaaatatcgaatcgcatatagtttaataaaataaattttataaaatattattaaccaattgtaaagcactacctagagatggtgctagacactgctgataccttataacaatgctccataccttaaatgaatattattaatcaatcgtaagacatctcaaggtggtgctagacacatctactaacaacctctaacaattttcataataaacactagtgcaacacaactacac

SEQ ID NO: 74345 - DNA, 857 bp, Cannabis sativa
agctgggatttagaaccaatcgagctttttgatatattcaagattacaggctgtagggattttagtagatattatggtccctttgccccttcatctagtgacagctcaccttctagtgaccttggtagatcccttaggtagaaaattatattctcccctttttcatcagcctttttaataattgtaacgccttgtcttgtttttcagacatgggttatgaagatatcatggaccgaaaagggaagaaaatgacaaccaacccttgggtccctacagctgccgaagtggttcctcctaagaggcaaaggaaaaccatcgcccataagaagaaatcactggccgagcccatcgatctcgaggtttctgacaacaagatccaagagcaagttcctcctccagtcgttttcgacgccaatgcttctcgtccttaggcaacccccgctactgcttctttgagcaaggccattgagaccttgtcggccacagcaggagaggtcgggtctgaattttcccaagcatatggagttgcctgttgacgcaaacttcaaactcttcttccccctgattgaaattttctcaatcttaggagtccaaaagagatgctttcaaggagcttggactataacttcatggtacattggctttgttattataattatattattctttttatacctttctcatattcatctgtttgtaattctccaggcttcttttgcttcttttgcttccaatcgactactctttgagcggctcgaatacttagagggcgaggtccacaaattactatcccaatgcaaggttgggagtaagcatcgggacgacgcctaacaggaaaatacctgccttaagcaaga

SEQ ID NO: 74346 - DNA, 891 bp, Cannabis sativa
ttatttggggtcgtctcatccaagttaatgccatattgggatttaaaagtcttcattgcatgaaaaaaggtcggtttggaaatggaaggaagatgactctcaagctaggcatgtcaaaagcctatgatagagtcgaatggcgattcctagaagcaatgatgatttgtttgggttatgaaaagcgttgggtggataaggttatgaattgcattaagtcaatttccttctcaatccttcttgagaagtcagcggtcaaattgatcctagccggggtattcgacagggagaccccctatcaccatacatgttcttactctgctccgaaggcctgtcttgcctcatctatgaagctgagagagccgataggcttcatggtctcaggtttggtagagacaatataaaattatcacacctattctttgcggatgatagtttcatcttcttagacgctacttcttcagattgtcaaagtttgaaaactattttggatgaatactctttgctttcgggccaaagaataaactttgacaaatctgaactttgtgtaggatagaagatcacacaaggaaccgggacttctcttgctgctattctgggggttaagctagtggactgccatacaaaatacctggggatgccggcctcaattgggaagaaaaagaaagaagtatttgaagacattcgtacaagaataagaaccaaacttcaagggtggaaagctagcttattttctcaactagggagggagattttgttaaaagctataattcaagctatccccacttacgtcatgagttgtttccgccttcctaaggagctaattaaagatattcatgcaatgatggctagattttggtgggggtctttggatgctaaacaaaaaatccattg

SEQ ID NO: 74347 - DNA, 786 bp, Cannabis sativa
atatttatgagtatgacacatccaaaatggtcagtaagatatatacaactacaaggagcatatataatgtctaagatgaatgcatgtgtgtgtgtttcattcttatataataaagtccaaagagtcactatcatcatgttatagctacaaacaaaatgacatttattatctttatttacaccaaggagagtatacgtacgtaaaatatacttttgttttagctataatataaaacctatatgaacatatatataaaatatattgaaattaaataattataattgagatcataataaaaatcaatgaatagaacatgtacctccctttcaaacaaaaaaaaaataatacaacatgtgactactacataagatgttgtatagcaagattcttctacgtacatataggattaatatattaatattagcttgctataaatcgaaaaataaaatatgagaaaagaagctgtttctttggatgacttgacaatttaaaggtttttaataagtgatagttggagtagaagcatttggaatagtgtatataaatttagggtagatgaacactcatcagtcttgtcaatataatgatgcattcaatggaatatataccaaaaaaatatataatatatttataggtaattttatagtagaatctttaaaataatgcttattgtatatcttcttcatctaatataattttttagtttaattttttttataatcatgtatatatagggtataattatttatgactcacttataaatttagaaagttataaataattta

SEQ ID NO: 74348 - DNA, 1361 bp, Cannabis sativa
acttcacctttaagcaatctttaacttaggggtataatgatcataattaattaccccacataaccccgatattctaatatctataaatcttgccccactaaattttaaatactaaaccatattaaagtgacactaatggctaaaccgtcaattttttactgttaccggacataaaacatgaaaatattaaaatttataaataacatgcatgacacatatgggtgtgcagaaagtcatccatccaattacaaccgaccaatctaattccaaccgatctaatagaatcggatatccaatcataattagatcagatcggatgtaaattttgaaaatctaatcggattggttcagttgttggatgggacattcgatccaatggataatcaaatcaaaccgatccaattatcatctaattatatttatatattttttaattacatttataattttatatatttaatatattttatttaaacaatatgtttattaatttaatatatatttaacacatttgattaaagaaaaaaatattagatccaaaatattaattctcatcttcctaaacgttaataaaattgtcaatgcttattgaataagttttattttttagcggttttattatgtgatcatgagaattaagttggactaaactaatgtttattatgtatgttggattatgaagttttaaattattttttatatatattttaatgaaatttaatatatttattgatttaatatatatttaacacatgagattaaagaaaaaaaactttagatctaaaatattaattctcatatttctaaacgctaatagattatcaatgtgtattgaataagttttattttttagctgttttattatgtgatcatgagaattaagttggactaaactaatatttattatgtatgttagattattaggttttaaattattttttataaatattttaatgaagtcaacttaaatggtagctaaaatagattggatgaatccaatccaatctaataggaaaaccaattaatgcatccaatagttggaaccgatccaatctaatacatccattggatcagatcaaatcagatgactcaatttgattagattggatcggatgataaaatataatatctaataaataattaaattggatcgattggatataaatccattggatgtgatccaatgaacaccccattgatacacctagaattcaataaaatcctcatagttgagaaattatatcactaatgcctaaatttgacaaaaggacttattttctactaatgcataaataatcatgaaatagtaattaaattaataacacagtactaattttcatgtctaaatatgcgatcattac

SEQ ID NO: 74349 - DNA, 1523 bp, Cannabis sativa
  modified_base (1010)..(1012): a, c, t, g, unknown or other
tccatcaacactctagaatgagtgtttagttcataatcacaaacataataaccataataatcatgttcataattaaataactaagcaaaagaattaagaggaataagaagaaaagaactctaatgatgatagttgatgatgattgcttgaagtctcttctctcttgctcttcaatgtgttttctaatctcaaagttgcttgtttctatctctctagtcgtctccctttaatctgatttacatccttctttatataggccaacaaagatagatcaatcctcttagaattagaattaggaattttttttaaaaaatgatacgtgctacgctatagcgcctataccccgcgctatagcgcctaagagaaaaaaatctcaaacctgtgctaaaattatattctttttttcgtaaaaaatcattttttttcagtcgagcgctatagcgcaaaccccctgcgctacagctcacagtacaaaaattctacttcaaccttgctcagtatatcatgcataactcttccgtctgaactccaaatgaaataatttaacatgttttggaaagctaggaacgagctctatcattttggatttcataagctcttcgagaaaataatgaaatcattgtcaaaaatgggctcaaagatctctgtccatcacaaaatgtcttttcaacacaaacctacactcttggagaaaacacatcaaatctatacaaaaataaatactaatccatctaataattgactaagaatgagtgtacaaaactcatcactgcacctattctgtttttttgtatcctaatcagctataaatcttcttttccttggtcttccagatcttattttctggtttggtggcagaacaaggatatcttttatgttctgtggtacatcccatgttttgtgattgtgtaccatatatattgaccacttgtatgtttcaagccatgttcttgttgtgtaataatgtgaacagtaattgtacacatttaagttcatctcttttataacannnagtgcatgagcacacggtaattcgtcaatttggaatctgttgcaactgcatgtcttctactttagattgatcacccatgatcttgttagttctaccacttcgaacatgttctcgtttattggctttacctacatattaggtcaagataatcaatggtcaaattgtaaagaaaattaaaagaaactataatgcaacttgtagtatgaagtgattatacattttctgtcaatgagtcctcaaagttgttgactagctttatctttgtagtaggtgtccaaactgttgtggttttctgtacttttttcatgtttgtgtatgtccattgttgtattaatgctctcaatgactccattagtgttgtgattagtagttctctagctgctaagtttgctgcatttagagattcaacaatgttagaagtcatagttgaatacctgttgtgtttgatgtggtattcaaatttcctttatgtgtatgcttttgttgctgcgaagaatggtttatcgagctt

SEQ ID NO: 74350 - DNA, 989 bp, Cannabis sativa
gattgggacaatgcatacacgtacttgaacaggggacatgtatctgatctctttcagaggagaaggccactacaagatgaaccaagttcaagctcaggacaatcaaggtctcagggcatagtcagtcaagcaaacatacacgagaaggaagtagaactcgatgttatcatgatgaccaagaaagcatgagcaatacgcgaagctaccaatttgagagttattctaagacaagatctgtgaataattatgagcgaaggcagcctgatcttcgcgagcatctgaatcgaagacaacctgatcttcgcaagtggctaaaccaaaatgcaccttatttgcgccatcaactcaagcataatgtaaatcaacaacaagtaaaccccatccaattgcgaatgattgaactagaggataagttgaaagtatcaggatggagaacatggaaaattacctggttacgtctcaaatgaagagcctgagccatttcatcctgacatcttaaattctgagtttccatagggattcaaaaacccacatgtttcgcagtacgatgggcctacggacctagttgctcacttgaacaactttatactatcatgcgagccaacaatgtcacgaataatttgtgttggattttatttccgacctccttaactagagctgcgagcagctggttcgataaattcacccatcactctataacctcctaggaactgttgtccaaggactttaaaaagcaatttcaagccgttagagacagacgacatgaagcatcgtccttaactaacataaagcagcaaccaggcgagtcacttaaggcttatttgagtcgctttagcacattcgctgcaaaggtcagaaacctgaatgacagtattcaactcactacacttcaggtggggatcacaactgacctatacacggctggagttgacctatccaaattatatactataattaaaatatatatatatataccatgacaataaaat

SEQ ID NO: 74351 - DNA, 880 bp, Cannabis sativa
gataatgactctcatggatagtataagaggtatgtgtattttgtctttgatgctctaaataaatactagatcttggttttaatgattatagattattgttggttgataattttgagtgctcataatctgtaattgtttttcaacaattggtatcaaagtcaaagttattgattttagggctcaaaatttttcacaaacttattttctcaaatctaaaatttgtggtgatttttcggattaatgtgtctaaggttgtgtgaatatgagttttgtccctctaaatctattcatatatgtcttgaaaacaatcttttactttttctattgagatatatatgagctttaacaatggagaaacccattttggattcatcatttttcatgtattattttgtgttttttttcagtaaatgggtattggaaaatgatagaggattaaaaatgggacaaaacgcctcaaacggcgttgaatttggtggccggatgtgggagatatggtcgggtcacgaactgggtcccgtcgacccgagtttcagacccacaggcatttttctgggcaaaagagatgagaaaaaacgacacgttgtttttagtctagaaaacagctcaaaaatgacatgttgtttttctggtgtcttgaaattccacaaaaaaaaaaagataagtcgttttttttggtgtcctgatcccctcaaaacgcacatcgtttattgtctcggagcccttcagcgaacgacaagtcgtttcttgtcttcaccctactctggggccgcgtgcaggggtgtttttggaccattttttccaccttttcatgtttttaattctctattatttttggtatgtacaatactaattgcatgaattttattcatatttggtt

SEQ ID NO: 74352 - DNA, 698 bp, Cannabis sativa
aggattggatcttgaaggtatggctggagcatccatggaagcggttccgaccggaagaggaacgacggaggagggacgagcatctggagaaggagacgggatgacgtgttgaagatcgagacccgcagtaagtggctcgatcggagcttcgatagacggatgaattgtttcttgaacgatcgaagctttgacggaggacaccacatgagtagtggtggaactggtgaggacattgctgacaatggaagcagcagcaaacggaagattggagttaggagcagagaactggtgagattgtgccatggaagacgatgagcggttgaagtttcggtgagccgtttgaagaaccggccaaatccggaaaaaggagagcaggcccgagaaaaggggatttagtctcctaaagggaaatatctgataccatattagtaaaatgaagcttttattattattgattgtgtaataaatgtgtatagaaaacactatacataaggggaggatatccaatcctaagatacacactaaacacaactaagaataaccttatcttgtggctgcctgaccaagttgatccgagggtctcctcctctcatccagcgttagtaaatcaaactgtaaatgtgttaatgtctactgaagatgttgcctgggatgtcgacttggttcgtgatttgtttaatgacagggacgctaattta

SEQ ID NO: 74353 - DNA, 604 bp, Cannabis sativa
ttggttcgaatttggttcggtgtgaagtgatagtagaagcaaaggccaaacatccaaaacatttgagatcattataatcggatttcttaccaaataatatctcataaggcgttcgcttttgtaagtttggtgtaggcgttcgattaatcaagaagactgctgttaataagcactcagtccaatatttgatagggactttggactggaaaaataaagatctagcaacattaaggaggtgctgatgctttcgcttagccacaacgttttgttcgggggtttcagtgcatgtaaaatcatgcaatatcccatgtttagcaaacaagtctttgaaagtaagttcaggggcattatcagacctgaatcgcttaaaaatgcaattgtattgagtttgcaaataagaaataaactctggtattatcgaaagcacatcagatttgtgtttgagaagataaacccaagtgaatcttgagtggtcatccactaaagtcaaaaaatatttgtggttagtatgagaagcaacatgataagggccccaaatatcacagtgtataagatcaaaacattgagaagtaaagtttgcattattaggaaaggggagccttct

SEQ ID NO: 74354 - DNA, 644 bp, Cannabis sativa
gatagaatggcgacaagaaaaatcgcttcaagtccccatactgttagaattaatcaaccatatcaagctaataattagtctacaaatttaaaaggtttcaacagttcatcaaaatcaaagaatttccagacttaaaatgattatcaatgatcaaactaataatgatgatcactcgtatcaaactaataataactctacaaattcaaaaacataaaaaatcaaagaattcccagacttaaaatgattatcaaagatcaaactaataatgatgatcacccaatcattacaaattcaaagagtttaattgtgtccaacaaaatcagagaattcccagactaaaaatgatcatcaatgatcaaactacaaaccatacaattaaattggtaaggaaagaaattctaaaacaccatgaaaaatatcagtcctaccaaataatttctctgattctttgataaattcttcctgtttactcaaatcataaattcagttgaattggactgaaactaaatcaatgggaaaaaagattacgcccaattaacaagttctttaatcataattatatatatgtaattgttatattggattaaaaaccttaaaaactcagaaattaaaaaacacaccaattatccccaaatttctaattc

SEQ ID NO: 74355 - DNA, 1122 bp, Cannabis sativa
tattatataattatattatatatatgtattgtgaatttgtaagcgtgttaaattgtaaatgtgttaatttatgtaatatgtatatataataataatttattttataattgtattattttgtattttttttttaaaaaaagagatatatttaaaaagaaaaaaagtctagcctaacccgaaactcgatccaacccacccgaacttgtcccaactcaaaccaaacccacttggattcgaaactcgaagaatctggtctccatacggacgggttcaatctcatgattccaaaacccaaacctgacaaatccgaacttgaaaactcaaaacctgttaaaactcacctgatatgcacccctaagagcatttgttgtaacgtgtagtttttagttcggttgtttatactttttaaagctgtgttctctaataatgaagtgtaaaagacgaaagataaaaaaacatagtgtaaaaaagagaacacgtgaacaaataatattaagagcaacatagatacattacaatgtttctttcaaaagaaaaagatacattacaatgtaatctgtcatttattaatatagaaaattatttacatatgtacgtaccgcgctagttgctgtacttcgttcccttgctgtaatttgcgcgcggagtgacaaaaatggtcaatttcaatgctaattatgattcaatcagttgatacaatgctttcaaaaaaaaaaaaaaaaatcagttgatacaaagtaatgaatatattatataatatatgtatatatatttataggtaggttattgatacttagtttactattcactgaagaaggaacaacttccttttcgaattgcacgtttgcatatgttccattattataatttactgttctattatcgtgtagcttttttaagaaaaacagataaaagtgtggagagaattaatacttttcttctctatgtaaaagagggggataattacataagacaccatattttgtaaaaaaattgtatgtttaggtttgatgaatttttttttatatatttttacggttttctgaaaaataacacaaaaacaacaagaaaattacataaaaataatatgaaaataacatcaaaacaactacaaaaaataac

SEQ ID NO: 74356 - DNA, 757 bp, Cannabis sativa
tctagaaattttactgagaacccatatttagaaaggatcggtagagaaatttccaagaaatgtaatggtttacctttagctgctaaagttctaggaggcatcttgagatcaacgttggatgtagggagatgggaacaaatagcaagcaataatatttgggagttgacacatggaaggagtcaaggccttcctgctgccttagaagtgagctactactatcttcctctacacttgaaagggtgttttgctttttgttcaatattcccaaaaggctatcaatttcaaagacaagagttggtcttattatggatggctgaaaattttgtcatgcgctccaagtggaatagaaaaatggaagaagttgccggtgagtactttgatgatttagtatctatgtcattttttgtaaaatccaaggacaggagcggtagatctatttttctgatgcatgatctacttgttgatttggctaaaattgtttatggaaaggatagttctttattagagcacaatgaagacattgttaagttcgagaagaagacacgtcacctcggatgtgtaatggaacattctactgatcacaaggtatctagctatgattttgaaggtacccatttgcaaacctttttaacattaagttcaagatattctgaaatcagtttttttaaggaagtagtgcagaatttgttatcaatgttgaaacgtttgagagttctatcttttcgtggtcttcgtatggctgagttctctgactcaa

SEQ ID NO: 74357 - DNA, 793 bp, Cannabis sativa
accattaagaatatccagaactgctgtggtaagatcagaaccgatgacagaccaatttttctaatagaaagctgggttaaggccatctaatcccggggctttatctccagagaattggaatagagcttgcttaacttccccagcttcaaatggagaatccaaaaaacttatttgttgcagggtcaaagatttatcaatggctgcaaggatgaggttagtagctgtagcatccgagctttgggacttaaacaggttatcaaaataggcacaaacctcatgacaaatatcagaaagggaagtaacctgcctcccatcctcacacttgagttttcgaatataattagtctttttcctagcagtggctttattgtggaaatatttggtattcttatctcccgcattaagccaatggattttagattgttgcttccaaaaaacctcatgcttataaagaaggcaatcaagagtggattgaagcgtggaagcccgcttaatgtcctccctattaagaggcaaattggaatgaagagtattaagagaattctcaagggtattaatgcgagaggataaacttttgaaagaaccattccagtctttgatggcagcaatacaagattgttgtttagaaaggaaaaatccaagaggtgtggtagccgagtgagcaagaactgtgctccaactatccttgaccgtatcaaaaaaagaaggctcagtgagccagaaattctcaaacaaaaatcttttattcgtaggggtgtgtaaactggcatcatccagaacaatcttaagaact

SEQ ID NO: 74358 - DNA, 698 bp, Cannabis sativa
tgatcgaacaagtcgtcgatcctaggtaaaggatacttattcttgatagtcaatttatttaattcccattagtcaatgcacatgtgcaaggatctgtctttcttcttaacaaataacacaggagctccgtagggtgacacactaggttgtgaaaaccctaggtcaagcatcccctgaagctgaatcttcaattctttaagctctactggagccattctataaagtgctttagagactggttctgctctaggtgctaaataaataacgatatctatttctcgttacggtggtaaacttggaagttcatcgggaaatacatcaaaatattcttgaaccactctgatgtcctctggtcgaatcaattaaggttgtgtggtatccaataccactgcgaaaaaccctagacatccatcttgttacaaatctctagctttcaataccgagatcactgaaattcaggatccctaaactgatcccacaaatacaaatggtttctcgccctcgggttggaagatcaccatcttccacttacagtcaatactagcagagtacttagacaagaaatccattccgagtaagatatcgaaatttgctaaacttaattccactaaatcagcactcaactctctatcctcaattctgatcggcataggcctaatctgccttttggagataactaattctctgttatgcattag

SEQ ID NO: 74359 - DNA, 1591 bp, Cannabis sativa
aaaggaaaaaaattgagcaagttctttcacaatcattaatggatgttaaacttgacaaggaaatattgcaaaagagatattataagacttgctgccatgtttacttctaaagagtgggcaacttgtccttgggcatttaaagctgatggaaaggaggcaagatacacggtttggaaagacacatatttttggcaagtatgccattaggaccacaaaacctttgttgaagtgttgaggctagttgatggtgataaagaaccagctatgggttatctctacaatgctatggatacaacaaaagaaaaaatagcaatagctttgggtggagaagaaaagaattacaaggagatatgagaaatcatagatgagaaatgagaatttcagttgcatagacatttgcatgacgatgcgtactttttgaattcccgtggtcattattcacaaggattttccaactatccagagattaagttgggtttgtttcattgtttggacagacttatactggaccccgaagacagaatgaaagctgaacttcaatgtagcagtttccacaacaaagaagggttcttaggactcactttagctcaacaaacatttcaaaaacgatcagcaggtaattaaatgtctaaatctatttttaatattttttcaaaatatgtagtagtatgaataataaagttaagtaattattctttcttttagtgaaatggtggactcaatatggagatcaaacgccggagttacaaaaatttgccatcaaagtattgggtcttacttgctctgcatcgggatgcgaataattggagtactttcaatcaaattcatacaaaaaaaataaagaaaccggttgactacctcaagaatgcattctttggcatacataatgttcaacaaaagattgaaacacagatttttgaaaatgaattcagcaactcaatcaaatgaagatgatcctttgttgatcgatgagttgctatctgatgatgaatggcttgttagtgaaagtgaagatgaaaatgggacaaggccaaagaataaggattctcaacttggagaattggaattgactcattccactagcaattcaaaccagccagaaagtagttcaaaaggggttcgtaaactctaattcttgttttaatttacgtattgcattatgttaatcaattattagtttgtaattattttttcttaggaaaacgaaaacgcttagtagaggttgatgaagatgaatgggaggatatttatgatcacaatggggtggtagtagtgatgatgatgatgagggcaacaatttctcaagcaatgatgaatttagtgattcctaaatcatcatgtcattattgctgaaatttgttctaggataatagaatatgattctagttctagaaacaaaattatatttacttacgtttgagttttattagacatttgatgttatgtttttactttatgagacattttatgatatgtttggtttttataagacattacttatccttagtatttttagttactctaaaaatattattttaattaaataattgaggcgtatgcctcaatgcgccttgaggcttacgcctcgcct

SEQ ID NO: 74360 - DNA, 647 bp, Cannabis sativa
cagcagtaccacgacatctttttaagaatttgcgcatagagagagagtcattattacttcttttggtgttgacattaggaggagtgttctctttgtcatcttcatggttcaggattgagggaattgatgtaagagtggaagctgtggcaaagtgtgtaggggggttcgaagagagagatggcagaggctgattgttagtgtaatccatgttaaccacaggtgggtttggagggtaagtagcaaaggtattaagggaagcggaaggatgagatacacttgttccgaaatcaggcagaaaaatgtgtgataaatcaactgaagtggagataggagttgaagactgtggtggtagtgtttgagggaaagtgataggctgtttgagtttagaattggcctggtgagaagttggataagaaggggcaggaacattgtggggatcatgagttttgcacaagttaaggggaagttgtttcacagaggcacaggcagattgtgtatatgagaaaccttgggaaggctgagagtgtataaatggagtgtgggtattaatagttgaattaactgaaggcagatgggcttgattggttgcaacattttggctactggtttgactaacagtggacgtgcataattgagtttcaaaagat

SEQ ID NO: 74361 - DNA, 853 bp, Cannabis sativa
gacacgttttttgagaaaaatcttgattagcaaggatagcactgtaattgaaaaagtactgtagcatgccttagcattagggcgttacatacaatcgatatgaaatgtgaaataatataacatatcgaacatatatgtaaaccacgaaagagacataatacctctagccattgatctttgagcttcaattcttagtgtagctttgaattgggtaatcgggctttcaagctctctctgatttctttagatagaattcgttgtttatacagaatgagtgaggagctcaaggaccgagagtaccctatatttataatatgcacacctcataaataatttatcttacattctttcgatatgaagttaatcaaaggagcattcatatcatatggttaaaataaaaaatttctaaaatatttaaaaaactaaactaaaaagacgatacattatatattctaaattcatttattttaaagtttctttaaaagttcttattcatgctctacatttataaaataccatttattgctctaaatatattttattaattatttaagattttaattttcctttttagatgggaatttgtgtaaatattaatattatataaatatgattttggtgatgtattttgaagatgataatttgagcactcttgtaagtttttctattttatcattcaaaatacaattatcaaaatcttatttttcttattttacctcatatttttatattataccatacattaattttcatatttttttatattatttaaatataaattttttaaatataatttattattttaaacaaattatataaattaatataataatatcacacatatattaaaaaa

SEQ ID NO: 74362 - DNA, 1000 bp, Cannabis sativa
aagtttatagatcaatctacatgaatgcgtgataaaaataaaatgaaatgaatttctcgtcttgaaaagttcactgtctcctactaaattcaacaatgcttcctgaaatcaaacaaataatcccgaaatcattgggaattatatgccaaatataatttagcaaaaataaatacagaaaagacaatccttgataagtacatgaacattatcacaggtgacattcatcctattcctatctatgtaataatttcccccaaaaaacagaatgaccaatcttgttacaataaaaaaaatggcttcgtacatttcaaaattgagaatgctttaattcaacacacacccttttgtgcattttccatacttttctatgttttttggagtaaaagattaaataaataaaaatatggttacctcaaaaatcctcttgaagaaatgaagagccagagccgaattgagcaagagcattctcaagctgtagctcttttggggaaaaaaaggtaaaaagccaaggtggctagaaaagctagagtgtaacatataagcatgcctaatctactagacaccttaacctcttcaatagtttttttctcttggaatgaagattgtttttgaagattagtagcatttacatgattattattgttgttgttattactgttgttgttggtgatgaagaatttggaataaggcatattgttgcctctgagttcggagagtccgccaaaggcaaaggaaggaatattaatcaaggataaggtattattgaggaagatagaatgtggtggtggaaagacaagtttcagaaatatagattccatggatcgtaatctcttcaatattgttttagaaaatgattgtttctaatttctcattcaacaactctttatgaattttgcaaaaaaaaaaaaaaactagaaataaataaagtgaagagagttaccgagaaaactttgttgcaggctccgtaagtgaaagcaagagagacgagtgagaggaggtg

SEQ ID NO: 74363 - DNA, 861 bp, Cannabis sativa
cgcgaccaagtcccccacgttaagacctttcttgtcataagtggagaaaaccctggcatgctggaggaacagctgggtaggggtaatgcggagaagaggagggatcctgacccactccgtgaggagctccgggcgatccacgacttggaagccagaagaggaaaaagcggtggcaatattccttaacattcttttgaaaattaaaagggagcaggccctcgttagaaggatgggcccggagagtgaaaaaatcgtccttaaacttgttcccctttttggggacagacaccagttcataaaaatataaaatttcatctgggctaggtgaagcccagcctctggctacataaaaaataaataggcctgagagcaggcggtaagcttggggaataagttggtacggcgcgaggccaacaaatacaaggaaattaatgaaataatcctgaaggggaagcatggctccggacatgagatgggtctaactcacggctccaaaacccctataattgtggttgggcgtctcttcgtcgtaaggtaagcgatggaaaaccccagacgcggacggcttaatcccagtaactgtcacgatcttctctaattgatgagcacagatcgggtagagcggagttcatccgcttccagccgttagaacggcacatgtagttctcctgggcaaccggacccttcataacctcctccagggtggctagagcggccgcccccttcttagaagacttagttcttgacgcaggggtagacatgtttcgttctgaaaaaagaaagaatccagcagttagaccccaaaccaaaccctaatgttaaaaaagggaatgggggtcccctaaccgttggaaagaggcc

SEQ ID NO: 74364 - DNA, 1121 bp, Cannabis sativa
cattattttactaactttttaaactaaaataaattaaaaactattaggataaaaatattaaaaaaaaataaatcaatagtatatattcagcctcacgttttcttcatggaatggttgtgatgaaatagaagaataaaaaattaatttttgcttgaagaaatttcagactgaatggctgccattttcagaggagggctggttttagaaaataaattggggaagaagaagaaaggggggaagagagaaagagagaaagaaatatataagcgggctgggaaaatttagtgaccgatcttagcgggcctatattggcccactgttattagtaaaacacggtccaatgagaaattttaagtgaccaatctcagcgggtctatattggcctgtcattattgataacatggcccaataagaaattttaagggaccaatggtgagcctatattgacccaccgagattggtaaaattttaggcttaaaaaatgtcaataacgacggaacatacaatgcgcgccaagattgctacgctctggattttttttaaaaaaattcagacctattgggcacgtacatgcgggcccgtcgagatagtgctgccatgataagcctttttttgtagtattgattgcacaaaaaacgataacgtgttaaaaaaaagtgtcaagtaccattattagtttcttttatcatttctcaagaataacatagttataacacaaatttgattattggtaacaaatcaaatcaacaaaatagtacattaactttgataagagtgctgatcccaagccactccaaaccatgcacatgtgattggtcggacttagttcaattgggatgaccctcatttcacctttgacaatcttataacaaactattatccgacactttagtaaatatataacaactacagaaaacatcacccttagatatcctttttctcaaattcatatatataagagaattattttttaattatagttatatataatcattggtgattattataaattaattgtggcgaaattgttgaatattagactgaacgtcaattaggtgttgaccattggcttctaagtagtgcttgtatgtggctccatcatagttgggtgggagagcatc

SEQ ID NO: 74365 - DNA, 856 bp, Cannabis sativa
agcccacggcaattccagcttaacacattcataattcttggcgggcctgtgacacagaacccgccccaataacgttttttgtcccttccgaaatacacatattgtcaccattatccccattcggcccacttatttttataccagcaacacgtttcctttttgattcaaggatcaataaatctccatcaatatcttcaaatgtatcttccctcataccatcattcacgttaatccttattgctgactttcccaatatatcaccctgggatttatcaacattaattcccaaatcaaagcctatagtttctccatccaatcccattgatcgtgtaagtgattgatgcttcccttgattttcgccaccagtagagctccctggcaccctttctctctcggccgaagctcctcccaatccctcaccggagttctcccctcgcaccattaacccttgtcgaagccatttggatccgattgtgtgttgtcttcttcttggcatagccttcaactctagattataaggttttttgatcagatgttgtggggtatcaaacagctttgggcagaacttctctggatgtccaaggattccacatataaagcaaaaagttggaagatcctcatatttgaaattagcataacatatctcacctccttttttctctaatttcattcttcgttttaacggtaaatcaatacgaacagagacacgtacccgaagataatcacgccatattcccatgaagttgttcttatcagcttcaatgaaagtgccgatgtagtttccaatatccttgaccacctttacggacataaagccagtagataatccatggagttggatccaaaaatccagatt

SEQ ID NO: 74366 - DNA, 635 bp, Cannabis sativa
gtataacataagtatagatttttacttatttacggtttggataactattatatgaagatcttttttttttaatgaaaaatatttttccaagtgtttggatatcatttaataaaaattgtgagtaaattaggaattatgtaattattttaattttaaaaatagcttgtcaaaaatgttcttgaaagaagttacaaatcctagcttcttccaaaagaatatttaaattaacaaacacacttttagaaggacttcttttaattctaaatgctaaataaaagcttatagaagttaagtcaaacatgcctaaaaatggaaatgagaatagaaataagaatataaaataaaattaataaaattttaaatgcatacaaaaattaatagaaaaataatatatttttttcatcttgtattaaaatttctttttattttaaattggactaatttataatgctgaaaatatttaaatgcaggattatttctttcacgcaaattatttaatttttaatttggtcttaaataattataattatgaaaaaaaattgaacaaaaaaagtttctgaaacaaataaaaattgtaccaaaacgatcttttataagtttgattcataagtcataaatattaaaagttatctatt

SEQ ID NO: 74367 - DNA, 868 bp, Cannabis sativa
  modified_base (835)..(842): a, c, t, g, unknown or other
gggtaataaccctaggcaattaaatcgctcatgttagggtaataaccctaatctcggttactaattactcacacatatcatttccaatacaactgccaccgcgcataactctacgtgctaaatattttcttacctgatgtcccacaatagtagagattccaaatccccaggtgctcctgaccaggtgccggtaatcctagtcacaaataccggatttcacaaatagggttagcccccgattacacattcataatatataaacatggcattaaaaattcagataatcacatcgagctcgaaacgagctttccaacagtatatggaactcccaaaacggagctcggatcacgaagttatgcaatttcaaagttggaactcaaaactgcccagaaattcgagggcaggccgtggcatgaaaaagccatgccacggcacctgggaccagctcccaggttccaatcagaggggcgggctggggcatgctaataccatgccgcgtcacctaggttccaaacccagaaaaccagcaacaaacatacgaatttcagcaacaaaattcatctaattcatccccaaattataaccaaactctcaaatcacagagtagagttgctagcaagtattagagagttaaaattcatatttcacgcatcaatttctagcaataacctcataatttcagattgcacaataaacacaaaatcatgccttaaactaacaaaattccaaatttaagagcttgagcttaaaccttctcatctttattcattttccagcagcataacactaattgaaatataatttccaacctaggaaactgttaggttttatgccnnnnnnnnaactccatttcaatgtaatctatttt

SEQ ID NO: 74368 - DNA, 1261 bp, Cannabis sativa
agtaagcttttattactttagtagattattttatagtatgatttaagaaaagcttgttaggaagcatgttagtagcctagtagaataggcgcatgtttttaatttccaaataagcgctttagtaagttttcctttgatcatgatctgacgagactagctcttggttacgcagggtgttcagattagtatggacgccaggcgatacaccagtagccagggcaacttggttggatcaaaagaaggtcagggagctcagattcccccaaatgtttggggctgaggctgaggtccccggggcagggcacgtggtcggggtgatgctaatccgccacaggttgcccaagctgctcaggatgcccagaattgggaaagcaggtttgcagaaatgcagactaaaatcaaagaaaatgaggaagtgattcgacaattaagacagcatggtactcttgtagttcctgcaccagagataccagtagctcctgctcctgctatccaggccgaaccggtggttgtaatgaaccggatggaacccctgtatgaaaggttccgtaagcaggaacctccagttttcctgggaagtcctaatgttatgaaagccgagcaatggctaactgtgatcaccaggatcctgaattttataggcgtcactggaaatgacagagtgctctctgccactttccaatttcaagaagacgctttagtttggtgggacatggtgtccatgattcatgatgtgacaactatgacctgggagaaattctaggagctattcaatgccaagtattacaatgaggcagtcagaagtgccaagagaaaagaattcacccatctgactcagaaaggaaacatgagtgttactgagtatacgactcagtttgatcgcttggcaaggttggcctcgggaattgtgccaactgatttcagtaagaaggagaagtacctagatgggttaaatgcaaaaattagacatgatccaatgatcactactgatggcaaaaccacttatgcggaaatggtggataaagcactgcgagctgagggtgcagtgggatgtatgattgagtctagtgggactccagttgttggtgggactcctacccctcctgcatcaggttttagcaggggaggtagtggttcgtccatggatcagaaaagaaaggcatccactgcaacaagtggcttaggttagaataagaggtcccaagggaactagggtcgaggcaatcgccagagtggcactgagacccgatacacttaccca

SEQ ID NO: 74369 - DNA, 1388 bp, Cannabis sativa
actttgctactttctttttgcagacatgtcttccaagttgagaggtcttgcaggtgggccttcagatgagcctactggacgggtgagggctaaggtgcccaggacctctcatggtgtagatgctagtggaccatcacttcctcctcctccactaggagctgcactagtcagacagcctatgatttggcctatcgaccaaagtacacggaggcccagcagaggagcagggtcacctactggtcagagagctactgagtcagccactcagcgtatagagatggctattcctttcttggataaggctttgaaggagttgggtgatagtgtgcctcacaggctatactctggtggactttaggatctttctctggtggggtatgctttcagctttgttcatcttgttggcactgtataagctggtcggccatggagctgcttacatatggctggccagccttggaaaattatataggggtttggccggtcatagcagtccagtgaggggactggttggctagagttgtaatgtttaacattgatgttgtttttctttgtttttaagccctgatgaagctgagctcagctcgtgatggctcaaaggggtcttcagacacttcccaggagcgtgtgaaggtcttggaggcttcccttgccacaaaagacaaagccaattctgagctagaggtccttttggcagcgaggaagaaaatggtctattgattggagatcatgcttagtgccgggaacactgagaatatcaactaggctactctcatctctgggaacactgagaaagttttggaacagtaaaatcccgaagaggctcaagattttatggtggtgcatcctgtccaaagctctccatgtctgtgcggtgattagtaaaaggtttccaatagaggacaatagctgccctctttatggaacagatgttgaatctattgaacacctgttcctttcctgtaatgtgacttttcacttgtggcggtcctctccttggggcattttccccttatgcgatactgggattcggatgtgggactaggttaaattcttgtgggatcttaaaagcaaaggcattaacacagaggaagttttcctttatgcatcttgtattattgatactatatgccggacgcgcaatgacaaggtacacaataattgtcccgttgatattaaaaagtgcattgactctatttgtttatcttttgcatatcaccatgcttatttgctcccttgcccttcttcgagtttaaccgatatctgacatcccccaagattggctgaaggtgaattgtgacgttagagtggggctgcatagcatgtgccctgcggtagttgcaagggatcgttttggcaaggtgatctgggtcattacatctaaactg

SEQ ID NO: 74370 - DNA, 940 bp, Cannabis sativa
ttaaagttgtaaatacgttgtttgattttgttgctttttgagcatgttgttttcacgttatttgtacgttcagtttcagtggttaaaatctgtagattccttaaagtatatatataattgtttttatgcttttatagcgttgttaaatggttgttaacaattttaaaaagctactaacaactattgtttttttaaatatatatatatatatataattatacaaatacttgatgtagaaattaaaaatataataatagttatttctcatcgtactaaaagatatatcaaaaaaaaattataatgttcattatcctatgtaagatacatgtgaaattaaataaaaaaatgtttaaaatattataaaagcaaaatttcttaaaaaatattgctcttcagcgcatacaatcaaaactaaacatacttctcaatcattaattcatgtaaagtagcgtcaactttcttaaaagactttgaaatattttcttgtacatgtatgcaactcacttcattctaccaaaagaacagatatgaacaacaaatctattctgatcaactttgaagttcatcatcattagaaatcaagtcatgcagcagttaaaacaacatcaaaataacattaaataaactataaaacaactttctgctatgattttttttcttcaaatgaatgaactacaatcagagaatatttcaaacaaggcaaatcacaaaagaaaattataaaccttgacaatatttttctttagaagcttcaacttgtcaacaacgtcagaggtcttatcacacacctgaaaatattaggatgacaacattaataaaacaatgaaccaataaaaatacgattaatagtcatacaatactacaagtatatcataaactgaataacattaaaataacaatatatcaactaaaaaataacgtaattataaaacttaataaa

SEQ ID NO: 74371 - DNA, 779 bp, Cannabis sativa
ttgtcttctcccagaatttgtttccaacctcgcattagatcatattatattatattatattatattatattatattatattgaattatatattatatttttatataatattatgttgaactttaatttatattaaaatattatatattttggtgtccataaaaattaatactacatatagttttatataaaatttaatttaatataatagtatacaatacaatacggtgtaatacgacatatcaaacgaaccctaaatttataatattataaattggtcattttattaaattttgtcacacgtggcaaataaaataatgaccaatttataatattgtgaatagtttagaaatcatttgtaataagctaaaaaatttataaaatacaataatacatatattatagttcggaagacaaaaatcataaataaccattaacattggtggcgtttggtaacaattttttaatcagttttctgtttttaaaattaaaaaagtaaaaatatttttcaaaaatatgttctattttcatttttcaattttttaattgagaatcaaaatttcaaaaataaaaaaaaaaatcaatttcaatatttttttaaatagattttttttcttaatcaatattttggactccgaccaccggactcaagtccccctcccatagtcctggcatgaacttggcctctaacccgaacccggacctagacccgacttaaataaaatcaaaaaataaaaatgaaaataaactttacataacacatttttattttctgttttt

SEQ ID NO: 74372 - DNA, 700 bp, Cannabis sativa
cttgcccaagtgtgtaatctcaacttaatcttaaccccacaattagcaacttttcatttattattatttttttgaatggaaaaagttacttccattaattaaagatcttttaaaagtaaggacaataaattagcacgaacagactccttaccaatcatgtaatcagctttagaataaaagtccttagctaagaagtgggccactttattcacaaatcgctctacaaaatgaactaaaacattaaacaattctgataaaatgagttttgattacaatgtcgtatagagaatacatacgaactttactcttgatagcatgcaccacattgacacaatcaatttccaccaacacatttgaccatccgtgagattttatccaacttagggcctctttaaaaaaatgagaatatcaaaacataatgtaaatttggagggttttacccaaaatttaacttgtagggttaagtattgtattgtatattttaagtagtaatgccgcaaattaggggtgttcgcggtgtgggtggtgcgagttgtagctattttctcaaactaaaccgcatattagggatggtaattatactcgcgggtttaggtacaggccccattgcgggggcaagtatgggtttaaatgttcatacctgagtcgaaaattggacagggcgggagaatagataccccccgatatgatatatgtatat

SEQ ID NO: 74373 - DNA, 530 bp, Cannabis sativa
tgaattatttagcattaaaaaaatcataaatatatggtaaaaatatgctttagtggccggccataggatgtgggctccccacttgcaattttaccattttttcatcagagtctggaagagttggcacaatagcaaagtcaaaattggaggatcgggctcttttaaacatgcttcggatagaagaacctgcctgacaattaagtttggtgaaggattgtttgattctagagttggagcaagccaccaccttaacaagaggaacaagagtgaaaggggtggaacgcctggaagattcaagatacataggtcccttgcctttagaggtaacagtcacaacatagagaccatgataggagtagaaacattggggccagtgaatggcaccgtggtagtctaagtggagacagttgagacattagaaatttgggaggattggtttaaggaaacaggggtagggcaagttacaattggtggagcttgagctaaagtagcattggcaatactagggacaaggaacttgtcaatggctt

SEQ ID NO: 74374 - DNA, 712 bp, Cannabis sativa
  modified_base (335)..(343): a, c, t, g, unknown or other
aaaatgttagttttcacattttattttattagatattttttctaggtttgaatagaaattttagggtttctaaccataaaattttcaaacttaggatattttttaataaaaatgataatatactaaccataaaatatcttatttttcaaattttttatttttgtaatatttaatttattaaattacacgattaagaatataatattatgaaaatctaaattttaaaattcaagatattatattatattatcttattagagatttaataaatttaatttttttaaataaacttgaaatttgaaaaattggttagatatttgaatttaagttagaannnnnnnnntttaggagatttgttagtttttttttgaattttttaaatattctctaacaacctaaattttaaattctagttaacatgtattttaaattttaaattttaaaatagaaatatcttaatctactttccattatctacatgtttgtttgtaatatttatttatttagttattaatttattcagatttttttacaaacctattacttatttgatctaaattgctatgattaacttgttgtcagatccaatgatctgatcttaatcatagtccaattgtcaatagatcttataaataatttgtaataggtaagttttgcaatttcttgcatatgtataaacctactaacatgatagggcccatccaaatcattt

SEQ ID NO: 74375 - DNA, 895 bp, Cannabis sativa
cccctcaagttggagtgtaaatatatatgacacccaacttggatacaatgttggaaaaaggagaaggcattagtgctttgataaatatatctgctaaattctgttgtgaagatacgtgtcgaagtttgagggagccttgctgaattttttctcgaatgaagtgacaatttatctcgacatgtttcgtgcgttcatgatagacagggttttcgctgatatgaatggcagctgtgttttcacaatagagcattattgggattttaggagatatgccaaagtcttggagaagggcaaggatccaagtaacttctgatgttgcgtttgccattacacaatactcggctttagaaaaagaacgagagacgatttgttgctttttggatttccaggagacgagggattggccaaggaaaacacagaagcctgaaacggatcgcttggtatcctgacatgccgcctagtcaacatcagcaaaaaaggaaacttgtacattagcttgagataagctggtttctgcataggctgagactgttggggaggggttgcaagggaagaacagcccttgtcctgggatgcttttgaggtactgtaatattctattggtggcttgaagatgagggacacgaggtgcttgtagaaactgactcaaatgattgacagcatatgtgatatcaagctgtgtaatggtgagatatattaatttgccaatcaagcttcgataggtagtaggatcagtttgtaatgcccctttatccttgctgagtttgaggttgcattccatggtagaggatgctggtttagcacctaaagtacctgtgtcttttagcgtttgtaaagtgaaaaggcgttgagaaacatatattcctttgtgttggaagttattttaccaggaact

SEQ ID NO: 74376 - DNA, 1005 bp, Cannabis sativa
ttttcaagcctataactctgtttgggatcctaattataaagtacgtttttgttgctagagcttccccctaaaatggatttttttaatcaaaaactaaataatagacatctaactttgttcaagaaggttcacttcatccttttagcaacaccattttgcgttgggctcttcactacagttctatgcctaataattccaacccattatcagccttaaggttcttaattttaagatttgtttggttttccacctgagttttctaaactctaaattgttccaggcactcattctcggttgatagtaaataggtccaaacacacctacgatattcatcaactattgaaagaaaatattacttaccagagtgggtaggcaccttgtatggtccccaaagatcagcatgcacatatccgagtatcttttttgttttgtgccttgccagagtgaattttagcttatgttgtttctctaaaacacaagcttcacaaaatggtaaggcacaagaatttaaattttcaattataccttgtttgtgcagttttttaaggcattgtttgtcgatatgtccaagtttgtgatgccacaacttcaaatccgattctatccctttcagcatacttgtctctctagctgggacaatttctccttgaagagcgtataaaccattgatcttttcacctttcatcactaccaaagaacctttggttatcctcaagcttccgtgtatagacttgtattcgtatccttcatcttcaagtgcacccagggatatgaggtttcctctaagctctgggatgatccttacgttcgtcagcaccttgattccaccaccatattgtttgatggcaacctttctggttataatgaccaagcatgaatgattatttcccattagaactttacccccctcaagtgatctataatcaaaaaatgattcttaacttagacacatgtgataagtgcatccagaatcaagaattccctccctgttcattgaagattctg

SEQ ID NO: 74377 - DNA, 1106 bp, Cannabis sativa
gaaattcattaaagataacaaagcatgtaaaatcgggattaaaggctgcccggtcagcccgttgtctgaaaaactaaaaataattccaagtttaaagaccgcttggtccgtgaccttgtcttaaaaaaggccttataggcaaacagataaaaaagagacagaaaaagaaagtagtcaaacggctggagtcccaggctctttgtacgggtcttctgggtcagttcgagctggaggatcgtttgtctgagcggggggcacgtcaatagtctggccagaggtggaagtgattgcctcgggttccccataagccacttgataagcacagtactcaagaaacatgtctatggtatctccgaggtaatcaaaatttgcctgaggattagccttccagaagtcataaaaaatctcgagacccgctgtctctaaggaatgtaccttccctccaagcctcgccacttcaattttttactgctcggtctttgacttctacttctcaacctcagcattaagctccttctcttttctcttcttctattcttccaacctgcggaagacaactcgaagaacctgcctttcttcctgaaggctggccacttcttttgacaaggaggcaatggcagtttcaagttgatcggaagcctgtagatctttagtcagcatggccacctttttcttggcagcaagaagtttcttgttgacctctcccagttccatccagacagccccaagctaaaccctgacttcatcagcatccttcctagccaaatccacttcctcccgcatagtgttggaaattgcaacattcttagaagtagtcgatttcgcccataaataagcgtaagctatcttcacacaagtctgtacagagaaagagtgttgaaatctgaactaagtgaagtaggataaaaggaaactgtcaggaaagacttacccttgcaaactcctttagagctcctcccatcaccaactctagggaaaggttattgtctgccctagccagctgctcattcgcctcagggaccgatcgagtcacatagtgaatgagcatgtccttacctcttttggtctccgggtgtagcaccgaaggtgttgggttttatgccata

SEQ ID NO: 74378 - DNA, 1449 bp, Cannabis sativa
acaaggaggataactcgaatcaagcgagatatgactttccaacttagcaataatcgtctaaaggataagagtaaaaagcggttgagtaattattaaatattaatccacatgcgattaaatgaaatgtagggattatccacatttcatgaaccattatatttttaatcaaaccctaaaagaataattgccaacatatattcttataaatagggatagattccagaggaaaagagacggaaaaattgagagagaaaatactattattcaaattctgatattgtattttgtactcaataaatatccctaataataaggactcgcggagtatgtagattttaactacaaaacaacgtaaaaagtatctggtgttatctgatcatttattacttatatatatattttgtagagaatttattacataaaggctattatattttggttaacaaaaatctacattaatagtttagtgctttcattgagagccttggtgataaaactcaaaaaaatatctccttataaacttgatctaatcacattcaatagctaatgacaatcaaaacgatgaaaattaccctaaagaaataactcgtcgccctagaaaagaacccatgggatctctaagaccctataccactggagcatcatgttcaagaaggaacgatggtggtggcgatcaaattcttgaaagaaggaatgaagatgctaataattctactagatacgtgcctatgagtgaagatgtttatgacccaactagatatgtaccattggtggagttggagaataggcaacttcgacaacgtttagttgaatctaaccgacgaaacgctgagttggagagagaggctacagcagccagggcgacacaggaaacgatttctcagaatcaacctgatcgtgcagtaaaaagaccacgaggacgacctcgaggctctagaaccaggagacaggaaacaaactaggggaatcctcaaacacccaagaagaacaacctggggatacaagggatgtcccaatggataatcaaacaaataatcaagaacaatggtgagatgttcctcaaagttcccatggatttcaaaaaccaagggaataagaaaactgatgtgttagaggcatctcgtaggaatgaagaggtgagacagcctcgaccaaagaaccagggaatacctcgtggtaacgagagcaaccctagaaatcaaccaaggtcaagtgggctacctccgagacaccctcaacgtccttctcgaacaaagagagagaggatgtatacacgtacttgaataaaggatgtgtatctaacctctttcgtaggagaaggccgatacaagatgaagcaagttcaagttcagaatcttcaaggtctcgaggacataatcgatcgagtaggcaaacacgagaaggaagtagatctcgacgttatgttgactaagaaagtattagcaattc

SEQ ID NO: 74379 - DNA, 1238 bp, Cannabis sativa
  modified_base (1200)..(1206): a, c, t, g, unknown or other
cagaagctggctggcctatgctggccatagggccagctaggggtggctagttcatcattcgtcatcccatttgagtgcttggactccccgttggttgaagtgctgagtagatggcttggccttcttgttggcgagttgtactactacgtggcactgatattggccacatagataagccacgtcaggtgggcaaaaattgggataatcataagagtatggagtatcgcctaaaactggaacctcaaggaaacggaagtaagccactacctcattatatttgaagttaatttagcatttaaccaagtataaaagtagggagtatcgcccaaaaccagaaccttaaggaattggaagtaagccactaccttattatattcgaagttaatctagcatttaactaagtataagagtagggattatcgtctggaactagaacctcaaagaactggaagtaagccactaccttattatactcaaaattaatttaatataatacatacttaattcaggttaacttaaaatagaagttcaggcttcaaagttaactcaagttaacataactaaaatattcaggctacttaaataaattaattaattcaggttaattaaatatttaagttcaaaaagtcctgataacaagtggtatttaccaagaaatattaaaagtaattaattagctcaggttaattggttatttaagtttcaaaaatcctttaagtaaaaacactttcaaatatttttcttcaaaataatgtgataccaaggttcaggccattagaatcatattccaaggagtacatatgacttgttaacaagaaaaatatttaagtctaagcatttaattaaaaatctaaaggttcatgcctttggaacaagaacctcacgatattggaagcattgaaactttgcagactctatagattaaaatgcagatatctaaatagttaatcaaatagtactaattacttaaaaatcccatgacaatggtataaaatattgtctccgtacaaacaaaaagggggacccttatcccctacaagacaaatatacataaagttgtgaaagaaatataagagtgtatagatgcggctatggctgggctaaatcctttggtggttgagtaccttcgagttgaacatcaggcaagacctttgggatcacaaaattggtcacaaaaggaacatcagaatttggaagagnnnnnnnagatcggaagagcgtcgtgtagggaaagagtg

SEQ ID NO: 74380 - DNA, 1799 bp, Cannabis sativa
aaatctaaaagggtgtagagttcaacctatggatatgaatgtgtgaatgaaacttaagtgaaatgtgatttatataatgtgaataaagtaaatttttttagtaaaagaagaaaaaaggaaaaaaaaataatgatgattgtaaatagttacagttaagtgaatgatatgtattgacatgatttgaagtgacactaactaaaagaaaactgaaaaagtaaaacaattatttatatttaaaaaaaaaatatacataaaacttatcactaacaaatgaattattattttatatatttgtattttgaaatctgataagataaaaagtggatttggtaaaaaagaggtatggggcaaaaaccttattactattttgcatgaaaagtggtaaggtaaaaggtgtggttggaaaagaaagtatggtgattggatttgtttttttttttttctgaaaaccagaacagaagaaaagtatggtgattgggataagagtaagggcaatagattttacagcaagtgcaatttgaaagatttttttaaagttaccatacatatctttacttgaaccaaaatacttttaacaatttacaattctagttgaaatataactaagaatagtaacaattttttatgtagttgaagttttgggtgaataataaatttattgtttaggatgtaggatctaggatatatataaaggattttatatatgtaagtaagatgtaaggatgtatgtaaaatgtaaggtatatatgtatctcctgtataaaaaatatatatatgataaaatgactaagttaaaaagttgaaacttaagaatattgattaataacatgcatctttatcaaattactaattgatattcctagaaagcaacaaatcaatatatatcataaatcataaaaaagataaaaagaacttacatacatgactatttagggttgatttcctcgtctttatatgctactcacaatatattttcaaatctccaccaattcagaaaacttgacttgttacccaaatatttttaaatttaaaccagctgataacaatgattagtaattagttagaaatcttttataaagtctccttagccaatttatagtatatcatgagcaatatacaataaataagtataatcaatgtgtaattggtacaaaattaaagatactcacaataagtgtgcaaggaattcctataaagtccaaattatcatatgacctgccatgaaaaggactcagcaaagcttatgaagaaaaaagaagataagagttaataaggaactatcaagctacactaaaataatttctacttgaaaattataagattggaactaatatttaaagtgtattaatctaaaagatatctacaaatataaattggcatagtacttacgtggttaccgaaaagattaataaaaataatagtaatattcttaactgaaagcgcatcattattaagtaaatatgtttcaagagcaattaactaaagataaaatttcattgtaaacaatattctttgtacaactttcatgaattgtattatcagaaattggtttcacaagaattttgatagcatcacttgtttttgctctagataaagcaacatataattgtccgtgtgaaaatgctggttcataaagatatagtccgacaaactgtaaagtttgtccttgagatttatttattgtcattgcaaaacatggtcggatcggaaattgaattcttttaaatggaaatgaacctttgtcattttctagtggcacaaaaagaattctgggtaagaaaacttttttaccactatac

SEQ ID NO: 74381 - DNA, 549 bp, Cannabis sativa
taatgaatatgtatagagtttttttcttcagtttttatataaaagttattttacaattaataatggtatctattttttagttttaattaaaagaaaaatatttaataatgcattaagaaaataagaattaattaatgataaaaaaaaagaaatggaataatacatgtgactcaattataataatgattaacttcttaaaatactaactttttcacacataatcgtagcttgtttagattatttattggattttttttaaaaaaaaaatgatttaattttgtaagataaaggattaacgtagattttcgtcaaccaaattaatagtatattcgcaataaatacactaaagaaacaaataagtaataaatgataaataacaccagatattttacgtggttttgtagtttaaatctacatactccacgagtccttattattagggatattttgtgggatacaaagtacaataccaatatttgaataataagattttctctctcaaatttatcgtccattttctcatggattttgtgttggaattattttacc

SEQ ID NO: 74382 - DNA, 546 bp, Cannabis sativa
tctcaggtgtgatatttgtcaattctctaagcattctcgtcactctttcattccaagacctcatcaagacatcaaccctctcatctattctcacttattcacgaggatatatgaggaccatccaaatttaaaatatcagtggggcacgttggtttttattactagttgatgatcacagctgcctaagttggacatttctcatgaaagaaaaatttgaaataagtcatatttttcaaaatttccaaaaaatgatccaaacttaattccaaacaaacattcaagtgttaaaaatcgacaatgctcgtgatttcttcaattttttacttggatcttatgtgcaattcaatgagattgttcatcaaagttcttgtgtaggcacaccataacaaaatggtgtggccgaacgcaaaaatcgtcatttactagaggtagtccgatctttactcttttcaaagatttgtgccaaaaataaataaaataataagaaatgcacttgacagtaaaagttttaacaaaaaaaaggcattgaaagccattagaaacaaa

SEQ ID NO: 74383 - DNA, 1185 bp, Cannabis sativa
  modified_base (476)..(479): a, c, t, g, unknown or other
ttagacttgcgttaatgctagaaattctacttatgagatgatggttactatgggggtggagcaatgactttggagaagtgtaaaaacatatctgaagtctctaactctactagtgagactaaatgttaaagtggccaggaaggctactagataattattcagcctatggaatgttcaatacagtttttggcgttattctagtaataaattaactactatagtgttatttatgactaacatagatatagttgccaaatagtaaataatccagtaccctaagagaggagtaaacaaatagaaaagaattacacaatattaaggattttgtgactaaagagatgtaatgatagagaaagtttgtattaaatacaacctgtcagatcctattacaaagataatactacatactacacttgatctgaacatcaaggtgttgaaatgaattaaaattcacttttagttttatattagtgcannnnggagtttgttgggattttataccctaaataatacccattttaatataattagatttactaattaataaaagatcagaaatcattttatgttgcatgaatgacatgatttcttttattattatatgcttactgtataaattctattaaatcaagaacatataattattcatgattatagtgttgtgaacacagtagaatataataatgagtatatgtttcgacatttaagtcccatgatttctcaatacactggatttactctaacatgataatcaacgataaaatttacttacaccttggataaatattatgttcttccatggcattggcaaagtattctaggatgatgtatggagtaacatcggactggactgatactgacaattggataagatatcataaactttttgttgtatctatctaagtcaatatcacttagttgatcttaggttaatagatcttaatcttgagatggttatgttctagcttaaatgtattatttatgttctttgagttgttcgttaaagttgaccaactggtttcccaatacttacatcttaggaacatggtagtataattaagtgggaacgctaatcatagatataatatctatagcttctataacttctagaagtgaaatgatgatttcctttgagcttggcttaaggcaataaatgattgaggcctcatttcagtaattatatta

SEQ ID NO: 74384 - DNA, 752 bp, Cannabis sativa
tttcaaagaatactcaacaaattaactctatttttgtaggagtgataattatagttacaacattatttttataaatttttgaaattttttaaataatacctgatagaagcaactacgattatattatcgtccttttctaagatggctgtataaaaatttctgaagttgattctgctcaaatttgatctgttcatttatataatatgttaattgattaacaatttaacataacacataactttatttcgcaaatacaatgcatacatatttccaaatcaatcagattataacttagaaacgatcagaaatctataaaactacaattacaaggaaaatgttatagctagagtactaaaaaaaaataaaaattacactcaattcttcttaataatataattaaaataattatttctaaatacataataatataatctaattgaacaactacaataaactgagggataagtttatgatccacttttatatgttccagaatctataacagaatttttgtcttattttttttatatataattgtgtatatttatagttatttagaatcaaatataaaattttaaaaaattttaccgcgttataaaaaattatatatttaaactttattttaatactttatactattaaataagtataagcgatgatataaaaaatgaactaataagatcttttgaaatattaaaactataccaaaccatttctttttagagagtgtgtaccatatatttttcttaagt

SEQ ID NO: 74385 - DNA, 612 bp, Cannabis sativa
accctgtctatcaaactcgaaactttatcaaaaatacttgacaccaccctatttggaagaccatttcgtaaggaattataaagttcatggttactttttggtcatagttgtcctgagatattggtagtcctttacaagtccttgacctccataatttacttcatctgtatttagaataagctgtgaccagaaaaaacatcataaaaatatgattggaagaagatagaaagaaagctaataaagttttggttgctaagacttacttgatattctccagcttcttctacacctactctgtatccttcatatgaattcgatggatgaaagttgaatatgaacagaagtggacctctcatgtatgctattacctgtatgacaaacaaaacaaatggctttatcactttaatgcggatttattcgtgttcatgtcaaaaaaagaacagtaggatgaatctggtaagatgtttgttatagttatgcaggttgtcgacttttttaaggcatcctcgatcgagtttgggactggtagagcgcaagtttcacactaataactaaatgggatagaataaaggagcgattgaattgcagtcatattgaaatacctaaatatga

SEQ ID NO: 74386 - DNA, 939 bp, Cannabis sativa
gccttcaacggattaaccttccacaccacctgcctaatttcttcaaacgacggacatcgaaacaactctgcattgtcaagatcagtaaccaggggctggaagagcgaatcaaaatcgttgtcgaagacaggttgctgactttcataaagcagttggaactgcttgttaaaataagcccctattccctctctgtcaaacaaccaaccgttcctaacgtcattgatggtgcaaatcgagtttctcctccgtcgaatcaaggtagacacatgaaaaaatttcgaattacaatcccccagcgacacccaaagatctcttgacttttgcttccatattctttccattctattttccaactcaagaatttccaattgcacttccacctcctcatcactagcagcctcatcttgttgttgttgaagcacactcaacttatcatacagccttttaagttgtgtgtcacaaaacccaaacacattgctattccactttttgagcgcttctttcgtttccgtgagtctcctgcaaacccgatagctagcctgaccaaagcaagagtttttccacgcattcttgaccaccgcttttcaaccagggtccgccgtccacacttccaagaaccgaaatggataattgagttttttagtcattggttgagtatccagaaccagggggtgtgatcggaggccataataggatggtgaaccacagaagctttaggaaaacttagacaccaatgcgcacaggccactgctctatcgagccgtttcctcacggagttatgagagccccttgacttcacccaggtaaactttgggccactaaaacccagatcaacacctctggtttccaacaagaaattctacagatgagccccttcacgattgtggaactctcggccacctttcttttcctcgtcattaagaataacatttagatccc

SEQ ID NO: 74387 - DNA, 1094 bp, Cannabis sativa
  modified_base (722)..(725): a, c, t, g, unknown or other
tgccttccacccttcgcttcagtacctcatattccttttgagtgacactgggctgcctagatgcacctggcttaagagttgatctttttgcccccgtcttaagtcttggcaacgggcccagtcctcttaagtggtttgagtgctcacccagtgcctgtgtcataatatgcgtatctgcacgaaattgggtggggtcgacattgtactggcgggggcatcggctggcgttggttgagtgtcacgaatctcaaccattttggcctgcaaaaaaattcataataaaacttttagagttaaagaaattgaaattataaaactaatttattaaaaatataaagatacttacatgcagttgttgtgtgtgctcgtcgcgccatttattgttcttgcagtggaactttgcaaatgtatccacaacactgggaagctcccccgtctggggatcagcctatttttaaacaaaattggaattagaaaaatattattaaaaatttccaattgaacaatatttttatcatatattgaaaatatcataccccgctgacaatggtagaaattatggtcttagatccccattcaccttgaaccttcatgttacctcaatttttcgcattttactcagctcttgcctgtaatttaacgtatatttattgttagcaaaatgggtacaatttagtttccatatccttgaacaaatcgtcgtacttaccaccaccattcannnngggctcattaaaggaagcagtggtagaatttggatcgttaaaactagaatcttctctaaaatatcagccatgacatctgctatttcttcttcttcgttgtctaatatttctatagtcggttgcgtgaacgactccccatgaaaataccaggtcgtgtacaattgttggatgccatgcacaaacaaatgtaccctaatattatcgggagtttcaaagttcacatttagacatctcatgcaagtgcatcgtgtaactctagcagaatttatttgcattcgagcaactccaacaaactcatccacacccctacgaaactctacagatcgtctgtttgaagtcatccagcttctgtcactcaccatattgcta

SEQ ID NO: 74388 - DNA, 1013 bp, Cannabis sativa
caaaatactgaaagatagtgggttagactcaagttattgaagtcctaacttccatcccgaagatcctgaagtcaacctgagcgtagggctagggtccctcccaggtcgactgctatgactcgggtctactcaactctgtaacatcatccttcatgtcacgtgtcaaacattgatgtccatgtcaccgggaaaagttcccgggttaagaggttggtagcctattattttatggttattttaattagagctagttttagaataacgtccatgaatgtgcatgaatttattgagcatgtttccaactttctttcccaacatttttatcctattaaacacctattaaagtgctggtaacaactatgaggtgaagggaatttgactttttaaagcaatcttcaaatactaaagtgctcattttataacaaccaattttctatcaacaagcacttgctaaaaaacataagacttgataatttccaaagctattttcatgagagttctcttagtgcttagagataaggacaaataagctttttgacaaaaattatatacctcgttcaagtcatgatatctccactaatctacactaatcagattgtgagtgagtgtttatatatattcttctttagttatatatatatatcataatgcatgttgtattattctttatctttcatatatatatatatacaatatatatagtgtatgtggtaatatatatttaattaattttttatttaattattatattattttataatagagttataatacattttaattttctttcatggtaataaaatttctaatagattgatcttttattttccaattttatataaattaaaataaaatttaattaattttttctatttaaaatgattaaataaaatattttaaaataaattatgtcatagataaataatagtgtaacatctaatcggaatagtaatgatagaaattggtaaataataactgtaagatacttagggccagtttggcacagctgtact

SEQ ID NO: 74389 - DNA, 882 bp, Cannabis sativa
agaagaatataaagaagaagcgggagatttaaaaattggaaatttgcatactagtaaaaatgagaaactttgataatgatatgaattcgtccatacataaatgcattgcatacctctcgcctaaaactacaatctggggtagaacaatatgctgagtaaccttgttgttacaccatataatgtaatgcaacctggttttagactttagtaatgcaaaaacaaaatgattaaaacattacattatatgtacattaagctaacatgtttgatcatttctgttttttgtacgaatacatcaaaaaaatcctctttctgaactgtcaccaaatactaacactatgtatcatacaagaaaatgccaactgtgttgcgcccaccaaagttcgttttctgccgccactggccaactgttggggaaacacaaccccctcttggggaaactggggtggaagtccaacaagcacttgctgtagaaggggcctacaagcaaccgaccctgattcagaagtaccaggctcatttttttacattggttccaatttttcagtatcgtttcatttaagcaagccaatcataaaagcaattcaaccctgaaaagagaacaaagaacaagtcctgtcatccaaaacttttacttgaaaatattcaatgaaacaatagttggagatattacaattttattgtctaaattttcagaggcagttttgtcctatgtggctcgcgataagtattctaaaacttatagtttggcaaaacatgttcttcgattagacaatgagctattatagtttgaagaagttccaccactaattgtggtttgctgcattattaatcatgtatgactctattcaccatgttaaaaaaaacaatagttggaaactt

SEQ ID NO: 74390 - DNA, 680 bp, Cannabis sativa
aactttataatattttattagttgccaaaaacctcggtcaacaaaatagaatgagggtatattgggtaactcacttataaaagtgtgtatattttaataaaatataatatgagggtatttttgattaatgaatacaaaaaaagaagtatttttcaacttattccttgttttaatttattttggaatttaaattcatttttgattaatttagtatataaattatatttaattaattttttctaatttggtttaacatatatttggtattcttatgttatttggttataaattaaaagtaaaaatatttaatttggtaattaattacatgattcatttatgcatgtaattttaataattatgttaatgtgaacatttaaagttacacaattaattataaaattattatatttatttatcaaaacaagtaaattattgtctaaattatttattttttaaaatatttgtcattaattgttgttgaccgaggttttcggcaaccaattaaataatatataagaaaagttgtaggaagtttaatgcatgatatttttacatggttggggcattaacgaactttagtccacgagtctttgttagtaatgagagtatttattacagagaatattcttagtaaatttctctcctattttctctctttgattccttttaacccagaatcc

SEQ ID NO: 74391 - DNA, 803 bp, Cannabis sativa
ctgaagggtgggaactccagatcacggaatcaggctgagatatgtcgatggggatggtgagaatggccttgacaatgtcttgggagaaataagtatggagcttaggaatatcccaattcccagagtcagtgataaaaaaggagacagttgagttggggggggggggcatgggttttgtaagagatatttttgaatccaggaacccaatagtgacggagaatatcagtagaccattcccaatcttggtaatgagacctgtagaaagaagatctcggccccataaaagactagtccaagtgtaagaggggcagtgacctttagaagcagagagaaaatcattgttcttgaagtatttagcttttagaagtctagcgaccaaggaatgaggatttgtgaggatacgccaagcctgtttggcaaggagtgcttgattgtggttgacaaaattgcggaagcctaatccgccaaaaaatttagaagtgcaaacagaggaccagtttttccagtgcaacttattacggttgccggaagaaccccaccaaaactgggcagtaagtctgtcaagggttttgcaaattgaaaggggaatgcggaagcatgacattgcataagatggaattgcctggattactgcctttatgagagtttccttacccgcttttgagaaaaatttattattccagagttggagtttggcactggctttttgggtaatataatggaaggaggatcgcttagaacgaccaaaacattgagggacgcccaagtatttagaaacgaaaggtttgttttcgagttgaaga

SEQ ID NO: 74392 - DNA, 819 bp, Cannabis sativa
  modified_base (26)..(61): a, c, t, g, unknown or other
aaaatgtgatttctgatctttattannnnnnnnnnnnnnnnnnnnnnnnnnnnnnnnnnnntagggcacaaaacccaacaccaacatgggaagaagactcaaacgtgaagagttttgagtctctcatttatgcagaacaacaacatctccgagaactggtcaccagctttgccagaatacaaaaataaactaagtgatgtaaaaatatcacttagacatcataaagtaaatcccctaaatatttttttacttttccatcgtccaggttgacaccatatgtcaacctggtcgctgggatgtgaacttgggcatttgatgtcaacctgggcgctaggtcatgaactttcttaaataaaacaatcataaatcactcagcattaatctgattaatgcaattcaacttgaatttttaagatatttcaatgcactatcaagtcatgtatcacgctttaatcgcaattctgaagttatcgattctaaatttcaccctcaagggagttacaaaaataagctccaacttacctggtgtgagtcctcccatcgcatcctgggctccaaaaattgaggatcaatctcaaaagttaattttcacggtcagattatcatctaatgtcaaaaataggcaacttttattttttcattattttattcctatttgcaagggtctccttcacgtataaaaggagagctcccttgtgttgacctcgcttttagccaacgacagtgagtcttattaagtaagcgatgtgtaatttatagcgatagatatatagtaaaacaatgtaaagacacaagaattttataaaggttcaggcatgc

SEQ ID NO: 74393 - DNA, 717 bp, Cannabis sativa
aaaacaacactacctctggggactcccgttttgtatgaatttttttacattttttttctttaatttattattatataattattttttgaaaaattatttcttttgtttttatatttaaatatcacaaaaacagcccatttcatcagtggctttaaatgtgatcagtgtaataaatatgaacaattacaattcttcattcaaaaatggacattacaaaatctgtgtaatctgaagatgaatgtcagtatacatatatatatatatatctatatttttgttcattgttttcacgaagcttcggactcaagaaacatattttccttaaaaaatgaaaatgggttaaggtggtaaagaaatgatgatggaaggtggggaaacttcagatacgagaatgcaagatttagactctgctgatgatggcttcactcagactgtgttttcttggactcttgaagacatttctaatgaaaatctttataaggttctttactctcactctgtaactgtatatgttgattgtcgatgttggtcttttctctgcttattaattagtatcatcgttcacacctttttgtttgccctttttgtaatattttattctataattcttcattttgtttgtttttataattttaaattgggaaaattacatgtggacacgtttttttccatttaattttaataataacatttctttttaaattattgaatataccg

SEQ ID NO: 74394 - DNA, 612 bp, Cannabis sativa
ttgatggtccgtgaagggatcgagccagaattggcagaagttatggaggacgttgaggaagtgccagtatgcaacctagaccccactaaaatcattcggttgggaaagagcctagaatcggaggaaaaagaaaaaatagttaaagtattaagggtagccacggatgtttttgcgtggtgccaaggagacatgaccggcataagtccgcatgtgataacccatgtccttaacgtcaatcaggatatgccaccagttcagcagaagcggcgtccccttgatccagtaaaggcggaagctctagaaaaagaggtggacaagctactagctagtggcatgatccgagatgtatattatctaaaatggctggccaatccagtactggtgcctaaaccaaatgggacatggcgggtgtgtatagattttattgatctaaacaaggcctgcccaaaagactgcttcccccttccccgaattgaccaaatggtggacgccacctccgaattcaagctattgtccttcatggacgcctatgctggctacaactagatcaagatgcccatagcggatcaagaatggactagcttcaggaccgataagggggtatactgctac

SEQ ID NO: 74395 - DNA, 729 bp, Cannabis sativa
  modified_base (464)..(485): a, c, t, g, unknown or other
gtttgctcaatctataaattagattctgtgttccaaattaaatactactaaacaattatttctctctattttgataaatacaaaatacaaaattggattatatgttagtaatgtaggaagaaaaggtaagaaaaacagcactagactagactacccaaaactaggtagtgataaatcagtgaagatcttgcttgttttctatgacctatattactaaatcaattctactaccaatctcactactatgaggaaatgttgatgataagtttctggaacaattattaactaatcagcaatgtagatttcaagcatacaaactgctaaagatgaaattattaagtaataaacaaacctttctttataatcaatgcaaaatataaaacttagggctcgtttggtacgccgtattgtattgtactgtgttagactgtcttgtgttgtatagtattgtattagtattattnnnnnnnnnnnnnnnnnnnnnnttgacttgtattaatagattgtgttgtattgtattgtattagtattatttaatctgggtcctggtactgggtccgggtcttgggtccaagttcgggtccgggttggatttcgggcccgggttcgggtctcgaatccgactctgggtctgggtctcgggtcccgggtccgtccgaggtccaggtcttgggcccgggtcttgagtctaggtacgggtcccaggtcccgagtcccgggtcggggtcc

SEQ ID NO: 74396 - DNA, 814 bp, Cannabis sativa
  modified_base (223)..(223): a, c, t, g, unknown or other
  modified_base (366)..(367): a, c, t, g, unknown or other
ttttgtactaaaaatatatttaattattaattatatattacaaaaatatatatatttttaaaaaatatttaaaataaataatatttagatttcttattttttatttgtttgaaaaaatatttaatatttatatttttattattaacaaatcacattaacctaaagttttttgtaaactacattttttttttacaagtgattataatttaaaaatattataaantatttttatcaaatgcatataaatatatattatgggaaaaaataattaaaaatatataaaaaataaattttttatatataacataattatttttatgtatatttatgattataataaactaaattatattattattattattnntattattattattataatagaatcctaataccttaagacacttaaaaatttataatttactaaattagtttttttcaactctgctgcacttattttttcttacagcacaggctaaactggccctttatttgttttgatgttggttttatctttttattgtgcattttatttttctaacatttattattcatgtgtatttaaacttcatatatagcaataatattaataataaattaaactacatatatacttcgtcgtatcagattccataaatatatattgttcgcttttagttgcaatgccaaatgatatacgtatatacttttaatgaataatgtttctcataaattatttctttccaaaaaaattaaaatatatcatgaaagaaaaaaggagaaaattccgagcgatatgtagattaaagtagtgtaatatgtgaataatgca

SEQ ID NO: 74397 - DNA, 804 bp, Cannabis sativa
aacgattctttgatgaactagctgttggagtaaagaatcccaatccaaacattccttctttggataccaataaagctgtgttgtaattatctctcatgatttcggatggtctaagggtatcaaccacagctaaagttgttgtaaattgagaaaaaactctcaaaacaacaaaggtaaccaggaaagaaagaaactccataattatatgattaatctttctagcttatgatgatatgaaccatttattttctctgcttcaagtgatcataatgcctaaaaacatcatacaagagaaagggaataacttcaatctgagtaagaacaagaacatgaatttcaatagccaaaacagaaatataaaaagattcaataaaaggagaataaataaaatgttcatagaatgcaattaatttgagtagaattatatttatcacttgaaaaagagaaaaaggccacttgtcttagacatcaccccattataaatatttgagtatgataaaaacagaaccatagaatgatcaagttcaaaccagatcaatagatatagaaagaaagtgcagaagtgttatgtttaaataacttcaagaacatatgcaaacacaataataagaatataccttgttaatgcagtggtgtatgtgttgtggatttatgtttgtatgaatgttgttaatgatgctattaattaaagtcaacacagcaacagatctttaattgttgtgtgaattcaaaaagaaaaggaaatattaactctggaaaaatgcaagtggtgggtactaggtaggtagtagacagtgaaagctt

SEQ ID NO: 74398 - DNA, 595 bp, Cannabis sativa
tgattaaataaggaagaaaagaaaagaagaatttttcccaccaattttctaaggaatgtcattaagggcaatgacttttatttatttttattttattttttaatattaaagttataaagacaattttattccttaaaatatgttttacacaataattaacatattctataatttaactcaaaaggataatttagttaatttaaacatcccgattacatttttttttgataaagtaaacaagataaatcactatcattttatttccaaataattttagtaaataacatattacaaattattcttcatttattccattacaatttttaattaatttattcccactataaatactagatagtagacgataattatgtaaattttagtattaaaaaatgacttactctctttctattagcccaaaaattacaactcaataagataaaacattaaaaattaatgacaatttgtcacccataattttatggaatacgtcgtgttaattttacgaatctgtatgttaaaaaaagacaaagttacaaatatatacttttacaagattacatataaaatcttatatattttaggaaaattctac

SEQ ID NO: 74399 - DNA, 530 bp, Cannabis sativa
cacttagtcaaaacatgaaaattcttaaactttatccaagtcttaagtttttcttgataatctattgcttacaagctattggttttttctttctttctttaattgtgttatattattattactaaaacaaaactatacttgcagttaaaattggtaggcctggctaccgggtgacaaagcaatttgatccagagaccaagcagagatctctcttgttccaggtagatctctattgtttagctgaaatgaaactttttaaagataccttcaaattctgagattatagatattgatgtggctgcttggttatgtcctgcagatagaatatcctgagattgaagaccttgctaagccacggcaccgatttatgtcgtcttatgagcaggtgtgctttattttgagtatctctctgtatttttaaataatttaagctggaattcttttatccaaaaaattgataaactaactttcccttgtgttttgcattttaatggttacagagggttcaacaatttgacaaaagatatcag

SEQ ID NO: 74400 - DNA, 823 bp, Cannabis sativa
aactaatcttttatttttttttttagtttttttattggcaaatgatttttaggtggtcgattatttgactcgtttttctaattctaatcctgatcgtatttctaacagaggagatgttctaatgaaattacaaattattattttagcttattatattaatataattgcattaaaaaaatagatatgtaattaaaatcacacattatttttgtaattaaatgtttgaaaagtccttattttcgtggcaaagtgctatgtccacgtggcatgtgttaaataccctatatattgtgtgtattaatatgtagggtaatagttcgtttggtacgccgtatgacacattattgtattgtatagtattatattgaattgtaatttatgtaatatttttatgtaaaactatatgtattattaacttttatggacacttaaatacataatattttagtataaattaaaatttaagatagtattatataaaaatatgatatataattcaattcaatataatacaatacaatacaatatgacctaatacgacgttccaaacaagtcctaaaagtattattactataattagtaagtaatttttcatatttagtgtattttgatattagagtaatttgcggcataacctccttaagtgaccaagtttttgcaactaacccataattctaaaattttggtggtaaaacctcctaaacccatgttgcacttagccctttccatctatttttgggtgtgtctgcgtgtacacgtggcacagtttaattagtccacgtaataaatatttaaaattaaaataaaaaattaattattttaa

SEQ ID NO: 74401 - DNA, 1369 bp, Cannabis sativa
  modified_base (784)..(784): a, c, t, g, unknown or other
  modified_base (883)..(890): a, c, t, g, unknown or other
  modified_base (917)..(923): a, c, t, g, unknown or other
  modified_base (1152)..(1157): a, c, t, g, unknown or other
atgtgtaagtaaactttatcgttgtctatcacattagtgtaaatctaatgcactgatgaatcatgggacataaacttttgaagcatattattacaactaccttccactgtgttgacatcactgtaattgtgagttacaatatgttctagatttaatagatattgtatatcaaaccttaagcatgaaaaagacatgtaaacataaatgacttccaatctcttattgataacaaataagattatattgaaatagattttatttaaggcataaaatcccaacacaaagatgagtgtctagaaaaatttaagatatggaaagcccaagtagaaaacaaaataaatttaaaggttaagacacttataaccgataatggtttagaattcatcaacactgagtttgatagattgtgcaatgagcatatgggataactaggcataggacaattgtgaaaactccacaacaaaatggagttgtgagcataaaaatagaacccttttgaacaaagtgaggtgtttacttcttagttagaggttgggaaagccttattggggagaggctttatctactgcttgtcaccttattaatatgagtcctaatagagtcatagatttgaagacaccttatgagatgtggtatgggaatatacaaaacctgaaatacttgagagtgtttgaatgtgcagcatatgtacatcaattcgatgataagcttgatgctagatttgtcaaaggcacgtttctaggatatcttattgttggatgttattttaccaagatctagattnactaacatgtatgttgattataatctataatctaacactctaaatatgaattttctgatggcagcataataatatgacaccttccgttcagatctctannnnnnnnttcctttctgtagcaaagcattatcannnnnnnaacctggatcttctctccttcagtttggttaaacacagtcttccacactatgattgagtacttgacttgatatgagtgagcatgttagtctattactaaaggctcgaaattgatgaagaacaaggagaggaattcaaaatactaaggaaggaggctctcttttactagttgtttaacaaagaatgaaaactagattattagagatagatgagaatgagagccatcttannnnnntatagtatttcttctagggtttatgatttaattttatggattaaaaaagataaaataaatggctgaaaattgctttagtgacccgccacttagtgggcctcactaattacaattttgccattttatttcataattattttcattcactaatgccatattttctaatttcaatcttataaatgtcaaaactatttatttaataattataatta

SEQ ID NO: 74402 - DNA, 862 bp, Cannabis sativa
cacatccatcctaaatctccacaattttctttcaaaaaccaagaaattcagcgccaacaaaatgtagatctcaaccaaaaaacaatcaaatcctaaaaaatccaaatacaaaagttaaaacagaaaaaaaacaagaacacggagatttcgacctccattgattagaaaaaacacaaaaacaacctacaattaaaaattcaaatcatactgtctagagaatttgaagacaaggagatcggataattttcgaagcttacccataaacgaaacagagaagaaagtcaaggtacaaaaatttctaatgattttttaatgatattcttcctaattaagttttcttcatggttaaaaatactgtttagatcgtggaaatcagataaagaattaatgatatagaaatttggttgatctgaataaataaatgagaatagatcacaattaaaaaaatactaatgcatacagatgtaatctactatttttttttttttggaaacagttgtatatatgttgctttcgagaattataatagttgtttgtgtagaaatgaacaatatttgttaaattaaatcccatttatggttgtttgtagaaaatagttattttgactgataaaaaatagaagtttagaattatgaacacaatttaaaataacatatgaattagtattttttttaaaaaaaaatgcaaatacagtagaattggatgttatttaatgtttattgaaaaaaacagttgtttataagtttttttgttagattagaaatagttatttgtaactattgatactaaaaaattataacaaatacacaaatttcaggacatggaacctctacacatattggtatagagcaatggccattgg

SEQ ID NO: 74403 - DNA, 1038 bp, Cannabis sativa
taacaaacagtggcggatccagctcttgcctatactcattttttttttcttaatgatgtatacaaaagaattaaaattaaaattaattatgtaaaataaaataagtctttatccctcctaaataaatatatatagttatatttatgtattatattttttaatattttattccgcttcagtttgaatgaaattctgagtcccctacttaattataacaaatgcttatttgcttaatttatttagaaactttatgtttttattaaaacaaataattattatataaatttcaaataataataatttaatctaaaataaaagtatatttttttattaaaaataaaaatatgatactaataattattaaattaaattttaatatacaacaagtactctttatgattttaaaaataaaaaatggtatacatatttaacaaatacaagtatagtacataaataatatatgcataattaattataaatttaattagagtaatatattaactttaattagtaaatattattactaatttattggtataattaatattgatatttatatttatatatatattaggttaatattaggtgcgcataacacatatatttaattatattgttaatttttattcttattatgtatatttttaattgtataattagtataatgctattcaacaaataaaagaaatattacaaattgtaatttaaaagttatttattaaaaaaaatatactaatattcaaaatttaataatagttttagtttacttactgtaataattttaattttataacacttttgattgttttagaaaaatcaagcacttttttttttcaaaaaaacaataatataattatattttttggtaaaaaaataataataaaaaaatattttttaaaaatatatgtaaatttaaattaaaattgcaatgttaaaaaaaaacctttatgttatgaaaacacatttaatataaaatgaaagataagaaatatgtataataagtttaaatttgaattgtaatatttaaaaaaacaacaa

SEQ ID NO: 74404 - DNA, 650 bp, Cannabis sativa
tttttgtggtgcgatgtggtgcggacggtttgagcggtttgatgaacactcctagttcaaaactgtatgaatctaaatatatcatatgagccatatatatattcatatctagtttatataaaaaaaaatgtataaatgattgtattgttagtttatcaataagttatcttcgtttcacaacttgtttattagttgctaagttttatgagtaatactttttttacattaagaaaatttgtggtaaaagtcttcaaaaagttcagatacagataatttccaatctcaaaaaatagcagtaatagtcctcaatgtcatgctttttatttgtccattagtcctaattttaactgagtcatttactttttagagttaccacgtgtcgaaatattattggtccaaattattattttaattttaataaataaataaataaattatttaaaaataatttttttttttttttcctatcttcgccttctttttcttctctcaaatccctagagaaccaaatcaatcaaattccctcaaaaccctaaaaaccagagaaaccctataatttccaatccaaatccaaccatggtatgcatacacaaagccaatagacgatcttctagctatgcagagaattactagatgaaatactacttcta

SEQ ID NO: 74405 - DNA, 1483 bp, Cannabis sativa
  modified_base (982)..(1005): a, c, t, g, unknown or other
  modified_base (1375)..(1396): a, c, t, g, unknown or other
ttaattttccaataaatattataaaaattacttaatttaagttggtccaaaatttattaattaattttcaactcaaattttattttctataaatatatatgtcagaatttgaaatccaatatacttagaagtaatacattttcgaagttcactctaaaataaaactaaaaaaattattttaatttatgttggtctaaaattaaatcaattaattttaaacataagtataattttcctgttcaattaaatctcttaagaaaagtatcaagtatttaagtatcttgaacaaaatcaacttatatattaattttctaatttaattaaatatatcaataaaaatagcaaagagtcgacctagaaaatatctatctatataattcataaactaattactgattttataattaaaatataatatattttagtctatttatttttattaaatcactaaagaaaattacttgatttaagttgatctgaaattatttaacaaattaattttcaactttaatctaatttccaaaattgaaaatatttcaaaatatctacatttaaaataaatacatttcgaaattaatgtggaaactaattcttaaaataaaataaaatacaatatattctaaaaatgattctaatttaagtttacctgaaattgaaaaatttctgactaaaataattttcttaaatttattaaaataaaaacaaataattaagtaccttgaatataatcaaccttaattataaattctaatttaatatcctagaaaatattctaattttaagttcgcgttaaattaattaaacagattaatttttaacttaatatattttctaaccaatcaaatttcttgaaatagaaataaataattaagtaccttgattaaaatcaacttaattatcaattctattttaagttctaagaaaaatattttaatttaagttggtctaaaattaattaaaaaaattaattttcaacttaaannnnnnnnnnnnnnnnnnnnnnnnttagaaaatataaattagttactacaaatcactatctagaatctcttcgttaaactaagtgtatttttctaaattaatttaaaaataatccaataaaaaattaattatgttgctacttcaaatttaaattaggttaaactagtataattagcctaatacaattatttaataaggcaaatgggtcttcacaattggagttgttcatgtgagggagggatgggtccagtatgtcgtacccactactaatggctccataactctcacacaagaccgaaaggagagaaatttaactattatttaaataattgttattcattgaataagtccaatactaattatgcctacataaaaggggtaagttgaaaaatannnnnnnnnnnnnnnnnnnnnncaaatttacctctaattttatatttatttgaaacatacctctttttatatgtattgtacccaaaatacccttacataagagaatcac

SEQ ID NO: 74406 - DNA, 1200 bp, Cannabis sativa
attcaaataaatctccataaaataataattcataactaacatgcaagtttcataattaaaccctaattatctactaatttctaagttaaagtctagcggtctttacaaccaggcaagatactaagctagcacgtagagttaaagcactgtagcacttatgtatgttattaagcatatttaagtgagaaatcgagattagggttattaccctaaagtaagcggttatgtggtctagggttattaccctagtatttaagtgattttgaatgctatattatattgtatatgttgagataaagcattattcgtgtaagccataattaggttagacttggtaattagaaccgagataaactgttctaaggtcttaatgtaattagacgtgtgagtgtaatgcgtagatagacgatagatgcggtggcatcaaatattatgtgatttctgattatattgcatattgttatttatgctgtcttgatgggcttggctcacaggtgctctattgtgcaggaaaaggtaaatctgttactaatcagccataagttcgagggcttagtggtgcattgtacatgttcaagccataatagaccacgagggttgggtctaccagaagaaatattttgtattacaacttttgctgcttaggtcggcgtgtaaagataacttgtaagattttacaaaagtttttacaggatctcgaaacaaatataaccttttggaatgtttgtaaagttaattaattacaagttatagttttactctatagtattaattaaaagtttaaattttctgctcttagctttagtaatcccatttagcgggattcatatagctttagtcactgtttgtggtgttcctattattagggcgttacaatttagtatcagagggctaaggtttttaaactttttgtagaccggctgaacatgtacaatcatcatcagagacaagctcaactcgtggtgcaataaatattgagagtaaatgcttaactgcttttgtgattaaaagtttaccgctttccgttgtaggcagcatatgagaatctaaaaaataaaatgttatatgaaaagtataattagtgtttatattgataaatgtttattttaaaagagaaatagatagtatgagttagggttaaggcaataagtgcgtaagcatgaatttggtgcctagctcatcggggttattgatttcaag

SEQ ID NO: 74407 - DNA, 512 bp, Cannabis sativa
tttttaagttttttctttattttttttttgatatacatcaacacataaaaaggatacatttgtaaattaaatggatatcccataatgtaaaatgaatataccacgagcttaaattttttataagtttcttttttgtttgtcttttatttgtttttttaatgagataatataatgcataatatatataatgtagtgaaaattatatatacgtcaaatttaaattaatattcaatttttttttctttctttccatcacgatatattatatatatcacatacaaacgatatacctaagaccaatatgaatataccacaaacttaaataaatatacttttaaatgagattttttctccaggatatataatagtatacacaaaatatgtaatacaatcataaggagaaatactataatgaaaaattaatataataaaataaaaaaattatacgtaccaaaaacttaatttaatattccattttttttcgtttcctttcctccatgatatactaatga

SEQ ID NO: 74408 - DNA, 800 bp, Cannabis sativa
aagttcttggggatgaaaatcatagatattcacatcttgaatgtgattaggttgaagaagatgagagttgaagtttttgttagacacataaaattcaactatttcttgatcatttggacgaaatctaaccccagctggtagaaaattgttgaactccataattattgagagaaaataatgtatgtgatgttgatttagagaaatgagtatgtgaataagtaaagagtagtgattattaatgtatttatagtagtattgttttctgttaactatattaactgttttgttagttaattggttgactctgtttaaaaaaaatgtgtgactaattgttccaaaccactatttaattaattaaacaattttcttatgataaataattttgtgattaaaaaaatgtgacacatttttatttttataatcagaaaataatataagttcattaaattacttgttttgattttattaattaatataatgaagaaactcgttagaagattgaaagaacttgatcagttcaaacacagtgattcagcaagaaaagatgagattgagaatcttcaagaatttataaaaccattagaacaagattcgaaaaagaagagtgttgataatgaatctttaaagattgttataaagacactaaatgagaatttggacaagtgtgaagagaggtttcgaaattaagtacaacataccaaaaaggtatcaaaacggtccgaaacaacctttgaaggattacatagtaagattacaagagttgatggaaatgacatggagaaaagaaacaaagaacaaga

SEQ ID NO: 74409 - DNA, 940 bp, Cannabis sativa
gagctcgtctacttgatccagcgcttcttgtaatagagctttgttcgttgccggattgccggttcgtacgttgcccttctacgggatgggagcaaggtttctactggtaccatagcttcacatccatacaccattgagaatggggagtgtccggttgtggttcttggagtggtctggtaggcccataatactcgtggcagttcttcagactagttgtttttgcaggccaacaactttttctttagggtgacctttagtattttgttgacggcctctgcctatctatttgtttgtggccttgccaccgcggagaagcttttaaggactccgtgttggttgcagaagtttgtgaattcctcgcagtcaaactgctttccgttgtctgagactatcttatgaggtaaaccgtatcgacacacaatgtttttgataacaaagtctaaggctttcttagcggttatggtcttcataggctcggcatctgtccattttgtgaagtaatctacagccactatggcatactttacccctccctttcccgttggtaaggatccaatgagatctatcccccacaccgtaaagggctaggggctagtcatcaaggtaatttcgttgggtggggctctcggtatgtttgcaaatctttggcacgaatcacattttaggacatagtctacacaatccttcttcattgtcagccaaaagtattgttgtctcaatattttctttgagagacttggacctctagtgtggtctccacagaacccttcatggacctcctacatgatccgtctagcttcagggttcgacacacatcttaaatacgacatgctgagccctctccgataaagacattgtccatcattatgcatcgatgcgcctgatactataacctcctagatacagtcctttcttggggcaattctccttgtgttacgta

SEQ ID NO: 74410 - DNA, 939 bp, Cannabis sativa
ataatttaatattggatttgaaaataatttgaaaataattttttttcttcttataaaaaattaaaaaaatttatcgaagaattatataaaaataccaaaataatacaaacaataaaaataataataatatttcttttttgagtttttggcggctagattctcgtaactatcatttcacttgcatttaaccttctaagttaaaattttggtagtaaaactctctgaactactgatctgttagcaaattcaatgtgtcatctatttatctcagttaaataccaacatagactgcttatgtgtacacttttgtatatgtggcacatttatattaatccacctaatataatttttaaaaataattatttcaaaatttattttattttttttttaaaaaaagttataaacttattagaataaataaaataaaataaatataaaaactaatctggtaaaataaaaaccctaaaataataataaaataaatctaaaacaatctcatcgtattcttcctcctctctcatctccttctactgtgttctttcttagttccagagattggtaagggtaagttttgcaatggagatgacttctagttcttgattggcaatgatgaactttttgttgggccctattttttcaccttgtcgaaccgctacctcactttgactcccacattagtatgatattgtccgctttgggcctaagccctcacggttttgtttttgggcaccttcccaaaaggccttatactaatggagtagtgtccatctttacatacccataattcttcccattcctagctaatgtgagacttgggttgataacccaacaatcctcccctcaaaccaaggaccacatacttctgggctcccctccagcgaaactaccttatgtcgccgctatcaccaagggaactcgccgcctgaccatcacctttgt

SEQ ID NO: 74411 - DNA, 1377 bp, Cannabis sativa
aaattaaataaatttagtaagagtaattataatatatgtataaatattttttaataataaataagtcccctcaaaataaaatttttgggtcttgaaccgactactattgaatctatattcagatttctaaataaaaatttacttcataaaaatgataaacaataatctcacaattgcgataacaatatgaaggttaaagaaaaaaaaaatagaaagaaaaacttggtgatcaaatcatatgaagtctaatgcaagttgtttggctttaagcggggtgcaatttgagacaaattatcagagtgtggtcctcaaactcaataatttctctatgctttattctaaatgatatattatctgctttgacatgagttttgtagtatgaattttttgtattgttctagctttggttatcctgtatatcatggctaatgccatttgatcaatgaagttttcctagtccttggaccttccttgtgatttgcatggaggtggtgttcttcaatcatagactatttccctcaaataaataaataaataaataataaattaaaaaaaaatcatgaagtccaatctcattccttgttgttaataatcttctctctatctttctaggtttctaaaagtgatattaataccctcgggtcaaacttataagattcactttataaccataaaactctaatttaaaattaagttgaaaaattaaaaaatttgcaaaaattgtatgaacgacactacaagcgatattttcatgattttttttttttttttttttgcatcaatcgatattaaaatgtaaaaagttgtaagaaattataaataactataatatgtacaatcatataaaaaattaaattataatttttctatatgccaaaaataaaaaccttctccaccgtagtgtcaaaaaatatgccctaccaaaaaaccttcctatgaaacatagatatgatactctaaactctttagagcaaagtctatgccgaaagccatgtgggctaggttaaccgtgcacacttgtgaatgaagaccgagaattgttataaggcaccacactttaaaagacttaggtgatgtttggttcaccgtaatggtaatcgtaatggtaatgaataggtttcttacatggtttgtttttcgcttttaacttctgtaatccattacaatgtaatagttattacattgagtattgtaatgatgattacataccaaaaccaatgtaatccctattacaattacactctattacaaagaaaaaaaaaataatattttaataaaaatatagtaaaaaatgtcaaaagtctatgttaccccttttttttttttaaatatttcataattttaaaataaaaccaatagggttattttggtcaatac

SEQ ID NO: 74412 - DNA, 599 bp, Cannabis sativa
ttgaatctaagtatactgccccaggtactccataacaaaatggtgttgcagaaagaagaaattgcactcttttgaaaatggtaaggtctatacttagctattcaactctgtcaatgtccttcaggggatatgctattcaaatggaaaatgatattttaaatatcgttccatctaaatcatttcccaagacacgtgtagaattatggaatggtcatatacatagtttacgctatcacagaatctaagggtgccctgctcatgtcttaccaaataaagaaggcaagctagaaacacaaactaaggtttgctatttctagaaaattataaagagactaggagtggactattttataattacaatgataataaagtatttgtttttaaaaatatcacattccttgagaatgactacattaaagactttaagccgcaaagcaaagtagtattggagaagatactttcggaattaactccaactaatgttcgatcgtcttctactcaaatagaggatgatcccactccttgggttgaaccaatgcaaactgacacaactgagaaaattatcactaatatttatgttcaaaagatcacggtttctc

SEQ ID NO: 74413 - DNA, 981 bp, Cannabis sativa
tctctctctctctctcaatctgacgatgtaccattgatcctatttttttcttcatatttgtgttttttgaggacacacagttcgacaaaagttgtaatgacgttgagaaatttagaggctgacttattacgttttttaatcttctctagccaaatgatttagtgatcattttttgagatactttttaagttgttcaattatttagttgttgtccgagtaaatttattttttgaacttctgctttacgtttatgtaaatatgccttgctggcttgctgagctttctttttgctgctccacttaaaatgaggataaccaaaagaaccttggttatctctttcctccttgtcgccctcttctttcgaaagtcgtacgtagcccaaaccatcactcgcagcaggccaacgagccaaccacgacagcaaaggtatatataaatatttatataattaattagttttgagtgagtacaaataatgaatatcaagattagttaaagttagttttgagttcgttgggattcgtttaggatgttagttaaaatgttggttagcttagctgtcacttttagttgtttgctgtatcttttttgcttctctactacttggtattagtagctaacattggtgtcttgtaaggattgatcattcattcaatacaatagctctgttttctctgtttgttttcttctggttttagctcattagagctgttatggtatcagagcaggattcatgtgctcttctcattcttcatcttgtttttctttgatctctgattgttatgttttgtggaaatggttagaggaggtggagctcaaggtcgtggcaatggagttcatactcgatcgaatcgtgaagctgaagacaaatctcttaactcaaatatgttctcagttcttggagaaaattcgaaatcgacaactgctaatgatttgtcggatccctacttcctttcaaatggagataatccaggtgcagta

SEQ ID NO: 74414 - DNA, 909 bp, Cannabis sativa
  modified_base (49)..(62): a, c, t, g, unknown or other
  modified_base (225)..(237): a, c, t, g, unknown or other
ttaaaccctgtgtaccgataaatctaggaatatatttaatcacacaatnnnnnnnnnnnnnnactgtgctgacgacacaataaatatgaatatcaatgtgataagggaatttataaatcaaattatcatatagatgataacatgaaccaaatgacacactaaatgagtgataaaaataattctttctctttattgataattaaatgataaagattacattgaaannnnnnnnnnnnnagggcacaaagcccaacaaactccgacttgcactaatataaaacaatcagtacattttaattaatcctatattcagtcagtgtttttcaaatgcagttcctgtcaaaactttggtgaatggatcaactaggttatcctcagtgtccactttctccaccagtacatcctctcttgccacatactctctgatgatgtgatatttcctttctatgtgtttacttctcttgtagcttcgaggctctttacagttggctatggctccagtgtaatcacaaagcaaaactagtggtttttccattccatgaacaacaccgagtcctgtgaagaactttctaagctagaaaagttccttagcagcctccgcagcagctatgtattcgggttccatggtagagtctgacgttgcagtttgtttagcacctctccaaaccactgctccacccccaagagtaaacaccgtctgagatgtagatttttgtcatcaagacaagcctaaaaatctgattggtatagcctacgggattcaaagcaccacccttgtagactaacacgaattaccttgtacttttcaagaactttagaatatgcttaacagcattccaatgttccagtcttggatttatctgatacctgctcacaattcctactccataacagatgtcaggtctagtg

SEQ ID NO: 74415 - DNA, 894 bp, Cannabis sativa
tttcgcatctcctgatcactctttccctcttacagctgacctcttgcattatatccctttctgggttcaaatttatggcattccctttcgctgtaagtcctatgatcttgccaaacttatagcttcaggtttgggtgacctcattcaagttgacgaggataccattaaggaaggcactgggccttacttaaggggtagattccttctggatgttaataaaccacttaggaggggtattaacattcgttttcttaagatgggtagggaatttaccaaatggttggacttcaaatatgaacgattgcctgatttctgcttttactgtggtaggctagaccatactcgtagattctgccagtcttatctgcaaaaatgtgatgaaaatcctgttccaccacctagtccttacaccattctgcttagggggaaagaaaaatctatggacaagtctggtccttttgattatcctcaccctcctgctttttccatctctgagttatctcagcagccttcccctcctaatcagggaatgtcaaatccgttcttggcccagtcttataccttcactggtttgttgaactctactattggacctagttcatttttgggatcacctgttagctctagtgttattatgatccccactcctgttaatccgaaccttagcactcagggtacttctagctttcccgagtatattactcacatgcactatggttctgttcccagtcatatgactattgcaccaacggattccactattgtttctgaccactctgatatccagcatccagaagttataagggctgctcgatctctggctgatgctattccttctcttgacttgggaaccaatatggagaagcaaactgctactcctgatcctaatgtcaa

SEQ ID NO: 74416 - DNA, 588 bp, Cannabis sativa
  modified_base (32)..(48): a, c, t, g, unknown or other
tttagggtgtttaaacaacatactcgtgagtnnnnnnnnnnnnnnnnnaaaataaattccaacagttattacacaactacatgatcagtttgccctcaaaaagttaggctttgtcaactattttctggggttcgaggttaacaggtcaactgatacaataactctcactcaacaaaagtatacaagggagcttctaaacaacactcaattaattgactccaagcctcaaaccactcccttgtgctccaccacaaagttgtcctcctcagtaggtactccaatgcaaaatcctactacttatcgaagtgtgattggtgccttgcaataccttaccacgtcaagacctgacattgctttccctgtaaacaagctgagccagttcatgcaatcaccaacctctgaacattggagtgcctgcaaacgtatacttagatatctatctggtactttggacagaggtttaacattcaaagctgcaaaaactctcgatctgcagggatttactgatgccgattgggcttgttgcgatatttttgcacacgcaagtgtacgtatcgtttaaagtagtagactcactaggagtgaggt

SEQ ID NO: 74417 - DNA, 941 bp, Cannabis sativa
gaaaaacaaacaaaagctaaatcaacagctcaaaaagaaaattaagaacagtgaaacataaaaaagaactaaaaactaaaaccagcatatataaccaaagaaataatatacattgccaatatattatttattgtaagtaataataattatttttcatgataataaaaacagttcgattgaggaaagcaatgaaataggattaaacaacttctttagtttcttccaaaaattctcacaattttgcctttctcctgcatacaaattaccaaaaaaaaaaacaaagaatcagaacaaattttcataatttaattttattatctaaacatgaatcaacccttaatttatattccaaatatacgataaaatacgatgaggaaattaaaaataattgtttaacttaccttgaaagtgattgaaaaaatcctctgtaccatgcacaatgacatgtccatcattgtaaatattccacttagtaatcttcacattattgatcgaaacagttccattatcaaacacttgagttacaaggagtttttctttcgaacgagttgaagattcaaatgtagaacctttcgataaagagcctgattcaaaagcttccttgtcaacttttcccatcacaatttggtatttcaaatcaatccatttttcgaaacggactgctttgttcggaggaacaaagagagtgattgtgttgttttcgccatagataatgaatctattttggtcatccatgaagaatatgaaatcatcatggcaataagggttaataatatcggggttaagatttttatcgagaatagttgacattatttggtaccctgtgttttcgagagctttcactatatttgcaacttctactattacaatgtttgtgtttttggtggttttgtaccaatccaaataacaagatcgacataaattattagaatggcgatatt

SEQ ID NO: 74418 - DNA, 1127 bp, Cannabis sativa
  modified_base (719)..(719): a, c, t, g, unknown or other
tgttataaaattccagaagttgacacgtgtccaatagaaagaatacggaacaattctaaaatgatacaatagtatcattaaatgcatattaaataactcgtttattaactaaaggttagataaaaaatattcaaaacgtattaactttgtagtcaatagcgagatgagtacagttactattgatctgaggttaacgagacatatccatgcctcgaaatatatagacaagaaaggatcatgcatccatctgagcggagtgagtatattaacataagatacctcgcatttcatatagcgagaagatcacctcatattacaaatatcacgaagagaatacaactagatgggaaccttcctaacacttagcgtattttcttatcaagatggacaaggaagataactaaaatcagaaaagatataaccttccacatcagtaataaccatcaaaggataaaactaaagaacgtctgggtagttacttagtattatctcacacgtaatttaaatgaaacgtgggggattgtccacgtttcatgaacattcatatctgaatcaatcccaaaaaggataactgctaacctatactcctataaataggggtagattccatgggaaaggggacgacaaatttgagagtgaattattattattcaaattctaaaattgtactatgtattcaaaaatatccctaataatgactcgtggagtatgtagatttnaactacaaaaccacgtaaaaatatctggcgttatctgatcatttattatttattaatttttgtaaagtatttattactaaaagactatttaatttaggttaacaaaaatctacgtgttaacagtttggtgctttcattgagagttttagtgataaaactcagaaaaatctctccttacaaacaaaaatctatccatattcaatggctgaaaacaatcaaaatgatggaaattatcctaagaaaactacacatcaccctgagaaagagccaatgagatctcaaagaccccataccactagaacatcacaatcaaggagaaatgatggtggtggctatcaaaattcagaaagaaggaatgaagataccaatgattctgctagatacgtacctagaagtgaggatgcttat

SEQ ID NO: 74419 - DNA, 1789 bp, Cannabis sativa
  modified_base (1182)..(1182): a, c, t, g, unknown or other
  modified_base (1361)..(1363): a, c, t, g, unknown or other
  modified_base (1732)..(1742): a, c, t, g, unknown or other
atcataaaaatatgcttcaatggcatgccaaaatttgatgtaaatttggcacgtaacaaatagttgacactatttattatgatggataatttgtaccacaataaatacacaatttttttatttacatttatgttattgtatcaatatatttaattatagcattaaactataaagtatttatatatatattgttggaagaggtttcaatagttaaattaaatatataactatcatggttacatttatttttaaccatttgattactgttgaatggttgtgattaatttaaaaattaaaagaaaaataaataataaataactgataacttgatattttattttcttataaaaatttaattaaaattaaattactaataattattaattaattttatgcaatttaagtagcaattatttttttttaacttaaataattgaaataattacaacaaaagttcttgtaatttaaaattattacacacataagcttaattaataaaaaataatatgaatgacctctaattagaggtaattttacgctcaatcttattttttaacacctttaagtgccaaattagtgtgtcagtccaagattggttcaagttatttattttttttttcttttaaaaaataagtaaaaaaatagtttaacatgtaataacaactataaatttatgattgttaattattttgactccttgttgaaatcatcttcatcaatctaaagattgtaagaaaaaaaattaacaaagtagattaccaattaattgaaattattgctttttttttcacaaataagcataatagtaggaaaatagcaagcaaattattaaaaatcaaggagaaatctaattgtagctggtttaatagagaaatgggtttgtggcagagatgtaggagattgtatcgaagtgaaaaattcacataattcaaggttgggacaaactgaaatcttaatttttaaacaaatttttataaaggaggaagatgggtcaagccgttgttgtaaagtaataattagatgtaatttttaaaaattaattaagtattcaaaaatttattttagaaggggtggatgtccaaattttgtaaaataatagaattttattataaatatcatagttaaatggtttaaatgttaaaaatattataatagggacttaaatataaaaataaaattatntataaatattaattgctaaaaagagtcttattaaatatttaaattaaaattaattattttagaaaaattgttaattatgattaatttaattataaaaaagaattttttacctattggtaatctgctattacaggtaaaaaaaataaaaaaaataataaccatcatggttacaataaaannntaaccattgagtagtcacccaatatacaaatagtattctaacactctccctcaagttggagcatagatgttaatcatgcccaacttgttacaaagataatcaaccagcaccccattcaaagtctgtaaaaatatcttctaattgttctccgatcttcacattattggtttttatagttcatatcaaagttataaaagcggaaacaaaattttgataaaaatagttttatccaatatgaaccataagcccaaaaatttcaacataatgaatatagattaaatctaatctactgaaagaaattcaattacctcttgatgcctatcaaggtattcttgattattttcatgtccattatgtgatattgatccnnnnnnnnnnnataattttatataattaaggatgttgtggctactccctaattattta

SEQ ID NO: 74420 - DNA, 996 bp, Cannabis sativa
ttcgagttttatttctcacgagattgattataaaaaaaactaagtctcgatactctaatttctagagagataaactaaagagaaatgctctaaccttatgtctacttttttgaacttaaaaaatgaacttgtggaattcttctttatagggaaaggaggtcctattaaattgtaataaaataatccaaaaaatatgaaaaaacaaatatatttaggctatttttgaccaaatataatgatatcatatgaaaagttactttggagattgatcgccaatttttggatcttgagtcacgtctgtgggactcccttcgggtaagctataacttaaatttgtaactaacttgagagtgaaatttggagtcgataacttctaaattgtgattgaagtgtgacacatgacttggtagagcattgtaatagctttaaaatgcaagtttaattgcatcaatcagatcaatattgagtgagttatgaccattttattgaaggctatttgggcctagcgcccaggttgacatgtgatgttgacctggatgttgggcgagtgggaaaatgcacctagtgatgtatttttttatgcctaagtgatatttttgacatcacttagtccatttctgtgttctggcaaagctggtcactagttctcgaagatattgttgttctgcagaaatgggaaactcgaaactaccaggtttcaaagtaaatcaccttgtcagaaaagtgaaaatatgaagttgtaaattttactcttcttactttatggctctcagttattatgaaaaactagacgaatggtcaagacagaatcaaaatcgaataagtatatcccagcgcaccaggccatatgtcaacttgagtgatgggtgcttattttggagcttccaggatgtcattttgatacatccaaggttctaaaacacgaggatgaggtctcctacactgtttttgaccattttagggagaatgctcagagttgaattagcatttgaatga

SEQ ID NO: 74421 - DNA, 812 bp, Cannabis sativa
tgattatttattgttattattattgttatattgatatttttttggtttttaatttttttttagtgtaactctatttagttataacccattaattagaatataattagtttggtcctaaatgtattcttagatagatgttctaccgtatgtataagctattatgcattttataaattgttcaatatgatatatatacatggttcttcttgtgaggagttgaaaaccccctactattataagtcaacaataataatattaacaattatgtcatatatatatatatatatatatatttgagaaaaatcactgttattataaattaattcatcatgtcatttacaacaaataaaatgggggagaatactttttctccatatatatacaaaatctctgtctaactcaaactgtatttagctaaaccatgaacaattatatatttatatatgtcactaattataactaactatagagcactaggaaaaatagataactgacatgactaaaagataaatcaagaatacaactcaattgtaatattaattacacaaaaacaaataaaagagattaattaaataactattataacaatatttttatattatatatatgtataattatatataagaaatatagaagatgagattacataatatacaatatatgaagaagaagaacattcactcataatagtgtaaattaataattttgagtgtaaattaatgagagattaccatcttgagcaaagtataattatcatatttatcgacaaacgtatgtctcatatctataaacaatcgagtttggttggaggt

SEQ ID NO: 74422 - DNA, 857 bp, Cannabis sativa
actttcttcaagtatcctttgagttaacatgataaaaccaggcctctttcttctgatctcaattccaagaattttgttggcttctcccatgtccttcatctcgaattcacccttgagttggcacttcaactgactgattttgtgcttatccttgcctactattagtatgtcatcaacatacagtagcaggtaaatctctttgtcaaaataaacacaaggatcatatctactctttgtaaactttatcctagacatgaacttgtcaaatctaatagtccattgtctaggtgcttgctttagtccatagagtgatttgtgtatcaagcatacctggtttggattgccattgtcaaatccctcaggttgttccatgtagattttctcatcgaaggtgcaatgtagaaaggttgtccttacatccatttgatctatttcaagatcttgatcagcagccttggccataatagctctaatggaagtttgttttaccactggtgcaaatatatcattaaaatatacaccttctctctgagtgaacccttttgcccccagcctagccttgaaccttactgagtcttcattaactccttcctttcgccttaacagccatttgctatcaatgaacctctgccctcgtggtctgttaacaactgaccatgttttgttcctaatcaatgacactttttcttcattgattgctctcaacaaatgttccttgttgctgcatttcagtgcctccttgtatgttgtgggttctgagttttcgagctcactagcagcagcaagagcaaatgctaagaaatctgcataaccaagctttgctggtggtcttatttctcttcttaccctatctctgg

SEQ ID NO: 74423 - DNA, 1831 bp, Cannabis sativa
aggggaggctccacacagggagcagctccacgcagggggaggctccacattgggagctactccacatagagggaggcttcactcacaagctgttccacacagtagcaagcaggttcctcaactcacacacctgcagccttcgattcctacgtattgtgtctactcatacaaatggaagccaagagaatatatcgagggtagatatgtttactctaggcaacgcatacaagatagcgactattcaatgaatattggtatataagataaggttcatttcatttgagttacaagtaaaagagagaacatagtgtaacttaggatgtcagatacatcagactacctgagatactatgttatcaggtgtaaaagtgacttgacatcctaagatttcgagatctgataaaataagttctaacagtttagagtatacctcttgaagcctgtcagggtatcctcgaaacttctcgtaagctgtatcccttaatccagatgatgaggaaattgtaattggactcacaccagtgtcttccaaatcaatccaccacacacaaggaatagtgtgggctataaggatatagtgtatagcctttgttcttattgagttctcaacacatgagcaagaacaatttgagagagaaattaattttcttttccactctataatttcaaaaatcatagtataaaagtgatgtcaaagtgttagtttaatttgtcaaattaggcttctatttatagttgttaaatccatttaattgaattattattcaattgtttaaataaataaatatctataatcgaattcggttactgatatttatgagagaatctctcaaccacttaagagaatatctcaacaaccttgaaatatctataacaactttttaaattaaatatttacctgattgaattaattaagccaaaaagacaaattccatagggatagcataatgctataggtgcctaccatgtctatttaggacaagattggtgtcttttgtcttagaaaatattgtctctacaaattttgtctttttcctatttaattaatttgaaaaaattatttatttttttaaataattactatttttccaattcaaaatatattttttttgaacatctttatacaactctttatccctaccttttacagtgtttcaaggtagcgattcggggatcatggacctattattctaagctctaataaactagattatttattgagtctcatcaactgaataatctcttgtttattaattccatgattactccactataaatatagaattgagctcttagtaattatagaattatatttactgtgtttaactacagtgttaattgatataatcaattctactgattaggtctccttgtgttggttcgtaattaattttaatcaaattaccattttacccttctaattacttctttatcttttagttccattaattcactagtggaagtataattcaagatcccatcttaatttgcgcacaactttcgagtaccagaattaacacataaagggaaccaatattcgatccgttaggaaagtcatgatactataattgtcgatcatgttcccaaccatccacaagcccgaccctattggtgtgcaggcaaacctattacacatggtccacacaagaaaaaggcccaattttcttaaatcttttttttttttttttaataaaatgacttggtcagcattacaaaagcccatttaataaggctcattaattgagagagaggttttgtcaaaaccaataagtcttatctctcttcttcttctccctcccaaaaaaaaaaaaaaaaactttttaattttttt

SEQ ID NO: 74424 - DNA, 654 bp, Cannabis sativa
tctcttgtaattttgcaatttcatttcatatatatgcattgtttttgttgatgttaattttaatactattacttccaggaactggaaaaaatgaaggagattgcaaaactaaagaacttacctccagtatactctggaaaatgggccaatgcaacagatgaagaagtagaagaggagctggcaaaaggaaccccatatacctatagatttcgtgtaccaaaggaagggtttttaaaaatcaatgaccttatccgaggcgaggtaattcttattttcccctattcatagttctttgaaactaaatttcttttgaaacagccatagaattttcttagttcttccattagaagaaatgaataggaaattcagttgactgatttgtcttgctttttaagttttcatatcatggtagatacgggttatttacaatgtctgtgtaaggcgccgttcggttggaggtaatgaaatggaatggaatggaaatgacacaatttttattccattcctttatttggttgcattttaaagtgttcaccattttgaaatagaaagaatgaccattctaatgcaagatgagaaaaaatttaatagtcttttttatcaatttttttatgcattttaaatttgattctattcccgttcccattcccattc

SEQ ID NO: 74425 - DNA, 1062 bp, Cannabis sativa
ggcacacctacataggaagtggttgacagagctgctgaccaaagggccagtcagcttgccacttctaactcaactccacccgctcctgcacacaattagaactattttatcttaattttgaatttatgattttattttcatagacatattagtttcatgttctgtatggattactggccttttacttttgaacactacttatttttcagcttcagggatttttgttcttacttttgtcctataggcactctatttttgaacataaccattgtttagccctaaagtattttattatggatatgtgaccgaccaggtgatctttaatccgggctatcttcttcttgccttgacatataagtatccagatatacttttctttatgccaacctaaagtttgcttgcacttgacatagaggcaggtttaatagcttatactaagtgttcaaatctctgataagttcttcgtgctagttcgatgcattgtatggtatgggtgccccccaagtgagaacgtaaacttacggtctcttggtcactagcaattcaccaagtttcttaggcattacctttgaatattcttggggtgctaccatgtgtatgcatgtggaattgagaaataataactttaagaagttaatcttgttagcaagtggtttagactcaacatatttgaactgaaacgtcatttttattcattaattggtctttattattgtgcaacttaaataaattgtttttacaagcttacaaaataaaaagttttcttctagaaattaagtggctacccctgcccgacatgccaagcagaggccatctttaaagaaaaatgggaggccatgccaaaaggccatgtgtactagctcttttaaactaactctactaatgagttaatagaactactactaaaaagtagcattagtagaactttcagaggtactccccattccaattacttggaaggagaaccagctccatgttctcattatagcttcccagcttctaggctcccttacttgttatctcggtaacttggtaagggccttctcagttgggtccaaacac

SEQ ID NO: 74426 - DNA, 879 bp, Cannabis sativa
gcttacagagaaaatcaatgatgaggcgtccatcggacaaccgaccggttgatctgttgaaaaacgtacggccattggggaggttgactgagaatccgagtcccgccaccggtccacccgtgtccgagttagagtcgccgaagttgaagattaccgacctgtttttgcactgagacaccactggattcaccgttgaaaggaggaggttgcaggtatatatacttattgtgaagttatatttgattaatatataataaaaatgatagtttttttgttttgtatttaattatatgaaactaaaatagttatgtttccagttagttttagggttataaatattatatatcatcttattataagttatgattaattaccttattaattacctcttctaataacttgttaaccaactaaaatttgccacgtagctcgcaaattattttagaatgtgtttattacatgcttttttcaattaatcattatttgaaaacattttggtatataggcttaattttctagataattttttgattgaagcatctaagggccggccctgaggtgagacgaaggaggtggccgccttaagcccaccgctcagaaaaaaatatttaaatatagttagtaataaaataaataataatacttttaatggtaaatatgtgttgtactgggttccaatttttatttttgcctaaggcccaaattaacataacaccggcccagagcatcttatatatagttatagatttgatcctccccacacatgtacctctctaggcatggaaaaatgatccagatttctaagtcggattgggagccttgattcaatggagcagtttcgatttgaacaaacaaatctcttatcaaagctcgaatcgt

SEQ ID NO: 74427 - DNA, 1179 bp, Cannabis sativa
aaagttactttaaatgacggtttacaactgtcagaaaaaatcactttaaatgaatgtttataagtgttggcaaaagtattatatagattaaatttaattatttttaatttttgttttgaatatcaaatatatataatattattattttttatataaaaaaataatattaattaaaataaataaaattaatttatttttagattcatatataacaattcattaaaattatattaaattaaagattattacacttataatatgaaaaaaatttcatatttcacagaatacatatgatacaaatctaaagaaaaaaaaaagtaaaataagaaatttgttgttgtagaaagttaataggaaaaacgcctaagttgcaagattgtgacttctgggcaacaaaaaatcacacttgctgctgattcttcaaaccaaaaaatttccatgaaaccatcataatcaactttgctctagcccaatagtttagatgaacttctcagtaataatcaacaaaccaaagtattataagatgagggaacaaattcttttgttaagtaatttgttgtcattgtgctaagaacgacaccccacaaagattcacatccttatacccttttacctataccaaaaatatacccatatcgtcgagaaggagagggagctcggacgacgactagccatagccgaagacgacgactcaactacacccgtcgagatccatggattttgttatcggagacgactcgtccgagaacatgaaacagagagaagtcgaccccggcgataacccgatccaaccctcactgtgcaaagcccggcatcgtctcctccatcgccccttgcgaccaagagagagaagtcgacgtcgtctcctcaaccgccccctgaagtcttcgtctcctccaccgccccctgcgaccaagagagacctccttccattgccgcctgcaaccaagagagagaagctttgatagctttgtgatgagagaaggggaagagatctggtaataggatgtggtaatgttaggtgcggctgagagaaaatatatggtagggttagataatgttagggttttttagtgtttaaatggaaaaaaaaattatttaataaacataaaaaatatataatgttaaaatttgatgtataaaaattctttttcattattttttaaatatgaaactttt

SEQ ID NO: 74428 - DNA, 514 bp, Cannabis sativa
ttaactaataggcccacctctgtacaaccacaacaccaaatggatccattaagaaaattaacagataaccgacttgataaaaggtccatcacaaaaattgacaattgtgattcagaggttgaagggggattaaatgatatcaaaaaaaaaaaaaaggaaaaacctggacagtgatcgtgatattgaaagggaatgggaaagaaggctatttgaccaagggaaaaaaattcaagttttggatcaagttcacgggaaagttggaagctttgttcaaggtctggctatgggagagtcacaacaaagcatggtgggtactgggttgagaaagaagattttgattaaacctaaagctagaggctctagtcgagcacaagtgggaatgggttagagaaaatcgatggctacggggccacaagaaggaacaattggagctaagattcaaggggaatagggaactttgtgtttgggcagaatgaaacaaagagaacaacagatcgatcaattgatgatgtga

SEQ ID NO: 74429 - DNA, 880 bp, Cannabis sativa
gatggaagtatctggtatttttattaccaagttggagccaagtaactcgagagcgttgctgccaataaatttcctctctttgcagtaagctaccaaactctgcttcaagcttcctaccctgatctaattgatcattcataggttggggcaaagagttaataattttgagttgagattgaacattacgaatttgggtagctagcggggggcctaaggattgcttccaaagcgtgaggcgagaggagcatgttgtgagtctttccttaaggccaattaaaggattggagtgtggagtcaggttagtctcggtccaagcatcgcgaaggcaatcctcaaatctcggttcggtcatccaaagcttgtcaaaaatgaagcggggtttttagttacgatgaccgttcatatattgcaaggtaagaatgagaggccgatggtcagaaccaaaaaaatcgccatgatttagttgggaatcaggaaatatagcatcctaagcattattagataggcaccagtccaaccgttcctgagtatgatttggttgcttttggcgattagtccaagtgaaaagattacctaacggggtgagagggtgaagttcatgactgtcaataaaagattgaaattgcacggatggagcacgagacatattacccccgattttgtcagaaagagacaggtaatcattgaaatcgcccataatgagccacggctggagccgagcatgagagccaagtcgatctattaattgccaagtgtgcagtttcttttgagtgtgaggtgcaccataaaaagcggtaaaagtaaaagcgtgaaagttaggaaacttaagataacaatgaaaatgactgatattatatgaaagcaaagttacatccacatc

SEQ ID NO: 74430 - DNA, 1381 bp, Cannabis sativa
accctcaattagctgggggtgggcctagagtttataaaaactatctttaaacttgtccccctttttggggactggtaggagttcataaaaatattaaatcttaaccggattgggtggggcctagttccaggcaagtaaaaaatatacaagcctgatagcaggcggtaagcttgtggtataagttgatagggtgaaaggccaacgaagaccaaaaaatcaataaagtagtcctggagcggaagcacagcctcggacatcaagtgggtttggctccacgccccgaagccattgtagttatgattaggcgtctcttcatccctcgagagacgatggtaaacccctgagatggaaggtttaattccaacacagtaatgatcttttccaactggtgggcgcaagtttgtgtcgaatgtagcttatctgcttcccaaccattggagtgacaggtgaactttttgtagactaccgggcccttcattacttcatccaaagtggccaatttcattggccccttcttcgaggattttgctccagtagaggcgagggtttacatggtatggatttgatgaaggtctaggatttcttggtcgaacctaaagaaaccgtgagtgtgaaggtcgcggagaacttcactcatctgaaaagaaaatctagcaattagcccccatatcaaaccctaggatcaaaaaggggaataagggtcccctaaccgctggaaagaggccccctccggatgcctaccgaaatccggatgcctaccgaaaaagggatgcctaccgaaaaagggaatccagagattctctaaggcaagcatcaggtgcaaaacatctagcaaaaaaaaaaaagaaaaaaggtatggaagtcgcttcgaacagaagcaagcaaacaaaaaactaccactttctactctcaagaaagacggcagtgcacgtacagagaaagcagtaaaaagcataaaaaacaacaataaacgacagtggtcatcgaacgccccattttgggggggcatcacagtgacattcaccgtggccaccgtgccacagaaaccaagcacaatcaaatgaaaatatcatcaattttaatttaccctaacaaccagaagaaaaggaaatagagagcgtctgaacaaaaacttacacaaaggcagcaaggaagaggttaacgacgtttggtggtaatattttgtctaacagcagtgaaagaagagcaggagatagttggaggtttctggaattttgtcaaatgggttggatggactaaaaattgaaaggtggtaaaagtgacccagtagagaaaagtgttggcttttataggccattaagggtgcaagactgtcttgatcaggcaccgtaatacagtgaagattcgtaatgattcgaat

SEQ ID NO: 74431 - DNA, 909 bp, Cannabis sativa
  modified_base (26)..(29): a, c, t, g, unknown or other
accgtatttttgttgtttttttgttnnnnttgtgcatttgtgaaattaaccccaaaaaaattgtccaaactcttcgttgtcacttgtgaatatacaagagaaagatgaagaaaaatagaaggtggcatacataatttatcatgcatgatttaaggaacaaaaaagtaagtatactgaagctctttttggtattgacaaaaaagtaaagtgaagtcttatccacattgacattgaggaaaatcatagtaacagacttcaaattataaaatatgtctaggatttagtagataattaatgaaaaatgctaaaaagaagtattgtgtctatcgcattttaggattggtggataattaattaaatattagagcaatgctcataattcacttttagatttttcctatgttataaatagtagattattgttattgtgtctagcctctttagacatattagctagtaaatttcttaaacattatttcattaacctatatagaacttattacttagttggaccaatagcgatatttacatatgggagggtgttaagtaccattagtaccttttaacatttctctagctataacaataatatataataagatttaccaattagcatctctaatggtattctttattttttagctaaaatagctacaaagcttaaatagagtattttattattattgttgctctagtcatgttccctattttagtttgtatttaattattttaataacattttgtaatttaaatttgtcaaatgtaaattaactttatcaaataataaaaaagtaatagtgtttttttattaaaatactattaaaaattattagcaaaaaaatagggagctccttatatttagagagctttctatccattctttattatagagtgctattttttgtatgg

SEQ ID NO: 74432 - DNA, 849 bp, Cannabis sativa
aaacataagggggttttgctaccaaaaaaaataaggggttaaatgtataaaaattaaaacataaagagatttcactgtaaattgctcttccaaattattgagaaatattttgatgagtgatcaaagaaagattaagagactatatataatagaaaaaaaatagagagaatattgacaataattagtaatctaatgtattataaatgatagaggaaagagatcgaaatactaatagaaaattgagggtaatgaataaattatgaataatttgaagttgtcgatataaaagaaaagtcggtatgtctccaagaatattctgttaaacaaaaaattctgttacaaaatcacattttatatagaatagatagatagattttttttaattttattttttttttaaaacttagttgttagatatttataaagtttttttaaaaaaatgatcttgaattacacgatttataagtcttttatttgcgatacaattaaatttagtgttagttttaatagttttgatttataattgtatataaatattttttattaatctcaattgagagaattagataaaaatatattgactaatttttaattgtatatagatatatagatagacaaattttttcaatttttcatttttttttaaacctagttgttagatatttgtaaagtttgaaaaaaaattgctatggtttttatttaaaaaattagaaaaattaataaaaaaaatagaaaaaagtaagaaaatggataaataagttttaaataattagaaaaaattagaaaatagataaatggattttaaataattagaaaaaaaaatagataaacagattgtaagccatttta

SEQ ID NO: 74433 - DNA, 818 bp, Cannabis sativa
aatgttatttaattaatgtgtatcttcaaaataaggaacgtcttgtaatgctatctatattgagaaatgcttatggcacattggatttttgttatgtgtaatattattattgatgcaatttaatattgagttttacttattttattttaataaatattatagaaaatcgctaactaattatagagagcgacacttcatcatgaaactaggttaatttcgcttttagccgacgacgctgaatctagaaaggaatttaaaattaattagatgaatgagaatatatttaatttgaagcataaaccaagaacacaagattttatagaggttcagtcccatttatttgacaatagtttatttctctttctgattgtatttcacttgtgagaagagaagtaataacaacttgatctctctcgaaaacttttttttacagattattgaggagcgtaatagctctcttgaaattaaaattttgaatcactttataatggaatgactattctatttataggggataattacaatgaaaaatagttttccaaaggctatctagccatacaaataggaaattaatgactttcctaaacgatgacaaatatatatatatatatatcctctaattatgaatttgattatatacaaaatgggaaacttcaattaatgaattctcgcatttttctctggtcgaattatgtgaagtgttggttatttcctcccgtctaggttaacttcgttcattctgtacaacaagttttactttgcttatttattgttgcgtctagcaagttgtttaccctgtgcgggcacttggaagacca

SEQ ID NO: 74434 - DNA, 560 bp, Cannabis sativa
aaaatcttaaatgaaactagcaatacgtggttcggcacgtacattcacctaatatatatatatatatatgcatatatgtttgatatatatctgtaatgaaaatctggtaccacatttcatgctataattatatatataattgatgatgtatataaaacatctaaggtttacaagaaggatataggttattctaataaaatataaatcttgcacccaaaaccaactttttatgtacgaagcaaaataagaaatataacccaactttttatgtacgaagcaaaataagaaatatgttatgccccaaggaacaagtagacatatattaaaatatgtatcaatgctaattgaaagactgaaaaaaaattgatgaacatgaagcaaataaaatgtacaagcaattttggaaacaaaatttcagtatatgtgacaagatgtaacaaaatgatacacatctttgtcaaaacaaatttctctcaacttctactaattcaaattacttttatattaaagatactaaatcaagtaaatttgaattatttcacaattcttataaaatagaa

SEQ ID NO: 74435 - DNA, 705 bp, Cannabis sativa
atcagcaaagcgagtgcttgaaatggctttggtcaaaccatctgctaattgatcgactgctgctacatgattcacctcaatgaagccctgctgtactttctctcttacaaaatacaaatctaattcaatgtgtttggttctagcgtgtagcacaggattcaaggtgagaagaaccgtgctaaggttgtcacaccaaacaactggaggtcttgccaagtgaattttaagttctgaaaacagagaatgcatccacgatatttcagcagtaatattagccaagctcctatattctgcctcagtacttgacctcgaaacagtatgttgctttttacaagaccaagccactagattttcaccaaaaaacacagcataacctgatgtggaccttctatcatctggatccgaagcccaatcagcatcacaaaatcccacaagatcaagagaagaaggtttctgcagatgtaacccgaagttctgagtgccctttatatatctgagaatcctttttacagcattccaatgagtgtttaagggattttgcatgtattgacagactttgttcacactataggacagctcaggtcttgttatggtgagatattgtaaagctcccacaatagacctatagtgttgaacattgtcaactggttctcccccataagccgacaacttcaagccactagtcattggagttgaggctgattt

SEQ ID NO: 74436 - DNA, 1499 bp, Cannabis sativa
  modified_base (1431)..(1461): a, c, t, g, unknown or other
tcataaaatgcagacctgtctaaaatagatttgatgtttctgatcaatccaaatcaggtataaactgaaaaaaaaaaaatatatcaatacactagctaaatgtttctcccattgcattaacgttgttttctaaatttttcatggtggatttattcatatcaaattacgaataataaagaaaattcgaatttatctagagccacgtatatagaaatattgttctagtttttaagtttctacgtagttgtattacagttgtattaacattttactatcattttgaaactagacatatcaatgatattacaaactaataacgatacaataatttttatgatatttgcaggtgtttcgtatcgacaatccaacacaaaactcattaaaaaaattataacatggttagttttattaatatattcatttggttgttataaagttagcttacaaaattctaacaattgtttttccacataatattattaaggtacaattgattgttgataagtgaaaataaaaatactgacaaattttttcatgacgatggccattcaaattttctatttctagatgcaattaagttgtatattagttgaataatagttgtgctactacaatattattattttaaaaaaactgggctcatgatcgataatacatgactcgtacaaaaaactcgattgtggtaagttttatttgtattacataggggcattattagttgttttaatattagctgcctcacagaaaatataattgttgcattatagtttcatgacaattatctcatagttgacttacaatgctcaaattttcaaactgttaggaaaaagatgcaattctgtttctcatattttacaatggaaaatttgatcaaggaacgaattatgtaaattatgaagctattggctaatacacttcaatagattgcaaatatgaagaactagtacatgagctaaaacaggtgttggaatgtaaccaagaatacactcaactaccactgaaataccaagtgaaagaaggataccaaccattgaggataaaggacaatctaagcctattcttctacatacaactaaaattgaaagaaccttacttcacaaggtatctattgtgtgtgagcatggtcaacaacacaataacaaccaacaacacgtccttctttgtgatgagctactcattgcataacaattattttaagagtgtatgtcatatctaaaaatattaatacaaatataaagtattatcaacatcatatttgacacattaataaaatgtttcaaaacttttcttattacattgactattttgttgaatcgttaaaagtttcttattactaaaataacacaatttttaaggcctaatataagtgttaccatgggaaattgaactccgaagagcaaccaaatgatgaacctgttgggttttgtgccnnnnnnnnnnnnnnnnnnnnnnnnnnnnnnnttactaataaagatcagaaatcacattttatgttgcat

SEQ ID NO: 74437 - DNA, 1452 bp, Cannabis sativa
  modified_base (1019)..(1028): a, c, t, g, unknown or other
  modified_base (1380)..(1395): a, c, t, g, unknown or other
ttgtgcagtcaccagcttcgttaatgcctccacctgggctgtcaacttagttatggcatcaacttcatgcatacccgcaacctttttagattgacctctctctgttgaatattgttgattatttatggccatctcttcaagtagttcaaaggactcattcacactttttctcataaaagcctaaccagctgcagcgtctatgagtgttcgggtgttgctcaccaatccattgtagaagttatgcacttgcaaccactttttaattccatagttcgggcatttcctcaataagtccttgaatctctcctaagcttcatagagagatttgttgtcatgctgggtgaagttgttgatgtctgatctcagcttggcgatctttgtaggaggaaagaatttggaaaggaatttcaaggccaattcctcccaagtgttgatagaatttggtggcaaagataccaaccaactcttggctcgctcccttagtgagaatgggaacaacctcagcctgatggcgtcattgctaactccattcatcttgaatgtcttgacagaattcttcaaagttagcgagatgcatgtttaggtcttctgatggtagcccccaaactagactgaagattggaccatctacagtatggctgacttgatctcaaaattgttggcatcaacggcatgtggccttatataggatctggcccctgtcaaatttggtagcaaataatcccttaggctacgatcattgttgttgcgaccgttagcctggtcttctacagctcctcaatcgttgccattattagcgtggtcaaccatgactacattgtgctcaatctctattgcctctttttctaatcttttccttcttctgttctgtctgcaaggcttctctatttcaagatcaacaggcaatccggcaattgcaccttgacgtctcataactagtgaacctgaaaaaaaaaataagattttgacacaaacaggaattagtactaaaataaaaaagaaaaaccaaattagaacannnnnnnnnntttaataatattaactaacaattcccggcaacggcgccaaaaacttgttgtaataatatcaacacgcaagtgtacaagtcgtttacaagtaatcaactcactaagagtgaggtcgatcctacaaggattgtagttaagtactttaaaattaaatatttacttctatttggttatgtcaaaattaagagaaaattaaaactaaaaagtaataaaaaatagtgaaattaagaagcaaataaagaaaaaggaattaatgatgattaaagttagggctttgatttcaattgtatctattgattatggcctatatgattatctttctattactaatttctatgcaatagcaggtttnnnnnnnnnnnnnnnngtcttctcagatatataaacctcaattacatgcaaattttctactatcgtgataaat

SEQ ID NO: 74438 - DNA, 804 bp, Cannabis sativa
gtgaaagtgaaagagaaactcaaggcaatccccactattgattactccaagcagagttatcggatcaaagaagtttatgaggtattatgcccaactattcatatacaaccttggcaaggaggtgtttggaacaagctttcaattccaaaacataggtatatttgtggcttactgtcattgatagattgaggctaaaagaaagactgtttagattcaagatggtccatgatgaaaattgtgtcatgtgtggctcacacagagaaaataaagaccacgtgtttttgtttgccatgtgagtgatggatgtttaaaagcaattaaatattgattggaatggggagcaaaaattacaacggtggatgggctaatgaaaaggctaaccaaaggagaaagcaaattccaacaacaagtatatgcggctacacttgctgcaacagtatatctgagttggctatgcggaaatgaggttctctggaatctaaaagtttacacaatagaaacaatggtcaaaaaaattagaagggatgtaaagtataggattaggggaatattgcctaaaaaagtttcaaagatacacagggattggtttgagaatttgtaaatattcagccctaaccttaggtgctatgaattgtaatatgttgtttgtggaatatatatatatatatacttactctgattcaccaaaaaaaaaaccaaataaaataagtagatatttacatagtaaattggtaaaatataaattactaaaatgttccttaaaatcggtatttcttatctacttttatgggctattaaggccca

SEQ ID NO: 74439 - DNA, 629 bp, Cannabis sativa
  modified_base (595)..(595): a, c, t, g, unknown or other
aattgataaattacacatgatttttgagatatgatatgggcaatttttttagatcgattgagcttttcaagcctaccctatttgttaaattcctagttttacccaatttcagcctaaatattgacatcttgtttttcttttgaccctatataataaccttttgagcttaataaaatccttattcatcctttttcacgccataatatattgatattttatgtatttgtaaaggagtgagagttttgttcagggaaaaatattcatggttatgtgatgatgacgaaaataatgactatcccttcaaaataaaagtttgtaagttgtaagtatttcaaaaaaaaaaaaaaaaacgaaaaaaaaagtgatgagaaatacataaaaaaaaataataaataaattcatacttgctacattttaagtatgggggaacagtaagttttatgaaaaaatgtatatgattgaattgttgaggagagtgattggagaatacaaatgagaattatttgagagaatattgtatatgctatggtgtgatttgagccaaaattaatcttctctatctacctttcaccctagccttacattataagcctanaaagtcctattgatctttagattgtgtgtaatta

SEQ ID NO: 74440 - DNA, 869 bp, Cannabis sativa
ttcaacattatgccattcatgatcattgatccaacttaacgcctcttcaatggctaaagcttcagtcatgtctggtgccattgtaccactgccaaaaaaccaaaacaagaaaaaaaacagagcactaaaacctaaaaacatgggatagcagatcactcaaaaccaatacgaactttgcatgtcaaaagacatgacaccatgacttataatttatactctaggtcatttaatcacaataggaataatctcactattttattaataatacccaaatgacaaaccttaaaacctttctctgtgtttaatacttctcggaatccaatcattaacttatcaattttttgttgttataagaatcctagatttcaacagcaagtgagaagaagagaagagaggaaaaacccaaagaacctattattaacgattatttactatttctgttggaaagaaaataaataggttagttatatacattacattattagttatcatgtatatatgtattatttgttggctcattttttttttgaagctgctctattatgtgtttattttttggtgaagtttttctcttcattctatttattgtactttatttatattgtttttcttgaaaaaaaataaaaaaattaccaattaattatttaatagttgtcataatattattataatatattttttttttttatttttatccgtttagttcatcaattatttttttatttatctaattattatattttttttatttatatttattactttatccaattaaattatagtttatctaattaaataattttttttgtcaaaccaattaatataaatttaaatacatataattcatattcttctcttcttctcttttt

SEQ ID NO: 74441 - DNA, 1311 bp, Cannabis sativa
  modified_base (847)..(848): a, c, t, g, unknown or other
tctctctctctctctctttttctactttaaaaacttttcaagcgataccaccggttatgggatccaattaaacattgttactgttataacttattttttaaagtgatcattatatagatgagaacttagagttctttttattgttaccgaggaaatgacaagaatttaagaaaaaaatatcattttaattttttatgttttgttaacaaaaatcagctaaactttaataaaccgaccaacttcatttataataagtaatttattattttatatttaaaaattatcatatggtattctaaataagtttattttataaagtaattttttaaccaaataggcttgagcatcatgacatgttatattacccaaaatatgaaaagttacataagttacttcattgtaacttattagttaataataaggcaatgtaatctaacttgaaataataatttcaaagttaactaatcaaaataggtaaaaaaaatgtgtatgaattatatttattattattattattattttgaaaaaatagctaatttgtattttgttagtatcataaagaaactaaaaagtttttttttttgccttaaaaaaatgaataatttcgggaactaaatttattacatttttctactttcgatagtaattatatcgaatattatattttagggttattttacaatgtacccttttaaaagggatgtattgatatactctcgacttgtttcgacattcaaaaaaaattttagtctaattttttttatattcatgtacgttatagctatataagataacctacaaaattttaaaaatttttgaataatttataatatagaaaataatgttnnaacagtctattttacacgcgtataaaataaaatagtcacggtgcaacacactgtttgaacgtaattttcggcgtgttaaacttttccaaattttttaaaattttgcaggatgtttttaataactataacatacatcaccatgagaaaaaatctgactaaaaagtatttcgagtgctaaaacagataagggtgcatcaatgtatccattttaagggggtgcattgtagaatttccctatattttatattgacatggcaccattatttttgttcatgtatatttttggaagtatttttttatagtttttttatatatatttttttatttaagcgtttatatattacaattatgttttacttgtaactcgaattcaggacttccaacacacatccacccacttatgaccacttgagctagcctcaagtagtttatatatatatataatcaaactaaacataatatt

SEQ ID NO: 74442 - DNA, 1002 bp, Cannabis sativa
taaaataaattccaacagtaaccatcaagtcccgactgattgtggcattgagtcctcacacatatttctattttctagtgaaatctgtgagaaccaaatcatcagcaaacttcaacagtcgatcgaactccaaagtgtattcagccactgatattttcccatgagtaaacttcacaaaatcttcctgatgtgaagatcttacagtaacattgtaaaactgttcttcgaacatattcttgaattcctcccaggtcattacattgacatcccaggtttggcccacgatatcccaccagacgcgggtatggtcttgcaacatgaaggttgcacagttcactctctctgttcccattatttgtctatttgtctatttgctatagacctgcatgttacgctcacatttatgtctacgtgcatagacctacgtgttgctctcacacgtctatatacaataagaccttaatagggtttacctcggttctggttaccgagcctaacctggtaatgccttactcgcataaccctacacatatatattcctaatctatacattacgttcattcggtggtttatcatggtgacatataccaggtctaacccagttatgtcttatacacataattcttaacatactcgcatgtattaaatatttaccacatcatataaaatcttagggtaataaccctaactcatattttcactggattaataacattaccatgtattaacgctttcttaccttcataatgttctagggtgaaaacccaagatcgcattaaaattaaactcaaggtactagtttaccgagtttagcttaattatgccttatacgcataactctttattccaacatattcaacatggcataacattcaacattttttttaactactaggctaataaccctagactaaataaccgctcattttgggataataaccctaatctcgattctgaatcaatcacaatcacaacatacaatatgagcaccactgtgcttaa

SEQ ID NO: 74443 - DNA, 986 bp, Cannabis sativa
tgaaaatttaaacaaactaccctaaataattaggggtccaaccatataataagtgctaaagccttgtaaggcgccaaatcatacgatgatgaacatacaaggaatctcattattagctaatattcatcaaataatattctatatatatattagctaatatatatttaaattaaaacaataaatctttgcagaaataccttaataattgtgaaaaacatatatgatgaacatacaaggaatctcattattttatgtttgtgatttaggttgctaaccatccttaatgacatattttaaatttgaaataaattaggtaattttgtggcccttagtagtgcccttcttttgtttgtataataattgatcattaaacaaacttacgtctttatttatcagaaaataataatttcaatacgctgtaatgatcaatttaataagagtagaaaaatcgaattttagatagaataatgaatgtcaaatttggaattcaaattactatttattttatttttttgataaagtctaattactaaattttaaaaatgttattgaacttaataattatgaagcggcttaattatgttatttaataattaattttcaatactataaaacttatttggcttgatttttgttaatttaatttcttataattagttggcataaaatgttgggagactgattaagtgggaagaaaaatgacatatgtctgaaaataagtgggaaaaaaaaaaactaaataagagatctgaatcctatttccccgaaacttttaatatgtgtacctatgataatacctgataagcaagaaaatattaaattgtaatacttaaatgagataatatataatattatttgattagttcgaaatatataatatatttgataggtgggcattcatctaaatataacattttttttcttatcccatccaatttaattagtcattggattcaaaaaatcatcaccgaattcaattcaattag

SEQ ID NO: 74444 - DNA, 1074 bp, Cannabis sativa
aaaagtagaacgtaaatacccatataaaagattaaattaaaagattctctcaaatattgaaatagatagaggtgcatcgctaaatctcttttaaagagtgcattgtaagatcacccgtgtatattattataatatatgtatatgtatatgtatatatgtatttaccagtgtgaccactaacgagttgtagagaaacaccattgcccaagaattcacccaaacgatcgaacatagcagagccagcattaactgaagcagccaaaggattaaactctaaaacattcttttttgctaatacaacccttccttttattttctttccatgtagacccccagtcagcgtgtccaccactttcccagctagaaacattttcttttcttaataaatatatgcaattaaccaactcttcaaggaccaacaaacaattagttataagtacttgtgattatgatgaacaattgggaaagattgatggtatatataggcctcatcacaccagattgggatcagatcacattataattattattattgttttttattataattttttgtgttatcttcaagatttctaacaataatgcacacatcgacattcatttttaaaaaatatatgtatatggatttttgtaaattaaatttttattaaaattgtggtattattattatttttaaatgttatcaaagggtcaatgaaagtgtacttgtcaaatattcaaaattacagaaattaagaggataatttcttggaacttgggagcaaaatatatatatgtatacacatgcaactacttttgttagggatttgttttaaaatgtctcttttttttagtatgtgtatacaatttatattaagttaattttaatcaattatttttatttaatatgacttaatacgtataaaaaatttaacttattatataaatgtgaatcatgtttgtgtgtaaattgtgttattttttttggcttttattttacatttatgggaaatgagatagagtctagagtgtattatgagatgacgatgcttaaagaggaaaattaatccatacaaatatattaaggactcgttt

SEQ ID NO: 74445 - DNA, 1251 bp, Cannabis sativa
  modified_base (130)..(136): a, c, t, g, unknown or other
  modified_base (1214)..(1216): a, c, t, g, unknown or other
tattattatattgttctctttagtgtttctttattctttgaaccatacatatacctatattagtttgattttattgacttagatacagatcgttaagactttactagtagataattttttatttatagannnnnnnactattagttttatattaccttaatgaattacaagagataattttgacttttgtgatatgctcttttttatttttgtttattatggtttttaatgagtgtgcattgtgataggagtagaaggctatagagaggctcttaatgaattaagagagataattttgacttttgtgatatgctcttttttatttttatttattatagtttttaatgagtgtgtattgtgataggagcagaaagctatagaaaggctcttgctcttgatctaaagtcatttatgtaaatctctaataaacttttttttgaactctaataaattatttggataatcacttttacaattttagaaaatttatgcattgttatgatgacaaatcaccttttgtatatgtatttgttctcatatacataaatttagatttttcacttatgtactttattattaaaaataaaaaaaaattaacaaattagagagattatatctttaatgaaacaatcacaaattggaatcttagggcataaagttacaaattaatattttacaaattataaatgagaagtatgaggcggtgacgtgacggtctaaaatctctctaaagttatttttttttctccttaattctcttaattttaaatattttattagagcataaatttacaaattaatattttattattattttaataaattttctataaaaatatctatcttaaattaattattttttcaaaaacatataataataaatataaactaaattaataatataaaattaaataattattcaataatatatatatgtattcataactatatatacgtgtgaattttttttttttttttactttgatgaatatagaaaaagtatttttttaatagaaaaaatttataatgaattaaacattatgaattgaacaaaaaaaaaaagcaagtgtgatattatgtagaagaaaaaacatgtgcgagattatgaattaaattttttcataatgcattatttttatattacaatcttataaagttgatgtcattattgtagctcatatcctcaaatttctaaacttaacactcaatttatnnntctgttagttgattaataaagtgccacatgtaaat

SEQ ID NO: 74446 - DNA, 790 bp, Cannabis sativa
ataatcccatataaaataataattatagactccatttaagatcaatactcggtccagttgagtgagaaaacgatgtttacttctttacgaagcctgcccaattaattctatattttacttctgttaaaattacagaatattaaatggactatatgtattacttttatgaattacttaattattcttttctaatttcgtcattttaagtgttttcttttttacttcaaatgatctcaatgcgccaataacattcggagatatattctatgataaaaaagatgaataattctgtaatttgaataatattaaaaaggataaaaaaagaggatgagaaacttagtagtacattacttgagtgttcttagtgtaatcatttacataataataatagggatgagagatacacgaaaagaatactcaactctattttgggcaaacaaccaagcaacccttaattccgaattaaccctttactactttagggcatatctctatgagtttatgtacataaaatagcaaaaaatcacaatgctagcttagcattctcattatacagctttcttcttcacagacaactcgtttctcccactacaccaaaatatagaattggtgacatttggattggtaacatttgtaaaaaaatgtcataataatatcatttaagtaacatttgataagaaatgtcactttaaagagaataattgacattttaattaataacattttattaaaatgtaactatcaatatactttagtgacatttgaataaaaatgccattagttttttcat

SEQ ID NO: 74447 - DNA, 993 bp, Cannabis sativa
catccacgacctccaagctgtaggttgcaagtagtggtctcacaccttttacccgtgtctggtgtcaagtggtcctgggttgcaagagtagtggctattttgtacccttggtcgggttgtcaggccttgcaagtgtggtgcctccactacttgtacctcctcgccttcaaaacttgcagaaggtgtagttgtacacagcttgcatgcatgccttttccgtgtgatcatactcttgtcgtcttattctttaataattgtaagaatcccactcgccatggctgtaagctgcatggccgagtgacattccttagagccttggtggccatgtttcttctaggatttagtcgagtgacatttctctttgtcatggtcgagtgactttcctcttgtcttggtggccatgtttcttctagggtttggctaagtgactttgctctttgtcatggtcgagtgactttaaggtcactgtggctgagtgtcttttcttcttgctaagcccgagtgacttcaaggtcaccatggctgagtgacttcattcttggtcatggctgagtgacttcaaagtcactatggccgagtgacttttcttcttgccaaagtcgagtgaattcaaggtcacccatgcctaagtaacttcattcttggtcaggatcgagtgacatcaaggtcactatggctgagtgacttttcttcttgccaaggccaagtgacttcaaggtcaccatggccgagtgacttcattcttggtcatggtcgagtgacttcaaggttactatggtcgagtgacttcaaggtcactatggtcgagtgacttttcttcttgccaagaccgagtaacttcaaagtcacaatggccgagtgacttcattcttggtaacggttgagtgacttcaaggtcaccatggccgagtgtcttttcttcttgccaaggccgagtgacttcaaggtcaccatggccgagtgatttcattctttttcatggccgagtgacct

SEQ ID NO: 74448 - DNA, 1189 bp, Cannabis sativa
aaaataagatataataataataatcaattgtacgtgatacttgaaataatatttcaattgcccaacccatttcataggtggcactctacgattggttagcgatattcctcaaatcttattttatttttaagttatatgggatctactacttaattacaccaatagtggtatgataccaaagaggattgtcttttagcatttctcataactaaaatatcacattttttatactttttttttttaattaagatatttaaaaaataataattactttttttaaaacatattaattaataataacagaacaaatgttaaaattcgagatgaaatttaagattaagatatagatttgggaaatacaatacaatagtgaagactataagtaaactacggtaatagcaaggaatgagatacgatgatgaaaataagtgagatataatgagatgacaagtgagatacaataattgcaatagttttgaataatcgagatataaaaataatatattatagggaacactgtaatttttttgaacaccattctatttatttatttttataaaaataaattcatttaacaaagtaatttaaaatactacatataataaattttaaacttcttcataaataatttcaaatattaattaataaaattgtgcatttagtttttaataattagaatattaataataatataaaatacgataatatatttataattttactatacattaaaattatattttgaagtaactatattataatactgaaaaaaaattaaattagcttagttataactaactaccatatacaaaccaactttgttcgtgaagaatttaggtgattttaatcaactaagcgttacaccgaccaaaaagagctcattatgggcaataaatattacactacaatgtataagttatgcccattaaccaattacgctatggacacaaatcttctttcccacttcttctcagtctctatgttcctatttaattaaaaaattgcaactcatttaaatgtcacatttagagatgaaaattgggcggttaatgtacggggaatgcaattcccgctacttatttatacccccatcccggctccatccccatctaataactaacggattcggggtaagggaatattcatcggttatggggaacccatcgggtatccattaaggtaaaatgaa

SEQ ID NO: 74449 - DNA, 1037 bp, Cannabis sativa
  modified_base (48)..(76): a, c, t, g, unknown or other
atgtgtttatttcatatcgttttataagttcatatttaggatgttaannnnnnnnnnnnnnnnnnnnnnnnnnnnnggtaaaataattccaacaagttaaacatcaaaaatgtagcaagtacggtagttcaggacacaacaaagctacttaaaattggagagattatagtattctttgtttgtaatctttgtaggatttaaatttgtattattttaaggattgaggagtttgttgtgttgtttttttttcttgcattcacaatgttctattatgcttgacattgttcgaaagttgtttgattaggattgtttagtttgtttattatgttttttcttgtgttcacaatgttcgaatattcttaacactgttatatagttgtttgatggtgattatttagtgtgtttattatgttttttttcttgcgttcacaatgtttgattatgcttgacattgttcaatggtatttgtttaatatgtttattgtattttttctcaatattttttacaatgtttagttatgctcgaaactattcgatactgttcgataagtgtttgataatgtttaattattccgacagcctgatgacggagtgaatgagctaggaagactgagtcttgactagctgttgtagcctacatatccacactcaactggcagtaggtaccaattgtatgctccagaagatcggaaacaaacagagctagatcactaccaactctggaccgaagcctttttaaagccaccaaatggtcaacaactaaatggttagcttaggcttctgagctttagtttcatagctctatcttgcaccgaaaggcaagtatattggccctttgcctaccctcatctgactctgtatagaatcacttctggaagagttaatctgctttctcagttggacactgtactcgtttgtctgctcaactagcctgattgagaaggacagagtggttggaggaagagttgaacaaaaaggcatcccttctagataattgctaggttttggtcttagaggaggatctagagtcccaagac

SEQ ID NO: 74450 - DNA, 1526 bp, Cannabis sativa
tattataacatatatattaattatcagaccattatattagattgtctttaaaatttattggtttaatattttttaaattaatatttatagttaaatttatttattacccattaaaaagtactatatatacatgtaatatttgttctaatattaaaaaaaatcatattgaaaaaatcagtaactttgtaatatataatgcaatgcagtttcaatcgcaattattaaattcaaaattacaaactgcatcgcacaatttagcaaaaatgcaaattacacccgcaacgcaaaagatttcaaactgcataaaagtgcagtgtgttcgaaggacacaatttagtagatatcaaagtttggaggcacaataatttaatacacaaactatcattgcattagtaaaattgaatgaaattagataaaagtctttaaatccaaccgtcttaatagcttatagaaattttttgaggcgtgaaaattttaataaatataatttcatacatgttaaagttaaagagtacaaattctaattaatctttaatttttttacacaaagtgttaattttaccataatttaacatctatacggtaaaaataattctatatatatttataattttttaaggggcttttttattagtacatatatacaaagttttttattcatttttacgtttctttaataaatatttcatttatatataacattgattttgtttttacaaaaatgcaactcatacacaatcataaaaagaagccgtacaaatactataaaattactttagtgttatatgattattatatatatattgttgtaatcaaacaaaacaaactcaaacctattaatgatcaattaatcaacaagtaattaaagcagcaaaccaaaaattaaacaagataaataaacaataaaaacagagagaaaagacacaaggatttatcctagttcagatctcaaatttgagtcctactctagctctctcccaaggagatttctccactatgaatcagtaattacaagctccaattatagtacaatgcactcaagaacaatcacagtcagaattgactctacaacactcaacactagagcaaacttagccaactctgaacttgatcttcttgcagcattcttgctcagactctctctgtttctctcttactttctttccttaaattgaatacaatgaagagccttttatagtgttagtagctgacatgtccagcacttaacaactcatgacatgtcgattattaactaactaaccgacttcttaaaacaaagaagtttgcaactgaaaataatagcttgacaaactatatttggagaaaaaatcggtttagtttaaactggattatcttccacatatatatatgtactttagcaaatctttctatatatacaatttatttttatacaagtatgcaatgttgcatttttatacaacatataattattattcatgattttttggctacttttaatgttttcatttagtcattttgctcttatttgattctttgtctttcag

SEQ ID NO: 74451 - DNA, 1489 bp, Cannabis sativa
ggaatatttgttcagggatgtttacacttttagtagaattaagtcgaaagaattgaaacagaggttaactagtgtaccagtgttaacattgcgagataatgaggagaaatttgtgatttagtgtgacacttctaaacaatgattagattatattttgatacagtccaggaaagttattatctgtgcttctaaacgattgaagaagtgtgagtaagagtacgccagttatgatatataattgatagcagtggcttccgccttgggagtctgacgcttttacatttttagtaaaagtgcaaagtttgtacggattataggagcctcaaagactttatcatttggaaaaaaaaattaattaggaggcagcgatgatggttagagctgaataaaaattataacagtgtgatttcctaccactctatgaagcaaattataggcccagcagagtgacttcgaattataggggtacaaagaaagatttggaaccgattcgagaaaggactttttgatttcgtctgaaggaattttctgatatgaagttaaagtttgtgtacaagtcagataaggatatttaatagaaggttctaaatgagttttatataatgtcatactctttacacctaggagcaactaagatatttcacgatgttaaagccctttgctaatctatttgttaagaaaataattcaaccttgtgatgcttcaaaagtaattatctcagattgagatttatagttcacatctaaatgctgagagagtctgtaacaagcatgtgtaatatattttgaggattcctgaaataagcataatccgctgaatgagttttcgtataataacatttattagtgtactggtaatgtggcactgatgcagtttaaagattcaagtttgtatgtagatttatataatggatgaaagagctatgctgatccaaagtgtagagatattaaattccaagttgggaattttatctttctttaggtggttccaatgaggggaactcagaaatttgaaataaaggaaagttaagtcccagattaatcagtccgtttgagtttctggaaaggagaggttaggtagcttttcagctagccataatccctaccttacttggagttcataatttgtaattcaatgttaagacgtatgaggtagatatgattcgtataccgagttacggaggtatggaactttgaataaacttgtcatagaagcaatagtcgattcaggttcaagtgcaagaaaagagaaagtactacgaaccaaagactatatcgttagttaaagttctgtgccggaacaacaaggttgaagaagtgacttgcgagttagagtcacaaatgcgagagcagtatcccgagatttttagataaatttcgaggatgaaatttgtataaggaggggatagttgtaatatcacggaaaataaaatgatatttaattagacatattttattaaatatgcaattatttttgtaatgaagtaaga

SEQ ID NO: 74452 - DNA, 1084 bp, Cannabis sativa
aaatcacgtaatacgcctatgtttagttagggtgttacaaagttgatttgtacgagaattgcccattactttccaaagtccaaatccatctatccgtaccgtggcccgatggattgcctccttttaagatggttgaaacagtctcttggtcaaacagactgtttagcttctgtaagtcccactctcctctagataacaagagttcagtcaccctagtgttatccataaacaccacatcctttggttttggaacgaaacctttgcaatgaggaatccaaggatccctccagatacaaatatctctcccattagcgaccactttacaggcccattttctcataattgtgttggcttttacaatatttttccaaaacaaagaatcagagtccttgtagttacaactgagaaaatcctttcccttgagatacttagcctccaagatcttgcagcacagagattggcacccattcaaaattttccatccccacttggctaagaaagcaatgttcatttccttagttttctgaaaaccaagaccccccaaggacttggggagacaaagcttatcccacgctcttaggtgaagaccatggttccctttctcaaatccccaccaaaaatctcggataagaccatcaatcctattaacaagccggttagagagcttagtagtctgcatggcatagattggcaaagccaagcccacagacttgataagggtcgcctggccctccttggataaagtttttgccttccatccttgcattttagaggtaagattgtccagaataaagttgaaatcagcatccttttgtttagatctaaataggggaagacctagatacttaacgaccccatccggagagttaattcccaaggtgtccttaataccccttctcatgccctccagggtattcttgccgaagaagatagacgttttgagtttattaactttttggcctgaccaatcacaaaatttctcaaggcagctccagtaactttgagcttctctcaaattggcacgccctactagaataagatcgtcagcaaagaaaatataggaaaggatcggaccacccctact

SEQ ID NO: 74453 - DNA, 1409 bp, Cannabis sativa
  modified_base (824)..(842): a, c, t, g, unknown or other
gggcctccaacaatgacttgcaaatgtccatctaccggtggaggtagcaaatcttggttgttgtcgttcctctaaccttggtcggtcttaacataattttgcatatgtggattgtttttctttatgaggaattaaatttcccgcttcaagttgtaacattcattagtgtcgtggtcgtagtctccgtggaaccgacaaaactttgtcatgtctgttttgttcgcatctttcttcatgggcccaggcttcttatacggggcaagcgactgagttgccatgtatacactttctatatcttcattcagaatggtgaatgcagtgtattgggcatgattctctcggggagcttgttcggatttaccagtgacctttcgtttcttcccattcccttgcttgtggttgttactggaacgcttaccacttgagcttgaattgtttgggtagtgaggaagttgggcagatgttccagtggaaggagcctttgacttgccaggctttttctcacattccgctcgttgaatggcttcttcgagcttgatgaagccttctgctcggtcaaggaaatcactcattgagtctaccagcccgttcttccttatatctttccagagttcactgaggactttgatgctccccagtattgcggataagtttccatccttagttacccgtgaaactttggtcgcccccgtcatgaatctgctaatgtatgcccggagtggctcacctggtcgttgcttaacttcgaccaagtctcccaaatgcaatgggagttggcataaggaggagaattttgcatggaattctgaagagaaggttttccnnnnnnnnnnnnnnnnnnnagccaacttgaaataccattgcttagcgacttccgacagagtggaagggaagattctgcagcatacatcccctcgtaccccttgtaaatccatttgcatttcgaagtacttgagatgggaaagggaatcttctctcccggtgtacatcttccacgtcggcattttgaacttgtggggcaccagcaggagagaaaggagttctgcgtgctcggtccaactcaagatcattgtttctttgtccagccatgccgtgaaaaatgtttttcagttcatctagctgagcctgtacagctgggctgacctgcttggcattctggtcaatttgaattacatcagcatctttctgagcgggaatttgagtatgggttccaggatgggagattgtcgtaacattctgatcgtatgctcccctccttctattcagatcattccttaggtcatgggttgcgcccaacctttcgaatacagaggtgcttggttgtctcagcgattgattcacttggttgacgggtggaatggcaccatttatctggttggaaccatcaggtatgacttctcccgatgaat

SEQ ID NO: 74454 - DNA, 686 bp, Cannabis sativa
tagcaaaataattataataataattacactttatacattacgccattgtgtatatactatgccactacacttagtatcactttattcaatatataatgatgccactataatgaatgtctatattgcatagacccacgtgttacactcatacgtctattacatctatatagtgtatacccacgtgttacgctcacacgtctattaatgtctatatagtatagactcacgtgttaagtgcacacatctattaacatatatatagtatagacccacttattatactcacacgtctattaatgtctatagagcatagactcacgtgttacgcccacacgtctactttatatttaaggccttactagggttcgtctcggttatagttaccgagtttaatctgattatgtcttactcacataaccctactcaaatatacataatccatacattatgctcttacggtgatttatcatgatgatgtttattaggtctaacctagttatgtcttatacacataactcttgacatgtatacatatattcaacaccttcaatatatactcatacatatgaagtttttagggtaataatcctaacttgaaaaaccaattctttactcatacagtagataatattatgctcaaaataatgcatattcagggtaataaccctaattcgcaatatatatat

SEQ ID NO: 74455 - DNA, 999 bp, Cannabis sativa
  modified_base (39)..(67): a, c, t, g, unknown or other
tttagtcacaatactttgttgtgattaaaactaaattannnnnnnnnnnnnnnnnnnnnnnnnnnnntagtcacaagtaacattttgttgtcactaaagttacatttagtcagaaaaaaattatcttgtaactaaaaaattatcactaaatgtaacagtacttttttttgtatatgctgcaagtttcaaaatcgagcagcaacacgaataacatgactagtattttattgtctaacacctacatatcgatcgatcaattaaaaaaaagaactcaatcgggcaccaataatacttaacttataatgtcactcatactgttattgttattaatataatttaatttaatatcgagttttttatagtttaattataattaacatatgtgtatgtgcagatatgatgtttcactatatctcaacacaatgggacctaagtatgtattgaactttgccaagcagtgtaccaaattaaaggttctagttcatgtctccacaggtatatatcatcatttaattaattaaagcctttaatctaatctttaattatttaattaaccacttctaattaattattaacagctttcttattatttttatttttttaaaaaaaatgattaagtgtgataaaataattgattttgatagatcttactatcttaggtacgatatatagagtggtccaaaaatatgaattaatatacaactattgaaaacgaaagcatgcatgcagtttataaactatataaaatattatatattatatatatatttatagcattaaatattgccattataaactgtcacgtggcaataatctatctagtacacccaacacatcaaatcctatgtctcatattatttaggtttatttcttacttaggatatatattagtcattggagtaaaaaaaaagaaaaactctattgtggtttttacaccacattcagaaatatttaatttttttttacttttttatcatggggtgaatttttataaaaaat

SEQ ID NO: 74456 - DNA, 1163 bp, Cannabis sativa
gaagaagaagaagaagagctagaggctttttaatatggtacttgtgtttaggtaaattttcataaacaaaaaagaatgtactatatgtatatgtatgtagttagttgtgaccgttagtatagttaagacagttagttagttaagctctagagtcggttaattctgttaagtgtatgctgttagtttcaagtgtcaaccctattgaactagtctatataaagtctctgtttttaccacttgaaactaagacataacaccattcatggtaaacattgacattcattaataaagagctatattcagattgattcataagcattgtaactggttatttggttgtgtggcattggagttggagactcaacaatgtatgtagcgcgatctcaattacaaaattgtgtttagagaattccaataaatactagtttttttagatgaacaataattgatgaatttctcattgagaacctacgatatatactaagaatttggtatgtagtgtgatctcatttcgaaaaaaaaatgatggcgatgaatcgaagaaaatataacaaaaataatgagggcatacaataaacctaaagaaaattcagtaaggccacaagaattttctttatgggtaagggctttgattaagaaagaggatgaagtaaataaaatgaaaaataaaacctccttataagagactaattgaacattgtttgattaataatagttattgataaatagcgatggacttcaaagaacagatgaagggattgctctcagaagttttctaggaaaaataaaatcaccaaaataaagggatattcaatacgcataaaggacagttgattctctaaggtaatgagtaaaaagtccttttaataaattaaaaatactttttaggatgaaattgttatatctatattttgaacaataaataataaacatgtattaaattccacaattaatgagctaatggttccactctcattgaagaatctagatctaatgtgtacatttaggagaatgctggttaacagtaaagtaccgctacagttaaagcgaccagcaatagagtaaaatacttaaagatcatctcagataaaagagtaatattttttcttcataaatgaaggagtgataaaggcacaacttaggagagatcatctcgcatgata

SEQ ID NO: 74457 - DNA, 1228 bp, Cannabis sativa
  modified_base (26)..(39): a, c, t, g, unknown or other
  modified_base (191)..(200): a, c, t, g, unknown or other
aaacagccagagtgacgtactcgtgnnnnnnnnnnnnnnattctgtgggtgtaagggcctaattgaggcttgaagcagggacattacatttattatatttatggcataaagatatatttattatatatatatttggaatattttttaatgggtattattcattgatgattattaaataaatttaactatannnnnnnnnnttaaaaatattaaattattagattttaatctaatgatgaataataaaatagaaattttaatattatgcttagtttagctacttaatttaaaaaacatcaaaaaatataacactatatcaaatatgtttagatataaaatatctaagtcaaactcaaccttttttttatcttttttttttttccaaaaaactttttttcttaatttttatcaaccgattgaataaccccaacccatataatgtaaaaaataagagactaaactaattagatagaaaaattaagcttaaaaactaaagtttacctattcataggtaatacacattaagagtgtacccatatatatttatgccaagacttaattactttgttcgcactagctttgatctataagataagtgcatcgatatggggtactaaggtacttagcactattatgaagtgacgctttataattagttagcaattccttataatctttattaaaataaaatatgtggaatctaatattgaattgcatcaatctaataatgatattacacattacaagagtgctagacaccatgggtaccttaattagcattactatattgggcaccatttgtgcctagcacattttataggcggcgccgtacgattagttaacgatattttctaaaagttattgtcttaagttatatagaactcaatacttaattacactagctaatagagatatgtcactggagctattggtgtttggaagaatttatggagtttaaaagttttccctaaagtcagcaacttcttatggacgacggcttcaggctcgttatcaacttgtgttcaattagaaaaaagacatgcatgtttcagttaacccaacatgccccttgtgtctcactacaactaaaactatttttcatgcgttagttgggtgtgttcatgctcgtgcctgttggaacaggacaagtgcggatgtcagcgataatatggatgacgatttcagcaattggctgctggagctgcaatgccgaggaagagaaggcgag

SEQ ID NO: 74458 - DNA, 1070 bp, Cannabis sativa
agataatttaaaggaaaagcctagaaggatttgaaaccaactatttcgtagcttgacctcttgtcgaatatttctttgagtttgttcaacaagtacgaaggttttcaaggtattactcgtcctacacttattttgaactctccgagattcttagacaagtaatggagaatattctatcacaaattttaaagttaatttttctagatggaaatcacaatccttaaaatttaccccaatatctcataaattaattgatatattcatatcatcaaaaattagatatattcagcaaatcaagaaaatatatctaactttaaatattatatcaaagtaaaacacgttttaagattgttgtaaatataatattgaagaattatttcatatactattttttttaattttttttttcaaatttacaatttggatttttaaagtggttgcagcgctggttgtaataagggtttctatgtagtactattaataaatatggatcgtgttgtgtcgtgtcaatacttttaaagggtaggcccaacacagtctggctcgtgccgtactcggatttgtgtcgtgcttcactcgtgctggccaattttttttaaatgggccaacccattttcatattctgactcgatttcgtggttcgtttttcacatttatttttataataattaatgagtccattactaaaatatatatatatatatgtttctcataatattttacagaaaactatattaaaaaattaaaattattataataatttaaatattttcttataaatattcaatttttgtgtcatgttttataattaaattaatatatagttcataacaaaaaaaaaatatagttttaattttatatttttaaaaaaatttaattatacaattataatatttattgttattatatttaaattttattattatttttaatttatttataatgaacaaatatttatgtttatttttatattatatatggttatgtaacataattcttactttaatcttatttttaattttcctgttaactttaacaaaatataagattatttaatagaatattcttaa

SEQ ID NO: 74459 - DNA, 779 bp, Cannabis sativa
ttttttttttttttggttgttttgatgtttttgtgaaggaggtaggtagctacagtacgtgagagattatgggatgacgaaagacatactttgtgtttgtgttatgtgtgtatgtacgtacacacactacatgactataatatatatttatattttaacacctatacgtcatggttgagattacattttggtagagttgcccaaccataccaatattggatttgattcattaattgtttattttatttcatattttgtgatttactttcaaatgagagtatattatagggaagctattctaagcaccaacttgattaatcaataaataattttttcagaacaaataatgtcaactaccattttctaatatgtgggtgaaccaaacacaaacactttaatttcttcagaaaattttgggtcatcaatgagaaacgcccaaataattttggtataaatgaagtcaaatttaccaacttatactgtatctatactatacattaggacacatattcctataattaagggtttattggcctcaaatttaaagatgaattattgaagcccaacatgacatggatggaagtgactttccactataattattaatcttgtcggattttattaagatcgatcgtgaatttatgacaagaattatattgctaatgtatgttgaaaaggttattttattttgcccattccttgaaataagggagttaaatttgacagagcagaaatacatgagattgctcctcgtttggcatgcaataatgaaatgtata

SEQ ID NO: 74460 - DNA, 1012 bp, Cannabis sativa
tttcattccttcccaataattttattaaatctgggttgaatcactgaaagaatcattctcatccgtttcaactaaatgatttctcatgtcatacaatacaaggctactctcatataaatcctgctaaaatgaaagtttagtatgtaccataataaggctctttccgttcttcatttcttttcaaggaaaatgagggtaactatggttgaatcttattaacaaatagatttttctcaataaggatttgatggcatagaagcagaattacactctacaagtacaccgagcttagcaagagctaacctctcaatacagctggagctccaaaactcttttacacttgcagcctttttactttgaacttttggtttcgtgttccgcaaagcacactgtaaagatgtataatatatctatttaattggttattcactagttaaaaattaaagcttcaactaatagcatgagaagacctgattggaagccttttcttcagtatctttttatctctaattccgtcatatagagtttcataaacagaattaagttatatgattcttcttcagcaaatcttccacaagaatttttggcgctgctatctcccttttatcagcctcaaagattgtatccacaacctccggaacaattcctttgtgcaccataaggtggatgatgccaacagcctcaggaattctatgtttcacacaaagactattcagcacccttccaaatgtcatcagcagcgaaagaaatcccttctcaatcttttcaataaggaaatcataaccaaagtcagtattacctactctcaagaatctatcaatcatgactcggtaagtgtaactgtctggattagtgcctttttcacccatttcactaaatagcttttgtgccatgccaaccttcagttttccacagaaagcattgatcataatattatacgatgaagttgtatgagaaaccttaaattcttgttcagctcttctaaatagtttgtatgctccatccaaatccc

SEQ ID NO: 74461 - DNA, 1086 bp, Cannabis sativa
ggcatttcttggtttaacggtgttgttattttccttttccgttacctttaaccgaggctactgataacattatttgattttataataataaataattgctttttacgagttgctacgtgaataaagcctcaaatattgagaatattctagattacgaacgaactatacctcaaattttcaagatctctcgaatcaataacccaaacccattcttctccaatgcaaactatcaaacctcttcttccaaaagctttaaatgtcgtaagccattgcctaaatatcctgaaacactcttcctcctctaagaaaggacttcgtttgatgtttatgaagtattttgaggagggcatacagaaagggaatagaggaagagggttggttttcacccattacatgagtgttaaaatgggaaaggaaattgatcattttgatagtgacgaatatagtaagaggtaccttatctctacatttgaatttcaatttatatttaatcaagagtagtctttctcttttctatttgcccaattctaagatgtggtcgatgctcacatgtgctagccttgtgccacaacctgaacacccgaaatgccggagcgaccagaggtggaagcagtttggagggtcgtagaggaaaacttccttggcaagaagatgaagaggtcggtcgtagttgacgactccaaggtcatcaacgacattgcctcagacttcgatgttgcacttttgggaaatactatcgttgtcactcaacgcaagagcaagaacctatggctccaacttaccttcttttccttccattcaattaggtagtctttttattttctcaaatcaaaagccctaattaaacaatggtgagttattctaatagcgtctttgttgttcaagattttttatttcttctttgaaagtttgacaattgagctttatggttatttgatttcaggaatggcatgtgatattccttaggtgactaagtcatgaatgtgtttgttcacatcatatggagttatgtttttagtaacgcaaccccctttcaaagttaaggggatgtgggccaacataattttgcgttacaaaatagttaaa

SEQ ID NO: 74462 - DNA, 1005 bp, Cannabis sativa
gatcctaacgtcaccttcgaggtaaaattaatagagtcgagggtgcaaactatctcgggttacgtaggcgactcactaaggacctgaggcattgagtataggcgagactgccgggttagatcagtacaaaccagaaaatttagttattacccacatgtgcgtcttacaagcgagatctctgaggggaacagtggtgagaccagtacaagtggcttgactagtataggcacttggagccttgagcacataggccaggggcaataatcccccttcgtgattatttcaaggactttataaaccaccttaggctttcccatttcaactgaatcccgtctcctacagaatcctagcaagtttgagggttctgtacaaaatcctgaattgggagtaccccactcccttggaaatagagtatctttactccgttaaagttgttccaacgaggaagaatgccgcatgaggcttttacgatctcggcactcactccggtgagcacaaaatcatcgtggatggatttgccaaccaaacaaaacaatccttcaaggacaacttcttttggacgaccgacctctccccaattggcacaaacactttccttataattcgtaagtgattgtttgcattacacttggttaaattaacccatgtctttttattctaagttatctgactaaaattttgttttatgttcgacaactatcttaaaaaagtcttgcccccactcctgagacggtcgagtgacacatgctcttgttaactctttctcttacggccttaggtcatgtgcttttcttctaaatgaggtaaatctgaggtctgtggacctcctgactgacaaggagtttacttgtgattacaagtgtcccaagtattcttcttggcaacaggttcctatcccaaacgaggagaaagctcgggatcacgtggctcgggcatggtgccttcagaacactgcccctagagaagccagtgaaggagcatcccgaggtaatcaatgtggttggt

SEQ ID NO: 74463 - DNA, 2075 bp, Cannabis sativa
  modified_base (52)..(58): a, c, t, g, unknown or other
atgatttacattaagtatacaaccattaaatcattctgaaattgtattaccnnnnnnngaattaggcaacgactagtaaccagaaattgagataccccttgaaaattagaatgattagccagaaccctctcaccgaaatgagaatgggaggcaaccggaaattgatgaacgagaaatttctcatgacaatgaggaagatcttgggactcaacctggagaacgtaggtcacctgcaagaaatcaccagcgtccttcccaaacccatagagcgaggaatggtacagaccttaatgggggaaatacgacaaaccacactcagggggaaagaatagagcatgaagaagcaagtgtgacctcgaggtggtcaaggacccatagtcgatcaactcgaagaagagaaagtactcaatgagctaatgatcgagaaagcatgggaaccaataaatctgcgagtcactcaaagacgaagtctatgagtaggacgcgatctatgagtaagacgaggtttgtcagcaattactcccgaccggatttgcgagagcacttgaatcgaaagaaacctgaccttcgccaacagctcagtccaaagcaagagggtcctatccaattgcgaataaacgagctggaggacaagttcaggagatatcaagtggaggagctagggagacaatctggaaacaactcaaatgaggagcttgactcgtatcatccagatatcatgaaaactccttttgcttcgagattcaaaaacctgcatttctcgtcatatgaccgaaaccactaatctgatctcgtatgtgaacaactttaatacaataatgcaagcgagaaatgtgacgaacaatttacgatgtatcttgttgcccacctcgcttgttggagccgcgagcagctggtttaacaagtttactcaccattcaataacttctttggagcagttgtctagggatttctgaaatagttccaggctgctagggatagaggacccgaagtggcctcgctaaccaatataaaatagcagcccggtgagacacttaaggcatacttaagtcgttttagcacggctgcagctagggttaggaatttggatgacagtttacaacttacagccctttaggcgggtatctctactgatccatcaatcgcgagctgtgggacgacttataaggtcgtctagtaagaaacatcactgagttcaacgaaagggttcaggtattcgtttgaaaagaagaagcacgaaaggaaatgaatttgttgaaaacaagctcgagaagtaaacgctgcaacatttcaacaagtactgtttccatgagaatcgataacttggaggcttctagttcaaagagaaaggatggttctaaggaaccgtcaaaaaataaaaaagaaacataagaagcacgataagtatgtgccagtgtatactatttataccgagcttaatgaaactcaggagaatatttacctcgcacatgagcaaaaggttgccttcggcaagcccaagcccatgaggaatgcaaggagaaaaagagatcctaacaggtattgtaaattccataagaatgttgggcacacgatcgaagaatgtcgccaattgaaagatgagatagaaagtttcatcgctcgaggccactttaaacagtacgtgaaaagacagggccacggatacaaccagcccagtctgccccataacccaaaaaactaggggttgcaacctcttcctggttaaggggagggccacatatcgcaggggaaagcaataacgcccagaaaagatatgtaaaagagataaagaatgagcagtcggcatttgtcctagaaccttccaagaaggtgaaaacagaggaacctccaattatattgacggaggaagatgagaaaaatgtgagataccctcacgttgatccattagtaattaccattcaactcgccaataaaagaatcaagagggtgttagtagacaacgggagctaaataaatatcctttataaggaaactctaaggaagatggggatcgaaaaagccaaattgaggccttgtatggtaaatctttacggattcactggagatagcattgc

SEQ ID NO: 74464 - DNA, 727 bp, Cannabis sativa
caatgtacatgattgctgaaaccatggttccccatcaatttgaacaggaaatgcagcaagtacctgtatcttgattgactgaccttgtgcaagccttggaggccgagaaagtaccacctgttatcataccaagatacaagttgagaaaaagatccaaggcatctgagtctggataacagaaagcaagctaagtatgttgaatccactatccattgctatcttctttataatatgttgattctatattagtaattatatattgatatataattgaatccactatccattgctatcttctttataatatacgtacaatttttcaacatcattaatattcatttcagaacaaaaagccaattattgctctccaattctctatatttatttctctttctttctttcattaattctagatttttggtttttctcatggcaaagccaggaaacaagatcatacaagccaaattggtgggtatgtcgcaccctttatttatatttttgtataacaattcttaatctaaattcatttttgtaaaaattttatatcttcaactacatatatgcaggttcttcttggggacatgggaactggaaaaaccagtttggtattaagatttgtgaaaggccagttctttaatcatcaagtaataaattcaaatgaaaatatatattccattttttttttctttcttttcttttattatgaatcaaaatcattaattctcct

SEQ ID NO: 74465 - DNA, 1035 bp, Cannabis sativa
acacactccaaccgggagaaggaatacattcattgcataagtaggtaacgattgtacaaccgtttttatcaacacttccttacccgcgcgtgaaagaaatttagtgtcccaactcttaatcctctttaacaccttttccttgagaaaccccaacacatcattcttattcctccccatagtatttggaagtcccaagtaagagctattttcatctgcttcgatcatgcccaataccgaacatatgagctgacggacatccccccttgtgtttgagctaaagaaaacagatgacttcgctttgttaaccacttgaccagaagccaattcaaacaatcggagtagctccataacacggctagcttcttcaatcaaagcttgacaatacaagtaactatcatccgcgaacaacatgtgagaaaccctcggggccccattagcaacacggcagccatgtaacaactgattccgttcaaatctcctcacaagagcagaaaaaccttcggcacaaacaatgaacaaataaggcgacataggatcgccttgacgaatgcctctagacgggacaatcggccccagcttcctacctccatggatgatatgataccgaaccgaaaccacacattgaagcacaagatccacccacttctcggcaaagcccatccttctcaacatatccttcaaaaaccgccactccactctgtcgtaagctttgctcatatcaagtttgagcgccatatatccttgcttaccacttgttttcctttttagataatgcatgacttcaaaggaaaccatgatgttgtctgatattagtcttcccggaataaacgcactctaaaaatcagagacaacttgatcaagaaccttctttaaacggttagccaaaactttcgaaagaaccttataaaccacattacataacgaaataggccttaattctcccatattacaagggctactctttttcggaattaataccaaattagtatcatttagaccgataggaagcacccccgtatccataaactcccgaac

SEQ ID NO: 74466 - DNA, 1558 bp, Cannabis sativa
gagagagagagagagagattctgacacttagaaagtctgaaatttctagcttagaggcggcttatgcaacttaagttttcagctagagatttaggcctttatataggaagccttaaacactaggtttacaattcaaatcccttaataatagcaaagttagttagatatttacaaaaaacaaaaatgtccttagattctagatattatttagccattctattaggcttttggtggccaattcgcaacccacctttgatgtccacgtgtaagagtttcctatgggacctccaatgcaatccttggctagccaggactttgtgcttgccaggctggccgaccatgaagctgtccctgggttggctagccatggggccgaccaggggtggttggctagctcctaaaagtgagttggtctatcacttggtcctcgtttaaataccgaggtcttcattccaaacatcctaatttattagtcatgaaatctgttgagttcattaattattttaaataatagaatcaaatagatgtgacttatggaggattctaaattaatcaatctcaaaacaaagttttgaatgaacacatatatttaatattgagaatgttaaatgattaattaggcaatgtgaacctgaaagaaataaaagaattaataaattaaatatattaaaatctaattctgtaattttatccaataatgatgtgatgctctctgagatctgcaactatattatgcagagggtctcgttcatatgacttagaatgaatagtccaatgagatataacgtctatatgagttatggaataagatacacttagttttagcgcaagtggaagattattgggatttatgtcctaaaagcaagtaattaataaatagtatattagagaatatatgaaatacaattataatttaaatgatatattaattataagagtataattactaaatatctaaaaattccttattcatatagagaatgtataatcttgtaaggatgtacaagagaattaagattataagatatgaataaaataagtcggtagtgtattaaagttttgggaatctttaatatagaattgctaagtacggtttactatacactataatttttgtgtttgcaattttaatttagatcacatatatagatggacatatagtaaatgtactgtgtataattaaattatgcatgactgaactaatatgtaatagacatctttcattaacttgtcgtttaccaagaaaagagttattcatatcacaaagatgatcattagtagattagcctgaatcctaagtatacatgacctcttatttgtgttcattgtattttttgattcgctcgttaaaatttctcagagaagatgattcttacaatttctattttgggagattaataacatgagtggttgaaaacatgttacacaattatggaatccaagctttcctaactgatcgaatattagttctattatagtattaattctaggagtggtaacagttagatccaaatctataataagttatagattaactattcacattgaattaatggta

SEQ ID NO: 74467 - DNA, 670 bp, Cannabis sativa
gtgttaaatatttttaacctatttagttactactttttggaaatcttattttgttcccatactaaatcacattgtgcaggtgttttggatatgcatttcactacttgaaattgcttatacagttgcacttttagtgggagcatcatccggcttcttgtggagcaaagttgttacggtaaatgtttgagtaactagtttccttttttttttgacatgaaattgcaacttcattaaattagcaattccaatacaaaatagtctgaaactcagagggaataaaagtcccaagaatgctgcgactagataagaattgagcgtgcctagcaacatagtgggcagctcgatttgctgatcgtctaactaatttcctttttaaaaaatattactttttcgtttttcttgttgatataatggcaagggctcaatggtgatagtactatgaatttcaatgtttaggtattgggacacacaattttggcttcaatactctggactaatgccaagtcagttgatttgagcagcaaagctgcaataacatctttttacatgttcatatggaaggtaagtaactatgctcctgaacttagctcgtttgtttgtcgctcattcttgggtagtccctcaattttttgtgcattggttcgaactgcaattatttaggactcaaatc

SEQ ID NO: 74468 - DNA, 1069 bp, Cannabis sativa
  modified_base (124)..(128): a, c, t, g, unknown or other
  modified_base (1017)..(1044): a, c, t, g, unknown or other
actaatatatatatatatactatactaactaaattatatactaaaattaaaatatatatataccacgacaacaaaattacatacttgtatgtaataaaataaaactaattaaatattatttaannnnnataatatatcatacaattaaaatacataaaaaataataagtaaatatatgtagcatgctaataaaattatataaatacataaaaatatttgtattatgctaacaaaattatatatcactattatacatagcaaaataaaaaataaatatcatctaaaaataataatataccatacaataaaatagagatatatggtacaataaaatccacaataactaaaaaaatcgacataactttcaaataaaaaatattttaacaaaactaatatagatataccataatctttaaataatttgcttctaattctaaaaaaaatatgacaaaattattgattttttttatggcaaaagactatataaataataaatagtctacaaggatcatttctttacaagttttgaaatgagaacataaactaatatagttctatcatttgtggtcatttgctataatttctcttattaaatattctatttttgttattttatagtttatctatagttgatttatagttgtcagaagattggttttgtcgttgtttttatataattttatagttgctttataattgttgtgagatcaatttctctttgctttttatttgtttattactttttatttgaaaatcgtatttttgtaattttcaaactttaaaatcatatttttttgtaaataaaaattttaaatcgtaaaattagaaatcaaacaaaaatatatatatggatccaagagatttcaataattatgtcaaatatgtaaccatcatgattacatttatttttagtcattagatcactattgaatagttttaattaatttgacaattaaaatattttaattaattaataacttgtaagttgatagtaacataatacagtagaacctctannnnnnnnnnnnnnnnnnnnnnnnnnnntctaatttgttataaaaaaatcaag

SEQ ID NO: 74469 - DNA, 1252 bp, Cannabis sativa
  modified_base (504)..(510): a, c, t, g, unknown or other
  modified_base (1186)..(1190): a, c, t, g, unknown or other
cactctaccttggtttccaccggaaacttcttactttgccctgaaccaccagatgccgagataacctttctattctgatcagtggtggagtcaccaccatccctaccacacacagaagtaggaaaagtgggggttccaccaacactctgagtcactcggggctcctgaaggaattttacagcaccctcggctctcaaagccttttcaaccatttcaacatatgtggttgtttcagtggtagtgatcaccagatcatgcttgatcttcacattcaaaccggccaagtagttttctttctcgataaagtcagttggcacgatacccacaacgagcttggccagacgatcaaactttgtagtatactcattaaccgacatcccctcggtttgcaccaactcagtgaactcaatctgcttagcactgcggacgaattcattgtaatatttggagttaaacaactcccaaaatccttcccagggcataactgtgacgtcccgagtgagnnnnnnnaactcccaccacacgagggcgtcctcttagatctggaaaaaggcgcaggtcacccgatcattaccaaccactcccataaagttgagaataccttcaatcactgtgagccactgctcaaccttcatcacatcaagacctcccagaaacactataggtgcttgtttacggaacctttcatatagcggctccatacggttgccagcaacacgttgttctgctggcatcgttggaactgcaacgacctgagcaacttgtggaggaggcacggcagaaggaccttgctgcctcaacctctgaatttcttcatcctgctggcacattcgatcttgcatttctacaaacctctgctcccaatccggaggaacttgtggtggatttactggacgaccaccctgtgctctgccacgacaacgacagggaccacggggattcttgggattttgatttccctcaccgcctccagtctcaaccatgttaccctgacttcttgtatttcgtggggcgtccattttataggacttagcctgggaacccataagccaggcaggttagacagcgatcaacaacttaatactgctcttatgaacttaaaggcaacacacttaaaacaaataattataatctaatatgctccttgacatgctttcataatcatttaaaatactaaacaagtacnnnnntactgaaccgtgaaccgagcttttcctgatgaagattgtacatgtcttggcaagcttcggta

SEQ ID NO: 74470 - DNA, 847 bp, Cannabis sativa
cttgtttggacgttggcgaagatcaggttttttcttgtttaagcatcctcgtaggtccgattggccatgacagctggcggatctcgttccacccatagaccgtattctaccttcttgatcattgttgcaacgagttttctctcctccttgcattgatcgactatgggttatcatgtgcctcgtggtaacactcgcctcttcacaccccgctcttctctcttgggtatgattcgtctcgttcccctattgagatttgtgcgagctcctttcctataagtttggaaagaacgttggcgatctcttaacgatgacccatgtacctcaggttgtgtcaccatatttcccttatttctatggggaatttccggttcctcggttcctagttgatcatatggcatctcgccttcaaggtatcccctagtttccccaggttgtctttcctgagtgttttggggattcctttgggctgcgtcctgccccctagtttgtgagtctcaaggtttgccttacagttatctttctccatggttaggttaattttgggagctattcccttgtgccgcgctagctgcagctgcctcacgatctaattcagcattacgccggtttgcctcttccaattgaagcctgagttggcagttttctaattcgacaattggtatatactttgttggatcatatgcgccatcctcatcaactagattgggaagagacctaccattgttcattctagacccttcaagtctggtgcctagattctgggtttttttggagcttgtggtctattcaaatgataattcgaaagatccttggggactcattggctcttttccaggacgatgagtgg

SEQ ID NO: 74471 - DNA, 676 bp, Cannabis sativa
tgataatttggctaagtgttgggagagagagcaacacttggtattttggctaggtgttagaagagggattgatgtgtgaggacacaagatgagaaaggaaataggagggagagagtagggagagtgaaggagagagggagcggggagtgcgggagtgagtgagtgaggggggttgagagagaagaagagcgggaagaatgagagaacgagaggggggaggagaaggagagagagaagggaggacacccatgcggggggtggccgcggtgagctcctcatagggagctcaacccgcgactggtccccctcgtgcaggggtgtcttcttgtggatagtttcatcgtgtaagatagacaccttttattgtcttctttacacttttcatgtgtactttgacttttttcttctcattaatctggattctctacaaattacactttaacaattttttatggtcagcacttgccctctagtctataaaaattcgttcaagtattcttatagactaagtttagtgccataactgtcccattagacatttacacattggggtctttttgctatgaccatttatgaagaaatgttagttgtaggagctatcttgaccccttttgtgttgggtacttatcacattgagggagtgtcaactctgtgagctttcttaacctcttctatg

SEQ ID NO: 74472 - DNA, 749 bp, Cannabis sativa
tagccttatctcatggggatgcctcgttgggaatggagtcgagttaactttgatggcgagctggagcttatcttgatattgcttttactttaaaattgacaactacagtttctggtatcgagatgatctttctcgcgtgcatgccatcttacagcgagatagacgcctcgctatttgtcaccttgattcacccctctgtttatacttagtttgcataccgtgtcatatatgctaagtatttctattatatctcctccacgtgacgaggttaatgcctcgtcatgcacacttgcatttacatggtttctcgtcaagacataagtcaacaatcagtacatttttatctcgcataaagactgtttccaacccgagttataaacatactctgcaaattgtgcttttaacgagttattccatgtcaagtgtaattgcgattacgtgtttgagttctttattcttcccagcttgacacgtgtctttctctgacgtgctcgccgaattttgagtataacactaactatacgagtgtatgagatcatcgacaaagactaggaaaaagcttaaagtagcacatttcaaaaatctcatacgtagactagggatgcaaatttttcccaatgaacatgtcccgtagagaaatgcccctaatagggcggggattccccgtctaaatggagaatggggcagaggattattttttatctctgaatgttaaacggggaagggataacactccccaccctgacaag

SEQ ID NO: 74473 - DNA, 896 bp, Cannabis sativa
  modified_base (497)..(514): a, c, t, g, unknown or other
  modified_base (848)..(863): a, c, t, g, unknown or other
tttattatgttacagaaccggttatatttcaattataaccggcttgagttattagtttttattcatataaccggttatatttttagttatatatgagacatttatattggtggcttttccagcgacattgactttttcggcgacgttgacttttctgacgactttttcaatgaccgtgatttttccggtgccgatgacttttccggcgacttttacggcaaaagttattgttgttttacaaatatgggatttctatttttttttacaaaaatatggcataagaaaactcataaaatgtaaataaataaaaaaactcataaccctatagtgttaattatttatgccataaaaaagtaaattataccctcaattcccatatttatgaaaatttcccaatacaaaatgtatgagtatctagaaatgtcacaaaagaaaaataacacgtaaaaaaaataaaaacaaaaaataaatcatttaataataataataataacaannnnnnnnnnnnnnnnnntaataataataataaaatatttctaggacaacatatagatgcatgctcccctcaacaccaattagaggtctttggcaaggttgtcccttattattttacatgtttttgatttgctgtgaagatctatctcgactcttgcaacatgaagaaaatataggacaacttcaaggtttttctcttagtagatgagctcttttaatctcttgttttttacagatgatagcttactcttctgtaatgtgaatgagaattattgccttgctattaagcgagttttggatatctactaggggtgttcgtggtgcgggtagtgcggtttttgactattttttcnnnnnnnnnnnnnnnngcggtttttccaatttcccaaaccgcacccgca

SEQ ID NO: 74474 - DNA, 1061 bp, Cannabis sativa
atgagcggagcagcccaatctctcattctaaaataataaaatctactttgattatatgaagttgaagttgaagttgaagttagaagaagaagtaaaaaagagccaaagtgtatatataacactacacacaagaaaatgaaaaaaagtgggttagaataaggtcttctcaactccttaaaagagggaatacgaatcccataaagctaagtaatctacaccatatgatgatatgaatgatcaaacatcccactttattagcccctttttaaaattttatgtataaacaattcccatagtgttggtttgtattttagggataagactagggtaggcatcattttctattgtgatgaagaccatgattagggtttgaaagtggcatttatatatgcttttggtagttaacttctattattgatcgcagtcgatttcatcaaattaagtgtataaattgacaatgctcgtgtcaccatttgagtttaatacaatacgagtcaaaaaaggagaaaagagggtcccataatactaataatatatatgtgtctttagaggaaagaaattaaaagtgggttgcttttgatgtcgttttgttcttttattcgtttattctgggatgagaatagttttgagattggccatgctttcggtgtacaacaatcagatgaagatgccataaatatatgaattaccatatttgccctcaattttataaaaagatgatgattcatttcattttgcctctaattattatagcaacacaacactatgtcatatatgtgtgggttttgaaattatgtaacgcttgcttgactttggtaagctgtgaaaaagaaccttcattattatattttttgactgttagtttactatcgtgttctcgatcaatggagatttctcaacggaaatgattaaggtagattgatcaagttgtttgatatgagttgtatgatcatgatactattgttgtagccatattaaaaaaggaaaacactacaaaaaaacaactacgtttagtgataattttttagtcacaattataaattttttgtaactaaatgtga

SEQ ID NO: 74475 - DNA, 967 bp, Cannabis sativa
gatgcgattcaacttgcatttcgatgctaattcaatgttctatcaaataatatcttacacttcaattgaaattatgaagttatcgacctcaaatttcaccccaagtgagttacaaaaataagcttcaagttacccacagcgagtcttgctaggctccgaaaattaactatcagcttcagaagttaattttgatcattggatcatcatctacgatcaaaattagccaatttagattttttttttcatattttgaattaatttttcttattttcgtgggcctccttcacctataaaagaagagctcccttacttcatttttcacattcagaaaactacccacaaggttagagcttttctctctagtttctctctctaaaaattagagttttgatacttagcctttttctgtaataccatctcctaagaaataaaaactcaaagtagatgtagctccattactgtcgtgatacagggagtgaactacaataaatttgttgtgtttctctttttaatacttaacaactattttattctcgccaatctagtgggcatgagtggcttaggaatctatgtccaaacttctgagtcaacaatatgggatttaatttttcttatatagtcttcattgtgcaattaaagttatataatcaatgaaactcttatttaaatattttctcatcttcatgcacaacttaatttcatttgagaaaattatattttcagaggatcagaataaatagaaggtttagagtttattcacttaaatacatgtcacataaagtatattattatgtaataaatatatcgtaatacatggaaaataattctcgccatataatgaggacatatagccataattcatatatttgttatttaacaaggataatcattgagtttaagtggtacactagtttaaatgtcgatcaagtgagagaatataaatatattttcataataataaaattat

SEQ ID NO: 74476 - DNA, 748 bp, Cannabis sativa
tataaaaattattaatttatacttgatagtatataaattaaaataataacttgtgtaaaaaaaattaaaataataacttttaacgactatctaaacgcttaggtaacctactaattggtatctaaatatacacacataaaataattagtatccacttcgaattaaatactagttagtagtaaaggtatatataatgtatgtatattatgcttaaaaaatatatgtaagcaattaaaattaaaaattagttgtatataatgtaataattgagtgaaaaaaagtattaaatttcaataaagtattataaaaataaaagtatgattaatgttaaaaaaaattatgaaataatatctcaaatcattatttttctcggtgtcttttttgtttgctattaaagtttttttttttttaaaaaaagaatcaccatatcaataaaatatataaaaggaaaaatctataataataatgtataaaaaatttaatgagtaaatttatttaaagaaagttgtaatgattgtaataaataaatttaaaaaaagtttatcttcttttattacataaattatattggtcatatataataattattgttagatgttgagtttgggtatattattttttctctaacaaaattaatattgttgatcctttttagtatagatgtgtaaacttcaaaaaaaaaaaaaaaacttcaattggatcggccctacaaattcttacttttatgtgtttgcctcacattagtacc

SEQ ID NO: 74477 - DNA, 836 bp, Cannabis sativa
attacattttatcctacctatggtcccacgtcacgaaactcttcgctttccgtgtaggcatgcccatggttaaccgttggatgggatgaccttaggcattctcattgccacgtgtcacgatcccaattaatgtgggtcattggtatttaagctccctgatacgaaacgattcccttacttttccctctcattttcattttcctcatttcatctgaaactccaaagacccaaattcttctcccagatttttgcctttctttttgaatcttctaagtttcgaggatatttttttatctgtttgctttccgcggtacacgggtactcgcatattctacagacttaatcgtaatctatttttttaattacaacttggtataataactttaaaaaaatgctaaggcaaaaagtttgaaacgtcgagaaatcaataactcttattacaagaaatcaatagtacaaagtaggctatataccccctatacttagaacatttatacaaataaattgactaagtataaatacacgtcgagtactattgatatattgcgagtactactgataataaaacttcagacttttgccattccaagctcttcggattgcagtaccatcgagttctgcaagccgataggtcgcatggccaattttttcagcgataaggtacggtccttcccaattgtcaccgaaaactccatgtgctgggttttttcgtgtttggcatgactttttgcataaccaaatcccctactcgtagagttcgttctttgaccttagaattaaaatagcgagcagttcactgctgatagggcacattcttcagatgggcctgatcgcgc

SEQ ID NO: 74478 - DNA, 929 bp, Cannabis sativa
tgtatgattttttcgtccccttttgatcttacttgccactatttataatcacatagttggcagttaattacaaagttgacagtaatcttttaacaacaattatcccctgaaatcatggggtttgattacatatcacgtagtgtaaatgcgcttattatttgaaaatcatatagctgttattttcccgcttttactgggtcaaaatgatcgtgtattgtaacacgtctttaattgttttgtccgaggatgtctcgacagaagcttggttccagtgactgtgtattgtaacacttcatttgggaaaatctcaattcttgttaacagagagtttcttgaggctcatttggttattagcttcttacttgtcaagattgtaagtctcattgagaagatgtttgaaattaactgggggagttataggaatgagccttcccatagcgagataggaacctcgcttattgggtctcaagccaacccgactgttatacttagtttacgttatatactaagtgtttctgcagtcgacatgcgtcgctttcgtcttcccagatgtaacatacttgatgcctcactatatgcattcaatgacatatggtttctcgttaatgtactaagcaacagtttgtatattttttcctcgcataagaccttacagtcagtaagttgtaaatatactctgctacttacgcaattaatgagctattccattaaaagtgatttcatcgatccatattccctttatcttgacatgtgtcctccactgagatggtagccgaatttcgggtataacaacatgtatataggaagtctatttgtttaattaattaaataaattaggttgctaaaaataaaatattacaatgattgtttaatttaggtccaattagtattgtgtttattcaatgaataacaattatttatttaatggt

SEQ ID NO: 74479 - DNA, 788 bp, Cannabis sativa
ataaatcacttcaaatttcttatattgataactaattagattgtaaagggttttatttagggcacaaaacccaacacattaatcccaggtcggacatctcaaaatttttcatcatgtattctttaaacatctttatcatcttctcattattgcatttgtagatgagatcatcaacgtataaagagacaattagtgtatcatccttaccttgagttttgatgtaaagagttggctcactcttgctcctacctaatccttgttcggtaaaatagctgtcaattatgctatactaggtttacagagcttgctttaggccatataaagcctttttcaatctaaggactttatctttttgtccttgtaccacgaacccttgaggttgctccgcataaatttcttcttcaagataaccattaaggaatgctgactcgacatcgagttgaaaaatcttccatttcttttttgtggccaggcctattaaagccctaatagtgtcaaggcgtgcaactggagtaaatgtttcgttgtagtcgactccgtattattgtgagtatcctttcgaaactaatcgtggtttgtgcttttggatagaaccatctgcgtttagtttcgtcatgtagacccacttggctcctatagtatctttgtcttgtggatgatctacaagcttccaagtctcattcttttcaatcatctttatctcttcattcatagcttttctccatacttcttgttttagagctgcttcaaagctttttggctccataagtactaagttgcatgtctcg

SEQ ID NO: 74480 - DNA, 711 bp, Cannabis sativa
tgttaaactatattcttgtaaaattagctagctatgtacctctctaactagtagttagaaactagatataagttagaaactacacaacaacattctcaaatatttatttttgagaaacgataaaatgcactatagtagatgtccagtattacttaaaactataactatactataaaaaactaataattaatcataataataaagcgtcatcttaaggtgtcatcaccaactacctaataacaattaccatttactttaggtgtagcactgcatatatatgtatgagcatgtaaataaaattacctatctttgttaaatatcaaatttaaatgatataaaaatataaacaaagaagaaaaaatatactactcccttattggctgattaaatgcattgagttagttttcaggaaagtttaggttcttatacatagatagagtttgcttgtgagtttccttatttgctaaagatgaaaaagagtttggacgtcttcgattaatcaattcatcatatagatcgtttccttttccgaagaattaagctacatggaaaacatgatatgcatatatacatgcatttgtctttatacgtttttttccctgtaaaaaattgcgaaaattgtaaacttagaaaacaaaatgggaatcaaatatgactgaaaacttggcacaaccacatataggcttagtaaacatcacgtactctagcact

SEQ ID NO: 74481 - DNA, 830 bp, Cannabis sativa
gataccatcttacccttcatgcgtttcagggttctcgtagatgtcaataaacctttgggtcgtggtatgaatatcaagtttagatctctttcctgcattaaatggctcaaatttatgtatgaagggatccaaaactactgttactactgtggtatgcttgatcacacttttaataggtgtgaaaagcttctgaaattctgtgatgcttcccctattccaccatccttaagttatagggatgttttaagagcacctgctaaatccgtttacaaaaagagtatctttgatctttccaattccactccattcgaagaatcgtcttcacgaaactcagtttctaatcagagtcttcaagatgctatcaaccagtttctggttcctaatatggtgaatacgtctttgtccttggatgttttaactaatggtactaggtctgatcactccacttctgggcttttaatgacgtcttcagcgcccttattcgtttgaattccaagccttccctgctctttgcctactgcccctattaagactacgccggttatttctagtgttgacaaaggcaaagctgtcatggtttctgaatgtccccgcattattttatctcccccacccatgaatctgtctggtgttaagagatctttcacaaggcagaacgttcagattgggaattctgttagggaaatgctgaaacgagctcgggatgttgcagatgatgaagatgtagttgtggttccctccattgcactctcagatgaacaggcgggtgttgctttgcaaccccgcccagaaaaatgagtcttttaagctggaatgctcgaggtttgggg

SEQ ID NO: 74482 - DNA, 628 bp, Cannabis sativa
aaatccattagatgtgatccaatgaacacccctcatatatatatatatgaagagcatgttattattagttgtttcaacaatttaactacaaatgtaaatataaaccgaactttttgacactgcatgaaatcggcacaagcccgggaggtacaagtacgacctagtacaaaaaaatatgagtttgtacacgacacggtaagatgttataaattcccacaacacaacacaaaaagaaatgaacttaagtacgacaagttcaaaaatacaacacgtaaatatgaatagacgggcccaaaaatacaacacattaaaaagtatgataataataatagtacataggtatttactaataaatagacacattctaattaattgttaatatgattatatacaaaatattgttgaaaaattatataaaaataattaaaactaactatataaaaaaatatatatataatttagtgattaactcattaattgtaaaaacaaatagtgaaaaagtaaaacttaaatttaagcctacataaaaaaatagaccgcccaaataaagtacggtactagttcgagcgtgggacaaaaatatgtatggccttatgatcgtatagagcttactccttaaaatattaac

SEQ ID NO: 74483 - DNA, 517 bp, Cannabis sativa
aaccgatacatttctctcattgattattcttatccctactatcatctgatgtgataatgttggtgcaaagcaactctctaccaatcaagtcttccatagcagaaccaaacacatcaaggttgatgttcactatatcagagatctaatcaaacaagggaaactcgagataagacacattcctacctcagaacaaattgctgacatcttcaccaaggttgtttctataagtcaaatttcacacttaaaagacaagcttgtcgtggcaccttcacctagtcaagcttgagggagcgtgttagaaaggatgaagtccaccacacctgattattctcacctggtgatgagctgtccatggattattctagaattcccatttcatgagattcccttatcctcaggagccaattagattgaaagagaacattttattattaattatagatatttttcaactttgtgtactataaatatacctgtgtattcattgatacaatcattgatacaatcaatgagaaat

SEQ ID NO: 74484 - DNA, 1194 bp, Cannabis sativa
tatatacccacctacaccaatatttatatatatttctcttacaaattcatagatatatatatatatgaattatttcattaatctttcttattaaattaaatagatatagtatgtgaaatatgagataataaatattattattactttcactatgtataaataattcaacataaaatgtcaattagatttctattttttatcaattaattttcgttattagtaaatattaaatacaaaaaaaaaaaaagttataaattagataaagtagaactttaaaagagaacaccacatgaccttttagattggatgttctccttatgattgatgcaaatatctagtaaagaagaatttgtctataaatagtcatttccatggtaatgtgccatgagagaaaaatttgtctgagtatcccttgtcataataatctgaagaagaacaaaaacaacatcaagaattagaagaaaaaaaataataacaaaactttaaaaataaatagccatggctaaataatttgaaaataaaaaatatgaattagaaaaaataaataataacaaaaacttttaagttaagagtggatacaaaactttaacttgtatttgagacattatatatatacacatataggagtaagagctatataaagaataccaatagtttttattttttagtagaaaaatacaaatagttttaacaattaataatagaatattaatataacataaataataaatattaactagtatgtcttttcaattttttctattaaattgaattaaagataaaattaaattagtaaaaatagtttaaaaaatttaaaaaattagaaaacctataaattagagaaagtaggaaaataaaaggagatgaaaccacctcaactcttctaaaccttcctttatatatatattgatattgattatagaaaaaatcccaattttcttattctcttcaacctcctaccaccatggcctcttcttcaagaccaaagaggcaaagagtgacaatgcatcaaagggagcaaagaactaaggcaagtcatgagctcttctcacatagaaaatatgcaaagaagttcaaagaagatttctcacaaagggatgtcgtcaatggtaagcaatgtgatctctaagcccttgagtatgtcaattttaattttcttattgaacgtatgggatgggaaacattgttagaaat

SEQ ID NO: 74485 - DNA, 844 bp, Cannabis sativa
agaacatacagagttagggtttcctgcaaaatattggaagcacatcaaatacacccttagaggctaatagacttacttgtggactaagactaatcaacacttgaatcacgtaaaaatatccatctccttaatttttgcatttattatttctttagttctcaaaaatatttagttagtttgtttctgaaaaaaaatctcaataaacagtagcaattttggcttttgcaacaaaatctcttgggctcgttcagtttttttgtattctaattattatgtccaattatctatttaagtttatttcatgtactacttcactctctttatgcgtggtctagactgtctaatactcaaatacaagaaatttgtccactactatcattgttcctaacaaaaataaaagtaaatggtttaaagagtctcactcatagagtggtgccttccctcatcactagtataaatatgtataatcaattatttaacatctaaaaatactttatttcttcttaccaaacaaatgattacatacacatggttactaagttaatattacaagcatattttaagttatatttttattttttattttgattatgtatatttttagttgtataattattatttttttttaattttattcaataatatcattatttattaaaaaaaatatttaatttatatactatttattaaaaaaaatataataatattcaaaatttattattaattataattttaatttaactaaaatatttttaattttgtttgatacttttcatttttacaaatatcatatactttttttttatttgttacgttacaatagtgattcttcaagtaacatata

SEQ ID NO: 74486 - DNA, 915 bp, Cannabis sativa
  modified_base (413)..(414): a, c, t, g, unknown or other
tacatggtagtaaatctagatcctagtaaaatatttccaacaatagcatctctccaattattggtttcgccaaaactggaggcctcggtagatgactttttatgttctaaaaggcctcttcgcattcttttgtccactcaaactgctacttgcctcgtagtacattgaagaacggcacacacttattagttgactttaaaatgaatctgttaggtgcagccattctttctgtcagggcttgtacttccttaggctttgtcggtgatggcatgtctatttatgccttgattttttccggattcgcttcgatacccctcgcgttaactatcaatcccaaaaactttcttgaagagagtccaaaggaacacttttttgggtttaacttcatgttatacttctttaatattttgaannattctgcgaggtctgtggtatgatccccacttttaattgatttcacaaacatatcatcaacgtaaacttccatgttccgcccgatctgatttgcgaatatttcatttccaaacaatagagtcccatgttggttacgaagcttccatgctcttgatctaggacatgcatttttatctggttctatcaagaatatgcatccataaatgacataagctagtgtctagcagttgcatccactaactggtcgatcccgggtagtgggaaacaatcttttgggcacgccttatgcaaatccaaaaaatcaatgcaagtcctccacgttctgttagtctttgggacgaggacaggattagctatccatgagggataaaacacctcgagtataaagtcattgactaacaacatgcccttctcctgttttagtaccccttgcctctcggaatccaagggtctccttttttgtctcttcgctgggtagtttggatcaacatttaaatgatg

SEQ ID NO: 74487 - DNA, 851 bp, Cannabis sativa
gtcttcacttcaaatctctcgaggggcaccatctgtttcttttctcatctattttttgcagatgatagccttgtgctatgtcgagctaatcatcaatcagcaacagccatcaaaaactcactggactattattgcagagcctcgggtcagcgacttaattctgaaaaatcagtgttatcattctctccgaatgctctcccttcagttcaaacacgagttcaacaaatcttgcaaatgccgataaaagaatgtcacgaaaggtacctaggccttccttcctattcgggcagagataagaaaattctttttggggagatcaaagaaaagttatggaatctgttatccgcttggcaagaaaaattattttcggttggtggaaaagaagttcttctcaaggcagttgctcaagctattccaacatatgctatgagttgttttcgcctttctaaatcacttgtcaatcaaatagaaacgatgatgaacaagttttggtggggatctaactcttcctataatggaatcaattggaaaacttggaaagttctcacgcaatctaaagttgagggtggaatggggttcaaaagttttgtccattttaatcaagccttgttagcaaaacaagcttggagaattttctcaaacccatcttctcttctatgtcgtgttttaaaggcaagatattttcataattgttctttcttggatgctggtatgaataattacccttccttgacttggagaggaattatgtggggtaaagaattgctcatcaaaggtctccgttggaaagttggagatggttctcaaattcattgtgcctctgaaccatggctgccaggcattactacttt

SEQ ID NO: 74488 - DNA, 973 bp, Cannabis sativa
  modified_base (654)..(668): a, c, t, g, unknown or other
tgattccgtccaagtctaccccatccaacagctggggattcaaaaggttttcctttaatgcatctaaagaaagagaataaagtatttattactcatcaattcgtggttgcatctctaatgcaccagaaacctgtcgtcttttcaattctagttgtcactcacttcccacaagaaacacgtttaaactcagagcaagggcatcacgactccactaagcaagcaccacacttcaacaaattgacaacaataccacagttaatgctaaccctttggatggccaaggcaatgcgaaagacttcttctacattccaacacttggtcaataaatctgaaaaaataagacaagcatctgggagaaagctacaagctcccaacactcatgtgaatcccgagagcttggggtaaattttattcgtattcttgaatgaagtgtacgtgccaatcacggaagggcgccacatcagattatgcatggttagtatataccctccgcgcctcagcgtcacggaaggtattatatcctaaaagttacctggaggctctccctgttaggaagggcaaaaatgactttgagattcttattaataaaactgctacaaagaaggaccagaagttatgagtggtccaggattgtaaagaccgcttagctttaannnnnnnnnnnnnnnataattagggtttaattatggaaattatttattaattttgaattattagtttgcaatgatttatttgaattcagaatgcattttatatgtcatatatagaaattttatagttttgcatgttttgtgcccggcaacattggaacgtggtgttttgctattagaatcacatcctagtattttatagtatagcaggactatatagttagacattgggatgtcgggaatggtcggaattttataagtgaccaatttacccttaagtgatttttatgttttaagtgtgggcaaggggcaaaatggtcata

SEQ ID NO: 74489 - DNA, 667 bp, Cannabis sativa
ctgtatataattaaatttttttttatatacatatatatattatttatttattattttatatatatataaaaatatttgactcggtcaaaccgagtctttacaataaatgtcctaagttcttcttcgtctcggcttctatcagaggagaaggaatgctatcgagagtgtcttgaataaagataatatctggatttctagacgggatttaattggtacaaaattcatcgacttctttgaaggaatcttcttgagtgcgaataagggtcacaatcttgactgcgaccacctcatttaggataggatatctaaagttgatcaggctaaacttgttaaaggccctactcgtgaggagatccgtaatactccttttttcatgagtaacaacgaagctccgaggccagatgggatgtatctgcttttcttcaagcactattaggggactgtgggagaggatttttgtgaagcagtcttagactttttttggatgagcattatgcataagggggtcaatgccacgaacgttgttcttatccccaaggtccaaaatacgaaaagtcgagctaaccactatagacctatctctttgtgcaatgtcatgtacaaggtcatttctgaaatcattgccaatagaattaagcccattttaccctccctaatatgccctacc

SEQ ID NO: 74490 - DNA, 556 bp, Cannabis sativa
ccccctgccgtacaacggattccaatccgtgttttgcatatatgggcacaaaatcggctgcctatatatatatatatataaatagaagatagagctaagggaaatcatattcaaaatcaaatctactaagtaacgaacaaatagctacacaaattatgttgtctaacaattatgtattgcttctatctctaattttatataatctgttttaaattttgaaggtgggcaatcctccttaggctctatgtaggtccccctatggccacaacatctttaattatataaaattatatatatatatatattaagttaatcatgatcacacaatggacatgaattgtaattaattatgtgaatataataattttaccccaagagtttttattatgtctatataattaattaaaataatatgctaaataattttcttaatttaccccatatgtaattatgtggatataatttaatagttttatcataatgtataaaattttgacacttttataaaataattaaatttttcacatattttattgagatagaaatattaaacttt

SEQ ID NO: 74491 - DNA, 848 bp, Cannabis sativa
  modified_base (391)..(392): a, c, t, g, unknown or other
actcatcttggggtgggcttactacctttcagcagttatccgctcatccgctccacacttggctacccagcgtttaccgtgtgcacgataattggtacactagaggtgcgtccttcctggtcctctcttactagggaaaggttctctcaatgctctaacgcccacaccggatatggactgaactgtctcatgacattttgaacccagctcacgtaccgcttcaatgggcgtggtttatgtgcttatttggtgatagtttagaaatcgcaatgtatgttgtagaaatagtttttatttcgatctggaattatttttaccagaaagtagacgaaaaattaagaaatttaggcttttacagaacctaattagatttttatgaattagttatgannttttgaatttgaatgaaaatatctcaagttgatgcacatacacgcgcgcgcacctagggaaacgccgacatttccacgcgatttcagacagcttgaccgaggaaactcggacatgggatgtctgaattcgtatcatgccaagctccctcggtcaagtacgttgtatgcagccttgatactcggccaaacaccccattccgcgcgcgcaatgcatacccctgtgcaccaattttattttcttcatatcttttgattcaaaaatcatttttcactgaaacaaaagccaattctggtagaattttgtgtagaatctgaatttttagttaaaaatctaattgtaagaataaaatgaattttttcaattaattaaaattagttctagatattagtaggctttgaattttgaaaatatgatttctcacaaaaatagccttatggttatttttgaaattttag

SEQ ID NO: 74492 - DNA, 1261 bp, Cannabis sativa
  modified_base (835)..(838): a, c, t, g, unknown or other
taatttcataaataaattgggtcatatttgtggacgaatgtaattccaatttttggaagaagaaaattcaacctaacctagaaatctatgaatctaataatcctaaaatttttccttaaccctaaaattatccagacaaacaaaacaaaaattacctaaaaaataaccaaacaaaagtagataaagaagacaaccaatcatgaaaatcagactgtaaatataaaaaagaaaggtataaaccactcctgatgaggattttcagacaaggaagaactttgtgattgagattatgatgagcaaatcaatgtgttttgagaacttctgagattgaaggtgaaatccgatgaaatgcgcaagaagtcggtcaaagacaatgagggcatgcaaatacggaggagaaaagcaattggaaaaactttttgtagaaaaatttgaaggtttgaaaagtaaaaatagcaacatgagctctcacctctactttatatacataatcattgataaccgtttgatttaaaagaaattagatctaacggatggaatactgtaaataggaaaagatgggacatttaatgatgtgcctcgaagttttgaaccgccaaaatccaaagcatgcattttttcaaaattgggctaagacaaaaatacccttgtaatcatttaaaaagttctttttttaaagggaaattattatacccaaaattcggctacacatcagaagttgatacgtgtccaacagaaggaatacgaaacaattctaattgatataacaatatcattaaatgcatattaaataactcgtttattaattaaaggttaaatagataatattcaaaannnnttgactttatagtcaatagcgagacaagaatagtaactattaatccgagattaacgagacatatacatgccttggaatatactgacaagaaaggaacattcattcatccaagcaaagtgagtgtatcagtataagatgcctcgcattttatacagtgagaagatcacctcgcattacaaatatcacaaagagaatatagcaagatggaaaccttcccaacacttagcgtattttcttatcaagatggatatggaagataactcaaatcagagaagatataaccttccacatcagtaataaccatctaaaggatagaagtaaagggtagttgggtagctattagatattaccccacacgtgatgaaatgaaacgtggggattgtccacgtttcataaaccattatatttgaatcaatcctaaaa

SEQ ID NO: 74493 - DNA, 569 bp, Cannabis sativa
ttatttcatatatattttgaataacttatattatgtggtatttttctatcaactttttttcgttgttaatttgtttttaaaactatgtatttattttgagaattctttttaggcactaattattagtagtgaaagcattgttatgaaatattatattgttattgatataattaagtatcaaattaacatattttaattttaagaattattataaaatatcgataactagagcggacccaaaaagtcttattagcaaagggcaaaaatttaagggaaatactaaattgtactactagtgtctagtactttttatggtgtcatactgttattggtgtaattaagtatcaggtcgtatataatttaagacaataattttaatttagagaatatcactaaccaatcgtaagatttcttttatagaatgggtacccctgatatccaataacaataaaaatgtgctcaatattcaataacgttgcccaaggctgcattttgagactcaacattcttacgacatacaatcgtaatggtgtctaatagcaaatttatcttatataattttataatgt

SEQ ID NO: 74494 - DNA, 642 bp, Cannabis sativa
tactttttttactctattttttgaaatgcctcacaaaaattttactttttttttttatttggaaaaattgcagcataagtctccaaaaacttcaacttgatgcagataagtccctaacctcaaaaattggagataataatctccaaattcactatttagtatgtcctttagtctttttttaacaaatccatttactaattaaatgccacgtgtcgacaaattattggtccaaatcatactttttatttaaaataatttaaaattaaaaaataaaataattatatttttttataaaatttaataaaaaaaattaaaaactttattctttttttttttatttcattttcttttatttttttttctctcttgacttttcaactctctatctctctacttgttcttcttcgacggccacaaacaatccatggtcatggaaaccatgctcaattgaccaccattttttttttgcaagctatctaatatatatttattatatttttattatttttttttgtgtgttgaatttgtaacacttgattattttgtgtatttatttttatgatgtttgttctatttattacttagaaatagttttggtttaattatgtaaaacttttagccacattacacttgtaatgatag

SEQ ID NO: 74495 - DNA, 1165 bp, Cannabis sativa
ttaatggatcaacgaaatctttttatttttatcactctgagcaccatttattattactattattattattgatcttgttgttattgttgtagtataggtcctcaaaataaaaagatctctaaaagttgttctagtcatgaaaagttagatgtccttcggaagggcattcccgaaagtctaacttgaccatccggaagggcattcctaaatgtctatcgtgtccacctggaaggagttttcaagaaagctagtcttcctccaaaaaggagttttggatggctagctattcctcctacaagagtgttctggatagtcaactccagttattgcctttcctatccgggaagtggaccttaaatactaccaacacttatcttttcagaaagaatgagatcagacgagttttgagaggtaatttttagagagaaagatttagaggtagagtgagaggtacagagaaaagagagagatttggtttaagtattgtatgaagaatcttcggtagatgaagaagattcttgagtaagagtgtgagagataaacaatgtgagagaatccaacaaagaatcaatctcgaatgtagttgtaccctattcttgctcaatcaataaagaagatttggtgggattctagagttggagtagaaccatagatcacattaatctataggacttgaatcagtgtatatcttggtgttattttttattgtcttgttactttaatcgtttttggttttaatactctattcatccctatttttatcttcatttactgtttatggataattaatcctgtcatagctaattgtttcttgattaaatttcatttgatttgattttgcactttagttgtaattttctaacaaattagagcttggtattcgatcaagaacgtagaatcaagattcgttccgctgcaattctttgaagaaagaagtaaagttgtcaatggtgagattcaaattgaaaaagttcgatggaaaggggactttgcgctatagagagaaagtttaaaaggaatcttagtgcaccaaaaagtctccaaatttcttgaagatgagaaattattggatgaaaagaaactagacgacaaagcagagatggaggagatggcttattacacgatcataaatctatctacgagtgcgagaagaaagattgttgca

SEQ ID NO: 74496 - DNA, 690 bp, Cannabis sativa
tgtaacaaaatttttggtttaacgttatttttactttctacgttaattttaatagaatatcctaattacttaacaaaatattttttttattaattttataatattattttatatttataaaaaaaattatgtagatattttataaaaaaaaaataattttattatatgtatatttaaaaataaaaattacacctatatataatcacatctatatataaaatatatatatatttataccttaatttcatgacgactttaaaaatgtgtagacataatatataaaatatattttgaaagtaattaattctaatcaaactcaaattttatcaaattattttctaatgaaattcatggggcccacgtatatgtgccacgtcatttcatatatgtgtattttttattgtatatattttcagtttattccaaacaatatttttgttgtatatatgtgtatttattttgttattttcatgtatttttagttgtttttcagtttataattttttttaactatcactaactaaaaaaaaaaagttaaaagaataaaattgtaacaacaaatttcgtgaaaaaaaaacaatgtaatataacaaaaagataaatcatgttgtcaaaactaagtaaaaagaaaaaaaatcgtaatacaaatatatattgaagagtttataatattttgcttattgcaattag

SEQ ID NO: 74497 - DNA, 666 bp, Cannabis sativa
acacaaattctcaccaaaaacaaaagaacacaaattcatgtaaagttagtggcattccattccatgagagttgtacttgtattatataaggttaaagtggtgaaaagaagattgatcttcagtatgaagcttctgcagtcccaaattttcatatatcaatctcaaccattgtttctccttagatgactgtatatggccttacaaataaaataaaagcaggagaacttaatcaatgtcaagttataattaattcacacaaataaattcaaagagtaatttacggtataagaacctaaatttaatttttaatggtaataataccgaagttatatttttgaaacttctgtaagtacctagtctttaagtcaatagccacgcggcagttcgtgattagtccagatcattaaatttatatttttaatttaaatatacaaataagaaaataacatgtaaataatgactggacacataatggtcagatacctacgaaaatttcaaaaatataacttaagtattattaccgtcaaaaattaaacttaatgtaaccaagagttaaacttaaatatttacgccgcaaattactcaaatccaaaataataaaagttaatattagttttacctaatatctgcttcataattcgaagtatagtaaaagtcagaatctat

SEQ ID NO: 74498 - DNA, 784 bp, Cannabis sativa
agtagtattggagtgagaaaagggtgatttgtgagattttccaagacaacaagattcaaacacataaaaaaaattatttgatagtggtatattacattttgacaaagccatttttacaatttttgcagtagggtggccaagcttgttgtgccacaaagaatcagaattggaattgaaaagatgatgactatggcattgaggtgcaggctgagatgctttaccatgaacaagtgaaggggagagaatactcaactaagtagaattgaatttgtacaatccattctcaatattcccaaccaacaaaatcctctaggtagcatgatccttgacacaataataaaagggataaaactcaaaaaacacattgttatcttgagcaaacttagatacacaaagcagattttttgttatgaaaggaacacgtaatagactattgagagacaatgtttaagataagaaaggagagacgttgatcaatgacttaccaacactttcaaaatttaggccagcaccattaccaacaagaaattgttcattacttgcataagatgtgttggctccaagattggtagaatctggtgtgagatggtgagtggcacctgagtcaaggtaccggttgtcatcatggacagtttctggtgtggcatacattgtaggcatctcagcaatgtgaccagtggcagggaaattggcaaaagactcagggctagtaaatgactttttgaagcaatagaaacattgcttaataaccaaatgaccaaatttgtgacataattgacactga

SEQ ID NO: 74499 - DNA, 749 bp, Cannabis sativa
acaaacaatatacaattagcccaccaaagaaaataaatagttgatttatgggtaattctactttctaagcaaataaatggaggtagatgcaactttctaaaatgttcacgagatatttttcacagtccttatagtaataaatctctatgtgtgtatattcaaacagcctaataaatcacataaattagaaaactagaattgcttcatacatgccactgttcatctctgtgttgcaagtgcaattgtggtttgtttatttctttcctttcaacttacagcttacacagagtagcaaaacatcaaaaatagcaacactttgaaatatgtcaaggaaaaaaaataaaaatacaaaactaatgaaaactaaaagaaggtttcaacgatatcaagctacaacaattttcacaccgaagaataagaactaactaaaaacatgttccaaatccaacaactgaacaacccacagtaaaaaacacaaagagtaagaataagaactaactaaaaacatgttattattatccccaaaaagaatacatgttcaaaatccatttcaaaaagaaaaatgctccaaatccaaatccaatagccgatgtttcaaatccaatgctccacattctaatgtttcaaatccaatgctccatattctaatgctccaaatccaatgcttcatagattttctcgcatataaacaaattaggattacacgccctttttgcctaaagcttatattaatattaacttatttgaca

SEQ ID NO: 74500 - DNA, 902 bp, Cannabis sativa
aatgtgaaatttttacttaacagttctttatgtactattttttaattttaacttactgtctattagtgccttattacataacagttccaataccatggtgttcacctctaatgtatgttatatccagtgaccttctcggaccttgaagattgggacagctaagagacatgacaacctctattacttacaggaagaaatgattccaatttctatttcctgtaatgttctcttagataaaaatcaatagcataatcaccttggtcacccttctgtactcattacaaataaaatcaataaactacattttcccaataattcatctcttcaatttcattatccaatttgtcatttggcatagcaaaaaaaattaccatttccatctaaccacactttttctaatgctgtttttgatcttacatatggggaccataccccataccttcaattgaaggatacgaatactttctaacaattgtcgattaccattcacgatacacctggatttacttgctaagggccaagtgtgatgcccaaaaaatcataccaaacttctttacttatgtcaatattcaacataaaagtaatatcaaagctgttaaaagtgaaaatgccaaagaattgacacttacaaacttttacagcagcaaaggcattacacatcacaattcatgtgtaggaagactccaacaaaatgcagttgttgaacgcaagtaccaacatatcctcaaagtaactcgggctctagcattacagtccaatcttcctctttttttattggagttacatggttactactgttgtttatttacttaatcgaacaccatctgtaactctaaaaggtaagacatcatatgaattactgcatctcaaacaaccacattacactcacttaagaaattttg

SEQ ID NO: 74501 - DNA, 631 bp, Cannabis sativa
tccaattcacccccctcttggaaatatatcttgggctaacaattttgtgatataggagctgttagggtttgattcttgttcagttcaaattctagggttaattttggttgattttagcttctagtagctgatttggtggtgttatgttgaatttatgcaagtttgagctttgaactaaaagcttttgtctttaatggcaagttgagtttcattgggtatttttgtgattttctggttggaatatgttgtgtatacattgtttaggtactctgaaaagttttgtggcagttggacaagttttgagcaaattggcgagttttcgtggagattggtataaaatctggtttatcgattttaccagtttctgtcaaaccggtataccggttttggcaaggttccccgaaaaatcagttttctcaattctcgtccatttcagtgccctagttgggtgtttccctatttcatgagttagagtaatcccaagagagtataatagaacctagggttgtgggttcgggtttcccattttagtgttttgaccatgtgatttacccagttttattatgtgattaggacatccatctagcgcgagactttccattcaggtcggccagcacacttgaatctggaa

SEQ ID NO: 74502 - DNA, 969 bp, Cannabis sativa
ccttcaggctttcactctcttcttcgactgctaggggtagtcgatccctgtagtcataagatttttttttttttttggctttagcaatttcaatggacaagtacaacatgcaagttaggcaaacatgtggagagtgatgaatgtcatatgtgaagtgaaaacatttcattgataaggtaaatatgcgatcacccgaatacacatgttatgttcagagatcaacctaagtgcctcctctaatttagtgaaatgtaccataggtaaacttgatattgctaggagcgcttctcacatagtggaacttcacttcaagaagtatctaatgtttgattttctggggtagtagataggagattttacttgaatgtgctggcttacgagtgttgggaatatcgtctaataaaccctatagggatttgatgagctctccgatcaacattcactggtacctcctctcaagactctatttccttcctccatacgaatgtatttctccaccctctcgtagaagtcatctaagtcatccaaccctcttttcagcatatttttccataacccgcccctcgagtgtacccctgcggctatggagaacttgatcttatccttggacattttccctactttggtaacctcagtgttgaagcgctggatgtagcttcgtaaactttcttctctcccttgcttcacattggtgatacttgtgacaagcacaatattaacacatgcagtctgatgttgctggaggaattcatctgaaagttgcttccaagatgtgattgtctctaattttaatcgtgtgaacaatttatacgcggctccttttgatatgatcacaaaacattgataccttgccttacatgatacctttttcatcttcattagctcattaaatgtatgtcatgataggtcatgtgtctataactaatacgtgctcatagttcacctagatatttacacattacatttcat

SEQ ID NO: 74503 - DNA, 636 bp, Cannabis sativa
cacacttaaacatgacattgtccccaatggaacttattggaaaaataaattaataaaaatacgttaaaaaaagtaaagaaaaaaaactccctgaacaacgcttccgatcactccatggcatctccatgttcatctctcatgtcatgtgttgcctcatcattagtcccctgagttgcatacgggttgtactatccattgtggtactggctggagataaatcgtcatgtcaacccccaaagtgcatggcattcatcctagcacaggcatcctggtacattacccactcttgcatctctagtcagtgttgcctcatgtcttcagtaacagaggccaacttattctctattcgctcaaggcgttgtggcgtaatcatttcactaggttcctcttcctttggtggcttttccctagatgaggatgctaatgtcttctttgtttttggatccataagttgagccactacatttttgttaaaaatgtgctagattgcagactttgttctgaagtagagtattgtaccccagctttagcacacagcgatgtaattagattcatatgagcaaatccctttctgatgtttcgaacattatccataatcgagtgttggatgatactgcccacatcaatggacttctt

SEQ ID NO: 74504 - DNA, 578 bp, Cannabis sativa
gggtgaagatgcaagaatgcacctgccttcatatgaaaccttgaccaagcactgcaacaatagtttcgagagctacttggacaccctgtccttggttttctaaaaacaatctcaggaagtgactactcatctcgtatcagttcaatttgttgctgagtaatagagctaaaaacgagaggtcttagtttgaagactcgatccctcaggtcctcacattcaatagaagaagtgagtaactcagtggtcatgacttttttaccatgggccttatataagtctttggattatggtaccgtgagcttctcctgaatgaatcgagttgtatctcggtcatattcttcaggttttcttgtgattcttttcatacgaggaatgtctactctcagcttgactttcctcaacttggaaaggttgaatatcatctcaaaataattttttccaaggaaattaagaaaaattgcaccttgcgggaaggaaaaatttaaatctaacgacacatgaaaatcatatttttttgttttcgacgggcttgccaatagagtttacagatttctaataagattcaaaatccttgaaat

SEQ ID NO: 74505 - DNA, 1050 bp, Cannabis sativa
tttgggctcggttccatatcatatgatgttaaaaaaaaaatgatatttacgtaaatatggaaaaaaataaaattagtttagataaatatgaatagaaacttaatagaaaaaaatatggtatttaaaataaaaatttaacatatgagatttaattactataaaaaatattaaaatttcttttatatatatttttttaaaaaattaaataaataaaattacagtgattatcggcgttattactggtgtcagagtttactggcgacgcctgaaaagtcactagagtagttgttggcacttagaaaattgccaaaattacttatcgaaattggcataattgtcgaaaaatcaccgaaaaaattaccaaaatttttcaaattaatagaacttttttgttatagtatttccaaaagagtaatggatggtcttaaaaagaaaataaaaaccttgaaatcatagtgtacgtgccacgtggtcggtagatggaaaaatttctttgaaatatgggaaagtgttatatgctggatagccatatatatctcttttctagaagatatttttactgattataatatccacgtttttctatcttctttatttgtgaccttgcattcaaataagagagagttacgagtggactagtgaacagttatcgttgttgtaaaattaaatattaagtcttatatattctaaaaaagtgtttttaaaaaatattactaaaatgctacctatataaatagtaggtatacgacgagatttactttcatggaatgtattctgtgatgtacgacaaccgttagataaaagacttatttcatctgagggctggagttgatttaggagtaattaaagttaaaaaatggtaacgtaccctaagacccatctaatgtactctaaaacttatataatgtatcaaaatacatttcgtaaaatacatcaccaaataaaatcgtgtcccatacaaaatattgaatacactaatacctaataataatataatgtgaaaataagtgagagaaaatcactgcatcaaagtgtgaaaaagctgaccac

SEQ ID NO: 74506 - DNA, 1128 bp, Cannabis sativa
tatcttcttatgcaatttaggaattttttaaacagttgaaggttagggtgtgactagatgaagaagacgttgacggtagaaggtgactgtccgcagtagatcttcagagagcttggggttgggatgtggttggggatggggtgggatgaggaacaagagggtgagtgggtgaagaagacgaagaagaaaagaaaaaaatatgattttaaaatattttttagttttttattctatatttcagtggaggtggctaaggctagctggggtcggtcgggaatgctagcagtcaggatgtggttggtgtcgtggtggtgcttcggtcaaacttcgtggctggttgaagaagatgagcaagaaaaaaaagaaaatataaaataaaataaattaaattaaatttataattttaaaatatattttttagttttttattttattttaaatttttttaattataattattattttgaccaataaaaagttgacatgtggcactttatttgaatttaatggatcaagggaccaacatacttactattaatctcacattgtggactattatgctaatttttgaagttagggactaacctacatcaattctaagtttttggaggacttttaccgcaattattcttaaaataaaaaatataatattaaaggcattcaaaattattaaattaattaaaatatcaattaaaaaagaaataaagaaagagaacatgtcattttaaaggattgaatctatgtcattttacttgttttaggaatccttaccaattccactatgaataatttgctggttgccttgattattataagatcatgtaaattgaatatgttgtaattttttctagatataattattgttttgaataacttgtatatatttatttaaaaattttaggtagaatcacaaaaatgctaataaagaagtaaatggtggaggtaaaaaaaagagaaatttgcggcaaaagttctcaaaaagttcagtttgatataaataagtccccaacctccaaaaatagcggtaatagtcctcaaactcatgttttttatttgtctgttagtcctaattttaactgagccgttaattcttttaaaattgctacgtatcgaaatattattggtcca

SEQ ID NO: 74507 - DNA, 795 bp, Cannabis sativa
gatctaaaacgtgttatattggagtgagaaaaaacgtgttatttaaaaaattttagatttgaactaattgccgacggtcaaaatctgtgacctatactataagccacggtttaaaattgtcgcctatagtataggccacaatttttaattgtcgataatttccctttaaaaaattcacaattattaaggcacgcttaaaagtcgttgggaatactcaatttttcttaacggttaaacactcacttaatagttttttagcgatgatccctaaaaaaacgttaggaccattaggaatagtagcatttgtagtagtaaaaactaattccattggagttggtgcaacaacgtttctcggcaacggcaaaacagcaacatcattcctaatctctcatctcttttattttcttctctctggtcttattgaccaaatgtatgaaacaactatgaaattgtctgctaggaatttgtatgagtattaataaattttattattgatattttaatttgtaagaatttgtaggaatatatataaattttatttattaaatctataattgtgagattaatagagcttttgaaggaagcagggtttggtctcaataagactttctccaatagttactcttttaccctatatcgtctacattacaactgaaaaaaaaaaaaattgaacaggttggtcgggctaatcagatcaacccgaccaacccgtgggtcagtttgcattttttttttttaattgggcaggttagacataaatttttataacccaatctttacactgagttaaaaaaa

SEQ ID NO: 74508 - DNA, 787 bp, Cannabis sativa
ttgtaattgctccaacttagagatgcaagaatccaacttaccaaattatccttgaatttttaacactatttggttttactctttaaaatatattatttgttaattttttttaaaaaaatataacagttatataattttgcagtagtgcttagcatttttagacatgttaattgactaacaatattctctaaaaattattacattaagctatatgagactcgatatttaaatagactaataatattattgacacgtaaaaaaatactagacaccactaatactttttaaaggagtgctaatcacaccttattttacactctcttttgcactctctctatattctaatgataagtgtcattttttaagcaatatttattgagagtgctaatcacatcttattttacactctcttttgcactctctatattttaatgacaagtgtcattttttaagccatatttatttatacctaatatctaagtcatacatttctcaattatcgaatactgaacctgaaatggaactaatgtaatggaaaaggatgatactggaaacacatttccaatgataattaaataaaggtgaaggtgatacgtgtggggtactgtaaaacgtggcattgtataatgtggtcaatgtgggcacgtgtccaaaagttaatggctcactgaattggtggagaagttgcgagagacgttcaattcaaacacttgggtcttcagttcacacaacaatgcagctggcttcaatatcaacgcacttcacgcgctctcttctaataccattc

SEQ ID NO: 74509 - DNA, 683 bp, Cannabis sativa
tgaaaaacaaagaaaatgctcgaaaaagttcttagaaaacaccatcaaaatcagcccagcatctagcttccaagttaaatggatttgctgctacaaattagttttgaaacatttcttgtaggttcctccaattatggatcaatcctagagataaccttttccactcgtcctccgtagatttggtcaaattcagtgaaaagaagggacactttgcatcatcactagccttagcaacttgcatcatgtgattgtatttggagaagtggtccttagggtccgtccagccttcatacaattcaatttggcttattctaaagcgctccggtagcgaggcatctataatctttttcatacatggtcttgtatcttcttcttttgaatcgaacatagttccatttttctttctaaagttcaactctatgagcttcattaactcttcaactttgtgttccaagcgttaagttttgtcacttaaagattcccatctacagattcgatcattaatatgattccttagatcatctccgcgaggtctggctttttctattttagctttctctttcttttcatttaatttccttcgaaggtcgtttgtggagagagttttgttgtcactgtttggaattagatgcaccccatcgtcaccatcattttgactactagaatcattatgatgaatcttg

SEQ ID NO: 74510 - DNA, 618 bp, Cannabis sativa
  modified_base (201)..(202): a, c, t, g, unknown or other
tctctctctctctctctgtattttggcgtacgaaataagaactcaaaaacctaatttctatcgtgtttaaacccaagcaaaaagatcgctttgaaccgaaagtgaacggttctcatcccacaaaaatcaatcctctgaatcgttacaaatcgtgtgtaactacccattatcgtcccatagtttaaataataataataatannaataataataataataagataataatatattataataatattaataagaagtgtgtcaaatatactatttagcactataataatatttaccaatattattatactaaaaataataatcacaaatattattatactcttataaagttaacacatatcattattattattatgatctttttcttttgattgaatgatgtaatattttatattatttaatatttattaaattttttgagcaattgtgtctcatcaatcatgttgtaaaaaagattatgccttacttcactcatttgttcaggtgacttttaaattttattgagaatgtgtataaaacttctattttatatttttcaatattaataaaaaaaattaaaataaaaaaacgtaatgacaaaattaattgtttaaaataatat

SEQ ID NO: 74511 - DNA, 966 bp, Cannabis sativa
atatatacaacaagagtattagttagtaattaagttaattaatattaataatcattcattcatgtgtacatatataattcgacattgattaagatcaaattattaagagctaatattaatccggcctcgcgagtcatgacaaattaaatatatcaatgcgtaaatgatttaatttaattattaatgaattatatatcctgttgtgtttgattataaaagcgctaggtcaacgtttgatcagattcatagaaataaattataaataaatataattaaacctgagatttatgctctttattgatgaaattaatcacatgctaacataggtaatatcggtacagtgtacaccattttcaaagctaattagcgtgtattaaactaattaagctgctgttaccttaattaataaataaaattaacaatatagtacatgtcgatctacgtatcggtgaatttttcaagttttaaacagtgaattgtcattattatgaataaacgcactatatatatgcatgtgcatgtatgcatggatacaccttagtttattttcggccacgacaattaattagtggcaatattatcttcctaggctctttatattattatttaactttagagcctcttcaaaatttcagtaattagtatataatttattgactttaattaaattttatcttctttattcactatattactagtatttaaataataaaaaaattaaaaaaacaataatttttgtatattctcaataaaatatttattaactatattaatataattaattattttttacttattttatatcttatatattgaaggacaattataaataatgagctaaaaatatcactcaagcttattttttttgtgtcaaatttaatataaattttacattttagattaaaaatggtcttatagttaaatatcatatatctcttctttaaagtggtatacggtgtcaattac

SEQ ID NO: 74512 - DNA, 598 bp, Cannabis sativa
ataagtagaaatatgttcattcattctaattgattatatttgaattaaaattcatatacactacaccaaaatattgaataagtgacattttaaagtgttactattttttactttttgttatattttcattaaatagtgacatttgggcaaatgtaatatatctgcatgtcactaatccgtcaaatgtcattattttccatgtattagtgacatctgtcaataaatattttaatttattttaaaagaattctaattttattttgtaaaaatggaattagtgacattttataaatgttattttagaaaaagttattaaaaactataattaattattttttaaaaaatttatatttgtattgtacaaatactacctattatttgacaactttaacaaatcaaattaagtagacatttcatcaaacaaatattattgaaatgaaaataataattccacaaaaggatacaatctgtttttcaaatttatattgtactaaacattgaaacaatactaaataattttacaaattcatcatcgaagtaatgattttcatataagcttttgagtacttcaatatgcatcctgcaagagtgacgactt

SEQ ID NO: 74513 - DNA, 763 bp, Cannabis sativa
aagcatgcataaattttctttccttacacttcaagagaacaaagaggaggttgcaaaagctttaccttggcttggattcacttgaaacttaacttgaaatcccctagagctggtgaagaaaacccaaccctagttggttctatgggtttcgaaaatgagagagagaattgagagtgaaatgaattttccttttctttaattttttgtaaatgaagtaattgtgttttatcaaatattatcagccattacacttctaaaaaaatcaggttattaagtccactaaaaggacaaaataacattgggcaaaatgaccattttgcccctcccacacaaacacaacataaagatgtactaagggtattttgggaaattctaaattcccgactaatcttgacattcccaatgtctaattatatctccccgctatactaaaatactaagatgtgattcaactaagccatacatcgcattcaatattgccgaacactgaacatgcaaaaatattaaatttctatatatgacatataaaatgcattttgaattcaaataaaatatcataaattaataatttagaattaataactaattttcatatttaaaccctaattatctgctaatttccaaatttaagttaagcggtctttacatgattacttttcactgttcagacaacacaataaataagaacataaatgtgataaccatttggatgaatttataaatcaaataaacatataaatgataaaatgaaccaaatgacaca

SEQ ID NO: 74514 - DNA, 925 bp, Cannabis sativa
aagacatggagcaacttaatccaatcctcgaagaaattacatgaacctacaacccgaaaaccaatctgggcacctagggtttcacccggcacctaggttgacatcctcaaatagggtttcagtttttgggaccgtcttagtgaaaaatagtcaaaacttacattggcacatcaaatatatatatataccacaaatatatttgaggcatcagaattagaatcgaaggaagttgacttttgagcacccagggccccgagcacccggccaacgcctaggttgacaatctgtcaatctgggcgccttccaagtatcaaatcagagatccgttttttgcatcttctttgtctttatcaaaaatagggaaataggtcctttcaaaggaaaacacaacaattactgggtacaaataacagggcccagcacccaggttaataccctggggctggctttgtgcccaggttgacattttatcaacatgggccatttaaaatggagtttttcggttctttcaagaatcttctttgttttcaaaaaatattacaattcaactatttttggggaccaagcagaatttccaaaggagaaaaaagaggacccaatgctcaggttgacacaaggggatgggcccaacacccaggttaacatattgtcaacctgagctgttttcgatcaagttcagcaaaaattgttctgggaatattttttcataattataaataaagaagattaaagtgcacttgggtagaaaaccacaatcttgagtccttggaaacagggcccagtgcctaagttgacctagggctgggcctagcgcccaagttgacaatcaacctgggacattgttttcaattactaaaatgccaaaatcaatgcgaccattgaatctggaatggtcaaaaatgggtaggagacctcgtcctcaagt

SEQ ID NO: 74515 - DNA, 928 bp, Cannabis sativa
attcaaatattttgttacactcgttattattttttgttatatatatgcatagtaactagttatttagaattttcaaaaaatttacaagttatcctaaattattacaaattacaggatcataaaaaaatccactaagaagtttttctctaaatgttgaattcaatagaaagtatactaaaacactcattttaggaggtatgctatagacttacctattattatcaagcattattattaggcatcaattgtacctaacattatttaggtagtgccttagatgatattctataatagtcattaaattaaattatatgagactcaatatttaattacatcaatgacgatataacacctttagttccttttagcatttctcactattattagattgagcattgatattgggaaccagtgatgcctaacacatttaagacgtgtttcttaacgattggttaagttactaaattaaattatatgaaacctaatacataattgtatcaatagcgatatgatactaagaaaagtgttagaaactatgagtgtattttagcatatctctgtcatattaaatgataattattgtaaatagttaacaatattttataatactagttattaaattaaattatttaaaatttatatttaattactaataatgattggatactaatttattttaacattttttcattattattattattattagggataagattttgtcccgtgatgtactttcacggaatgtataccgtgatgtacggcaaccgttagatggagggagttatttgatctgagggttggggttgatctaggggtaattagggttaaaaaatggtaacgtattctgaaacctatctaatgtaccctgagatctatctaatgtaccacggaatacatgtaatatccagattaaaatagtatttaa

SEQ ID NO: 74516 - DNA, 614 bp, Cannabis sativa
ttcctcgcaccattgagaccacccaaacccatacatcgataccaccaactaccatcaccgaacctccttatttactcaaaactcaatccaacaaatttcaaatatttaagagttcgtttggtacgtcgtattataccgtattatattaaattgtattttatgtaaaactatatgtggtattaaattttataaacacctaaatatataatattttagtataaattaaagtttaacatattattatataaaaatataaaatataataaattcaatataatagtataatacttaattatactaataaaagtattagagggaaaaaatagtaatgagcaattatatgtgttaagcaatatttctgattatttatgtatagggagagtagagtaagtgagtaaggtaggtaagaaagtagatgatgaagcagagaaatataaaaagtcaaataagaatggtgatggagagaattgaagggagtgatatcaaaataaataaaaggcctaattaattaatccaaaacagaatcatcgctttaaatgctctctgctttggtagtcgcagttttaaatgctacgtaccctcattcatatatacacattcttcttcttcttctt

SEQ ID NO: 74517 - DNA, 647 bp, Cannabis sativa
actaacatgtatgtttgattataagactataatctaacatcctaaatatgaatttcttggggggagtggtgatctttgggaatatactactttaccaatacctagcccaccaaactaacaccaacaacaacaacaatcacatcaaatcccacaacagcaacaacaactaaaaatccaacgacaacaacagtaacacacctaacaaaaatgacggcagccaccaacacaactacagcaacaatagccgcaagtccaaccacaacaacaatgacaatcaatcaacccactatagtagcaacaacaggtccaataacaacaaccttaataaagacaccatcaataataataacaacaccaacaacctaataacaagaacaattagtggccatcatttctaccaagggcagacatcctaccccttggcagtagtctggccaaccacttgccaccactcttcctagtgttcctcccctaaactttaaattccctctaaagccaaaggctcctaggcaggaacttttaaagcaactcgagttcgcatagtgtctgctcagaaggcgtcatcacaaacaaagggatgtccttcaaaaaaggggtaacaatatctcaatcgttaagagagttgagattactgagggaatttgcac

SEQ ID NO: 74518 - DNA, 1107 bp, Cannabis sativa
gaggatttgtttgttgtttgaacgggaggtacatcagcattctgcccggaggtagaagcagccgccccggtttcaccataagctacttgggaagcgcagaagtcaaggtacatgtccttggcttcacccaagtagtcaaaatttgcctaaggattagccttccaaaagtcatagaagagctcaagatcggttgtctccaaggcatgaactttctctcccagcctcgtcaccttggccgcaagctcctcatcctccacccgacgaaggaccgctcgaagagatgtcctttcatcttaaaggctgctgacttcagcagataaagtgtcgatggtctcctcaagtcggtcagaagcctcaagatccttagtcagctcagttattttcttctgggcagtaaaaagcttcttgttggcttcacccaactccattcgaatagctctgagttttgccctggcgtcatgagcatccttcctggccaagtccacctccgccctcatggtgttggacaaatccgtgttcttggaagtagcagacttagcccgggagtatgtgtaagccaacttcagaccggtctacacagagaagaaactttagtatttgagccaagtaaagaagattagagaaaattgtcaagaaagacttacccttgtgaattccttcaagactcctcccatcagtagctccagagaagagtcattgtcagcaccggccaatttctcactaacgtcaggaactaatcagttcatatagtgggcgagcatctccttgcctttcttggcctctggaagcactggcaaaggtggagtaggggttcgcacttgctcagacccacctctcagttgttcagacctgtttgaactccctcctcaagactccttagacttggaaacttttggagtagaggagtttgcaactgtcagctcctcagaaagatcaatgacctccccggcaggcgtctcttccttagaagaggtctcctcaccacctctagacttcttggccgcaggagactcgttggagcttccgccaattctcttcttcaaagcattaagcatcttctgagacatgtctacacggatcaaaaacaacatggttagagaaaacaga

SEQ ID NO: 74519 - DNA, 681 bp, Cannabis sativa
ccctgctaccaaaaccggttcaccagtttcacatcacctatgaaaccgtaaacccgttttccctgctgcagaaacgggaaaaacatggtttttactccaaaatcgaaccaaaactcctccaaacctaatgaaaccttccagaacagtataattccaccaaaataacatatctaaaacatcaattcagcatatttcatcaatttatacaaaacaccacgttagaaccaaatcaagttcttaaactaacattccaactctaattccaacagccacaacaattacataacctatgcacaaggattccctaattaaattttgtaaacacagtttaaaatcaatgaaacaccacagccttaaaattcctagtaaaacctaacctagactatcccaaaactcaagaatttcaataggaaaagtatcaagaacttacctcaatacttagccaagcctttactccttccaaaatgatttaagacctaaagaatcaagcaaaaaaaactgacattctaaaattctaaaccagtccagaatacttccaaaataatccatcccatattgtcgtgacattactgaccacaccgtcaaatttcaacagtcgacaggcctgaaaatattttatttcaaaaataatattcacgatactcacatatttcaaattaatctccgcaattaataaattac

SEQ ID NO: 74520 - DNA, 1167 bp, Cannabis sativa
  modified_base (335)..(340): a, c, t, g, unknown or other
catttatccatcattttcatgtaagtgttttttagggattatttttttttttttggaaatataatggcgtgtttactaaactgtaactggaattaaaataatcaacaaaagaaatgaatcggtttaaaatagaatataatcggaaataatattttattatattgtttactaaattgtctaaaataaataaaatcatattattttgtttacataactagaaaaagtaatcggaattttttaattagacaaaattatcattattagaacatataattatttttctgtttataaatttttaaagggcatatttatgtcttttttatttttaattaatnnnnnnaaaattaaaataaattaagttaggaaagtgaaaggtattctctataaaaattggagagaatcttttcttttattttcttcctaatttgtgtgggccccactactttctctcttttcaaaatctagtaaacaattgtatgggaatcaatacatactattaattctcatttcctttatgtaaacatgccataagcgaataaatttattgctcacgcaaccctaattattacaaccaattaccagctaagagttcaaaagacagaaaaaaaaaatgtacatgatttatttttattagaacaaaaagttattatttgcaactaaaaaataatgttcattagaatagattaaaaacagctgataaattattttatatactattttttactctttttttttaaaaaaaaaaattatatgatttggattattctaatatagttatttcgttggttgctatatgagttactatgtagatttttataaaaaatacaaaaaaaaatgaaaataaaaaaactgttttaaaatataaaagtaaaaaaaaactagtagattatatattagatggtggcattttggatgagtctaattgctctataaatatatatatatatatatatatatatatatgtcaacacatgagcatttattttttgggtgtgaattaattagtatgcaaagtgttctaaattggataattaaagagggccaatgttaatgagtgaggctaagaagggaacacatattttgatttttgatgcttgtgtatacataatttggaaaactagaaatatatagctatatctatgtgaacataatgttccaactgtacaa

SEQ ID NO: 74521 - DNA, 873 bp, Cannabis sativa
  modified_base (765)..(783): a, c, t, g, unknown or other
  modified_base (837)..(847): a, c, t, g, unknown or other
atctgtatcaaactgaactttttggggacttttgccgcaaatttccctatattatataatatatagattatatataataaaaacatatatatacataaaaactctcttaatctgttggtcgggttaattcgggttaattgggcaggttggtattatttttaacccgcccaatataaagattgggcgggtgctttttagtttgtatttttcgtcgaattatctcggtttgatttgggcgagttgttcgggttgagaaatttacaaaaatttatgtacaaccctaatgaaaagtgtgagatttactacctcaattacttctccaacttaatccaacatttacacaataagaatccttcactttgtctcaaatctcactcataacaaataacgaagtttggaaagaaaaaaaaaggagaaggggaagggggttcggtggagcttcaagagacaagaaatggggttttcaactataaatttttagaaataagagtatatcatcttttattaaaattgtgatcaaatggcaattttgccctcatggctaaaaatcaacataataagcaatcaagggcatttctaccctttcacatcacacacatcctcatataaccatccatattttatgttatttgcataaccatacaattcataaattttagtccccgaacctggttcgagctaaaatacccgattatgactacactgcgctaacttgtcgaaattcacctataattgttgtggtattttctgttgggttttgtgccnnnnnnnnnnnnnnnnnnnatataatcagatttactaattaatcaatattagaaatcgcttttatgttgcatnnnnnnnnnnntttatttcatgattgtttaatgtata

SEQ ID NO: 74522 - DNA, 979 bp, Cannabis sativa
aacaaaaataataataataaaaatcggcaaaaaaaatgataaaaaaatattgagttttatttaaatatttttcatataaacttattattgatataatgttaaaagatgtaatttttgattttttttttttaattaagtagctaatttaagcgtagaaattcaaatttctcttttattattcaccatcggatcaaaatctaatgacttaatatttataaaattaatatttttagttaaatttatttagtactcattgataatatccattaagaagtgttccatatatatatatatataaattaagagtgtctttgtaacactttaccaattagttgtttttttaattaaaacatgaaatttttctaaaatatattttgtaaaattatttttatttttttattttttaattaagaatcaaaattaaaaattttgaaaaaaaaaattacttttagaattttttaaaatattttttttttcttaatcaatatatttgactctgacagcaatttgaatattgggacacggactccggcctcagccctagttccagactcagaccaccacctcggtctcagacttgaatttaaactttatttaaataaaatcaaaaagaaaaaagaaaataaagttataaaaacacttttgttttcgtttttagaattaaaaaataaaagtggttatagaacgtatttttatttttaaaaacacaaattttagttttatttttgtgattaaaaaattaaaaaataaattttatgtgtagttcaatatagttgtgttaatattttaaattataatacatgaattcgatatcagttcttgatgtaagtttgtgatcataaattcataattggagaaaatcatagagtccaacataatccatgattttgtttaaaatttagtgataattcaataattattaatgattaaactttacttgatttttttcctttggtgagagtcagtaatattatttaaa

SEQ ID NO: 74523 - DNA, 915 bp, Cannabis sativa
ataagctttatctgtgtcctgttttaagaggttttgtagaaactataaatgcttgtcaaacgatgttcatagagttaatctgtttctttttttcttgtaatatttgaaggccttttttcatacagttgtttcctctgtttaactgtgtagtttgggatgcatttttctgttgcttccatattatgtgactccttttgccaaactatgctttccacacatctattttatatttcctgctttctttgaagtattattatagactggcatcatccaaaataggtttgcaagaatgttatcaattaccaatattatatgtgtcaataataaaataaaggcgagataatagcttttagtgtgttgggagcttttatatcttattattcactgactcaatttgactttgtattattggcaaggataccaacatgagagttgttccaattgttggaggaatgtcattcgagaaacagacaaggcttctaaaatggaggcctaagattgttgttggaactcttggtagattatgggaactcatgtctagggtgacaagcatcttgtggaggttggtgctatattaaatcatttcttctgacaataaaatcgaaataagaaaatatctttgccacacaagttctttctccaatgttaactctggctaaattggttctaagtatttgtgtccatagattttctttcttccatatttatcctttaatttcttggcaaatgctgttgagttttaaatttgttatcagtttgactcctcatatttgctttgtagttacattcattgtcttttttcgtgttggatgaggctgatcgaatgatagaaaatggacatttccacgagttgtagtcaataattgacatgcttcctatgactagtggatctgctgaagtaaatcctcaaaatac

SEQ ID NO: 74524 - DNA, 1101 bp, Cannabis sativa
cagagttattgagatcgttgacagtagcttgtgttgcagcaattctttttttcataagaccaaatttggtttggtgccatgattgtagattagctgcacatatctctaaattgtgtagtatcatatcgattggttcaacaccattatgacaggaccaatgttgcttgataatttctgcactttcagggcccgacaaccacagtttttcaaagcgaaagcgactccttcttttttcaggttgttgtaatgatgtggcagtagaaaaagtagctgagatgacacggtggtcagccaaagaaatccaaatgttgaacatgtggctgagaaaaaattgggctccaaatgtgattaataaaacaccaatcaagacgttcacgaagggaattaggagcaatacgatccttggcccaagtgaaaacatcagcctcaacctgagtttcagataggcagcaacggtcaagagtgctgcgaaaagcttccatttgagattcattgcgtagacaaccccttgatttattagcattagagagtatctcattaaagtcaccgattgctacccaaggtaggagcggagcaacatccgcaaagcgcttaaaaagagtccaagaagcttctctcatgttattggcaggttcaccataaaaggctgtaaagtggaaagatggccctccaattggtgccatataacaatcaaaaaagacctttccaaaatgtaacaaagtcacctcaacttcatcagtccaaagaagcattaaacctccacttaaaccaacctgtggagactcaaggccattagaaaaacgtagagctgtacgtacacgatcaatagagttgccacttagtttcgtttccctgagaaacaaaacttggggagactgttgttgaactaacagtcttagatgtcgaaacgcactcgggttccccaaaccccgtgcattccagcttaaaattttcatggcgaaaggcggggttgcataacaacctccgctgaggagtcaaatgaggtccgagaatcaaggcttgttgaaacttaaacctgaacaccagcatcctgtgactgagaggatgtggctgtgccagcagtaccacgacatcttttta

SEQ ID NO: 74525 - DNA, 666 bp, Cannabis sativa
tttaatattagtcgtctttttttagagatagaaaaatatacggttctcacatattaaaatagtcatgttattatttatatatgtgtaaaattttcaaaataaattttttaataaaaaagcaaccaattgatatcttattcacatcaaaaacaactaaattgttgctttttttcaaaactcccaaaaaataaaaaatttctgaaaacgagatttttccagttttttctattttcggtaattattttgaatttcggtatgtatgctgacgtggcacaacaatatttgtacaaataatttttttaaagatatttttataaataaaatcaattttaggtataatattaaaaaaacctcaaaaataaatttataggattaagtgttacttggattttttttaaaaaaaaaagtattaccataccaaccattaaattttaagtgtttttctcctaatatccttcaatgaaaaagtacaatccagtcgtcaaataatgtcattgactttctatttaaaaaatagaataaatatgaagattatactatattatcaaattttcctcaataagcaccagtggtctagtggtagaatagtaccctgccacggtacagacccgggttcgattcccggctggtgcagctgttttgttgttgggactttttttttttttt

SEQ ID NO: 74526 - DNA, 1603 bp, Cannabis sativa
tacttcaaacatcaatttgtgggattaaatgtcataaatgttataattcagttagttttgaaatattttttgtcaaacttttcattctagctagtatcgttattttcataaatttgtatccattatttataaatgctctgccattatttacaaatgctcaaaccattttggatcctgttttgccactttcttaagcataatactctcttaactctactcttaacatcatatttaattttgtttacaattgcatttataaattttcatcttccaaagaacttcattcgtgaaccacatatccaccatatatggtacatcgatcaccgttagtgttgttaaaaaaacttggcatgtgaacattaataactcattattaattagtactaatattcaatttcgctctagtcagctattgcagtagcctcggtatggtcaatgttatccagttcaaccaaaatttttttctagccaaaacatgaaaactcaagtgatatatatttaaagaataagtgctctccattttctctgatcagtccacaaatcagacactcttcatctaaacaaatattgtatttgaacaaccttgatttaattaaatctcaatctatatccaatactcttaacatgtattcctgtggtagcttaggcatctatttgtcaatccaaggcctcgggtggattggtttttaggtgcatttcagactggaacaaagcaacattgtttaaatatgtttgggcagtggctaagaaagaggagaatttatgggttaagtgggttcacaatgtatatgtaaaggaggagaattggtggacctatcaacctttggcacaagcgagttggtattggagaaaactagtgatggtcaaggaacaaatgaagaacctcggggatttaaaacaaacacaaagcaaatatgaggtgactatcggttacaaggaattgcatacacatttgcctaaggtggagtggagccatcttgtttggaatagattcaacctacccaagcatagtttcatactatggcttgccatgcttaagaagatgaagacaaagctaagattgaagaactttggggtgatagataatgatagttgtcttatttgcaacagtggcagcagtgaaaccatgaaacacttattttttgagtgttcttactctaaggactatcttgactgaatcaaaagctgcttgcattggggaaccacctcggtttcgttggtatctatcagcaagtggattaaaaaagcaaagttatcaaggttcaaaaagtaggtgttagcggctgctgtggtagcgatggtttatctgatttggggtgcccgaaacaacatgttttggaaccaagtttcggaaaatagtgataccattgtatatagaattaaaagtgtaataaaaaatagaattacttgtatttggctaaagaatgtaactagtagtgaagagcattggtttaatttgtaaagattatagttgaggtgtaggttctctaaattggaggatgctattaggttgtaagaaattattttttggtttataatacacttactgatttactaaaaaaaaatctatatccgataccgcaatccacaaaatgaatttatg

SEQ ID NO: 74527 - DNA, 835 bp, Cannabis sativa
tatgtggacgacattatcgtcgccacaaacaacacatctgccttaaccaaattcatcactacccttgatgcacaattcaagttaaaagatcttggccctctccatttctttctcggtctagaaattgcacgatgccctcaaggcatctctgtctctcaacgaccgttcactattcaattgctcaaagattctggctgccttggttcaaaaccagtgtccactcccatggaaccaaacattaaacttagcactgaaacaggggacttactaccaaacccaactcaatatcgcagcctcattggcaagcttctatatctcacaataacacggcctgatataagttttgccgtaaataaattgagtcaatttttacatgcccctcgacaacctcacttgactgcagccacaagaattttacactacctaaagaattctccagggcagggcctatttttccacgcatcatcatcatcaccactccaactcaaagcttttgctgacgctgattggggagcatgcctcgacaccagacgctccatctctggctactgtgtatttcttggccaatccttaatctcctggaagtcaaagaaacaacccacggtttcccgctcctcagccgaagcagagtatcgggcaatggccaatgctacgtgtgaactaacctgggtcatctccatactgaaggattttcacaccaacatccagctgccttcaactcttttttgtgacaatagcgcagcaatccacatttcagaaaatccagtataccatgagagaactaaacacgtcgaaatcgattgccacatcgtccgagaaaagatcaccaatggca

SEQ ID NO: 74528 - DNA, 1006 bp, Cannabis sativa
acactcttatgggtgattaatatgactttcttcatcattgtagtgaaagcttctcttcaggactcacatattttttctctactacagaccaattggtgtgaagaccaacgaaccaagttgcactgccaatggcaaggtatcaattgtgaccattctggtcacattactcaaatcactttacatgatattaatgatgggatggcttcaatggagcaaagaatgttaaagaatctcaatttcacttgtcttccaaatttagctactcttgatctatcaaaagcaggagttgttgggattattccaggggagataggtactcttacaaagctcacccaccttgacctttccgacaatgttcttacaggtgagatacctctttctttaacaaatctttctcacttgaaagtacttgatctctcttacaatcaactcaacggttccattcctcaacaacttggcaacttgaatagtttggtgtccttaaacttaaccacaaatgccttaacaggtgcaattcctgagtccattggtcttttgatcaaccttactcatttaaatatgtggaacaatcaaatcaatggttccattccaatcagtataggaaagttagaaaacttgctccatctagatctaaaccccaactacctcagtggaccaattcccttggctttatttcgattaaccaaattaatccatctcgatatttcaaataacaaacttaatggttctatccctaaagctttgggtaatttaaccaatttgtcgtatttatctcttcatacaaaccaattaactggttccattccttcggaaatacgaaatttgacaaacctagaatatttggaccttcttggaaacaaattaactggttcaattcctcgagaaatcaaaaacttgagaaacttaaaaagcttgtacctgagtcaaaaccatttaaatggttctatccccacagaaatcgactccttgagaaacttaacaaatttggagctaagtctaaaccatt

SEQ ID NO: 74529 - DNA, 721 bp, Cannabis sativa
aaaaatttcaaaaatggggggaaaccaaaaagaagcctgagatcgaatactagcaccatcatttccctttttagcagaatcatgagaaattttttcatgggcagcaacctttgatttctttttaagaggaccttgctcacgtttagataactgaggagaaaaatcggagtcatcgtcttgaacaacaggacgtttgcccttattcctattagctaaagatttcaaccccattttagaacttttctttggcacagagaaatgagtggataaagaacgagtaatagccatatttataaatggaataagagaaaaagaaaaagaaggaaaacagttatgtgaatcggttaatgtgagttgaaaaaaaaaatggaagaacagaaagaagagggaaaatgagttgggatcgtggagggagaagagttcagctatggagattttgattttaaaaaaaaaaattgaaaagaaatggaaaataataagaaaaagaagagaaaatggagggaaatgatgtaatgtaagattgacataagacatcaatcaaatgacgtgtcagctgcatgtagtgtgtgtgcatgtggtaaaaatgtaataaaataaagatgatgagtataaatgttgctttaacagtgtgaaggtattaatataataaaaattgcatcttgtatttttggtaacaatttctaatgattttctccaatatttgttggaattttattttacc

SEQ ID NO: 74530 - DNA, 957 bp, Cannabis sativa
aagtggtcaaactgaaaaaaaataatataaattacaaacccaactcaaccaaacatggataactcaccaataatggtgtaaagcaccaagcttttggctgtgactggacggaaaaccacaaagctaatggtgattagaaatgggatgagacttgtttttgatcggagaaggaaaagagtgtaaactcaatgtgagtgaatagaagaagcaaagcatcaagtgaagtgattatttttggttatgagaaaactaattagcctttagataaataccacatattctttggaaaattacacaaaatttgtatttttttttacataaaacacaaatttttgtaaaattgttatatttttatgtatagttttttttttttacatttttacagtattcaataaaaatataaaaaaataatatgaaattaacaagataataatattaaaacaacataaaaaataatatgcaaataacaatgaaataataagagtacaacataaaatatactaaaaaattgtacataaaaaataatatgcaaataacaaaaaaataacaacaaaataataagagtacaacataaaaatacaccaaaagatcgtgttttatgtaaatacaatctaaaaaaccgttaaaatgttgaaaattctgtacagactgtatttttgtaatttttttattatttttgtttattttaattattctttttttttaaaaaaaaaatacaaattttataggtttttgtaggattttttttttttttttcaaaaagtttattatatgggaaaattgaagaaaaggttgaaaaatatgggaaaatcaggtaaaggtaatctaatactcttatgataatcagagggtaaccagttattataaggggataatgctttttgctgttttttttccacaattttttttttttaatattttccataaaataactttttgaaaaaaaaaatcatattt

SEQ ID NO: 74531 - DNA, 783 bp, Cannabis sativa
actcattaaataatgctataatatgtataacatttaaactatttatgatgtattaaatttaattattttcaatatatgttaattttttaaaaaaaatgtaatgatatttaaaaattgaaacaaatttacatagagtgacatatatatcgcctaattttaatgattacgattaatttttctaataatatatggacatgagctttatttttatataaatttgattattattaagttatttgcggctaaatctctaattttcacattctataacaattgaccccttgaattctttttttggcggctaaacctgctaaattacaatttcgtttgcaaatttagtttggcggttaattttatctgttttgtgctatgttggactgtgttgtgatgaaacaacaactcaacaagaacacattaaacaaaacaagaatcaatgaaaaccaattcaagacaatcactgtgttgcagcaaacataaaaccggtaacaagaacatcaaatgtaaatagagaacacacaaacttagcgaggttcaaacaagataatggtgaatcaccttgcctacattctcgaccagaaaacagccacaataatggccttagagaatctttattaactggtcttcaatgagagattacaacagttcaattacacaacatgagaagcttagcttctgcaactgaactcactagtggtagtgatgacaaacaatgtatcacaccattacatcactcaaagggaactcatctctctctaaacaaacaactcataatcaaccctctct

SEQ ID NO: 74532 - DNA, 552 bp, Cannabis sativa
gaccgatcctatggtgggtagcacctactctagggtcgtatcctcatggtagtataaagtcttgatacttaaagcaagtatttacacaatccatcttcatatgtaggtagggtgtgacacgatgaccataagagtgtagggggtgaaaatttagtcaccttgactaagccacctaggggttagtcacttaacctaccccctgagggtagtcactcaacatacccaagggatagtcactcaacccacccctggggggtagtcacttaacccacctgggggtagtcacttaaaatacccatggggtagtcactcaacataaccccgaggggatagtccctcaacatacccctagggggatagtcactcaacccacccccagggggtagtcgcttattatacccctcggggtagtcactttacccaccttaaggagtgtatagctttacttccccctgtacatagttcaaaccaatggttcatccttttttttctctagaatccttgtgtctagtgactttacacatttcccattaatttaatcttgaatacttt

SEQ ID NO: 74533 - DNA, 908 bp, Cannabis sativa
aataatataattccacaatcatacacagctaactagttagggtttgctaatctattctcttaatcttagggtattacataaggaggagtttaatctagctcaagataagctggccaatgacccttcaaatacttagttacagcaagctaaacaggaaaagcatgctgagcttgtgatagcccaacaaaactactcaagctttattcaacagctgagtcaaataacttggcttcagtttggggatgacaattcacaatattttttttgctttcttaaaaaaaggaagactgaaaatagaatgacgtcctttataaaggatggtgagattattgatgattatgattgtgttattaaccattttgtcaatcatttttgcaattttttgggcaacaaaagtgtagctaacaggaagatagatttggattccctaaattagggtcacaagttgagcattcagtggcaagtaaacatgatcagacctttcacaaagaaagatgtcaaggttgcattgtttgatatacgctcttttaaaagcccgggaccggatggatttgggtcgaggttctttaaaggttaatggaatcaaataggtgatgagataacagaggcaattctctattttttttcatgataggaagttgcctagtgacctcaataaaacagttatctctcttatacctaagaaagataatctggcaactgcagctgactataggcctattggttgttgtaataccttatacaaatgcatttccaaaatgctttgttctcgtcattcagaagtgctcccttctctgatccacaacaaccaatgagcatttatcaaagacaaattattggctcacaatatcttaacttttcaagacattttcaaggggtatgctaaaaaaaatatctatgcaaggtgc

SEQ ID NO: 74534 - DNA, 654 bp, Cannabis sativa
tacacataattttcatggtgcttcataaaaatatcattaaaaaaattcgtcaaaaaataattcattgtgtaaaaatatatagtatatatttaaaaaaaaaatgtcacataaggtgtaaaatgcctattaatttttaaaatgggataagttaaaaaagaccacttttattaatcaattgatcaaatttgcctctaattttatatttaattgaaacatacatctttttatatgtattgtacccaaaataccctgatataagataatcacatggagagtatcttgaagtgacaggggcaaaattagtataatttttaaaaaagaggtaaaaatgataaattttaaaaaagaggataaaaataatagaagacaatataaaaagggtatagtaatttctatttttaaaataataattaacaataataatggaccgattgaattacattgggctgtcagctgtaaatgggcctagcataagcggacctatatgatatacatcccaaagaataattatgttttatgacaaaaaaagaaagggcatgaaaaaacttattgggcataagcacaatcatagcagcaaatgtgcaatgacatgatacaagcacaaggcacatcttgattctggctgtttttaaatgtccaataaatatctcacca

SEQ ID NO: 74535 - DNA, 851 bp, Cannabis sativa
ccagcagagggaggctaaggcggaggcgtagcaccgggaggagctgaaggcagagggcaaggctacgaccaaggctaagcgtgagttgcgggaagccaggaaggctatggatgagatggccgccaagttaaaatccttggaggagctgcaccaggcggacttgctgtcgacggccaacttgaccgtagatgtgaaggagcttaggggctttaaggaccaagccttgaaaaaggccaaaagggatgagctccttaatcccgtcgtctgcaagcactgcgtcaagcgtattgacgatggcgtttatatggcctggtagtccaatcgccagaacatcaagcttgacttttatcccaagcccgaggaaatcctcgttcgctttcgggagaagaagaaaaggcttgacgctttgctcgaggaacgccggggccctcgccttcctccacgcattgattaggccgaccaattcaccattataattgtttttctttttctttacatttacagtctcttttcttttctttcatacaagttaattattatcttctaaggggagacaatttttatggcccatccccaggcccttaatacttttttaggacctgcttttgggtcaggacatcttttatatttacatttaaatatatatttcgcttagatatacattcttcctgattttgcttttacttttggcctgtttcacatttttccgtgttttatgccttagtacccccctgagtggcaggaaaaccttatttttaaggcactcagctttattcataaattaagaggttgcatatacttttcggtacaaattctcttaacaaagcctaagtttacattttttgactatt

SEQ ID NO: 74536 - DNA, 934 bp, Cannabis sativa
atatgctctgtatcccccgttccgccgtccgtccaatgagatcgttatcggccatggcgatggtggtttcaggagctcggtttccattgttcctcgtggttcgagacggtcagggatggtgactaaacggggccctctggccgctggcagttcacatcggtcggtgtgggtttccaagcagagaccaacgggtggtgtacctctccgttctaaatcgggtgaagatggaaatgttgaagctattcattttgaaaaggagtctggaacgtttcctggaatagaagtgcctattactgaagctataaatgaccgttcattgatgagtgtgcctattttgaatttatgtggaaaagaagatgtggtctctttagtggatcgggcccaggtggagcccatttctgcaagtgggccgaatgtaaatgctgaaacaattggtgtgaatctcttgagccaagaaactttgaatgttactaatattggaaataaaaaaagggatgttgggcctattgctattgggccgtgtgtgtttaacaatgggttggctgcccataatgtggacaagcatactagcccaatgttccttgattctaatttgagtaatattgttagtgggcctcctcccattaataataatactctctcatgtgggcctactttgaagcaatctaagaagttgtctactccaagccgtgagttaatggggccggctgttttgggtactaataataataatagtattgggccaaatactttatctcaagctaatgttgggcacatgaaaactacatccattttgcctaatgcttctcatggtactatggagcaagataatgaagaaaaagctttgactcagttttttaatgctcaagaaagtttattgcatgacctcaagcactttgggaacctcgacttgtatgaaatacggaaaatagga

SEQ ID NO: 74537 - DNA, 2124 bp, Cannabis sativa
caagagagagaccagttacaagcatgtcttcacatcaacaatttatgttatgaaaaggagaccaattaacgcttaagcattgaactacgaaattaggatcataatggtgatacaatccatatgttggacaactaaattaccaatatacgacttctaagtttctgatagctcagaagatcaacaaaatctgttatgcaagctcaagtttctgaatcagaaatctttagtccttccaaatgatgacgaaaactagttcttcctcaatctacccaatacctaatttactgcctaaactgtctaacgatatatgttttacaataatattatcaaggaccgtagattttactgctttcgtgttcaacctcttgataaggaaactgattcggctctcaaactagaaaccttaatgtttaattataaattattttcaccttgggtttactggttcataactataataatcacaaagggaaaaaattcgaaaagtaatgtgaaagaacccacttaaagaatagtaaatatgaccataattccaccaaaatatatacatatattcattccaaattaaacccttaaaccctacctactccaatcacattgcgagaactgagaagtttcatctgaataaatacatacttagtagcagtgtgaaattaggcactttttaaacgcattttattcgaacaccaagaaacactaaaccctaatgttccgttcaatacccagaatcctacaaaaccctaaaccaaattttccggtcgacctaagtttcaggcagaaaagatgtgtactcgcgaccagtaccacccaaaacatcgaacattataccaagtataaacgaagacaaagaatttaaacacgaaaaaatggagtggagaagaaaaaggaaagcataccgaagcttgagaagcaacttcaacttcgtagggagtgaactagtgaaactgactcagtgaactcagatcagaactccgagttacaaattacggtggcggcgaagagaacaatcaatgaaaaacataagacctttaggaatcttcggttatcttttaagacaaaatgggcttcggcccatgtttcttctttaaaccatggcagctatacgttaaaatatttacatcctcagcaattcagcatgttacagaaaaaaataaagaaatcttacagtttttttttttttaaaaagttttaacaaaaaaaatatataattttgtgtgaaactactatattataaactaaaaaaggtaatataatcgcttttcacgcggctaatttaattttttttaagtaatataataaaaaataactatttattcatataataaatagttttctaaaaattgttgttataaaaaaaataaggtggtgtagtaaaaattaggatgtttcttataatacatcatgattatttaaaattattgtaactattgtatctcatatgtttttatcactatatttcacatgttgtcatcaccgtaactaatttgttatcattagagaaaatctttccgtccatgttctgttattcttaattagtatgtttaaattttataggataatatgaatataaaataaatggaaggttatttttaaatattttatattaatgttgttgatgatattttaaaatttaggttatttttgaatttgatatttttatatatttttgaaaaataattaaatttaatattaaaaaaaataagaacgaagtcaagggcggagtcaagacgaaaaatttagagagggcaattattaaaacaaaatatttttatagaattgcatgttacaaatattattaataaggagtgtttagatataattgtataattagtatgatattaatttcctaattatacatattctaataaatatattatattttaaaataaattatgtatttagatataaaagtgataatttcatattaatttttattgttttgtttagtaaaataattagtaattacataaaaaatcatattatataataattaatatttaacattgaattttttaataattataataaattttttaaatattttttaatatactagtaattaattagtcaaaaaaaaatttcgttccaaaatattcttttttaaagttattatattttttttct

SEQ ID NO: 74538 - DNA, 1229 bp, Cannabis sativa
atagcaacaatggaaaatgcaaatatgggaggtatgtttttcatattgtttgtgatgctctaaataaagtattgatcttggttcataatctgtagtagattaacaaagaatttataagattttctttctacaaaataatttataaagtattattattataaagatagtgtatatatttttaaaaaattgctaaaggatactcacgttttatggtgtctagcattcttgtgaggtgtaatatcgttattcgtataatttaatattagatcctacttattttaatttaataaagattacaaagaattactaaccacttataaaattccatcgcatagcggtgctagattcttcggtgtcacatagcaatactctatttttgtagcatataccaaattttacattataataaatattactttttttttttactcttttgctactcattataatgtaatttttatattttatttcatatattaataggatttttatacactttcaattaaaatttaataattttgttgactttcttacacctttctataaatataaaattaattttacccttatacaatggtaaaattttgatcaaatataatgtttgactcatttcttgaggtaaatttaacacaaattctgtaccattttttagagatggtctaactagttgttaaaaaaaaaattattaaaggtttgttgtagtttttcaaaatgggaacatcaatttctataattaaaattaacttatataataattaaatttatagttttccattgagtacatagatacataaactttcaataggcaacatatttagtattaagaaagaaagaaaaaaatcatatctagtgtttatagacctaagaagtaattaattataatgagattgataattcaaaaaaattatatgtactttttataattgatagagtaatttgtctcttatttccattagttgaggactttgataaaaaaataactttttgagaattactttgccacttgtaaaaatatattttaatagaaagatagtcggttataggtttatctttttcttctacccctacttttaaattgacatagaagaacccttagatagcaaaagctacttttgttttcaatttaatagttgtaatcttgttgaggttttacatcactaaaagtggggtgagagattacataattaacatattataaattggtaagatttttttaagcttttgaggcc

SEQ ID NO: 74539 - DNA, 1350 bp, Cannabis sativa
gtgtggatttaaccaaatccattctaactaatttctgttagggtttttagagaccgaaggtcaacttagggattttacttgtatttacagttctgtcctcgtgtttaatttgtattgagtcttaatatcagtgtaagtggaggtttactccaacaagtttttaacaataaagatttataagtactaaaacaatttgacttgtttaaaaattgctttgatataatttttaacttgtaatagcagtaaattattttaagtaattatagattaatatgaatagaaattggatgaaaaagaatagattttcaaaaaagtatgaaaatggagttaattatttcatgaatttttccatgcaaaatgaagaggatcctactatgatatcttacccatgtatgaagtgtggaaatttaaaaaaaattaaaagttgtagatgtaagagaacacttatacataaatggtatagaccaaacttaccaaaaatagatatggatatggatatggcatgagtacttaaattgaactttaaaacattttctatttgaattatttttctattcaaaaattacgacatatatataaatattttcagggtcctaattaaacaacctgacggtaaagcctgtggtttttacatcatgcgactaatgagagacttaactatgtcgaacaatccaaaagattatcttgtgaagcatgtatgtgtttgagctatcatacttttacaatataatttaaattttgattcataaagaaactagtatatatataaaatttgactgatttttatattgtagtgttatgttcagaaaacatactcaatagatgagatcaacaaagtgcgtgaagaatgagtctccaatttaactgagtgtatatcatgatttagattaaaatttattaagtatatatgactaatcataattattgtcaaactttgaactaattacaatatatattattatataatactttattctattaagagatgaattacataatacatctatttgaagtattgaaagattattttacaaattatatttgaattgtaaatttttgtatgcaatcaatgtaatagcagagggaattattttattttttccaccagtacactctctcggcgggctctttagactgccgagattgaccaatattgggaggccagacccgtcgagataggtctcaaaaaatattaaattgggataaagatatacctatctcggcgggcatagattgctgagaatgcatcataattaccgaatggtcgggactgccgagatagattcaccaccaatctcggcattgaaatttatggcaggtcagacccaccgagataaatcaataatggaa

SEQ ID NO: 74540 - DNA, 622 bp, Cannabis sativa
tttattttttgaaggtgcttataggttgtaaaggtgtttgtttgcaatgaaatggctgattcatcaaaaaaaaaatgatactattgtttcattatttattttaggaaactttgttcaaatctttcaccataagaatatcaccatttctctacgcaattcatgaattgcatcagcaaaatgtgatgtttaccagcaaaacaaagttgttttgccagtaaatgtattcccaaattatccccgatcgaagaccttttccggcaaaatacctcgctgataaaaggttgttatgtcgatgaaacaacctaattttgccgacaaagagtgctaaaagccaagcgcgaacattataatgccctgacaaaagtctcaaaaaaatagagaaaagtttctcgtgtggtggaaaatatgccaaaacgtatgctggaaaacacttttaccggtgtaattaagctcgccagaaaaagtaaaactatatatgaaacatacacatctagtgtttcaatttattttatttcttaaaacctttgtcagcctattgaattacgccgacaaaaggtgaccttgatgaaaacccacaaaactctcttctatttccccattttctctttttctttctatttct

SEQ ID NO: 74541 - DNA, 711 bp, Cannabis sativa
ttttttttttttgaatggagttaattcttagttgtatgcatttttttttacttcaattttattttattttttagaaaacatctatccttgttagttttaagctttgtatgctctattctatataaatatctacaagcataaatataaatataaaaatcatcaaacttatgagaataattatatgtaggagtgatgaagacgtaacctataaaagatgaatatactacatgaaaaaatgaagatgatttcgatttacatatcaacaatgacggattcaggatttttactttgtgggggcttatttattataaaaatatgtttatagctacattataatcactcttattaaatttatctaatttagtgagggtttttctactattttggcctataattattaaattaaaaaatttatatttaattttttaaaaggtaatatttttgttcgtgggttatagcccccacatcactcttaatgagtctgtccctgcatatcaatactattttattttgtaaaacaatatatgcatgataaatataattgattgtctttttaaatggtgtattttttattttatattttatcaattagtaataattactatgttttacataaaaataactacaagtgcgctttttctccattataaaatgctaattaaattagataaagagaataaaatgatactaaataataattatatttattct

SEQ ID NO: 74542 - DNA, 1303 bp, Cannabis sativa
tttcttatatacaactgacatttacaaaaacacggtttttcaattatatatatgtgagatatgtaacatatatagttgtgtaataattaatatattttgtgtatgttatacatgagatattgttagtaacatacatattatattaattaggataaaattattatttgggagttataattttatgtatgggaattatacattaatattatattgatatatgagttatgtagtatgataataatgttgatagtaatataatattgtatatattacagatgtaaagattattattatcattgaataaagagaatttgaaattcttttttcattagtgatttttagaaaagaaattataatttgtgagaagttacattctttaataattaaaactgataattatctcattttatgagattaaaaaagtgaactatgagagttacatttatgagaattgtcttgtcatagcaagaacaaatggataaaaagtggatctacacttgtgaattgagtcataaattggaagagcagttttagactcaaataaagtaaattaatgtggattcaaaaattatgaaaagataacaaaattggagaagcaattataaatcttaaataatcaaagttgtgaacaaaattcatgagaatttttttaactttagtgtaatatttgagttaatctaattgaggagaaaactttaaaataatgggtaaaataatcacattattttgtaagtgatgaggtaagtttgatattttaattttgttgagaaaactaagaatgtcaaatgatatttttctaataatgatctctaagaggcattttgaaaaaataattaaattaaagctgtttaaataatgttgagattatttagataactaatatcggttaaaagtgattcttataaaaatttcactttatgttagtaatgtgggggtgagcaacaaatttaatcaaagtgtgttgaaatattgttaattaatttatttgattttgaattcaaattctaaatcaagtttggctatgtgcataagtggagatattgacatattttgtgtcaaattttagtgaaaaaattttaagaaggaaattaaattttagagaaattatagagacaatgtggttttctatattttaaaattaagatattatcttgatagagaattgtgaaagtgaggtagcacatactccaatatgagaatttgagaaattctcggtgtcttaaaataaagtataatttagacatatttggtgtctaaattagtgtttaattttgatatgcttggtatcaaaattattgagaat

SEQ ID NO: 74543 - DNA, 566 bp, Cannabis sativa
attgttttatttttataataatttatatcataatatattatttataaattaataatagcttgttattatatacaaaagaaaataattattagagtggaaaataaaatttagtgtattatttttaaattttactacaaatattcaagtatgttatttaacaaaaaatatagtacatttcaaaaggttttttaaatataccttttatctctttggacattcataatagttttttaatctatttttttttatataatcatatgtattataattatttaaaataatttataaattattaaaataattcatattaccaaaaataagattcaaatattttattgtataagtaactatttttttcttttccaacacagaatataagtacttgtttaaatcttatttttcgacactacaaactatttagaatcttttaaaaatttataagtgatcctaaataattataccatacacaatcatgaaaaaaaaattaaaaactctcctaaatatcaaaacagtaggaagtgtatcaaaacaccccttttaaaaaatgcacgtatattatttttaat

SEQ ID NO: 74544 - DNA, 1210 bp, Cannabis sativa
aatttaaaacaaggagagaatttttgagcaccaacctcgtagacgttaaaggacctatatacaaaacaaataaatatgaacaaaacttaatttaaataaatgatagagaaaaaatcaaatataaaaaaatgcataaaaaaacatcacctaggatatttaagcaataatttgctaattcattctcaaacttcgcctcatgttttgaagaaacgagatcaaaaaaagaatcatcaatagcataaaggccgttgacatatgtaaaaatcttgaaatcccgctcatctcctgcatatggagaacctaaagacataaactccaatggagtggtcttcaaatctgaagaactaaaatcaacaaaaggagattttaatgtcggggcacactttatcttgtcaagaaaaggagtacaaggaagagtgtcgtcctcttcttcttttgaaacattgccatctgttttttcaacttcctcatcaagaagggaagcaggaacttgaagaaaatgaaaggtaacaagttttcaatttgacatttttacaacttgaattaaaaatatttgcaacaatgtaacatgatcatcatcaatctcaagatggcttaaccccttgaaaaaatcagcaccctttaaatcaacttgttttcccttcacatttccaacatccttgggcttatcatcttcacttgctacagcaccctcacattttttctcaccaacctctgaagaattagcaccccccttatcaccaaccacatcatcattatttttatcatctttaccatcaacactactatgatattcatgagaaccatcaccatcataattaacaacactatcaaaatcatcatcattcttctccgaatctgcacctatattatcttcttcatcatcgtcaaattttaacgctttactatttttagctaaattaatctgtaggaaaatcatgaaacaatccactaagaactaaataacaaaaacaaaatatgacttcaaattattaaaataacaacagcgtaaaatgacatattcaacatacctaaacatgagacctgtcacaaaaatgagtggcctttcacttcagttaaataattacatccaacacacccttgaaattaagctccattctatgaacaaataatttcattgactttctctatcaaaaactctatatcaggagaaaagttcttccccgatgaagaaccaacatcagcttag

SEQ ID NO: 74545 - DNA, 743 bp, Cannabis sativa
aggagggaatgaagaagggaatccggatgagaccatatcctccaagcctgtttagccagaagagcctcgttgtgggaagtgagggatcgaaaaccaaggcccccaaaaaacttagaagcagagatggcagaccagcttttccagtgaattttgctgcgattagtgttggaaccccaccagaattttgcggataaactttgaatagatgcacaagtggatttagggagtctaaaacaggacatagcaaaagaaggaattgcttgaataaccgatttgatgagagtttctttgcccgccctggagaaaagctttccattccaagcatttaacctagaggaaaccttttggatgagataatgaaaaatagagtttttaactctgccaatgcaatgggggaccccaaggtatttgctaatgaaaccttcaccattaagcaaaagagaagttcgaaattggccttgagaagcaggattggtattaggagaaaagagaattgaggatttatcacgattaacagattggcccgaagcttggaagtaaagaagcaaaattctgtttatggcttcagtggagtgagaggtgactggggcaaaaatcatactgtcatcggcaaaaagaaggtgagagattgagggtgcacctcggcaaattttgaggcctgagaacagagcagcatcctcatgaatacggatggctgcagataaaccttcagccacaagtaagaagagatagggagagagggg

SEQ ID NO: 74546 - DNA, 656 bp, Cannabis sativa
aaaaaaaaggcacgaataacgatgccgggtgaggcagagccatggcattacgtccattagtggaacccacaaaaccatccacttgtatctaatatctataaataacatttacattagctaagactattattagtccaagcctttgtcattactttgaatattttctatcaattatatactctattatatgatatgatctcattctataattaaatattattgtccaatataatatatatggttatgcatctatgtcattggttaaaaatctcattaatgaagaggattgctatttgatattagaagtgttatatactacaagatgacactttatacatatatatataaattagttaataatattttataataattattcaattaaaatatataaaatctaatacttaaatacactttaaaataacatttctaaaaaaaaaaaattacacttcaaaacaaataatataatattttataataagagcatcactaacgatgcttcatatttggagatgccgtggaattggccctccaacgtagctgcaaacattacactaaattaccgtatgtgctacagtgcacgacgtatatgttgtgcactatacacacggcatactttttttatatataattaatttttgtatatgtctatatta

SEQ ID NO: 74547 - DNA, 1009 bp, Cannabis sativa
tgagcgacttttgagagtgtggcccaaaagactcagcaatgcacatatcctcgtacccccagcaagtccatttgaatttcaaaatacttgagatgcctaagggatcctctttccctgtatacatcttccaggttggcatcttgaacttgtgaggtagctctagaacattgatttttggagaaaaggggtatccacgtgctcggtccaactcgaggtcattgtggttttgaccggccagacctcagaacatgtttttcagttcatccatctgtgcctacacggatggatgaacttgttcagcctcttggctgatcaatgtcacgccaggatctctttgagatggatcttgagcgcgggccccaggcttagttgctagtggaacatattgtttgtctaaccctctctttctatttagatcatctttaagatcatgagctgttcctagtctattaaatatagatgcaccaggttgcctcaacgactggttggttggaccgagcactttgcaagaactgctagtctgggtggagttattaggtataacccctcctgatgaattaccagatacggtttggccgcctactgcttgacccacaggtgaaacctatgaccgggggttggacagctggccgttcacagtttgggaagtgttctcagatagattttcattcaagccgcccaacggaatgctggatgcaggttactgattagaaacttaataggctcttcgtatgagaaaaatagcttgtcttgttcggtcgtcgatggctgcttgtgagctcaactccatctctttatccctccattcgacaaacttacgcctttgctcctcaaacgcaaggttcactgcaacgtaaagctcttcttgatcatgatgtagagtattagaatgaccttgcatgagcccaagagcattacaaaggttctggatctcggtgtcatttccaatggttgtctggacatttgccgcttaaggaatcccagagtttgggatattcagatcggctga

SEQ ID NO: 74548 - DNA, 2244 bp, Cannabis sativa
caagaaccttgccaccaccaacacgatgcagagggatctggacttggccaagaaggaaactgaggatatgcggaaccagctcgatgtcgtgaggaaagaactcagggaggtaaacaagaagcttctttctaccaacaccaaagttgatgagctgactaaagagttgcaagatatgccttcgaccgagcaacaggaggctgacaatgtttctctatcccaagaggtcaatcgtctcaaggatgagagggagagtctccaaaatcttcttaacaaactggaggaggatgttaagaataaaaagaccagggaggaggaacttgtgaaggaggtcagagataagaagtccagggtggaggagctcgagaaggaggtggacgttttggagacaactgcccttgaggttttctatgacttttggaaggccgatcccgaaggaaactttgattacctttgtgattccaaggacatgtatcttaatttctgcatggcccaggcagccaaagaaaaccccaaggtgaccacctctacagctcccaccgaccagaacatcgaagttcctgccctctagactgatgatcctccagctccttcagaccaaattgatccatatcaagaacctgagactcctgctgtctgaatgtctttcttctctttttatatgtctgttcggcctataggccttcttttaagacaaaatgaccggccaagcggtttttaaacttggaatatatttttcaattttaagacaactggctgactaggcaacctttaatcccgggtttacgtgctttgttatctttaatgattgtcgttccttgttacgatcattgtgcaactattttttttttcatgcttgttatttgtttttactaatgctatgtacgggtatagtttcccctaagtgaccgagcagacttttgactcttggtcacttgcattttacaagtatgatttttgtctattcagatctatgggttcgagcagacctttgtacgcatttaatggtaaatttataacttgctaacagaattgacacaatttgaatttaaatagacatttttattcatttattgatcggaacatatttgttactgtagtaacttacacaaaagctattatattgatctaacccgatctttagcttaatttaaataaaacaaattgcattaaataaaaattgtactttcataggtggtcatctgaccttagtacgttatcatttcgtacttaaaatggtcacccgacctcgtacttttactggtagtattttctcaaatgttccccattccagttcttggtaccataacgagttgcatgttttcatcatacttaccaactttgtatgccttggttctagaacttcaactacctgatatggcccttacctatcgtactttctttagtgtttagtaatactcttctaaggaccatatctctcacaaaaaacttcagtgcctttacttgtttattgaattatcaagccacttttttttgatcggccaccaattttaggcttgctgcaggtcgtttttcttcgatttcgtcaagtgattctgctagaagtgcatggttagcttcttggtcgtaggtcaatcttttgtgggacgaaggttctaattctacgggcagcataacttcataaccatatgccataacaaatggagtctatctggtcgttatattttaagttgtgcagtaagaccataatactactggaagttctttcggccaattctctttagcatcttcaagtcgcttctttaaagtgtctttaagtgtcttgttgactgctttgacctaatcgtttgctgggggatgtggtgctacggagaaacttcttatgattccatggtttgtatagaattcagtgaacaattgactatcaaactgtgtgctattgtctgagactactttttacgatagtccgaactagcatattatatttttcaccacaaagttaagtactttctaggatgttattgttgccaatagctcgaattctgtccatttagtaaaatagtccactacaaccaccacatattgtactcctcctttacctgtaggcaatttttcgatcaggtcaattccccaaatagcaaaaggctaaggactttacatctgagttagttcgttgggcggtgcacaaggtatctttgaaaatctttagcgtttgtcacatttcttaatgtaggcctttgaatcttcaattatggtcggccagaaatacccttgccttagtatttt

SEQ ID NO: 74549 - DNA, 1073 bp, Cannabis sativa
gatgaagattgtacatatcaaggcggttagacctggagtgtttagggtctttggaacaattttggctcactttgctagtcgctagtagacaacttttgacatttaattattttgtaacttttagaacaggatctcaaattatgtaaattattatgtttaattattaaaatgaagttatttaatgaagttttaattattcactttttctaataaaatcctttgattagcgaaggcgtgcacagtatttagaaaataccataacatgcctaatttagtaaagagttacagtagagttcctgacaggttccaagccaaaaggcagagttctttgcaggtcctaagccatagacaaaactttgggcaactatacccaaaggtacttgccagataatgtcattgtacaaggctagatatcagcgaagtatagtctcaagtgtaatgacttggacaaatgttgagttttaagttgagcattcgactataatagactcaattgagtttcatacagagtttctaagggaaccacatatgagactaaggttgtatttgcctacaaggccatgacaggatgtttgctaaggtcaaaagagaacaaaaaattggccacccacttagaactaaggcctaggctggccaagattctcaagccttgagagggtcggccagggtcccatgactcagccaagaaccggccagggttgccaaacctaggcatgaaccagctagcttcttagggtgaaaccctaaagttggctaactcccataattgaatcctaaggctggttaggtcttaaacaagacctcctaaggccgatcaaagttagttttggattaaaatgtgtgtttttacaaattcgaatgtgtccttcatgttcttcgtggctcaaagagccaagaatcacaacgaaggctaaaatcgaatctttttcatcaaaagatcacatattaggcattctaaaacaatcatgcggatcaaaaatacgaaaaaagattacaatctaacataagaataaaaaagtttctaaaagcttaaaaagcttgaaacttgacaatggcaggttcaaagaagagaa

SEQ ID NO: 74550 - DNA, 695 bp, Cannabis sativa
tgcaagacttcttagttgttgatcgaccattagtttataatatattgatgggttgccctgtattgattggactaggggtagtcagtttaatcaaacacctatctttaaaattccaaacatcaataggagtaggtgtagtgcgaggtgaccaactgttggctcgcgaatgctatcgtgtagagcttcaaaataaaagagccaaccatcaattaatggtggtcataatagaagaaggagagaacaaagaagatgatctagatcctagaatccaagacgagaaaaacctgttaaagccaattgaagaactggaagaagttattttagatccaaacaattctactaaatgtgtatttattgggaaaaatttggatgaaaaactaaaatagaagttaacaaactttttgaaggcaaaccatgatcaattttcctggagccatttagatatgatagatcgatgctaaagtgatttgccatcatttgaatatcgaccctatttcctagtgaaaagacaaaaaagacgacccttagattctgagagacaaggggcacttaaggaagaagtggacaagttattaactaatgatttcaaatgcgaggccttctacccctcgtggatttcaaacctattcttgtctcgaagccaaatggcactgggagaacttgtattgactttttcagacttaaacaaggcatgt

SEQ ID NO: 74551 - DNA, 669 bp, Cannabis sativa
tgacacctattgcagcttacctctaaactagagccttgcctgaaaataagaatgaggcaaaaaatataagaagaaaggtcgttaggtatctaatcttaggcggagtgatgtacagacatagcttctcaatgtcgctcttaagctgtgtcaccaagggtgaggccgagcgactgatgatagaagtgcatgaaggcttctgcgacaatcatgtcaggggcaaagcctacctaaaaaaaattctaataggggttacttttggccaataatgatcgaagatctgatggactatgtcaaaaaaagtgacaagtgccaaagattttcgaaaatccctagagctcgacctaataagctcatgatgatgcaatctccttggcccttcacaatatggggaatagacttgattggttaactccccaagggaaaaggaggagtgcagttcgttgtagtcgctgtagactactttaccaagtgggtagaagctgaatcctcgacaacacttgaaaaaaatacagcgctccaaagtgaggttagaacctcaaaccaaaaataaattgcaaaatggttgataatacacaatttttaatttcaatccccagcaattgtaccaaaaacttgttgtgaaaattaatatctatactcaagtgcacgcaatcaacaacaagtaatata

SEQ ID NO: 74552 - DNA, 636 bp, Cannabis sativa
gtgcaagtttgagattttggtatgggcccaaggtatcctgttttgaggagatgagtgaggtgtcacttaattttttttaaagaaaaattatttaattaaataaagatttattttatatttatttattaattaattatttaacgttaaatgaagtagtaaaaagtgatcagtcaatgatctgctcttcactaccatgttcttactcctccacgactatattactgttttcttaccgtttaattttagattgacttctctatataagtcgtatcagaacaacagaagaaaatatctttttcaacattaaaaaaaattctttcttcctaacgattttttctcatagcaaaatttaaggtataatcgagcgatatagttcggtgcagaatatatcgtatatggagactgttttgccttgggaacgtcgtggttgcaagactgtcgtgcacacttcgggcagacccgcaaaacgtcttaaggaaagtgacattgtccgcgactcagccagaatgttctatcggtaattcgttcctgtttcattatttttaaatttgatctaacaattttaaaatgttctgttctgctatggctactactgataaattttctagctcttcttctaacgatattaacaagcct

SEQ ID NO: 74553 - DNA, 771 bp, Cannabis sativa
ctctactgcaaggaaatagggacaactaaggttgtgaaccagttactctaggttgatgacatgacgatcattagcaaagacaagactgaaattcaagtcattaaaaacaaacttaattctgaatttcaaatgaaggacttgggagctttcaagaaaattttggggatagaagtcttaagaagtaggcaagaagggaaaatgatactgactcagagaagctacattgagaaagtaatcaagaagttcaacttggattcatccaacactactgttgtgccacttgctgggcattttaaattgtcaaatgaatattgtccaaagacttaaacagagagagaaaacaggaaggggtaccttatgctatggttgttgaatgcctcatttataacatggttagtactgtgcctgatattagctcattctctaagtgtattaagaaggtttacggcaaaacctgggttagaacagtggaatgtagttcagtggctgattagatacttgaaaggtacaatcaagtatggcttgatatatcaaaaagacacaccaaatgcgaggttagaaggctatgttgatgttgattatgcatataatagggataatattaaatctactactacttatgggttcatggtcaacaagatctacctatgttggaaatcacaacaacaaccagtggtggcactctcaactacagaatctgaattcatggccaccaatgaagctttcagggaatccatttgtttacagggaatactacaagaattacaattg

SEQ ID NO: 74554 - DNA, 912 bp, Cannabis sativa
ggcaatatttgagtgtgaaatggcatttatgcccttgaaaatgaatatgtatgttttatagccctaagggcaaaaaggtcatttgaccattattgtgttattttgaatttaatagattttgggagaaaatggattatattttctggtattatctctctctcacgcgaaccctctctctcccttgaaccctttccattttcaaaatttaattgttgagaaattgcttgaattgggggtggattgaagctttgggattgtggattctttagcttacaattaggtaatttcttgctgagtttgtgtaaagattgttggtgaatccttttgctgaattttaggttggaaatgcttggttaagtaattgtaattttggtatgcatgtgttaggttgttcttgatgcatgttaggtgatttggtggtgttaatcttgtgaaattaagcttctatttattgtttgaattgttgttgagcttgggctgagattttatggtattcttaggttggaatttcatgtgtaagtaatgttttaatggctgggaactgtttgaatagttgaagagaaagctcttgttcttgagcttgagatttgcttagtttgagcatgatatttttgtgtttgccaatctgaaattgtggtatttttgtggggttttggatgcctaaagtatgttatttgagcaccttataattgctagtgatcccaattgttaatttgtatgcttggttgagatattggtgtgaaagattgagtttggaagctgaattttcgaagaaggactgctggtttcagggttctgcacccagatgccgcccctcttagtggaacttgtgttttgtcctaggtgccgcggcatggtctggggcatgccgcggcccgccctcttatttttgggcagttttgagttgatttt

SEQ ID NO: 74555 - DNA, 867 bp, Cannabis sativa
aatctcagagtgtttatattcctttggatgtcagaaatatttatactggtttaacctgtattaatagtagttatggtagacaagatttgactggttcactattagtagaaaatggtaattgttcctatttcaactaccatgcatttaatatcttatttgaaaaaaagacagcctttctcataatttgaataacttccagattgctcctattttacttatcaacaaaacaatttctctatctgccaccaaagtaactgaggaaaataaataaataaaatttcatagttatttagtccttgctgcatattttagcagtttatgatttagtctctggattgtcaggttatgttaaaacttgaagcattctttggcagacccagtagcaatgtggcatgttagagctgagatagcccctgctatcttactggtggtagactttggtggatggtacagacttgactcaaaatcatccggtggtggtggcaactcatcatcagatttgattcagcacactcaagtctcgttactcaaagatgtcatcattccatattcccatttactccctagattacacctctcagaaaacaagaatcgtgatactcttctttattttaaaggggcgaaacataggcatcgggtaagtatccatgtctaaaactatatttcattaatagaatttgttgaagcatcttttttaatagtgccatgtttttgtagctttgtcaactttagaagttggttatacttagcttgagggcctcaacttaccttcttatctattgacctttttattaattatcccaatagttgtcttctaatcgttattcacatcacttagtatcatagtttgtgtaagcagttatgtat

SEQ ID NO: 74556 - DNA, 569 bp, Cannabis sativa
aattcttatgtgtggatcaagtactattaaacatgtcttaggaaaatttaaatttaggcaattcaaagtaagagaacttgaaagctttggagatttcaagttaccattaaagaaggtagttggtatatggtattgtgcagtgtaaaggatttaaaaccaaacttaaaactgtgtgatgcaatgtgagttggtactgattttattggattgacagtttcttttttatggcacctggctaaaatggttaaagaaaatcgattggattatgtgtaccaaaaattgctttacatacctaaagcaggtgtattatagttgtaactgaaattatatatcggaatttgaagtaatgataacaatgttaaactggccttcattaactccccttcatgggtttttctatggaaaactgagaaaataaacaagaaaacatgtaacaaattagcaatcaattgagatattcctaaaccaatcaacaccaaataactagattgaagagaaaactaaagtaggagtgctagctgatatagattcttgaatctcattgttcatgaagcaaattacatcacttc

SEQ ID NO: 74557 - DNA, 963 bp, Cannabis sativa
gttgctgaagatatgatcagagcgggaattgaatttgtggttgggaaactcgctaacattaccttatagtctgatttgctggaaagaattaaagtggcccagtaaggtgattctgagttacagggggtgcaaggagaagttagaggccaggtcaacaaaagacttttcacttttgtctgatgggttattgcgatacagaaataaggtttgcgtaccaacaaataaagttatcagacaagagattcttgatgaatctcatactacaccgtactctttacactcaagaacgaccaaaatgtatcatgatgtgaaagctttatattggtggctgggtatgaaaagggatattgttgcacatgtgtcaagatgcttaatctgtcagtaaatcaaagtagaacatcaaaggccagcaggtttgcttcagcctctaaagattcccgagtggaaatgggaagacatcaccatggattttgtggtgggattgcctagaacaatagggtattatgactctatttgggtgataatggatcgatatacaaagtttgcacactttctaccagtgcgaacaacgtatacagtggatcagtatgctgatttgtatattaaggagatagttcggcttcgtggtgccccgaagtcgatagtttcaaatctatatccaaagtttacatccaaattctaggattgcttacagcgagcaatgggtactaaattaaaattcagtacaacttttcatccttaaacagatggtcaatctgagaggactatccacatacttgaggatatgctgagggcatgtgtaatggattttgaagtccaaagcgtagagatgttgaattctagattagagattttgtcttcctttgggtatccctaatgaaaggaattcgaaggttcgggaagaaaggaaagttgagtcccaagtttattggttcattcgagattcttgagaaagtaggtcag

SEQ ID NO: 74558 - DNA, 926 bp, Cannabis sativa
  modified_base (49)..(71): a, c, t, g, unknown or other
atatgaaattttctttaaaaaaaataaaaaatatatatacatgagttannnnnnnnnnnnnnnnnnnnnnnaaaataagtattgaaattaacatgaaatagtgtaaggaaaaaatttaaaaaaaaatcttaacaataatttttaaaaattatttaagtttatatatttttttaataataagtgtatttataattttatggggtgtaaataaaactactccaacctaacctaattagaagtcacacgccattaggcagagggaaattggtttggattttaaaattttaaagacataaaagcacaccgaactgacacatatactttgggtcccgtgacgtggcactcttactttttctaaaaaaaatataaataaaaaggagctacgcagaccagagtcacttccatccgtgctagcctttgctttttgtgcttttatttttattttccacttttcctatttttttttctttatttatcggataaataatcaatattttttttttgacaataaataatcaataattttgtatctacagaagtatggaaagttaatgggcctaactgggcctcgtttaaaaaacattcattggaccccaaaacataccacgacgtgatcaccatatctgccccgtaccattttcattgggataagttgaaaaatactacttttattaattaattaattaaatttacctttaattttatatttaattgaaatatacctctttttatatatattgtacctaaaataccctaacataagagagtcacatagagagtatcttgaagtgacaggagcaaaattagtacaatattttaaaaaagagataaaaatgatagactttaaaaaagaaggtaaaaataaaagaagacaatattaaaaaagtatagattgtaattttctcatttattttcatcagtatagg

SEQ ID NO: 74559 - DNA, 1117 bp, Cannabis sativa
ctaataatcaagatggggggacaaaaggatttattctaaaattgatcacacctttgtgaatgaggagtggacagacaactttcctaagacaaaagctcactataggtgggagactatctctgaccatagtttatgtgtggtgtcaactacgactaatgtggagattgggttcaaaccttttaaatactacaatttttgggctgatcactcagaatttaaagatgtagttattgatagctggcagaaaccgatgagaagtgagggtatgataggcatgtatttgaaacttatgagattaaaacactccatcaagaggtataatagagaaagagttggggatattggtagaaattatcaagaagcgagggacctgtacattaaagctagaactcaagctcaagatcaaccgcatgacaccactgttcaacagaaagaaaaagaggctgccttaaactttaatacccatgagaagatgtaccacagcttcttgagatagaggagcaaagtaacttggttaagtaaaggggatgagaacaatgctttttttcattctttcctgaaaaaaagaagaatggaaaatagcatagttacttataccaatgactatggagaggttgtagataattttagtgaggttgtcaagcacttcataaagcactttcagggctatatggggacaagcacaaggcctactcaagacctaaaaaaagagtgtatggagatggggaacaagttaaatagagagcaacaactggctttaatcaaacctttcactactaaggaggtcaaggaggctttattcagtataccggataccaaatcccctggtccagatggctatggagctgggtttttcaagacaatgtggcctgaaattggaattgaattcactaaagcggtggagaactttttcttgacaggaatcatgccacgggaacttcatgcaaccatgatcactcttatccctaagacagaaaacccgactaaagctgtggaattcaggccaattgcttgttgtacaacaatctataagtgcatatctaaacttctttgtttgaggctctctcaagttcttccaggattggttaaccaaaatcaaggagcttttgtgcaaggg

SEQ ID NO: 74560 - DNA, 678 bp, Cannabis sativa
aaatgtaactatgatggttacaataaaattgtaaccattgaaaccttttccatatataaatatatataatctaatttaggttgcaaaattttgaatacaaacaaaagttgttatgacaaatatatcacaatttttaaaagtataacaaggagttcaaaaaaaaaattcaactaaagatttcgttgtttatgtcgatatgaatcaacatttatactacagtaggtatctattttttaaatatatatttatatatacgcaaatatatattataatatatacatatttaatatatataaatataattatattttcagtgcaagagtatatgatgacatgaaagacgacactagaagtgtaactgtaattatgtttggtcacaacacagaataaattttagattgttatgcaataacaataatagaatattatgaagagatatgattttaatctacacataattatttatttagtatatactaaaataattaataattgtagactaacataccaacttttataatttatttttcacgaaaagactaaatatattgaaagtgtttctaatgaattgacaactaaatgttggatactataaatttatgattatcaagagaagatgctcaaagatacaagcatttcgatgcatactatattgaagaagtaaaacaagaagaagtt

SEQ ID NO: 74561 - DNA, 1271 bp, Cannabis sativa
acaaaattaaaaaataagatgaaaaatatattttatttttatataaaatataaaatgtatattattgtaatagactatcaaataaataatgttttaacaaattataactaattaaatgaataaactaaattagtcaattagtaaggagaaaaatacatatttttggataaattaaaaaaaattataattaattaattgaataagactaatttaatcaattagtcatgaaagaaaatacatattttgggataaattaaaatgctatgagaaaaaaatttatttatagagtatatgtaaacaatgtgagatcattacaaaaagtaaacttaatacaaaatccaactatactttctaaataatatgacattattacaaagagtaaactttgttgaataatatattttcttaatacattaacatggtactgtgaaaaaattaaaaaaaatatgaagaaaaaattatagaaaaccacctatatccttgtgtgctttcgttaatattaatatatagatattgattattgatttattttttagtatttgacataaacattgaattattcgcaaaattatacacattgagttatatttttcgtttgattatttttttgaaaatattttgtttcaaaattaaagacaccatatgaattaaatatttaactctaaattatgtgacattaaaataaaattactaaagagtatattatatgaataaaaaatatatataaataataaaatttataaatatcaaaacagaactaaaaatatatagctaattggataagactaattttattaattagtcaacaaaaaaaaaaaactactaaaaaaatatttatttgctataatactttctaccctataacaaataataatgatttgactaatgaaagtggcaaagaaaaacttatttatagtttggatatagaaaaccacaatactttttaaacaatgtgggatttttcacaaagttagtagattttttttattagacaaaacttgaagctcccacaaaataataaaaatactatgacaaaaatatgagatgccacatcatcacttttaaactctcttttatactttctaaataatgcgagattattataaaaagtaaacttagtttaataatcatattttcataatacattaacatggaactctgaaaaaattaaaaaaatatacgaagaaaaaattatagaaaactacctatatccttgtgtgctttcctttatattaatatatagatgttgatgatgttaggttttatgccct

SEQ ID NO: 74562 - DNA, 704 bp, Cannabis sativa
tacacgagattacataattaaattacatttattctcatcaacttctatactacatattaacaaaaaactatcacgagttcattaagcactgtactgcatactactttcgttagcattcttatagttttctcctttaccgcactttgtacccaaataacaataaatctatcattaattatacttatgatagctaggtataattttacttgtgaaatatctacttattttactttatatatttttacataggcttttacgagagcatgcatgttctacaagaggaaatgtagttttagtggttcgaataatggattatattatttttagttgagagtttattaaaagtaagagcctatatgtttagcattaaaactgaaattctttagtggtgctgattataaattcataattcactactcaccacttaaatgaggagaatatttaggtatctcatctcaattttctgtgtgggatatatttcatatcaatctacctttggggcaaaacttcaaggatttgaatttgtaagtaagtccaaccttggtttagtaaaattgccaagaaaacttgtaaactaaatgctatattgaatgtgtaataatacaataatgtaggataagcatataggctattaaaattcatgtattaattttgaacatgtataagaattttattttattatgaacttttcaatcatgttggtc

SEQ ID NO: 74563 - DNA, 668 bp, Cannabis sativa
aaaaattaaaagtcacccataaaattctcaaaaaccaagaattttagttatataagtatactttatatagaatagatatatatttcagctctatatcttcacaaaatttataatataaatataattatgcatggttaattactaattgtacagatgaaaagaattattggagcttattttgaagaagctcgatggttgaataattatttgttatataaaaatagaaaaagttaaaattgatattgtgtttaaatttaaataatatttattttaaatttttattaaaaaaaaattaaaccttaaatcaaatttctccctaagcttttcaacacattgaaacggcctgtatttatataaatatataattaataaatacatgcatgcatgcatacgtgcatggtatggggtggttatataattacgtactaattgtacagatgaaaagaactattggaggttattttgaagaagctcgatggttgaatgaaggatatttcccaagcttcgatgagcatttgagagtttcatatgtttcttctgctaacgttttgttgatagccacaagttttgtaggaatgcatgatattgtaacacatgaaactctagattggctctccaaacaccctaacattgtttcagcttccactctcctctcaagattcatggat

SEQ ID NO: 74564 - DNA, 681 bp, Cannabis sativa
ttcgatcctatattcatatagtgtatatgtttatttattctgcatgttatatacacatacatatgtttcagtttatacaaataaatgtctaacagtttatacatatgttattgatttgattccatataattgattatcataatttattatatatttttatatggtttaatatgtatatgcgattatatatgtatatatatattcacgtgtttacatatttttcgagatggtgggttcaaaaatttgtttattttcttcagatctttgatgcgttttttaacattaatagccttattattttcatatgatgttatacattcaatatatgcatgaaaaggttttgaaaaccatcaaaatctagaaaatttactgaagaatccacattcggacccgaatttttcattgaaattaaagttgacgtttacgtgttttagatgtataaaacccactttgatctctttattttttcatttggatcatttcgggtttaaaaacacgtaatttggtcgtcaaaattctcttttccagtcaggtttgggtcgggcctatcggacccacgtgtaggaaacgggtcaaaagtgactcggctgaagatagtcgttttcttcataactacaaacgacgtttcgtttttcaggacagatttttcaaaaaaaaaaaggaaaattaagaaaaatttaa

SEQ ID NO: 74565 - DNA, 785 bp, Cannabis sativa
gtattggatttaatactagtcatattattagtgggggtgttcgtcaaactaccaacagtgcataaaccgcttacaacacaccacaccatacaaaaaatgcggtttgaaaatatttgcattgcagttacggtttgcgtttttatcaaactgcgcagtatagtgtagtttgtagttttgtatttaataatcgcggctcaaatcgcaccgcattatatattacaaaaatactaatttttacattatgatttctcttttcatatatgactatatgagcaactcatatgtttataaaattcaaaccatacaattaaattcagggacatctatataaattattctcatatattattgttaacatattattattaatatatataatatgtatattttataattttttagagacaatttaatacaataatttgattagtatatatgttatgacgttaaaagtttgataagataatttttttcttatttaattgttgaaaatttattggactaatcttttaatttttattaatgatgatagtgtaaactgcttaaattgcatcgtcccgtattttcacattatagttttcgcagttttaattaattgtcttacaatgcggttacggtttaaaaaattacaaatatcgcatatgtaattttgtttgaaaaaataatttaaatctccactacgaacacccttaattagtggcctcttaaaacggaagggtgttataggtctttatttataaatttttttagccaataaatgatgtatttatgaagattaggtaaaa

SEQ ID NO: 74566 - DNA, 535 bp, Cannabis sativa
taacatgagaaacctttactccagaaaagtaggataaaagataaataatgtcctctactaagtcatgaaaagaagttacaaaaggaatagaagacatagagttgattgcatttgccagcaaaagtgaatcagtttcaataaagtggatggatagctggtgatgaatggcccatgttaaactgtgaaatagagcagcagcttccatttcttttggagagaaaaatccatgaaaaggcctagagaaaccaacaacaacatcacctatatgatctctaattagagcaccgtagcctaattttccagcagcctgatcacacgcagcatccacatttaatttatgcaagccagcagggggagatcgccatgtttgaggagtcctagcagcaacaggaacagagggagttgtcgaaaaatcaccctgggatgttacaccagcagccgcttgttttggagcagtggctttgtgaaactgatccaaataagaggcagaagaagaacacaaaatagcaaccggtttaggcttagtaccatggat

SEQ ID NO: 74567 - DNA, 577 bp, Cannabis sativa
tttttaatatataatgaataagtaaatatggtttttgtataaaaaaaattattataatcttttaattaaaacagttttttctaaaagttagattggagcagcttgtagcttctccaaaaattcttcaaaaaattgtattttcattgcttaccaaacacacttttatcaaagctatttcaaaaagcagtttttaatttttccaaaagttgtgataatttataatcctttgcttttacaataaagtgtaagtagaaagtttatttaaaataacttgaatcgaaattctattttttttttttttaaatttttatttttcattttttttaaggaaaacagatggaggttaattacgttacacaaaaattagagaattttcatccatctaaaaaaatttattgtctatcttaagggcattcaaatactctaaaagaattatacaataaaatcttaatatcaaaaaaaaaaaaaaaaaaacctctcaagcttgagaattgtgacttccattctaccaatagaacacttacaaaataataataataaaaaaattaatcagcatcaaatatttaataaaatatga

SEQ ID NO: 74568 - DNA, 755 bp, Cannabis sativa
taacccccttatgttattttttggtggtaaaactatcttatgtttacttctgttggcaaatttaaagtataagttaactttgactgttaaatgccacatgagactgccacttagtatattcatttacacatggcatattcttattggtccaaataaatttaattatttaaacattataaaaaattaaaactaattataaattatttataaataaaataacaaaataacctcttctttttctataatttaacaattttttttaatcttttcttcttctccgcttacccaccctcatcatcacaaatgccatcttcatcaccacccaccattgaccaccattgaatcaacccccaatcagtacaatctattcctcaattctaaatgaacacccaaacaaaaatcaaattcaagtttaaaaaaaatctcagtttcagatttcaattaagaacaaaaaaataaataaataaataaataaataaaatgtgaaggaggacatctgcttctcaactctggatcccaacgacgaacttgaagctcctccaccatcagacgaacccatacaccgacagatcccaacgccatactcgaagctccgcatctcggcgtcgatagatccaaatgcaaagtcgaagctctgctgctcaactctgacagacccaaacacaaagtcgaagcactgccgctcaactccgacagacccaaacgaatggacgtaatcttgaggtggtcgataatttctgggtttgcgatttgaa

SEQ ID NO: 74569 - DNA, 597 bp, Cannabis sativa
cttcctcttttatcattggtatctatctttttcttttttatttactcttgttttaaattcaagtttcaaaaaagaaaaacgggcaacttccttatttcagtttttatttatgcctagttattaacacaatcttggagtttgctattcagacaatgtgaccatttgtttttgtttcataaatggtgagttatgagttgggaccacttctccatggattctttttcaacctaatgcccaactttgcaaaatacttgaagagagtcattaaattataaaatgactttttatataaaatgaattgacatttttgcccaaaactttgacatgaaccaaattatgttctctgaacttttttgacgttaaaaattcttcctgaattattgagattatcgaatttaaggatttttgtctaatttcattcaattttacttatttagtgattgtttatgtactaaatcatgctcctctgactttaatatctaccaaagtatgtccctcttactttgacatgtgctaaatcatgtcctttgaactttcatctatgttagactttccttactaaaattggacaaaattccttaaatctaacaatctcaa

SEQ ID NO: 74570 - DNA, 685 bp, Cannabis sativa
  modified_base (26)..(29): a, c, t, g, unknown or other
attttttcacttttagtcacaagttnnnntgtgactaaaagtaaaaaattttgtagtgggtgtcgctcatgtcttttaacattaattgaaattgatttttaagcaatatataatttttttatttactaaaaaatatattattagtagtataatttaatatcacaatttatttattttacttagattaatattataaaaacttaataatcatttatattagatactttgttgcctcctagtaatacttaaaaaaaatataatatataaaatttattgaagcaagacaaaattattctgcaaagtcatttgattaactttgtaggtagttatatgtttctttccataaatgtaaaaaaaaataatttactaatatatatcttaatatagacaagttaaatatattatctttgttcttgacttaattgttgcattgattttacttaaaagactggaaatgatacaattattatattattatctgacaaaaacgtgaatcctgcaatttattaattattgttataagtacattacgtggctattatgtttggatctatccaataataataaattttataacaaaaaattaaaataaaaaattatgtaaaattttattaaaaaaaattataaaataaataaaattaaaatcagtattgaaatcaacacaaaatagtaggagaagaaaaaa

SEQ ID NO: 74571 - DNA, 941 bp, Cannabis sativa
gaactctataggtatttgataagatcatatcaagcacactatttttggcaggtatgaagtccatgttcatagtcgggcacatttttggcaagtttcctttctagtctgatttgttgctatagaaactcgcttctgatgctgcaaacaagatttttttttagaaaagtttgtacgttatcgattttataactgtttctaaggttaccataatctataaatagaacctagagaacaaccaatcagatcatctcttcaagttttcacttttgtatatttcttatttgtgaggagagtgttttatgtgagaacttagttgttcagctaggttttagtattttcttagtatggtcttacgatcggtttgaacaacttgactgaacaagtgaaaagtcttcgaaagaagacttgttcaagccttacttcgggaggaagtaagcactcacacatcaaagtcgaaggaagttcgctgtttgatggtgtttcagaaatcagattcgtgaagtgaattacaaaggattacgacaaagatttagaggaagtctaaatttgttaaagtcaattgtctttgtaattatttaagactttactatttaattccattctctgggtgtgactccgtgaactaggagtgttcgaaagaacactgataccacgtataattctcttgtgtaaagtaattttattttctggtgttatttttgcaaaactatgttctatagtaatataattatattttacagttgtgtttttactgatattttgtaaaaatttattggttttgcaaaaatacgatttttttaattattattattattattatattgagataataaaattacagtagagtagggcacactagggctgtacatcggtcggtttgggcggtttatcctatatattttctaacccaatctaaagttcgggttgctaaaatttaagtg

SEQ ID NO: 74572 - DNA, 1338 bp, Cannabis sativa
aaccgagaaaaaaggttatgtgataatgaaattagatatggcaaaagcttatgatcgtgtgaaatggtcttttttggaagcaatgttggaaaggttagatttcatcataaattggttgctcttattatgcattgtgtcatgacagtaaactacaagtttctcattaatggacaaccccaaggtcaagttatttcccagcgtggcttaagacaaggtgatcctttatccccctttttatttctcatcataacagaaggattatcaagattattacaatatgttgaaaattgtaatttgttaaggggttttaatatcaacagacatgctccttctatatcacacctactctttgttgaggactctttactactatgtgaagcttcaaaccaatgttgtgatactttgcatagtattttattgtgttatgaattggcttccggacataaagttaattttgataaatctttgcttactttttctccaaatactaatagaggtattcaagaataattagcacaaaagcttcatatggatattggtgagtgtcacaaaagctacttgggtttactaagtttttgcaataaatcatagaaagaaatgtttggatacattaaggataactttaaagaaaaattatcacaatggaatgagaggctattcttgtttggagggaaggagattttacttaaggcggtagctcaatctatgccaacatacactatgagttatttctaggtgcccatctcaattttggacgattcggaaagtctaatgacacaattttggtggggtacaacctcagccaaaaaaaggatgcattggttaatatagagaaatatgtgttaatccaaggatcaatggggtatgggattcagagatcttcaatgtttcaatcaggctttattagccaaataagcttggagattattagttgaccctacatcgataacgacacaggtttaaagctagatactacctaagaggaactttccttgaagcaccacttgggtatgccccatcccaaacatggagagtaactttttggggtcatcagttgctaaataaaggtatacgatgggctgtgggagatggtgcctcaatacaaatcatgaaaataccatggttacctatacctcataattttagacctttgatatgtcaaagaaataccccattagtggtcaatgaacttatcaagttagataaaacttggaatatacctctattacgcgatatgttcttggaagtggatgttactttaatattgtcattacctttaagcccaatctgtatggagaccaagtttgttggttgtatatacataataatgactatata

SEQ ID NO: 74573 - DNA, 685 bp, Cannabis sativa
agtccaatcctgcatactaaacgggcctaaagttttctttttagatcaaaaacaaattaatttggagcttttcatctctccaataaatacttaggatttttatcagcttaggaaaaaggtataaagcattcatatatattatttagtattaatatattaaattatttcttctcattcttttcaattaatattgagttaacgtgtggtgtttctttagccatacacgtcgcactttgaaaatatcttttagataaattttaagactttaatttaggtaaaaaaagtagggtaaattacggcataaaaacttaatgtttcagattttatacacttaaatattttatttttggaggaaaaaatacctaatgttataattctcttacaccgttactaccacttccattattaactcataaatatggacacgtggaaggccaaaaagcattacattgatttattttattttaaaatttagtattcttaatatcaaaaactaaatactacttgtttttttttaaaaaaaataagagaaatgcaatattaaattaccatagctgagtgaaccggtgtagtatatagaacatgattatcgaattgatgtgtcaatatcatgtgaaaattgttatgagaacattttaatattaaaaattttaagttttaaaataaaataaaaaataaatgtaat

SEQ ID NO: 74574 - DNA, 1104 bp, Cannabis sativa
ttacattgaaacagagttttatttagggcataaaacccaacagaaaaacactcatggcaaaacttggtagggattgggcaacagatttcaccaagacttctttcccagctttggacataaatctagtctcccagcttaggatcttctttctcatcttttccttgagaaaacccaaaatggcattcttactacgctccatcgtacatggcaatccaagataagtactattttctgaagcagccgacacccccaagaaattacagatatactctcgaacattctctctagtgttgttgctgaagaaaaccgaagacttgtcaaagttcactttctgcccagaagctctttcatacacagataacaggtgaagaacatttgcagcttcagttccattagctttacagtaaacatacgagtcatcagcgaacaacatatgggaaataattggagcaccgcgtgctacacggcatccagatagccatctattctgcacatatctttgaactaaggaggagaagccctcagcacatattagaaagagatacggagacaaagggtccccttgtcttatacctctactatgaataataggtcctagattgtggccaccatgagtaattccgtacttgattgttgaaacacaaaccatgattagtgaaacaaattccctacttagacccatctgtaacatcatttgttcaagaaacatccatccactctatcgtatgccttactcaggtcaagtttcaaagccataaaaccctcttttcccattcttttccgctttagatagtgcataatttcaaaagagaccatgatattgtcagaaatcagacggccagggagaaaagcactttgattatcagagatgaccgtgggaaggatacttttctgcctgttagcaagtacttttgagatgaccttatacagaacattacataatgaaataggtcacaagtcactcatagtttcaggttgtttctttttcggaacaagaactatattagtttcatttaaagcatgagggaaagaacctgtatcaaagaactgcttcacttgggagataacatcttgaccaaccacatgccaatatttctgaagaaa

SEQ ID NO: 74575 - DNA, 1208 bp, Cannabis sativa
attcatttatcagaaaatcaattattgatttatttccttaaatagaaatttatttctttaaatagaaatatatttccttaaataataatattcttataatttactctaatattacctactaataaccaaagtttataagaaaaataaaataataattaacgaaaataaactatgagaaaacctcacctaagcgctgtgtaacaagtaaaaaaccaaacttataaagttatgtataattggaaaaaatgagttaacattctaaataaaaataaagtgaataaaaatatgtacatattaagaacatcttcaatagagagctaaaagtgtagtttatatattttagtccatcttgataaatgtaaacttcaatgttggtgtataaaaatttagcacatgctaaaattagttgtgccaaattagcactgaatatagcatatactaaattttatacacaataaatattatattttaatttactcttttaccatttattaatatgattaatcattttttatattttatttatatattaatagaattttatatacttttaataataatttaatacttttgttaattttttttacacttaactagtgaaagaggattaattataccttaattacgttggagcactgttataaaattttggccaactataatattggctcatttttttaactcaagaaaattacctaaaaaaataaaagaaaaatgtcaagggaggtgttaaacactataaatagtggcataataaaccgttattagtgcatttcaatatcgaatttcacaaattttaatttagtgaataatatgagaaacttctaagtaattattaaatgtcatatctataaggtgtcaaataataatgttctattaataataattataataaaataattcaccaaaaaaatatattatataaaaaattatacataacaaaaaacttatagaaattgttgtataaaatttgtaaaaagaaaattatacaaaaaaagaatttgtaaaaaaaaaataaattgttaaaaaaattaacaatcattcataacaaaaaacaaatacatcaagttttgtaattgtacatgcatactaaaaattaatgcaaatatatcacaaagaaatttatgattgcaaaataacataatataaaagatcatttaaaaaataataaaaactattcataagaaaaaagaaaaaataataataga

SEQ ID NO: 74576 - DNA, 652 bp, Cannabis sativa
aaaatacatcctacagtactaaactaatttgcatggttattatggcactttggtcaattgtttatttgatcaataaaatggttgaataccttagccaaatataaaatagttgaataattatttgaatttccttgtagtattcagtagactatagcatgaaagaagataatgaattttgtaacattatatacatactaattaaaaggactcaattttcttttataaatgtatgtcatattttgaagcaagcattaaggcaattgtgtttgtttagtgtttacagcgcatatatactcttaccacttaaagcagcatgtccgtacattgtggttgtaagtcaaggctacgaacatgccgagacaacctcgagcccttcaaagcctcgccagtcgggccacctctttttcccaaactaaaataatattattcttctgagcaaattcttatgaaataataaaatattaatacccacattcattcttgccacctgggacccacccacctagtctttaaagattagatacacccaccgacgacgaggtggcgcgtgaagtgaatagtactaattgtggtggtggtggtaaaggagcttcggggatcggggataatgaatcttgttactgcacaaagtaaactactgcaacatgattgt

SEQ ID NO: 74577 - DNA, 528 bp, Cannabis sativa
gattctaaaacaattatcaaggctctgaggtgtaccaacaattgttggggcattaattattatgtgtgtaactgtaaacatctctctacttttatgttaaattgtaattttcttttatttctagaacttgtaatttcgcgactcataatgtggtcaagtggacttttaccaacagtgtaatcggtatggtagagctatcttcaatatttgagtcctatcttttgtaatgaccagaagatctaacttctatttttattttttttataaaacgcataaattcaaaaaaaaaaaaaaaaccccacttaaggttggttggtagcactccttcgatatgcaagatacaattttgatttaaaaaatcataatatcataacaatgataaatataataaacttcatagaaacttgtatatttttgccttgaatttccattatttatcagcatatgcataatcagattaaaacttgtgtatttccattgatgaagaacattaaaacttgtccaaaataatctcacgcatcaactctt

SEQ ID NO: 74578 - DNA, 1154 bp, Cannabis sativa
tctttttcttttgatcgagttttttttagcaaatttttaaatgagacaatttttatgaacatcaaagaggaagtattataaaatattattatagatgtccaaatcaatgtattaattactactatatatatttgattatatttcattttattttattaatttaatttttcattattctaattatatttttgtattatatattattttataacaatatatatttaaattaatttatttatcattcaaatatgcaaagctagtagaattaggagttagcctttggagggactgagaagtcaagagccaaactagaatatttgtttgcaaggtcctacttccttatttatatatatagatttttacattatattttgaaatttttaacttttttatttttttattgtgggacgaatttttttttaaaatattgtgtaagttttatattatgtattgtgttaagttttcactgttattctatggttgtttttttagttatttcactgttattttttttttatgtttgttttataaaaaaaaatatttttataaaaaattccgtgtaacagtaaaattataaatttttatcccaaattcaatatttttataaaactctatattatataactaaattaataatgtgatcatatacttaattaaatatagatttttcatatatttatacataaatatatattcttttaaagacattaaatcaagtaattataatatttagtcgttttcaagacgttaaattttgtgcacaatactattattgggttcaaagcatacataattaagttaaggaaagttgaagacatataacaacaaatgttgttatctattgtgacagttatacaactttaaattaataagatcactatcaaatataagtaccaaatatcaatgattggatttgacaaataaaatatagctaaatattacttataccgcacattacttaataatctcaattaatattattctacaacactaagacactgaaataatacctaaaaaaacctcaaatataaagtagaacctctattcaagaatatatataggaccaagtaaattatattttaattgaaaagttataactaaatagaattacactgaaaaaaaaattaaaaaacaaaaaaaaaaaatatatatat

SEQ ID NO: 74579 - DNA, 979 bp, Cannabis sativa
ggatgaattcacatgggctaagaatcggaaaaatcctacagctttaaaggaacggctggattggtgtctcattaataaaaaatggactgatgttttttctatgccaaaactcattcaccttgattattttggttcggatcatcgcgctcttttggtcaatccttttccttcagctacaactgatcctatccaaccaagacggtctcgttttcggtttgaaaaaatgtggctttcggatgccgagtgtgctgaaataatttccactacctggcagatgcaatccgactgtgatttgtcctccaatcttcacatcaacctgcaaaatgttgcagcaaaccttcagcagtggcacacccgaaagtttggaaaattaaaacatgatatttctcaagctcaatctcgggttcacagtattaattctgctcctgctaccgatttgttacattctcataatctcaccactgccgaatcaattttggatgatcttcttgctaaagaggaacaatattggcaacaaaggtcacgtattgaatggttaaaatcgggtgatcgcaacacaaaatttttccataccaaagctagtgctcgaaattccaccaacaagatcaaatctttgaaggatgctaatggtaatcttgttactgatcgtgaggggattacaaacattatttctcattatttccaggacctatttactgcttctgaggaagatcattgggctctctcacatgtactatctactatccctactaccatacatgaggaccaaaatgattttctccttcgtgacttcactaaggaagatgtctactctgctttgaaatccatggcatctgataaaagtccggggttagatggtatgtcggccatgttttaccaccatcactggcacattgtgggaaatctggtttcatcggttgttctgcatatcctcaatgacaatggtgaccctactacattcaacaaaactcttcttact

SEQ ID NO: 74580 - DNA, 1535 bp, Cannabis sativa
ataaggattacctccacgtttgtctgattgcgaagtgacattattaaggtcaccaactatacaccacggcaggttagacttggccttcaacattcgaataagatcccatgtgcgcttacgaagacttctattaggttctccatagagccccgtcaacctccaccttctaccggagtcatcagtaatcgcaacatcaacataattatgcccataacccaacagttggacctcttcctcattcctccaaagtaacgcaactcccccactttttccttgaacatcaaccgaaaaagctccatcaaaaccaacagcaactcttaacttctcaacaacaactttccttgataatgtttcacataagaaaacaaagttgggcttcttttggatcacaagatcctttgtgaattgaaaagcccatgggttcccaagcccatggcaattccaagctattatactcataatgattggtgggcttggaaaccaaggcccacctttagcacatttttggaccccattggaaactcctcaaccgaatccacctcagcatcctccacatcacacgtagccttcccctctgctatttccattcttctttttttactgtcaatcacacacacggcatcatgttgtagttgacttgccatatttgtttcacccataatcatatccccacttacagctattatttccttatacaccatcccagcatttacattctgaatattctttcctaaagatccgattgagtccatcatgccttgttttgctcgattaatctccacaattttaggcatattcaatgcaccaccgtcagccttggcaaagcttggaccaccgccgtccatggctttctcttcctctcttccagtacggagccattgagccccaataagataattctttttcttcataacagccctcatcccgattccatatggcttgacaatttcatcaatcggcttctcaaatcgtttcagacaagcacgctcggaatgaccaataataccacagataaaacagaaagttgggagatgttcatatttgaaattcgcccaaatccactcaccattttccttgctaagtttcattcgacgtttcagcggtttttcaatatcaatagtagaccgaactcgaagaaagtccctccaaataccattgaaatttctcgggtccgatttaacaaaagccccaacatacgcaccagcactacgaaccactttatccatcataaagccagatcttaaatcatgaatttgcacccacatatcaagcttatggagatgcacactccttggatcgtcacctttcttcaatcgatggaacacaagaggaattctattaaatgtccagggactaccatccaccacagtctgaacatcaagctcatggtaaaattggaaaatatatctattagtatccaattctttaatatacacacctttttcgggttgccaaagtgaagccatcatatgtctcatggcatcaaaatcgattgttcgacccgttaaaaacttgcccaccaagcaccacctatc

SEQ ID NO: 74581 - DNA, 1122 bp, Cannabis sativa
  modified_base (36)..(42): a, c, t, g, unknown or other
atttctcaattctgaagattttattaaactctaagnnnnnnntttaagctaaatatgaaatatgtaatttttatgatgtttcctcagtgacgatgggaaatgcgatggatgaccgttagagtcacatgggtaagtttagaacttgattcttagtgagacaaatatttgtgatattcagaatgctaggtttaagcggggttatagttttggaccattttacccctaggcttataattgcataagttgcaagtaagaggtgcattttttgtattttgcattagaggattaggttgctttgtccatgttggcagctggccatttcattttaattcagcttaatttcctaacgtatattagaattaattaattaaagaaaaatacaaagagaaaagaggaaaaattgaaatgttatctctttctctctctctctctcctttaaccctagctagagccagaggaaatcatcctcaattgtgacaactttctaagttttttctttaagattttgaggtagcacaaagatcttgtgagttattagttgagtttgagcatacaaagtttttaatttagtactatctgattatggggtagttagggtttattttttagatttattttaggttgattagagttggtttgaagttgtattgaggcctaatgtttgtgttgagcaagtttgagtttaaagaaatcaaacttgacttgacaatggtgttttgaatttctgtggttacttattgttgtttctagttggattttactcatggatgttattataggttgtgtggaaggttttgtgaagtttgggaacaatttaggcatgttttggaatttttggggttctctagtgtaaaccagttaaccgattctacaagtcctgtagaattggttaaccgtttcacaggcaggatcctagaaaaccctttttacctattcgtgtaatttttagagtcctaatttcaatgtttccttgataaataaggtattgtcatgttagttatcgatagcaaaacttgtagttgtgagtttcggtctttggatcgggttttaacgtgttatttagccattaacataaatgtgacatagggcatccatccagcccgtaattttccgttcaggtct

SEQ ID NO: 74582 - DNA, 536 bp, Cannabis sativa
aaagaacccaatttccattgatggggtaggaatctttgttaattttatactttaatcaagtaatttcatcatgaatgatataagaattataaaatatttcctttttatcatgtaattgcatcgttatcaggatccgaagcagtcgctgcccctgatttcttctccctcgatgttgctgcagctgaccacttctccctctcggttctatattcccacactcgctctcgtggagctgggcctaagacaccgatgactgaggacgagcggcgccttgagagtagattggttcgtggcaatgttaaattcatgagccatatgattcagttccatatcatcttagtcatatgaatacgtgcaaatttgattgattataatgatattattttctttattcaattcatatgagatactggaaggtatactctaattctttccctgtctttgtggtatgagttttgttgtaaattctacacaacacatgacttaaagcacaaccaatattaagatcgaaacaccagcaagaagaacccttttaa

SEQ ID NO: 74583 - DNA, 992 bp, Cannabis sativa
atattcatataaactagaaaacacaacctgatgactcaacccataatacatcaacgcatactttgtcaactcctgtcgttttatcatagtcaaaacaggtcaatctcatattctcaaaagttctctatgttatgactcagcccatataaaatatatattatcaaattgaaccatacttgacttttttcttttcaaaaagatttaattaatttaaaagtaccaaatattatcaaacaccagtaaatttattttgcatgccataaaaaaaaacactgatcataataagtcatacaaatcagaaaaaaaagattagaataaaattagaaggaagatatgatcaaacaaacaatttaaagaaagaacttacccagaatcagagaaggccgatcgagaaaagagctgggtagccagcagccggagctctgtcgtcgtcagagagagagaggaaacgagagagaagtccagatctaaacagtgagaagaaattagaatttgggattttttttagggatttaggtttttttctttaatatttgaaacccggccgggccgggctcaacccgaaataatttgtaccgggccgggccgggccagaagctcgataagagcccgaataattcgggccacatttggcccgtcaggctgggggcccggctcggcccgcgaaaatggcccagattgacattcctagttcgacctgcaggtaaaagagggagaggctatacttgtgtggatagacatcgtgttacgatttttatatttactacgcaagtatatgcaatcaagtagtatctcacacaagtgaggtcgaaccacagggaatttgattaagtactactaaactatacttatgattctattcggtaaaattataaatttgcaatttgaaaggaaattactcagaaaataaaagagaaagtaaacgacgattaatcaagatgagagattagggaggtgaatcttgttgataagttaccaatgttaatacctaa

SEQ ID NO: 74584 - DNA, 735 bp, Cannabis sativa
gaccagtttggtcaaatctatatttctttcaaaaaaaaatgttgaccacattggtactagctaggaagaaccatttaaagtttagccaaaactttgtgttaaaatctaaatttatgttgctaatgcagatttgagggatgacaaacagtatctaattgatcatcctggtgctattccaatcatatcagcacaggcaagtcactctctcttacattaaaagagacaagataataagaaaagatatagagagaaaaggaagaatctttctctttttttttaatatttttttccttaaaaaaattattttatttctaataccatggagtagatgatagcttatggttcaatattgttgcatggtgaagatctaaagaaggcaatagtagatttgaatgaaccataactatgattaatgatcacagttcatagtagcaataacatatattaccttaataaatttgttatgtatttttatagtgaataaacacgtttattattttatgtagaataatagtagtttttaataatatgcaattaacaaattattttaatttattgtaaataatatttttattatgcttctaaattctttttgttgatttttagtattttttttttttaattttttcaattcccttaagtctcagttttaaactgacactaaaaggtgtttaagtgtcggttataaaatgacacagaaactcaatggtttcggttgtaaaccgacactaaaag

SEQ ID NO: 74585 - DNA, 788 bp, Cannabis sativa
aaaaagtcattggcagatttataatgaatcaacaagtaagaactgaatacacaccccagcttgagatactctaagctccacatcatgattgtaaatctcatataagtactgcccaaattcaacaccttcttttccctcttctttcaagcggcgtaagcaaagccacatgtgaagcacgagtaaagaaaaagttgttttaaaggtcttctctaagttgaacactgcaagttcaaattcgataaacaaaaaaatcaattagtacaactcaagaatggcaaggaaactcaaatagaaagagtctaattctacatgaccatttgaaagtttcgaatcactaatgctttcctttacgtgcttatttctccttttttctctactataaatattggatcaccccgatggctaaggagcaaactaagtttcaaacacatttttcttgaaagctcctattccattttactgtatgctaaatgattctgataaaaatttcaccttcataaattgcaggttcatcaacttgggaggtaatccgcgagtaaactgcatttgtctagatggagtggttagggatacaaagcttgtccaacatgtaacaaagacacttcttctgttcgagtgattggcaagatatcttatgttggtcacagaaaattcttgcccagtacctatagacttagaagggacgctaatgttgatgggaaaattgagagaagacgcccaccaagatgttttacatgtgaggaaatattagaacgagtaaacaaacttgtattgcaagttcctaaaaa

SEQ ID NO: 74586 - DNA, 581 bp, Cannabis sativa
gttgaactctgcagtaaagcgggtgctcggttggaagaactgggctactgattgttttctggcaatgtcaaaaaatttgggcacctggttggaaatttggttgcatggttggggattctccggggtacctcgatttttataatttaggatatttagggtattgccaccttatttatcgacatgaaaacttaagattaaaaaatttgagacccaaaaaatgttttagcgaggcacttaccaatttaccactaatgtgacttaagtcgtccgatcatcgagcagatttccactcgcgtttaccgacacactttattcaagatttaaggtacaaatagtatttatatacacatatgcacatgtttagtatacatgtattatatatttccatgtagctaacatcttagagatagcggtatgggtgtacatagagttacactaagatactgatatctaatatgttgggcaatatgtaatagtttggattaatgctatcaagatcactacaactagggcccgtttggtacgcaggatttgattggattagacaggctaatttgtccaatccagtgtttgggcatgtt

SEQ ID NO: 74587 - DNA, 1727 bp, Cannabis sativa
caatgaaccttgggctaagtttccgtttcttaccaaagcgtttaatgcccttcataggtgacactcagagaaataccatatccccgatctgaaaatcaatatctcgacgcttttgatccgcataactctttttctactctgagtcgcgagcatttgcgctctgattttatccactgcctcacttgtactctgaacagcttcaggacctaaaaactctctttcacatacttcatcccagtgaataggtgatatgcattttctcccatataacagttcatagggagccatcccgattgttgcctaatagatgttgtatgagaattcgattaggggaaggtactttacccatgatccttcaaaatctaacacacatccccgtagcatgtcttctaagatctgaatggtcctttcggagtgtccatccgtctgaggatgaaatgctgtgctgaatttcaattgagtatccatggctcgatgtaggctctcctagaatcttgacgtgaacttcaaatccctatcagaaacaatggactttgggacacagtggagacaaactatttctctaacatacagttcagcatgctaattaatggagaagctcctctgaataggtaaaaagtgcgttgactctgtaaacatgccaacaatgacctacacggagtcgtactgtcccgtagtcttaggcaatccaaccacaatgtccatggcgatgtcttcccatttccacttcagaagatttagtggctgtagcagccctacaggcctttgatgttcagccttcacttgctgacaagttaaatacttcgccacatattcagctatatcattcttcatacttggccaccaaaacatggccttgagatcttggtacatcttcgttgttcccaggtgaactaagtaaggagtcgtatgagacttgtttaagatttttcttttaatgtcatcatccataggcacacaaacacaattcataaaccgtagcattcccgtgtcatccactgtaaaatcactagtctttccaactaaaaccttatctcagaattttactaactctggatcttacaattgtgcttctttgattcactctaaaagagtagattgcagggtaatattagccaactaccccacaacgaactcaatcttagctcggctcatctcatctactaactgcctggagatctgcttcatggtattcaactgactctgtcctttcctactcaaggcattagctataacattggccttcccacggtgataaagaatttcacagtcgtaatcttttactaattttagccaatgtctttgtctcatgttcaagtcttctgggtgaagaagtatttcagacttttatgatcagtgtatatctcacatttcttgccatatgagtaatgccgccaaatccttagcgcagatactactactgtgagttctaagtcgtgagtgggatacccctgctcgtactccttaaactgccaaaaagcataagctattacctttccagcttgcataagaacacagcccataccctgtcttgaggcatcacaataaacaataaacttttccttatctgaaggaagagttaacactggagcggtaatcaagcgctactttaactccaaaaaacttttctcacaccgatcagtctaaacaaactttaaattctttcaagtcagttccgttaggggtaccgcaatctttgaaaaaccctcaacgaaccgatggtaata

SEQ ID NO: 74588 - DNA, 891 bp, Cannabis sativa
agtacaatcaattcaccatttaaagagctgattcgatggaagattaggataaagtttcactatgctttgattaatttttttttatagggtattctatattaagactttattttttaattgttttcttctattttaaggtgccatttttttttttatttttcgctacataatgtttctattaaattttgtaatatatatatatattattgtttctttaaaatttctaaaaacaaataataaatgttaaaattatatattattatgacttatcatatataaattaattcttcaggtgaaatataactacaatattagtatgtaaatattgatattagcatattttttatgattaataacaatgtacatatcataaatttacaaacacaactatattttactaaccaaatgcactgacacaaatttaacttttataaaaacaagcagtttgataattataccactttaagtacctaaatctaaaaaaaaccaaaaataccaaaccttaaataaaattaatattgacgtggcctgatacgtaacttccacctagtatatataaaactctccatgttgtaaaattaaaattcaatatattaaaattaaacaacttatacatgttttatgtgtacttagaaaaatttacactaaatatttttttttcaaattttttatttatactttgacaagaaattttttatatttatactttccttaatttttttttcttttttactattttttacttattaaagctttaaaaaagtttttatttttttttattttttttatatttttttattcaatttttgattttttttgagtgagttgctgatttttttttttctttctctcctctctatttctcttttttttattttttttttccaattc

SEQ ID NO: 74589 - DNA, 864 bp, Cannabis sativa
aaagtcctttaccgaccaagcttcccagataagctttgccggcgcagtcagggtacttttgccggcgcaacaatgcgccggtaaaagctggttttcttgtagtgaataaagtttgaatagttacttatcatgcgtataagaaagaataatcgtacgtacaacaaaatatgtaaatcttgttttgatattataaactactcggaattttctgaaaatttgcaagtagtactactactacaaatatcagaattcgcgacaatcctaaaaatgatctttttcgaggaccatcgctaaaaaaattaagctaaaaaaattaagtaactgtttaaaaccgtcgggaaaaatttagtattctcgaccatttaaaatcgtagtaaacaaaataggcgacgttttttaataaaatttaatttttttaatggacccttataccgtcgggtataagggtccattaaaaaattgtcacctacttctcgccacatttcccacgtgtccacctactttttttttattttccacatgcccacttatttcttcttacctagttcttcttcatttcccacaccctaaaacgaaaatcttaataactctccaaaaccccacccatatgcctccgaaccatcaccctcctctctcgccgttttcctccctttctcgatctcccttctcgtctctctcgtccatcgatctccacccacctctcctcccgtcggtctccctctcctctccgtcgcatacattgaaccaccaccacctctcttcgtgtccctctcatctccatctcatacgttggaccaccaccacctcccgtccgtctccctctctctttctttctctccgagctcggtataagtacatttattt

SEQ ID NO: 74590 - DNA, 865 bp, Cannabis sativa
ctaattgcattatatataccccatcggaccctcttcccccattttctgcttttcttctacaaatctcaaaccataatcctccttcttcatttcttcattttcgaccatcagacccccttttccttcttcttcatttcttcatttcattttccactttctctttgcgtgcggctactctaaacaggtatggacgcaaactcttcttcccctattcctctaattttcgatgaacttttctgtgcggcttttcatttgttttttttgcttgtttttgatttggtaacgagtttatatgtttctaatatatattgtataaatttttttatgattattgagtaggcggttgggtgagttgcgttcatcacgattataattttttatggtttctttagatctagtttgtttaggttctataattttttttccaaacatatataactatttgttaatggattggatttggatctgttgattgccgagaaaatttgtaggaaaaaaattaaacgacaatagtaagtattaacttttgttttcagtaaaaaaaaaagagactatacatattaatctcatttacattgttttcacacctttgatctgtgtatacatatattttatctgcgtacatgtatatttttgaagtgcaatatattttctgtatatgatacatatagattatttaaatgtatatataatatatatttttttatttatatatgtgtatatatacgatgtatataattttggcagatgtatatacataccaaatatatgttgttgtatgttttttttattttttttaatttatttttgtaattaaaagtatttatttttgttacttttcgattaaataaaaagatctttagca

SEQ ID NO: 74591 - DNA, 602 bp, Cannabis sativa
ccaaattttctaatgcattatttgcattataggctgatttagttggtcatatttaaattagattatatatcatatttttttatataatactatattaaattttaatttatactaaaatattatatatttatgtgtctataaaagttattatcacataattttatacaaaaatattatataaaatacaatataatactatacaatacaatacaagacgtaccaaaagaaccctatgtgctttaatatatgaacaactaagagataatgataacaaaattacttaaattatacatttgattatacttaattttacaagctcaatttttgggctcatttaggactgtttcaagtattggaggggctactttttatttaaaatagatactttgttttttatagaaaatattaaatgcaccgaacttttaaatatttatataattataatattgaatgcaccaaacttttaaaaactggtttcttcatcaagaaatcagaaatcagtttgtaatttttccggtgactatgccaattctgatgacttttttaaaatttgttgtcggtgccagaaaagtcgccggagtagctgctagcgtcagaaaagt

SEQ ID NO: 74592 - DNA, 761 bp, Cannabis sativa
taaaataatttccaacaaaacaaagatgccaaatcaaagaatggagggattgagatatgagaatcatgagagcccatgaagcggtaatcgacaaccgttccagtcaggtcgtcgtactaatcaggagatcctatcaagtcaccagcctacagccagtagctgatacatatattcccactgggccacaacatgggctagaagaatgtatagctgaacacactcagtaatcctaagttaatgggtcgtccaatcaaaggccatagggtcaaactatgggccaaatggtagatgggcaagttttaccaactcgttacttgggagggaatgactagcctaacacccgtcatcagacagaggtaccgggccagccccttgttgacaatggtcagctaagaaggcctccaagtgaatcagtctttacccgattgggtaccgttcacgacctcaggaatgatttaaattgcgaaaggggattagacagacaggatactcatcttacgtacatccagataatacgaattactacatacccgacctagtttaaagagatcttcatgtgacacaggttggtcaaccggaaggtcaagttgatccattagtggaagtacaaatagatcaacttaagagccttgttcaaggcctgatcggcccaaaactcaaagatctagaacttgaccagactagaggatcaccattctcactagaaatcaatgctctcgacctattgccgaagttcaaaatgccaacatggaaaatgtata

SEQ ID NO: 74593 - DNA, 837 bp, Cannabis sativa
ataaatattttttaatgataaataagctcatacatacaaacaaagtaaaaattttggatccgtcactgggaccatcctttcctcaaaccagctcatgaaagtcatggcagcaggagccacaactgacacacttgtttgttttcagcaggcttgtgcaaagttgcaatggagcaagacatgtagtgcagtttttggagcaacaaagcacaacgggcaagatgtatttacttgcacattttcacacttcaaaaactaaaaataaatttttttatctaataaatatgaaattaaatgagaaaataataaatctttgatttggtcaattattagggaagggtattatatttacattgaattaaaaatttgtataaaatattttaaattatgtataaaaaaataaattatgtattttaattaataataactacttagtaagttatattaaaattttaatttatttttaataaatttgtagtacaaatacataaaatattaaatttattactaataaatactgaaatttgaaaaatagtaaaataaattctcaaatttctaaacttaacagtttttataattttattggtacccaacttaatggtcttgaacggagaccaagccaaagaataagaagaagacatatttgagtttggatttgattcatttatggtgtaatttttattctgatgtgtgtgctaagttctaggttcaaattttattgtgtgtatttttaatgtttgaattttagtattttagtgagattctactatttgagtttgtttatgagatctgttttttttttatttatttatttttataaattttgagaacttgaaattt

SEQ ID NO: 74594 - DNA, 753 bp, Cannabis sativa
gacacttttattttgttcacttttaaaaaatagattttagaatctcgagttttgtaacaatttacatttacgatgtttatctatgaaaatatttaattattataaaattttaattaaatatgattttacatcaaatcatttgattaacaaatgataacataatagtgtgcttaaactagtaggatattatattaaatttgaatttattttgagttgattttaaatctaaaataggttacaataatagtggcgtttggaatagtatcaatgtaattttgccatgtcattgtgacatggcatgagaaaattgacatggctagagtaggtaaagtcaccatgacgccatataattatttaacgagtcttataacagatactcaaatttgataacaatatagaagtttgagaggctaaactaaccccaaaaaaatagaagattattaattgagattatttcacaaatacacataataataaaagaaattataaaaatacggttgtacggaaaatatttttatgattttatttacagaaatacggtttttgatgtatttttatgttatactcttgttaatttgttgttatttttgtttgttgttttgatgttatttcttattactttaatatagttttcttgttgttttagtattgtttttacaaaaaaccgttattgaccgagattttcggcaactattaaaatatgattataatattaagctgtaagaaagcgagataaggatttttacgtggttg

SEQ ID NO: 74595 - DNA, 543 bp, Cannabis sativa
cgagtgaagaaattggtgtcaaaccttttcgttactacaacatttgggctgatcatctagagttcaaaaaagttgttttgaaaaactagaacaggcctatgaagtgtgttggaatgaaggcattgtattttaaactcatgaggcttcagcattgttttaagaatttcaacaagtaggttataggggatggggggaaggcttacaaggaggctaaagataggtttattacttctaaattacaggcccaaagtaatgctcatagtctagtttttcaaaggcaggaaaaagaggcagcaactagctttagtattcaagagaaaatgtatcatagtttcttgaagcaacgaagtaaggtgagatggctttgcaagggggatgaaaacaactcctatttttatgctttgttgaaaaaaaaggagaatggaaaataggataatttcctacatcaatgaccaaggggaaaatgttgacaaagttcctgaggttgttcatcatttcatggctcactttcggggatacatggggagctatagtagaccctca

SEQ ID NO: 74596 - DNA, 1777 bp, Cannabis sativa
tcatgtccactatcaatgacatataagttaacgatcactcacatgacataatgcaatttcaagcgacgccacgtgttaaggaccaatcatgagaaaattggtggacattgcaagctcccataacacggggcgccccaaaaggttaaggagtaaatcttatccagatttttgcaaccatgacacgtgcaacctagcaaaaaaaattcaagcaaatccatagttaattagtgcctgcggctccagcttctgcgaagggcttccacgaaaagtacatccacaataaggaaagatcacatgaagaattaatgagcatagcgggagcgaaagggaaggtgtccctttccggttgaaaaatgaattatagaagccaaggccttctcttagaatgtctatagcgaaaaggcttaggacagttttttctcccatacagtgtcgcgagaggccaccacccatacctgtcagatcatagaagtgacagtaatgcttttttgggtacgacgtcagtttttgtcccccaatctcacgtcatagtacaagggatgtgcaccattgtacctgcccattatccagctgccatgtgaggagatgattcgaaaaggaaagaccttcgggcaatacgtaaagggtgttcggacagtactcatcttacctctgtgcaccgcacgatggagctgccacctaccgaatcaacggtcagatctttggcaattgggtcggccctgaagtaatgttgatcaataaacctcctataaatacccatatatttcatgaagaagggaagacctacaatgcaatgcctaaactatatacagttgtaatatgcaatgcttgcctacaatgctaataaaatggactaaggataataaatgtgtgaaccacgtaaaaactttgcgtctactttttattatttttcttccttcttaagctctaaataatcggctttcaaaaatctcggtaaatagttctattcactcacaactaaacatgaagcattccaaacctttcatactttgaaaaatttagtcttcgcacattttcaaagcaccatccaaaccatacgcattgattgtggtggtgaatatcgcaccctttccacattcttcactcaacttggcattctccatgacatctcttgccctcacactccagaacaaaatggccaagttgaacacaaaaataagttgtggtcaaaattggattgacccttttagccgaagctcaaatgcctctacacgattggtcgtatgctttcttcactgccatttacttgattaactgtcttcgtactcacattctctgctataccagcccttatcaacttctctataataaacatcccatctatactctactttgagtttttggctgcgaatgttttcctttcctccatccttataatattcacaagcttgagttttgctcttctccttgcacctttctcagctacaatagaaaacacaaagcttatctctatctctatccttcctctagttgaattttttttaattgtcaagctgttttcaatgaatttcatttcccattctatattccttctcaactttctgcgccatcaaccaaaccacacgtagttatcccatcgttgccttactctatccccttctcctattcatatacagaatgatcctcctcaccctccaccaccttaatcacaagaattggttccttctcactcccctagtcactccaccttctacaaattaccatctccacctctcttttttacacttcttacgatatccccttcttcttctaatcc

SEQ ID NO: 74597 - DNA, 1057 bp, Cannabis sativa
aaaaaaaaaaaaaaataatgatatgataacgaagagagtgttagacactaataataccttttaccatttctctctttttcataatctatagtagtttgacatgtccttaatatagacagttttttttaatgaaaagaatctcatcactttttgttttttttgaatatttttaaaaatacttatttctttatattttatttataattttacagcttaaaaattttatttataaaaatatatttataaagtttttaaattacaatatatttaaaaaaaataattaaaaaataaagagaaatgaacttctcaccacaaaaataaattaattataaaacaacaaaaaataactagaaaaataatctcataacaactataaataaactatataaaaaacggtttattatttttactgaagataaatttttataaataaaaaaattcaaagcgtaaaataaaaatatttccgtcgatgtatctttataactttttttaaattttttgatttattatgtaatttcttttctctaacctataagagcactcacaatagtttctctactctattctttaaaatacactaccaaaattttactttatctattttacctcaaatttttatatattactatatatcagtttctttatttttttataacatttaaatactatattttttctattattatttattcatttaaaatatataataataaaaaaaaatgaaaaatataaaagatgagtgatgggagagatatttaaaataagtttgaagaatgaataatattttctaagtgaatagagattgagctaaaatagctataaagtaaagaatctaacggatgcttaattttaccacttttgacgctattttttttaacgtgaaatttagctattttaagtattttaagtatcactttctcgttgtcacgcccttttggacgggatagagtacaacttagtagtggtagacactttgagaagaaaaaatttaacaactcaaaaatttgaggtcaccattttaaagttgtgtaatcatcaatagacacaaaaattatat

SEQ ID NO: 74598 - DNA, 1009 bp, Cannabis sativa
  modified_base (566)..(566): a, c, t, g, unknown or other
aatgacgggtgtgcattatacaatgtatttccagatgaatttcggttaatcatacataaatgccccttaagtaatttttaaagaacaaaactttgtaattacttagtacaaaggactctctttattcataactgaagtttaaagtttgcatcagtaatgcgagttacatcattttttttattgatagtaaggtcacaaatgttctacgttccagtagttttttattagtgaaccatcaagtcgagccaatttataaactccgactccaactactgcttcgatgacatatggaccctcccaattcaggtttaacactcctatagatgcgtctctcgtatttgcaaagactcgtctgagcacaaagtctccaacattgaatagtcttttcttgactttcttgttgaagtatcttgtaactcggtgttggtatgctgcattggtgatctgcgactcagttcgtttctcctcaagtagatccaaggacaattttaaaagttcctagttttcttattgattataaaactctcttctgtgagtcgagatgttcacttcaacaggcagcattncttccgagccaaatgctagcgagaaaggaatgtctctcgtggctattttctcggtagttctgtgggcccagagtacctgaggtagctcgtcaacccatctacttttggcagcgtctagcttcttcttaatagtatcctttagggttttattgacggcttccacttgtccgtttgcctgaggtctggatactggcgagaagcttttgataattttgttcctctcgcagaattcagatactatcttcatggggattccgaacctgtagataatgttcttgacaacaaagtcaatgactttcttgcaggttatggaaacgaggagttcggcctccgtccattcagtgaacaagtcgactgctactaccgcatacttagctcctcctcgcccagtgggtaatgccccaattaggtcgatcccccatatagcaaatgggtagggcaag

SEQ ID NO: 74599 - DNA, 1711 bp, Cannabis sativa
  modified_base (212)..(216): a, c, t, g, unknown or other
  modified_base (504)..(504): a, c, t, g, unknown or other
  modified_base (1531)..(1536): a, c, t, g, unknown or other
ggcacaaaacccaacagtttcttcctcctcttgagcggagtcacctgctcttcctcagcctcatctttaggattcaagggctcctgagcatattgctttgcccttgcatctcccgtcaacttagcctcgcacttcagttgaatcaactcatcctcctgatgagctcgttcaacccgtctagcatcatatttcctcttcctccccttcactgnnnnnggaatgaagtccttgggatagagctcgtacttcacaaagttatcctcagaggttaactagatgatattccgatattcccctgaaagtcgagcaagcttttgagctctatcccggagagcaacagtgagaagagggcgatgatatgtcggaatatgctggaaccgagtgtgagtgatccccgtgccatccaccatgaagtactcatcagcaaaatgcccaattttgctgaaggctgaatcatcggtgcccgtcaaccacttaaagtctagttgagagaaatagaagtancccgacctgccttgcttaggggtggacttcaaatcaaaaaactagctgacttcgtgaggagaaggcataccccacttctgagaagcgtagaagacaaagagggcagacagatatttaatgcccttaggagtgaactgggtcgggcaaaggccgaagaactccgccacattcttgaagtattgatgcaaaggcatcaacgccccttgttgggcatttgcacccgaccaggcgcacatccccctttcagggtttgtggcacggttgttgtgggtgggaatgtagcaatccgattcgcccaggtacccgccctggtcgagaattcgaaggcgcgcctcagtaaccctggacggagggcttacccacctgatgcccaaggcaccttgccttctatgaggaaccgcagtagtaagttcctcactgacgtagtccactccctcaaccaggacgtctccgtcagcatcgactggctccccagcctcattgtactccccgtagttttgaggttcaacctctgcctcttcctccgcctcggaggaactgctaggacgaacatcgtcctgctcctcaatttgctggacttcagcgtccctttcatgatccacctccacctggacggttggatcctgttcggcgctgggcaaagtggtgtgccagtccacttgaggatcagatgcgtcaaccagacacgttattttctttgtatggccatcattctatggctgggtataagatttggagaatgtccttcactagaagaaggtgggctagaacgaagacgaggatgatcctcgtgcaaaagttgaagcaggtcctggttgatctgatgttcgctcttccaaaattcacctgggttcatctacaaaaaacaacacacaagatgagtgtttggtcgaaatatcgaatgataaataagaaaatatgccgaccaagagtactcaacagattaaagaacaagaatgttcaaagaaaagtcataactcaagaagtttgaaagtttctcgggttagggcaaaaaatttcatgaagnnnnnnataagcaagatgaaagacagacattacgcagttcaaaaaacaagcagtatggactgtaaaatcacataaatttatgacaaagaagaatcgcagagtttctgaacctagggtttcctaaatattttctacagcaaagttgaaagtgcattcaaaatgtaaacatgcaaaaataagc

SEQ ID NO: 74600 - DNA, 2108 bp, Cannabis sativa
taaaggcataacgaaatgagtcgcctccatagtggattaagttgacatatcaaaagaccttcttaaaggcataacgaaatgagtcgtctccatagtgaattaagccgacatattaaaagaccttcctaaaggcataacgaaatgagtcgtctccatagtagattaagcctacataacaaatttagtcaaaatgccaaagacctaaagtgcgaaaaaatcgcatcaataaaagattaagctgacacatcaaaagaccttaaaaacatatgaatcgcatccataatagcatattaaaatgctatatcaagtcctccttaaaagcacatcagtcacacacaaagtggattaaaaagatatacaaaaacacataaagtaataagtaaaataaaaagtaataatttatcccgaaattcataataaatagctaaagatactatatgcaaaataatagggcggtcaaaccaagatgttacatatctcgggtcattcaaactaatatagtacatatctcgatatggccgagtaaagtataaaggagcaaactgaaagagagtagttgtaaaatcctaaagacctatataaaacaaggcaaatcctttaaattaggaaaagtcgtcggactcagacattatgcaacttacattggttaaaccatttgaatcaggttaggtaaggtataacaacatcctcatcacttgagtacactatctagtgttcgggcaataaactattcttaaaggagtttcttataaaattcttttttaagaaactagaagagtattgtttggggaaaatttcagtggatcaacaagaggcccatggtgttagaaacataagaaaggcccaataaatgaatacaggtaaaacccacaaaagattgggaaagatataaagtttaaattaggagctgagatacgggaatataactaagaaggtaacctcattggacgagccgaagtaatatctaagtcgaattaatctaagataattctcatctcaaatcgtgatgagaaacacattatcttagatcggaaggagcctatctcagttcagccttggacttctcttactcaaattttaggtcaaaataggtttcatcttagaccagtccgagatatgacctatcacggtcagtctgagatatggagtctgaggtatgacctatcatggtcgtttcgagatataatgtccgagatatgacctatcacagtcgttctgagatatggagtccgagatatgacctatcacggtcgttctgagatatggcctacctcagttagttcaaactcacttatctcgggcgggatgactcacatatctcagatgggatgactcgcatatcccaaacaagataactcacttatctcagatgggatctcaatatctcggaccgaatgacccacgcacctcaaacttatgactcaccttttatacaagacacttgtcaagatatgcaatgccacctcataagtaataatagacacatgtcaaatgataccttgagaaattgacaccagataaaagaggagtataaatggaagtgagggcaggagaaaaaagtgggggctagatcaggggaaggctgagagaagatcaagaatgagcaggaggtaaagggctctctaaaaactaaaaatttttgactggttttttgatcaataatgaactattttttgtcaccatttttggtcaaaacataaggttgaagacgtgccgtacccctagtaatctttcacgcacaaaaatcaacgtgcatgcgagagtcatgttgaattttcatgaagcaactttggcttttgcgagggaaggctaaagttgtataaaaattcaagtgatgacttcgctttaaaagactaaaggctgaaacatcgttgggcatgtgacacacttcaagcagtcctcctcttctgggaaggagggttgaagacgtgttgtacccctagtgatgtttcactcatagaaaataacgtgcattcgtctcctgagctccagaaagctctaagagacgcatgtaaccaagtgcgccctaggatctcctgggcagtctatttcttttggtggattgcaaggcacttagtagcttttgaggcaaaggctcagatcttcag

SEQ ID NO: 74601 - DNA, 824 bp, Cannabis sativa
tgaccttctttaaattaattagtgtttctgctatcttctatctaatctagtagagtcttatgtctatgtttactcttttcatgataaaacggattcttacaaagatggatgatgactgactattcgagtacacagtaactcctcctctcagctatttcaatttgaataaaattcttcgaagccataaagcttccttgaatgcgtccgtggtagccataaattctgcttcggtggtggatagagcaatcacagactataattgggccttccagcatatacagttttgatttgtcatgaaaacgtaggaagtggttgactttttgatatctctgttcgaggtatagttagcatccgcgaacccttttaactccaattctcattttactttctcataggtcaaaccattatcccaagtacccttgaagtaccttagtaaccattttaaggccttccaattttaaatgcccagattagacatgaaccagcttagaatgcttagtgcacgagttatgttcagtctggttctcaccatcacatacattaaacatcccaaaatcattgcataaggtacttccttcatttcctctttctccttcgaacttttcgaatattattcctttgaccaaataaattgcctgcctaacaaaacaaatgtactctttgcatcttccatgttgaacttctcaataactttcttgatgtacccggactgcttcaagttgatcgtcccttccttcttgttccttgaaacttcaataccaagtatcttttgaactggtccaaactccttcatctcaaactctctcttgagcttggctttgata

SEQ ID NO: 74602 - DNA, 514 bp, Cannabis sativa
aaaaatgggatcatggttgatccgaggaagattgaatctgttacggattggccgagaccgaagatggtcactaaagtcagaagttttatgggtttagctggttattactgccggtttgttgaggagttttctaagatttcaatgcccttgacagaactaactaaaaagagtcagtgatttatatggacatacaagtgcaaagctagttttcaagagctaaagcatcgattgatcacaacctcggtattagcactaccgtcagatcaggagaggttcatgatatactgtgatgcaactagacaaggtctggggtgtgttctgatgcaagctgatcgagttatcatttatgcctcccatcagttataggagtatgaacatcgatacccaactcatgatttagagcttattgtagtggtatttgccttgaagatctggtgacactatctctacgggaaaaagtgtgagatttacactaaccacaataacattaaatattactttactcaaaaatatt

SEQ ID NO: 74603 - DNA, 893 bp, Cannabis sativa
gtctcttctcaatttgcctttctctttcttttcttttcttctcaagtgctgaagcaaattgagataatcatatttttgtaattttaaaattatacatattagtgctttatgagtgtactgttttgtgtgtaatatttgctttttgtgttggtttcttattttattgttgcttttttttttttcatttttttccaatgttttctttgttttaacacattatttctccaccaatataatataaggaggttattactcaataaatttgagagaattatcatattttgtaaaacattcaatatgcatgcccaaaattgtaggagagcttgaattgtgttcttcatttgttgaatttgagagaattggatcattctcagacaagttattttaaagttttataagaattgtagacattgaaggacaattagttcgtttagtttagttagaaaaacttaatgtttctaacttatttgttattaggtaccagtgctgtccagcaccttctacatagatgacattttacgaatggttaacgatattctttaaaaattattttttaaaatcatatgaaattacacgctatttaattacactaataacgatatataataccaataaaaatattagacgttttagcaattctctaaattaaaatatgatatatgcactaaaagttgtatgaaaatacaaatatacatatatatggatgacgaacaatattactctttttgtaacgataatattggttttggtggcatatgtaaagattctaaactcccttccatcatttgtacgacgttgaacatggagggacggttgaatggcatagattgaatgcaccataagcttacaataatcatctttctcaccagcatttcatcatcttcattttccat

SEQ ID NO: 74604 - DNA, 805 bp, Cannabis sativa
acattttccattatatgttttgtacccataacaacaatcattctttttattgtcaattaattttaaggcattattattgcactagttgtgcctaataacttttagaggtaacgctctgttatttgttagtgatattcttttaatgttattatattaaattatatgagatctgatactttgctacaataacgatataacaacaagaaagtattagaaactattgtggacattgtcccacatggaataaatggtaaagtattaagtcatatataagaacatgaattactctactcatcaccaattaattttaagatggaaccccataactatatttatgatcaccgtctatctttgaaaatgaacaatattggaaattgagcttcatggatacttttacatataaatactcatcccaaatccaacaatcctacgaccctctttctgagtaagagacttagctccatggatactttttcatataaaactcagattgcttcccaactctgccccaaataggacgcacgaggataataacgagctttgacacatgactaactaaagaatcttgacaagaatgaagatgccaaccctattttccaagcagcacaacattaaaattatgaagcttctgaaatccatgtctcccatgaacctttgggacacacattcggtcccaactcatccagtgaatgccacttccgtctcttccaccaaaaagaacatattaatttctccatctcgccacacatcaatttatgccaaaaaaaaaaacgctcatagcatagttgggaaaaaatgtcactac

SEQ ID NO: 74605 - DNA, 672 bp, Cannabis sativa
cacttttaatatataaagatacaacacacaacactaattattgatatggtataattttttattttatttttttcaattaaagtttgacaaaaagatacatatattcattcctactttaaaatatgatagaataacttttatattttatttcctaaaagtataaacataatatttcacatatgggacttaaaattatcacaaaagttcaaacatggtattcgagatggtaaaaagattgatttataataataataataataataataataattattcaatatgagaaattataaaaaggtttgatcgtgcagtgttaagcttagcctgctatgcatgcttatgtatcatctaaggaatacaattcttcagtcttattgttggataaggttaagaatgggatatattctttcttcaacatccagaactctaaacttccagttccaagtcattcttcagaatccaaaccaaaacctctagactacttcaaattatttgattacttttactttatcatatatgtactgaatttctaaatcttaaccttactgataaacctattaaatggtaactgttcacggacaaacggcaccgtttaagccctttccaagatcaaactcacaacaagaaactagtgagtctcaaaatcaccttgtgacaaaagtattttgttta

SEQ ID NO: 74606 - DNA, 1151 bp, Cannabis sativa
ttatatatttataatttttatccttaaaattattatgtgagagaggttatttttacatgctttaaaaatattaatttttttttacttaatatattatctaattattatttttgctattatttatttaaatttactatggttttgaactaaatttttaaacacattctgtaaactaaaataaaagttacatagtttaatagatagaattgaacaaattatctatctatttttttttctttttaaaaaaattatctcaatagtacataattaatacatatttttgttctaatatgtattttgtcaaattttttttatgttttactttgtatttacttaacattttaattttttttgtgacaatactcttttaattttatttttaattgtaaatttaagacatctgttaaaattccactattgaaagttaattgaattttcatagtggacacttttttatgcgaaatatattttcattaactttgagattttagcgccacatgtatacatgtgtacataatgacaatttcaattaatatttaaatattgaatttaacttgttcttcaaatttgtgagcagaagtgaagttaagggagtgttgctacaaaaaaaaaataaataaataaataaaaaagtgttatgtgtataaaaactaaaatataaaagagttttggtctttgattatcctaataaaaaatttatatgttttcataagttattttaaattcggatagagaatacaatgattttttttataataaaaactaaatgtatttttcatttcggtgaaagtttgaattatagtaaaaattgaagaaaaaaaattcttgttaatgaggactttaatttatcacataacacaaataattttttttaggaaaaactactactcacatgcatacttttattatataatgtaacttgatcaattctaacaataatattattaattataacataccacaccatatattgttttgttttccttcaaatagtcaaattaatcttcttcttcattcctttaattatttaattaattattaatctgcttatctcttaatatgtccctgagctaggtgggccctaggcacaggcctagcctgcctatgctcagggtcggccctggtgccaacctcacctagtatatatatat

SEQ ID NO: 74607 - DNA, 1153 bp, Cannabis sativa
aaatagttaaatcttaatattttctaaaatcgaagaatattcctataggatttcttaaaaaacatcatcagaattggctcagtttgacaaaatatcaacctgggcgctgaatagccctaggtgtcaacctgggcgctaggccttgatcttagcacctaggaagtgctattttttcctcgacagtacttatttccccatatttgataaaggcgaagaagatgcatgagttggattgttgatttgatacttggaagttgcccaaattgataaattatcagcctaggcgctgggtgcctaggcatcaggtgcccaggttgttcaaaaatgaactttctctgaatctgattttgatatctcaaatatgttcgtggtatgtctagttcatgtcccaattcaaattttaacccatttgcattaagagagtcccaaaaattgaaaccatagttaggaatgtcaacttgggcgctgggtgaaaccgggtgaaaccgtcctagggcctgaatgtgactgctccatgtcttcatggtacaaaatgctgaaagataatgacttggaaatgtgttattgaggtctgaacttccattctacagttcccaaagtcaacctgggcgtagggctagggacccctcccaggtcaacagctatgagttgggactactcaactctgaaatgtcatctttcttgtcacgtgtcaaatattgatgttcatcttaatgaactcaccagtacttgcactagaactttaagattaagaaactcgattactagggataacgtcaacatttcattaaaccataaaagtactaattgtattgtgattttctttgaatgctcatgttatcatagtagggtgtatatgcctttccagtgatcgaagaaatgctttcattggtcacttgacataccaaattttgttgggctttcttgatcataagtctcagagggttgtcacatgctgagcatctataatgcttattcagagattcataaattattagtttttactcactgaagaaataactggagttacctcaagactccgataagctttaatcaatgcttgggagcgttgttaggtttgtgagctgtaattaagtaataacaatgaaatatcaacaagctttacttgacatttttattcattagatgttaa

SEQ ID NO: 74608 - DNA, 642 bp, Cannabis sativa
tggcgggcttgtaataactgcttgtcaacggtggttcaactgcgtactaagcgtgtcgatgtaagtcctttatgcccgatttgtcacaatgaacatgaaactatactccatgctttagtcacttgtcgagaggttcgcaaatgctgggaccgtgttggattcggtacatctgtcactcctggcgctagtttctttgactggtgcagtgtggcttttcgcaacaactctgctactgtaaattgcagaattgtggtcgtgtgttgggctgtttggggagccaggaacaacctggtgtggaacaagaaaccatttatttttgaagacgttgttgcgtatgcgtttcgctatcttgaccaatggaaatctgctcaagtatcttcgaattcatcgtggccgattctaacggctgctgatgtgggagagcagtggacaccacctgacggtactagtgtcaagataaacgtcgacgcggcaatctttaatgatgggaggagcttcggcttgggtatggtggctagaaactctgatggtttgttgattgagggaaggatgaaatacacagcggtccaagtggaggtggctgttgcagaagcaataggcattcgggaggtattgagttggttgaaggagaatcgatggcct

SEQ ID NO: 74609 - DNA, 1217 bp, Cannabis sativa
aagccactatatgtgcttcttccaagttgatgtacttttggacccttttttggaagtcttggagattggcagctccttcctgctgtagctcattctaaaaaggagtttcggttcgtatcctggcatggaatagtgctaactgttgtccgtcatcaactttttaggtttttgaggcctcttctttgaacttttttatgaagttctttagggttttcgttggtagttgcttgatgttagtcaaggcgcttaccttgaggttaattttcttagctgccacgaactgtcgtcgaaagctgacttgtaacttgttccaacaatctacggatcttggttctaattttttgaaccattcctcggcggatccacccaatgttaacgggaaacacaaacacttcgcatcattactgaccctcatgactaccattactcgattgaatcgagacaagtggtcgctagggtccctatctcatgcgtatattgccatttcaggcattttgaaatttttagggagttatgcctctaggatgtttttggcccagggctcccggtcttcataatacaactccgaatcatcccctttttgccttcgtgagaccttggcaatatctttttggaggattgctagttcagccagaatcccttcattcaaggttccctccgacactggtattgcttgtttctttttctccaagtgattcctgaggtcaccgtgtttattattgagcttttgtcttaagttggcagggggatgcttgcgactttttctacctttttccccaagttcttggtgtacgaatacactttttcggtcctcccagtcctgagggccagtgctctctctgaggagcctgtctctctgcgggcctctccctttcaggaaatcggagcagactttttgcaaatcctgagcctttttgttctttttagggaaagacgtgggatttttctttaggcatccctttgagggatatcagatagggtttggtcccctattcttgtgcttttgggtactcggcgaagactcttcctgtgtttcacctggtcttggaggcatagccttcgaatgcatgtggattctggccatctccatagctttttgcatggcggccattatcttgcatcctcctattttgctctttttgagctgctagtttggcctcgtgatcgactaccttttgccttagagcaagtaattcagtgtaactgccatcatcata

SEQ ID NO: 74610 - DNA, 1137 bp, Cannabis sativa
tactttcaatgcttcataaagcattctggttcacacgttagcatattcacacaacttcagtgcttcataaagcactctaattatgcatcattataaacacaaattcttacatccctaggtcactatgattgcaagaaaagtgactaatttcataagcagtataacatccatttaatcctacaataacaaaaatttattcaattacaactcatcacataataacacacttgatccatttcacaacatcataaccacacaatctcggtacttcataaagtacccttaccactcgttaaccacgagatatgtatgtcactattgttaaccgatacagcgaacgataagtaagaaacctgtccttagtttcaggagtaattactcataacagtaatgaccgtttcttttactcgatcataatcgactcactacgataataatcgtttcaaattactttcctcgatcataatcgagtcacaacaatgacaatcatttcctattgttttccctcgatcatagtcgagtcacaatgttgataatcatttcctattatttctctcgatcataatcgagagacactaatacatactaagatctcgatcataatcgagactatcacaactataattgttaaccataaataatgcgtaatacttttcttacctcagtccagaatttagcattcatgctgacctaagtggaatcaaagcttgacgacctcgggccttatgtcatgacaacaaaaaccaataaataccttaaaccgaaactctaagaattaaccctaattcacgcaaccaggcaaaacctaacttccattagctctaaaataagccaaataacacccaaataacctaaatagatactgggtacaaccccgagccaaaatcaatttcgaggaaaaaaaacccaaaaatttctcctgcaaggcaaccagtcgaccggttttggcagaccaacaactcttgggttttcacccccaaactcgagccaaacctttccaaacctaatcaaaaactccagaacagtttattgtcataaacataacatgtacaaagtatcaattcacttcagtgcatcaattaccaaagtacccaagctaaaaccaagaaattgaatttctaacactaaattcttcaa

SEQ ID NO: 74611 - DNA, 732 bp, Cannabis sativa
ttgttgggcttctaattgataaatttaatggtcttggtccacgttcaaacttaggacatgatccatagtgatacataaatatgaggggttcttttaattatatacctaatttgaaaaataattatacaaataacaaaagaaattttaattataacatgacatctattatatacggagcttccaaaaatattagatagaaatctactattcttaagcttcacccaacgccacttttttttttctttgagtacattcttttttctttttgtttgtatcatcaaaaacttaatcttctttttcttaaaaaaaatctatttttatcatactttcaaaaaagaactgtagctacatcattaattgtttggatttaaaaaaagtactatctccacctatttataatataattattttaatacgtagaaagtatatatatatattttactattatcaaatcattcggaatcaaaagtaatcttttagtttattttatatttagtaaaccaaaataaaatattttaatttagtaaatgttatatatattgaaaaaaacactaagacactagttggttttgttttaaatttttaataagctcaattttaagattgtattatccccatatgtgtttttgttacctaatgattaatttttaaggatagttttatttttaagttatataatgttgttgatcaaaatacatttacgttacttttttttatttatagcaactttaa

SEQ ID NO: 74612 - DNA, 936 bp, Cannabis sativa
cttaaatttactaacagttcggtagtttagaaagttttactgtcaaaatttgagcttggaaaattaaatacaagtgaaataataattaaaaggatttaatcgtaaaaaactcatttcgaaataaaccgcgctttccataactttttggaaaataagtcaaataataaagtatttcattttaggatgttgattacaattaactaaaaacaaattacactttattgtagttatattttatttaatgataattaaactataaaatttaaaattttgatacttttaaaataatatatttttataataaaaatgtaattttatttataacaattagataaaataatattctgtaatccaatcgagacatcttttttataggagacacttagaattaaaaaaacgagtcaaataatcagtcgtctaattcttagacagtttgacaaaaaaactaaaaataaaatcagataaaaagattgtagcatcacagttaaccttaagaatatttatattcaattttatctaccgctcagaagacacaatagtaaaaattgttccaacaagttcattcaacttcatagcttgagcactcaactattaaccaagatacgtaactatactactaagtaccttttcaatcgcagagaatttgttattctcaaccactaacaatgatttgatggcgagtcattaaaaaacaaagaataactaataacaaaactaaataaaatcatgtcacagaagagataagattaaaacactcaaaattgtgctacatagataagactaatcgtaataaaaaaaaaaaatcaaatcgcaatagcaaaacatacctcaaccaagctgcatttatgtctaaaaagagacaacctcatgtagctataaatttaagaataaaaaacccttactttactcttgtaattaattaccataaaaatgaaa

SEQ ID NO: 74613 - DNA, 700 bp, Cannabis sativa
taagaaatcttcgaccaaacgtcttaaggtgggcgatactctgctaaagagtattgctccaagcactaaaactcctaaaattttaactgagggaatcctgacggttgtctctttggatgttcattaggtggtggtttttaattaaattcctttgaccgagaaaattccaagtctcaagcatctactgcttgggccaaaatctctaagggggcaaacactgagggacccaatttgtaaagtccatttgctactctgtccgcactgcatctagagaccaatgctcactttctatcatgattgagtgatgcctgtggtgaatgagcaactcactatggtggaggagatgtcggtggaactgctaatgggtggtatgttgaaggaggccacccgagtaagtacttttccttccattattctatacaggttttgcgtcatgcacgtttaaccctattttagcgtgaagcttaatctaaagatggcatagacctattccagagctaaatctgctcatctaaaagtcacagtagccaccaacacactgaagtaaacactagaagatgccaaaaaggagcgagagcggcagacttttaagttagggtgaataaaacaagtcgattgctgctgcaaaaaagctcatcaaagatcttaagtaatagattgatgatacatcgtcgacagccaagcttgaggaggacctgga

SEQ ID NO: 74614 - DNA, 811 bp, Cannabis sativa
ttttctatatttaaatccaattgtactcattcctaaaattttcgattccattagtgtataacatatttctagcattatgtaaatatttatatatagttatttatgtaaatatttaggccaattttgcaaagaaaatatccagcattatgtctaagtgtccctttttgaggcttggattaaccatctcatacttcaacttatttatttattttttaaagttaatatatagatattgacacaccagtaactagttaatactttttttggctgaatcttaactaattaatacttgctatatactattgtataaaaaattaaggttatgatttttctaaatcacctttatatggtgagttttttgtgccctcacatgagaatttcttccaaaattttgaaataagatttcagaaataacttatactaatatttccgttcaaatccaatgatctagaatctgaactttatttatttgtgtcatatttaagaaaataacaaagtttatagtgaccaactttaaaaatttgtctctaataaaatcattgaagttacacctcctacaaacttaaaattttgtttccataaaaatcttcaaatctatttttcatactgtaaattatttgaagtttttaaaaaaattatttgaagtttttaaaaaatttactaagacgatgacgtaaattataacgaaaactcttatgaaaaaaattaaattatatttttttaaacatgaaaattaactaaaaaattataataatatgagattgacggtaatactaaggtgctgtttggtaatacttttgttttttaattt

SEQ ID NO: 74615 - DNA, 586 bp, Cannabis sativa
acttgagacgcactaattaacttactaaacaaacgatcaagagaaacaatacgaataattctttataaaaatatcacagaagagttttatgggataattctcatattgatgatttgaatagaaaaatgaaaaccaaatttaggcctcttaagctttatagtcaaagaaaatgagactttatatgaaattccaataaccaatctttataatggatgaatgatttaatagaatgattatttgttttgaggcagattacaaattctgcattttaaagctagatcaaactattaaatcatgtagacacaaaagtttcaagtcatttcttattaaggaggtactaaacaagaaaatctcaatgaaaacaacaacaaagtaaaccataatatccttattatcttaaaaagacaaaaaaaaaaaggaaaaaaaaagattctttgccacataattacattgtcctcaacaaaattacaggcggccgaagacacaatcttttcatccaagcaagcaatgatagctgcaattataaatttcataaatcagccaaaatacaaaaattaatatatactcaatcatatttaaaattaat

SEQ ID NO: 74616 - DNA, 1366 bp, Cannabis sativa
ttttcctaagaaaaaaaatctaaagatagcttttaaaaatttgtgtcaaacatcattaaatttttaaaatgacaaaaaattattttctattctcacttttaaaaatataattttaaaaactaaaaactgaaaatacagccaaacaaactcttagttttgatcattctgtaagggcattttttgtttttgatagagagaaattataaatctatttatttttatatataatgatacaattatagttatattaggcatagagtattgttattaggcaccagtactgcctagcaacttcttgacatgtgttgcgattagctactccctaaaaattattatattagattatatgggacccgatacttaattggatcaataacgatattgatacataagaatgtgttaggcaccactagtgccatttagcatttctcattaagcatatatactttttttcgaagaattcataaatacttgaacatttaattgcatgcgtgtcttttatcttataagtatgtaataagttattttgaaaggacagcataaaatattgagcactactcgaaaacggacaattgcctattataactacataaatatatatgagatataaaatgaaaaattaaaactctttatttttttatttcttaaaaataatttaacatgttgtagttgtaatttaatatagttacgagtatgacatacctaccagtccatactataaattttgtaataatgttattatatatgccaattggtcatcataattatatatttagagaccagtcaaacgacataaataaatacatagatgattatgaatagatatagtgcttttattttgggcgtgaaacgacagccacacattaacaagacttgatatatataaatatatatataatatatttaatggaggtgtaaattactttgtgggcttggggaaccccacatttgaaaattggaaaaaatatctgtggccatttgcaaaattgcttggagatatgaatatgatcatcatttcataaaaataagtacaaatatatataattattgtgtgtgagctgattataaatattaccactgccagttagttcctaattggactctgcatttatttatttattgtttttttttattatcacccatgagtagtactactttgtatgtggagaatgctccaaacttaaggaaacaaataaagattcttaatttttgtttattgattaattaagtaatatatatatacctgctttttacgcacctaatttaatttctttagtattacagatgaacttctatttaaaaatactttaataacctctaatttataataaaaaaaattaaatctcaatttagaccaattataaat

SEQ ID NO: 74617 - DNA, 609 bp, Cannabis sativa
gttgtctaaaatattttcttgatagacggttgcttcatctttaaaagtgaaatttacattcaaatgtggtatcttaataatgtgacgccttaataatttacttgataaacggttgtctcttctttaaaggtaacataattacgattatgtattgaaatttacatgtgacgtcatataaatttatttgatagacggttgcctcgtctttaaaggttacataattacgattatgtattgaaatttacatgtgacgccttaaaatgttacataattacgactatggaattagctgttggttgcttttcaaataataaaattaacttttgttgtctaaaatatttacttgatagatggttgcctcatctttaaaagtgaaatttacattcaaatgtgttatcttaataatgtgacgccttaatattttacttgatagacggttgcctattatgtattgaaatttacatgtgacgccataaaagtttacttgataggcggttgccttgtctttaaaggttacataattacgattatgtattgaaatttacatgtgacgccttaaaaaggttttttgatggacggttgccttttctttaaaggttacataattac

SEQ ID NO: 74618 - DNA, 543 bp, Cannabis sativa
ggtaattaaatcgatttttttgggcacaggtgggagagaggtgctccatcactcttttctccttacaccatattttgaccccaatcatttggagggaatttgttcttctaacttttttataattattaattgaaaattatacaatcaaaaaaagctaacggcacacattttttggactttaattaagggaaatgctcaagaaaagttatagtgactagcactcttataagatgtgatatgcaatttaagtctcacttattttattttattttaatgatgattataaaaaactgttaacaaaactactacctctcataaaagtattaggtaccatagatagttctttgagtattgattttagagcactttactttaaataatacttgatgatatggatatatttgacatttttaaataaatgattattattaaaaaaaatactaaataataatatctaaaaatacattcttactattttttttattataattattatgttataaagttggaagattttaattatttaatatgtattaaataata

SEQ ID NO: 74619 - DNA, 765 bp, Cannabis sativa
  modified_base (26)..(41): a, c, t, g, unknown or other
agggtccaatctgtaacttttgcaannnnnnnnnnnnnnnntggtatttacccatatatatatatgtccttaaaaaaaatataatatatataaaaacaagataaaaataactattgaaaccaacaaataaaaaatgcaaaagaaaattatcaaaaaaaaattgagagaatagaaattttgattaatatgcaaattggagaaatagattacatgaagatataacatatagagcataattaacaataataaatttacaatactcaggaaaaaaaaactctaacaacaaccttaactgaggatctaataacctattagtgatcaaccatcaaaaaagtatgaaatatactaagaatctaaactaaatgaataatttcccttatttatgatttaaataatcgggttgttatgtccaaatttttatcaaaaaaaaaattaaacttttaaattagtttttgtttaaaaaaatgtaattatgaatggaaattcggcaggtaataagcggggaatgcttctcccgttcttatccccattaactattttaatacttattcccacttccattcccacttattcttcgttgcaggtggggactcgtttatttttaaaaaaataaaattataataaaaaaggtaaattgtataaaatttaaaatattatatatgtattaataatttaaaatagacaatgttatttaaaataaaataaaaatatttaaaaatttactaataataaactacaagacacataaagataatgtataataat

SEQ ID NO: 74620 - DNA, 1107 bp, Cannabis sativa
taaccattaaaacctcttcctatactatatatatgttaagaataaaaaagaaattatatatatctatatcggggtcggatatagtacggatagtattatctcccccccattcccacttcgggtattgaaattgtcccccaccaccgcctcatttaccaccaagacggagaatctccaccccattagaggcgggtccccgcggttactcatccccgcggtataaatttccatctctaatagaaaagggtatgtcaaaaaaaaagagtagaaaaggatttcgtcaaaagtagtttattggattctagacaaaacagattatatattttttaaaatattataaatagtaatctgaattaattttttatcaaaataaaatttaataataatctgtttacattttctatatttgttcgtgttaataattatctttaaattggttatataaagaaaaaaagttgtctaaaattaaattcagggtcttatttttaccattttaaaaaatataagattcattttatcatttaacaaaatataaggttcaattaataacttttgtaaaacacaaagtctaaaataatatttactttatataaatgtaattgtgataaatatgatattttttaacaaaaaaaataaaaatataggataaattatcgaaggaatattattaaaaattttaaaatctcatgtgtaaatttaagtacttctaccatgtgttcttttaaaagagtgcgcatatacatattttgtttgagaaatttgttaaaatatacttaaaaatttagactattcttttaatataccacctttaaataaatactctaaatattctccaaacattctaaaaccccaaaattacccttacaattcaaaagctctcttctcccactctctttgtcaaacttcccccctctctctctgttattccaatccagccccgactgtcacgagctccgaccgaccaagatgacccacgaccgagaatacccatgacgactcgcgatgacccacaacgacccatgagaagcacccaagacaacccacgaccaccgcatttttttttctggtttctaacccatctagtgcttattttctgcattttttttt

SEQ ID NO: 74621 - DNA, 599 bp, Cannabis sativa
gtagatgtaataagtagtacaaaatttcctcgaaacccttacaaactatctctcaatcaataaacaaacccaaatagtttattaggtttaagctgaagtttacaaatagctattgttcattaattctttagagttcgtaaatttttcttttatatcgattatctctttagagtttataatgtcaatcacaacaatacaaaacaaagacaaagtatctatgcaatatatattttaaagacttcaaacaaaataaaaataaatttgtcaatgtatattcaaagacataccttatgactgctgcagctgataacgaacaccaacacaaggagggagacacgctaactcagagcttataactgccacaacaccaaggacaggtttggagaactaagaaggaagggtcttaggttcttacaaaaatataattaccccactatagaaccttggtcactaaaaaaactaaaaatttgggaatatgaaaacgacaggcacaggataacaaaattatgaaaaataaaatgacaaaacacagattatgaaaaaagaaatcttctgataacttggacaaaaatagcaaaggaataagattgaaatattag

SEQ ID NO: 74622 - DNA, 1255 bp, Cannabis sativa
  modified_base (696)..(697): a, c, t, g, unknown or other
tttagtatatccaatattctgcatataggtgtcaaacctcaagttccattgcttaggtgcttgcttgaggccataaagagacttcttgagtaggcatacctcatttggattcccattgtcaaagtcttcaaattgttgcatatagatttcctcttctaattctccatgtaagaaagttgtccttacatacattataaaactttggatttttcacagcaattcaggttctattattcctaagagactgcatctcttctaggatggcctgcaaccatgcttcaacatctttacttctcatagcttcttgaaagctagtgggttgtgaattgtcaacctcttctgtaattataagtgcatatgcaatgaattcagcataactaaaacgaccaggggcttttctctgtctgctctctctatctctagctaactaatagcttctgtaattagttggtgttctaggagcagcctcccctcaatctggacattctcatctgatacaacttcactgtattaggaagtgctcttggttttcatggccatttcatcttccttgaaaacaacatctctactaatcaagcacttcttaaatctaggtcctaaacaccacactctatatcccttaaccccttcaggatagccaagaaatatgcatctcaaaactctaggctgcaacttatcttgtctaacatgcacaanngcagtacatccaaacactttcaagtgatctatgtttgggggtttacctatccataactattgtagggtcttgaagttgtttggcacaaatggtgatatgttgattaggtagcagactgttttaagagcttctcccaaaaggttctgtctaaaccagttcccaataacatgcacctaacccaaccctctcaattagtgttctattcatcctctcagcaacaccattttgctgatgggttcagatcacagttctatgtctcgggattcccattttggcacaccatcccttgattgcatttgagcagtactcaaggccattgtcagttcttaggaccttgagtttgtttctagtctggttttcagtagcctcttccatgtatcaaaggtttctaaagcctcatctttgtttttcaacaaataaacatagactttcgtgcggtaattatcaattatactcatgaaatagtgtgctccacctttggttggaaacttagatggcccccaaaggtcagaatggacataagctaagctaacttttttgtggtggtgtgttctgcct

SEQ ID NO: 74623 - DNA, 610 bp, Cannabis sativa
tattattttgtaattgaaaaaggaggagtttacctttaatctttatgtccgaaaatacatgctgcaatatttttttatagcggtgttcgttatactcacaacatcatctctataagtttttaaagagtttcgaatagtttacatagccgaaaataagtttaaagttttttgaacatgcgtagtaaattagaatatcaggaagtctgtttctagtactgcaaactattcaaacttttttaaaaaatttatagcaatattgtaattatatcaaatactgctatgaaaaaaatttaaaaaaaatattctgacatgtaatttcgagcggagagtttgacaaaaaggttataattagcattcctcagtagtatttacaaaaatgactatattttcaaatacacattatatttttaaatatagtttaattattaaactatgtaattatcactctaataattatcctatctagtaattatacaattacttctaaacacacttttatttatttatttttttaaaaaaaaaaattacatttgttgggtttcaaacctacaatccataccacctaagcccccttggccactttgaggtgttttcattgttaaattacttt

SEQ ID NO: 74624 - DNA, 1054 bp, Cannabis sativa
aaaataatttccaacaattccaaccaacatcttttcctcatattcaaatcttttttggtaaagaaatacttgaggctcttatgatcggtataaatctcacacttttctccgtatagataatgctactagatttttaaatcaaaaactaccgcagcaagttctagatcatgagttcggtatcgttgttcacattcctttaactgatgggaggcataagcgatgacccgattaacctgcatcaaaacacaccctagaccctgtctggatgcagcatagtaaactacaaacttctctttatttgatggtagggctaatactagagctgtgatcaatatttgtttcaactcctggaaacttgcttcaaacttgtctatccacaaaaaccgttgattatttttagtgagtttggttaagggtattgagatcttagagaaaccctcaacaaaccgatgataataaccagccagacagagaaacttctaacttttgtaaatgtcttcagtctcgaccaatccctaacggattcaatcttacctagatctaccttgattccatctttactgacaatatgcccatgaaaagacacctaagatagccaaaactcgcactttttgaacttggcatatagtttatgttctcgtagtcattgtagaaccatccgaagatgttgctcatgctcctcttctaattgagagtatacaaggatgtcgtcgataaatacaataacaaagatattgaggaaatccttgaataccctattcataatatccataaaagcttctagagcattgattgtccaaaagacataaccagaaattcatagtgcacataccttgtgcaaaaagcagtatttagaatgtcctcctctcaaattctcaactaatgatagtccgatcagagattaatctttgagaagaccgtcactccctgaagctgatcgaataagtcatcgatcctaggttacggatatttgttcttgacactgttgttattaagctctcgaaaatcaatacacatgtgtagggatccatctttcttcttaacaaataacacg

SEQ ID NO: 74625 - DNA, 1024 bp, Cannabis sativa
atattttaggaattattacataaactactattttttgtaaagtttttatatttttatgttcaaagatttttttttacatttttatggtgttctataaaaacaacacaaaaacaaaaaataaaataataaaaaaataatattaaaataacaacaaaaaaataacatacaaataataataaaaaaaaaatcaataataaattaataagagtataacataacaatacattaaaagaccatattttttataaataaaattataaaaattataaaaaaaatatatatatttaaaatttcgtacaattgtatttttgtaaattttttattatttttatatatttatgaaagaatctttatgtatttatccatgagttttgtcatttcttttgagatatgtgagactttatttttgtgtgattcttttaatttatttgaataaatatttcttttttaaaaaatataccatataatttagttatttatttataatacaaatatttatatgtcgactaagggattcatgagggtagtgttgcaaatggaaaatcatattagtgggcaaagaaaaagacagggaaagtagctatattaaattgaaagtcttaatataaataattattaatatatattctttcaaaaaaaaaattgaaaatatattaatgagtttctattatattttattatttgcctatttatgtgtcacatgcaaattccacgttatcatgtgatgtggatgcctccatcaccccttttattttttctttattattgatacatacaatttttttttttaaatgaatatatattggtgatcatatcatgcatgtaaattagtccaaaacctcatactaaatgggaaaaaggagaaaaatgaattatataatatgatggaatattagattttgaatagttgatgattgtttaaagttatagtatattagtgtaattaattttaacaatataattattgaaaaaaatattaataaggtaaatactattttggaccctgtgttttgttaaatgacaa

SEQ ID NO: 74626 - DNA, 564 bp, Cannabis sativa
cgattctctttgtataatctcgtcccttctgcatctctccttcttttcaaacttttcaatcttttgttgcagtcctttagttgggctgagaaattaccaataccagtgtttccccacgcaaagagagcctccccacacactttaatctttctctgaatgtccacattaacatcagccccccagttttcagttataatctgctcgcagtccgggttccccaaccaaaaattctcgaaccgaaatttccttggcataacacccaacttttgaggctgaatatccaacaacaaaggagagtgatccgaagtggatacttccaggttatgcaaaatagccaaaggaaataaatctaaccacaactgagacgcaatagctctgtcaagccgagcttcaatccaacggtcagtgccacggctcttttcccatgtgtaaggatgtccccgcatctccaaatcgcaaaggttacaagcttgaagagtttcatgaaaaccatcgatgagccatgacgggtatggtctaccccctttcttatccgcttggctaagcacattgttgaagtcccct

SEQ ID NO: 74627 - DNA, 947 bp, Cannabis sativa
agatattctcccttttggatccaagttcactccattccttttggcatgaagtcttacaaactggccaaaatgattggggatgaagttggtgatttccttgaggctgacaaaatgaccctccttaaagcttctggtttattccttcgaatctgtgtcttgcttgatgtctctaagcctattcctagaggtatcttaattgattttcgaaacattcataaggaaaaatggcttaactttaagtatgaaaatctccccaatatctgttttcactgtggtatgtttgaccacaccttcacaaagtgtgtctcttaccttaagaaatgtgatgaatttgcctacccacctcctttacactacaaaatccctttgaaagctcctgccaaaaccaatttcaagcgaaatccgtttgacctctccaattcccatcctttagatgaattgccaatctctcaaggaaatgttgatcaaagccttgctgctgccgtgaaccagtttctcaccacccaagatgcaggggctgactcttcttcctctggtgccatccctaggacggatggggctgtttcctctggctttgttggaaacaaccctgttcctcctcctgaactctcaacttttgagagacataccattgccccaactttcaaccctggctttacttgccctgctcctgtggatgccttctatgaggctaaccaaactgctttccctacgacagccatagctgtgcacaccaatgctgaacctgatcttgtacctgtccaagatattgaaaggatcactgagaagtccaagggcaaagctgttgctagagccaaaaggtctgcttttcttcctcactctgttatggtgggggattctctcagaaacatcctcaaaagagcacgtgctggacctgtgatcaatgaagcttccactgatgctgactctccttttcaacaggcggg

SEQ ID NO: 74628 - DNA, 985 bp, Cannabis sativa
aactttcatatcttaaattgttttactaaaattggtaaaaagttcttaaatctaacaatctcaatagttcaaggagtatttttaacaatcttaaaagtttaaagagcataatttagtacatattaaaattcagggagcaaaaatgttaataacctttgaataataatattgctagtgttattaataataacactgattctctgataacataatttcctatctttttttctttaattattttggtccctttttcttaaatacaaaacttataatctttttcacatttttttcttttgttttttttggtcttttcctacaattatttatttatttatttattttagtgaactgactatgtgttactattcctttgagtttttttttttttttttcagctttatactatagatttttaatattaaatattaaaaaagtactctctatttcttttattagtttaaaatagattttttttactacaccaataattatttagcagcacattatattttttttttatcaaaagtttacaaagttttttcagccacactatttattatttttactcaaaaattgtactattgtaatctttttttttatgatgatcattttaatatgtgggaagcatatgtatttttgccgctacagaaataaatgactcaaaaaagtaacttttaagtttttttttttttctgtgtgtttagttaacaaaaataatcaaacttttagcttaaaggaaatttaatatatcaaccaattttataaggtactaagaccatctcaaggtatcttaaacaataaaataatataatataacttaaaaatataaaaaagaaacaaaacagtttcttttaatattagtcatcttcttttggagatggaaaaatatatgtttctcacatattaaaatgattattttattatttatagatgtgtaaaatctgaaataaattttttactaaaaaaataacaacactacaagaat

SEQ ID NO: 74629 - DNA, 813 bp, Cannabis sativa
catattaattgccatgctaaattataataaaaattattacatgaaaaatacaaattgacactttatttacaaaaatatctctataaggtgtggacaacatttataagatagatttagaatggtttaatgctttgtaaatactgttactcataaaaaagctaattttaggcattttgtaaaaatgtgctgtatgtaagttgtaaaagttattggagtaatgaaaaacactgctgattttccaaaataaaattaccaaaatacctctgacactatcacttacacaatcagacgattgttggtgggtggttggccgaaggttgcatcagacaaaggtttcaatcagccgaagattgctgggtggttggccgaaggttgcatcagacgaaggttggtaggtggttggccgaaggttgcatcagacgaaataattattagcaaaatattcatgcaactgtagtgcaactattatgaaacattaaaagttagaacactattttcgcgtatgtaattctatctgtctcttcatgatttaatatgaacaaattcaccattagaaatttgaaaaataagaaaatacactaagataaatatttaattacagtattgatgtaattttttcagattatatttgagttggattgtttgagaactctagttcaactttttgagatctacatttcatggatttgaaaactgaagtcaggacattagttttacacaaattaaactagatttccaggtaaattttagttttgtagtagtttttctatattttttttaatgaatttgaaacagcccctactttgattgatt

SEQ ID NO: 74630 - DNA, 1060 bp, Cannabis sativa
aaggcatatcatatgggcaagaaacaggataaatataaacaggatgagcataagaaaagtaaaaggctaaataatccaaagatataccaattgtttagaagacaaataaatccaaaaaagaaaagggcctggggccgggacataaaatgtctccccttaaaaagaaaatagaattgttttataagaaaggggaaggataaaataaagaaataagtgaatcacttagtcaacccggggaggaagacgaggacccctaagttcctccaaaaaagcctcaagtttcttgttcttctcccagaaacgggccaatacttccacaggattagggtagaaagggagatgaggttcgaagttgttagctttccagcacatgaacacaccgtcatcaaaacgctttagacagtgttgacaagtgacttgggccaacagagcatccctctttactttagctgcttccttgtgagcctgctccctgaactcatggagctcctatacttcaacagtcaagctagatgttgtttccaaatcagcccagtgcagctcctccaaatattttagctcggcagtgagttctttaacttcttccttggaatctcgaagattcctccttgctgcagcaacaacctcatccctggccttcaattcctctggtggttcttctccataagggcctcctttttttgggcttcatcacagattgccttcttctacttctccgactcccagagactattcatcgcctcctccataccaccaaattcagacatagtatgtccatgatcaattaacgtcatagagagacgactagcctctactgcaatctagcagtcaacaaaaaaaataacatatcattagaaccttggatttggtacatggggttagtagaagcgcaggtcgcatatctcttcatgggcagttgggtcaggctggcaacaaagtggctcatcatcttcggggcaaaaggagccaggctaggtcccacaaagcgtttaaaccagtcggtcaagggatctaaattcaaatcccagaaatttccggcgtattcactttggacagatcc

SEQ ID NO: 74631 - DNA, 918 bp, Cannabis sativa
gttaaaccaagaattcccgttagataggcacttttaatatataaagatataattgtatataattcatcgacaatatccctcgtaccaaattctccctctaaaactaatctacttcaattaaaagtagttgatgttgagattatccctaaaaaaatagttcttagctttcaccgttcggaaaaaaagaggtctcaaaatacaaaaaaaggcacaaatagattaaacaacaaaatttatagaagctccctgtcaccaaacacaagacccatctaaaccaagcgctctcttgtaagagaatgggtaatagtattcttaattaaaccctactacaatgagacaataagatatactttgaaaagatttccaaaacatcaaaaattaatatcattaaagcataataccaaactcattataacgaatatttttaatactgacagtaagaactatatgaaaaaaattggagaagactgtaacattcctgaaacctaatcgaaggcaaaaagataggccatgaaacatggtccattgcctccgctacatgaagcttgaaggtaccaatagcatacgttctggccaaaccgataggatatatttataataatacattgaattataatgttttttttatatgatggtgtatgttggtagttgtgtaagattttctagaaatttttatataattcagaataatttacaatattttcaaaaataacttatttttcgtattttcaacatatagatagattaaaatcaattttttttaatatatgataatgtatgttataattatttaaaatctctcacaaatttttaaaaaacttcaaataatttaccgtatcaaaaaacacaaaataaattgttgaaatctatatatatactagcaaaaagctacgtgcgaggcacgtatattaaatttta

SEQ ID NO: 74632 - DNA, 817 bp, Cannabis sativa
atgggcgacactcctttcaagcatttcttaaaggctcccattgttgatgaagtcccattcattgggaaggaaggacttgaagtgatgccaacaagccgcaccaaattccccagtgtactttaagccagtactcccaagctccacaagcagagtctcgagtgcttggcttgaattggtagaagcttgattcactttgggaataggttcattagtatgtgtgggggccagaggatgggtggtagcctgagtctcaatctcggggaccttgagatcaacaacctgggaggctcgcttcttgttgggagttgctttcatgggccttttgacggactccatgttgacatctaatgaagtctccgaggcaaccttttctttcccttcttgcctgaagattgaaagaggtcttcaagattcatttcagtgagacaaaccaatatgttagcatatgtttgaaggcaagaaaaaggggaagttgcgacataatatcccgcctaagggatttaccataatcataagaagacgaggtaggaggactataatattaaatctctacatcctcctgtgatcctgaatatatcataggagttaattggttctaaatcccagctcgcatctatatgacctgccatatccagcatggtcccatactactcggctatcccataatacgagtcagtacaactaatttggacgtagaagtttgggtaccaactatcaaacctatgtgcaatgcgatcaatgagaaggggattccaggtgtagaaattataacggctatcccgaaaagacactaaagtagtatgctcagccctaagca

SEQ ID NO: 74633 - DNA, 879 bp, Cannabis sativa
aaagattttagcacaatgaaggtgtaagaattaataggttctttgcgtacttttgaattgaatcaacaaatcgaacaaaaggacaaacccaagtccatcactaataaagatgaaagtatcgctttaaaagttgctaaaaaagaaagttttaatattgaatgtgatgatgaaattgctttattaaccaagaactttcagaaataggtgaaaaagatgggtaataaaaagaataactcgaagttttcaaaatggaatacatctttcaaaccttctattaataataaaaaggaattcagtgcaaggaatgtaaaggctttgggcacattcaatctgagtgtgcaaacactctgaaaaagaataagaaaagttttaatgtcacttggagtgatgatgaaattgagagtgatgaagaaaattctgagaatgttgctctaacctcagttatttctagtgtgttatgtgattcataactggaagaaagattagtatgtttgaataataccattaaaaaagaagattcagattttgatgattcagaaatctgtgaagagtctctagctgaatcttacaaggtcatgtatgaaaaatagatacaagttacttctgaaaataaagtcttgtctaaaatgaataaaaaattgtctcatcaaattgaaacttttgaattaaaaataaaagattatgagactgatttttgcattaaagatgaaaacatctctctattaaagaaggaacttgaaaatctcaagaaaaatgtccaaatgcaaaatcctggatcgcctatttttgaggaagttcagaatgcaggttaaagaggctttgctggttgtaacgccccaatattttgccttattttacaaaatactaactttgatgcat

SEQ ID NO: 74634 - DNA, 940 bp, Cannabis sativa
tgtatatataatttttttaatatatataaatatgtgtagattgaattagatctgtgtagtatagttcttttaaataaaaatatctccaatatcattcctgaaaaatcattcttaaaaagttaggtgtattcgggaaagatttcttatatagcaaacaatataaattatgagacacttttttgtgatttgaatttttttcattgggtttactggtttgaacgaggcttttctctctaaaaaaacactgaatccctaaaccccttagcatttctcctatgtaattaagaaggttaatcattattcttaactaagaaaacccttagctagccaggttattttgttttagtagaaaagccttttagccaagtaacaaccgcgtatatcgatatatttatattatatataggtatatatgatgtcggtgaaataatatatattgatatcgagaggctgtattagatagagacatagaaattaaagggaaaaacgcggtaacagagtacgtaggattttaggtgtcatataatattggtaagtgtgcactaagtgtatatattcaaatgcaatgaatagaaagagataaattaatgaaatgaaataatggaagaggaagaacaaacatagtagtaggctttgtttggaagacattagtattagttgattttgttagtgtatgtttagtgttggttagtccaacctgtttgttagttgattttgtaagtgtatgttattcttcgagtttgttatacaatcgtattttgtattaattcttctgcatgacttaactatataaataagtaacacctgtgataattaaagtttacgcaatttaattttatgaaacttttgtaaagctgcctcatacatttctctttttatttgattttttttttcatggtatcagagccaattaactaacgttcatggctaactccttaaa

SEQ ID NO: 74635 - DNA, 1194 bp, Cannabis sativa
ttttatatttatatatataaaaatatatatttaatgttagaaatattgtgaggtcctccaaatattattttagaatgaaacaaattgtatattatgtttctaactagtttttttttttccaaaattaacagctatggatccatatatgcgatatagattggcatcacaagactgtagagaatcatatacagatatgttgacaaatgacattagtgagaagaaaactcgaggtcctacacaaatgtgtaaaatttgggggaaccatgatgatgtgaagataaaaattacatgtaataattttggacagtcctgtgataaaaatgctgaccaactttcaagctttattgggacattagtaagagatggaaaaaatgctccaattaattataaaagttggcataaggtacctgttaaatacaaatatggaatgtggaaaatcatacaggtattaattattatttaatggaaagtttagattaatctatttttaatattgatctttatttgttgttgttgttgatgatgttgttaataataagtattttattattgtaggaaaaatttgacattcctcttgaagctaagatttggacttttagaatgtttggtaagaaacttcgagagtggaaatctttccttaaaaatacttattatttggagaacttatcatttgaggagcaaagaaaatgtaaagataaaagagtgtatgatgatcaatgggaagaattgatcaagtattgggctacagaaagtgcacaggtaatttttgttgaagtttaaattaacttgctttgtttttactatcttttcagaaattttaatcaactaaattgtactttataatattgttctagagcaaaagtgctagaaacaaaagtagtcgtgcattaaagaaatataatcatacaactggcaggaaaagttttgcacaacttagagcattacaggtaaaatttgaaaactatttaacattaaaagttgaatcttgtttccaaattagatatgattttattacttattaattatgttcatctgtagaaagcgggtggtgcgagtacgccaacgcgtgcaactatgttcaatatctgttatgcaaagaaaaagaagagtatcataaatgagaagacaaaagaggctatggtatgatccaattattcttaaattatgtattatatattgctagctagtttagtt

SEQ ID NO: 74636 - DNA, 1065 bp, Cannabis sativa
  modified_base (267)..(285): a, c, t, g, unknown or other
ctcgagcgtgttgtctgcgcactaagaccaacgtcgagtcgagttctctaggaacgtgtgatctgtgtgctgggaccaccctcgggttgaaccctcctggaacgagtggtccttctggactgtggtttggtaggtcttctagagcccatgggctctttcccagaacgatttttggtttcctcatgtggggtgttaccattttctggattttcagccatgaaggaggttttttttttaaataagggagggttttttctgagctttttnnnnnnnnnnnnnnnnnnnagcaccaaactgttaacgcaaattttcgttaactgaattcgaggctcgcgataataattctacacaggataaaataaaagctatagaaaaataatatatgaacacagggtttttttacgtagttttgcagttaaaattctacatagtccacgagtcaatcttattcagatttctaattgtgtttcttttttttagggcctctcttgtataagattcttttcgtccctttttttgagcttgtatgccattatttataattacatagtgggcagttaattaaaaagttgaccagaatttgtttacaacaatcatccctaaaatcaagggatttgaattacatatcatgtagtgtaaatgcagtttatgatttgaaaatcgtatagctgtgattttcccgcttttactgagtcaaaatgatcgtgaattaaacacgtctttaatggttgtgtctagagatgtctcaacagaagcttggttccaatgatctcaataccgagctagggccatttttccttccgaggttaagaatgcatgtcttgtgacgatcacggttattatttacaaagagttcttgaggctcatttgaatgttagcttccgacccgccagagttgtaagcctcgctgatgttaacttctaactcgccagagttgtaagccttactgacgttaagtggatgaagttacacggaaccttcccatagcgagacggtcacctcgcttacttgttcttgagccgatctgacttttatacttagtttattcattacatgctaaggatt

SEQ ID NO: 74637 - DNA, 2023 bp, Cannabis sativa
gattttccattttttcatttctcacttcttactcacacacaccaaaaaaaaaaaaatctaatgaaacagtatggctaatttcaaccttatcacagagtacagacaacctttttatgttccccttaatagtgaattaattactcaaatatcaatcaaataataataactttcttcaaaatattgctggcaaaagtgaacctgaattgtatattgcagggtctaaagctaatgaatacaactaccccaaagtcagtcaataataaaccacatcaatccacacacaataacccacagaccccacagatccattccccaatagatttcaaaaattattctctatctaaccatgtccaatttgaccctacaaacagagaaattaccaaaaaaaacctcaactacttcctataaagcttaaaattattttacacaaatacccacatatgagaccacttttcatattcagttgaaatgtaccaaaaaaaaaaaaacaaaaaacaaaaaaaaaaccaaacttaccataaaatggaggtttggttctctgcttagtggggaacccaaaccccttcatcttggccaagcttttctttcccatgagtttatcttcttcaccaccaccggtcgcccctcaggcctgcaaccactgacacctctgccagcaaccactatttgaaacgcctgaacaccttcgaaccccaccagccacgttcgacccccaccacccacgttcgaaccccaccagtcaccttcgacttcgacccccaccagccaccttcgacccccaacttcgatcagccctagccctcttcttctcaactcatggtgcaaaaatgccctttttcaattttgttttttttttgaaataggagttgaacaggggacccatttaattacaaatcacgtttctttttattattctttcctaaataatttttatttattaatatttttggaataaaatttgttacttgataattaaattgtaatgccatgtcatttcatagtttctttacatgaaaaatgccacatcatcagttttaaaccaaagtgaaacggagagtaacagaaggaggaaatttaattagtttaaatagttcgaggactatttttaacaagcagaatattataaggggcaaaatttggtaaagtaaaaagttcagggggtaaaaatactatttataaaatttaataatttaattgaaaagataaaacaaaaaaataattttaccattaattttgttatgtaataagaaatatatataaatagtttataatttaatattataactatatatattaataaaataataaaaatgatataaaagtaaataaaaaagtagtacatttataatgatacaaattttgtatcatagcgaatgttgcgttaaatttagcacaatatttagtatatgccaaatttgcatcatcttttggcaagctattaaaatactatttttgctaagagcatctctaatggagtgctaaataggtgatgtattactatttttttagcactttcaataaaagacttctccaatgatgctataaattgtgtcaaatttggcaaatactataatttagaccaaatttggcacaataagaccatctccaatgggagatgcaaaaattgtgctatatttagtacaaaaaaaaactttgtgatgtatttgcatcaatttttagcattgtgctctaatgcactattgcaaaactagatgcaaaatttaatgtttttattaaaagtataaaaaataataactttatcattaatattatcatgtaaaacaataataaaaataatatatatataaatagttcatcataatgctatagttttttttacgaagtgattagaattactcatgaatttacgacgcagacgttcgccaccggcgcgggaacctcctcgaaccaggatagctcatcgtctaaccgcagagcatgctttgccaaaccatgggccgctaaattctcagagcgtgccacatgggacaaaactgctcccagaaatttagacaataaagct

SEQ ID NO: 74638 - DNA, 1088 bp, Cannabis sativa
tcgaacccgaacacgtaaatagtccctccaaacacccacaaagttattcggatccgattccacaaacgatccaataaagtttcctagggccgtgactacattgagtgtcatattcccggattttaaattatggagttgcacccacatatcgacatgattaatctccacaaaccgaggattttcgccttcctttaatcttgtaaaaataaaaggtttcctatcataagtccacgggcttccatcgatgactctttgtatatcaacttcatggtagaattggaaaagaaatagattaggattgagttccttgacatacattcccattcccggttgccatagaaaagccatcatattttggaaaacattaaaatccgaaacacgaccagtaagaagtttgcccaccaagcaccatcttgtgtcaatcgcaacctcctcagccctccctactggcactcgtagcacttcatcgtcttcttcctctagaaaaacaacatctcccattgcccttccttcatcactgctagacgccatgacagccaccacacgaacaagactcaaacaacaacactcgacaccgagcgacagccaaacgtatcagaggatacgactacgagaatccattgaaaggatattaggttagctgtgaagtattattgttaataataatgataattattaagataggaacaacattatcatgatgtgcggtgggttgtgttactcattccacgaccccatgaaaagtagattttaattgttgcttttgactttacatatttatattttttctaattactctattgtatttttttttttttttttttgaatggattactctattgtatttggttgtagtaaactatattttattatttagtgttttattttctttcatacttttattatttaattacctttattattagaatttcctttataatttgttacctttattatattaagtaattacctatatattaatcaattccatgtgtttagaagtaattatgtaattactaggtagggtaattattatggtagtaattacacagtttagtaattacactatattttaaaatgcaaggtgt

SEQ ID NO: 74639 - DNA, 623 bp, Cannabis sativa
tatttttgaaaaaaattccgtgtgacagtatttttgtaaaagttaatacaaattccagtatttttgtaaatttccctataaaaattccctgccatgttacccattcagtaaaaaaaatcccatctacgatatcataaaccctctcatttcatatatgggccacgaggatcaagcaaatgctttgaagttataagatccaaaagggtgtcataaacttctatagcacgcacaaaaccaacaacaaaatgaaaataatacaagcaggaaacaaatgtaagcagattttatatagaacgaaaacatttcttttagaaaaaaaaaatgggatcactgaccttgcttgaaaccgacaatgattctatgcagcgcccaagatgagggatgtgttggaatatattttatcatgatctagatttactaccatgtatgttatttaacatcataaatatgaatttctaaaccaatgtaaataaacacatataaagttttagaaaccttacagtgggtgcagcggaataataatggctcattccacccagatctctaattcttgtatcctgtctatagcagagtatcaccaagatctaagtccgaatctccttctcttgaaattggattcttca

SEQ ID NO: 74640 - DNA, 570 bp, Cannabis sativa
cccgatgggggaggtggaggttgagatccagcagctgatggagttggaatcggaatggcaagatgttgctggctatttgtgtactccttcaagtaattgacatcatatccttcaacatcatctaggggaggggatttggattggaagagagtctggttgcgcctgttccaaatggtccacagcaaggtaaaacagagagacaactggtcctttgggagattttcatagcctgaaaggagaaaatctttaatgtcctgagattgatgagcgttaaaaaaaccagctagacttgtttttttccaaattttcctagctctggaacatcctaggagagaatgggtgacagtgtcttggccatgagaacagaaagagcaatgaggggagggaataacttttctgcagaaaaggttagaagaagtgggaagaatgtggtgataagcacgccaaataagatgtttaattttaggagggatggagagatgccagagggttttccaccaatttttgagaagatcccgattggaagttgagggagcagaattagtgaaagaggcagaagaaacagcaagg

SEQ ID NO: 74641 - DNA, 930 bp, Cannabis sativa
gcttatgtatctggacccaaaggcgggtatgggtgaacggtgaaccattcagcacactcggttcccaagatttgagtaatagaagcttaccacggaagttccatgggctcctaagaagagcccagttcctatcctccaccttttcaaaaatcagttcaaagcagttgttattgatggtggttgcaagaaccgggaccacacgagcagggcgcttccacacgtttttcacaaggtcaatcataaagctttccttcacgtgtgtatgggaaatcactttaccaaagagacacagattagttaagtttttgacagtggaatcacagggagttaatgacaaagtagcctcatcatgggacatgtttttaccaaccacagaaacagagttacccaccaactccataccaaacaataaatgagaaccacacaggaattactacaccacagaaagaaataaccaaaaacccacaaacaaaggatataaaacagtgatattggaggagacaaaggaaaacgtgagggggaggaaataaaaacagtgctacagaaggagagaaaagaaaggaaagtcaaaaacaacaagagaaaatctgaaggctaacaataggggcacgactcaaaaactaaaataaaacacacctaatgtaccacaatgcagggaaaagttcaaaaggaataatggggactagggtcaaaaccagaattaacatggcaaagacatgccatggaccagaagaaacaagagaggtagaagacctcccttttatgtcattactactctaattttaattaatatgctcgatcctcttttcaggataacaatattatagtgcaagaaattattcattccttcaataggaagaaaggtaaagaaggtttttttgcgatcaagattgaccttgttaaagcttatgatagagtgagctggaaatt

SEQ ID NO: 74642 - DNA, 987 bp, Cannabis sativa
  modified_base (52)..(75): a, c, t, g, unknown or other
acaaagcatgctggaaacactcgtattggtatgtagggtcagtcatcagtcnnnnnnnnnnnnnnnnnnnnnnnntcgtgtataagagtcattcattccataggtgtaagagcccaatgaggcttgaagcgaccattcattgcatgggtgtaagggctcaatggaagcttgaagcgggaacgttacagttccagttgttcccaaatgttttttgacttggaaaggagaaaaacacgtgtgatctatacagtgagtgttccagttgttccatttgcctaaaatggaagaacactgaaacttgttccttctgtacaaaaggtaaagagtaagactttttaagaaatcaaaataaacatggagatacacacatcaactattataacatacactttttcaagacatcggtttgtccatgcacttgtcacatcaacatatgacattgttgtaagccttaacaacattaattatattgactcgtggactatggtttgttaacacacgaatcacgtaaaaattatcatcttacacttttctttagctttttaagactacattttttcacatttatttagttgtcaaaaatctccacaacacaaaaattaaaaggcaaactgctaacattttataattttgtcacaatcattgttcttattcttttttaaacgatcataattaatttagagaaattttatggtgcatcctctacaaatagatatatcaatgcttcctttcgtattatcgataactagatagtttgtcttaattttttatatgacaatatacgttgtaattatttaacacatcctacaaattggtgaaaaatttaaaataatttatgagaataaaattcaaacaatctgttataattatgcttaatttatttgaacattatttttgtattataaattattccaatttattaaaaaaaaaaatcaaaatatgttaaataactaaactatacagcatcatataaaaattataactatt

SEQ ID NO: 74643 - DNA, 861 bp, Cannabis sativa
aacccgccagtgtttgagggtggtactgatccactcaaggtggagcagtggatgagcatgatcacatccatttttgactttatgcgagttgaagacaatgatcgagtcaggtatgttatttatatgttgcgggaagatgcccgaatctggtgggaaattgtgtctcagggtcatgatctgaataacatgacctgggatgctttttcgagttctgttttatgagaaatactataatgagtctattcaggcagcaaagatagaagagttcatacgattaactcagggcagcatgacagtaacgaaatatgccactaagtttgatcgattggcaaaattttcttctgatgaagtggctactgaagctgctagaaaagcaaattttatacgaggattggatgaacatattgcacgggatgtgatagttgctgctaaataacctggggttgttcggacttatgctcagatggttgaattggccctggctgctgagggtgcagaagaccagatacgaaagaaaaatatttcgagaagagactcatggaggcagacatctggtgttggctctggtaggggtactgaccctggagatcgcaaaaaaggtctaatgaatcatcaacttgaggcccaaataagagacttcaaggtaatcaaagtttccgtcgtggtggaaatgagaactggcagacctttcctgaatgtccaaggtgcaagaggcaccatcagggtgagtgtcagggcagagcctattttcactgtgggctactgggtcatatgaagaggaattgcccacaacttctgcgacaagaacaaaagaaggatgatacacctgttccttcgcgggtgtttgctttgactcaggcc

SEQ ID NO: 74644 - DNA, 696 bp, Cannabis sativa
tctttattttcccatatttttgtaaatagcccagaatattatgatgtctctaaaatttgtgatgttaaatttcctcattagattttcatttagatgattcttaaggtaaaagtttgcaaaaatgtaatttttttttaaaaaaaatttatattttataggaaaatatttagaaaagaattaaaaaatatgagaaaacagtataaactcaattggttatccatctggttactctaagtgtgtttcgtatgaggtgttcaaaataatataattaattggaataataaagcggagaatataattatctataaacttataactgtgtttagttatgcaatgaaatatttagttagattactgttattgacgtaattttttgtcaacaaatgtaagaagatcgtaaacgagcaaaatgaacacaagtattcgtcaatcaaagtaaactgatttatcgaaaataaatttaacaaagatgaacacgaggattttatagtagttcatcccctttcggtggtaatatgctactccacttgggatgttattggtctcaatgcttgaggagagttctctagagttatgttctccaagagtccagttctcaagtgaattttttagaatgataagcgaaagtttgtgagaaggagtttgtggtgaatcctcaccctcaaaacaagttgttacagcagtaacaatgtccaa

SEQ ID NO: 74645 - DNA, 569 bp, Cannabis sativa
gtttataagcttttcccattctgggtgagcatacattttcatcattgcttaataaggcaatcttctcctagaatttcaatggtcacctcgtataccgaattgaccacctagtcaaatataaaagcattctcgatcattaccgtatcgccatcagtaatttaggtaatcttctttaccttagtgataccactactctctctgatgttctattatacgttactatcctaataccatttgtaatgtccccgcttcatgcttccattgcccttacacccacggactaatggatcttatacacatttacaccattttggctgcttgtgggattgataactgaccctactggccaactcaagtgttctcaacgtgctttgttctcattcacacgcttcttggaaaacttcccaggaagtcacccttcctcaaattaccctaggtcaagcacacttaaccgtggggttctttcgtaataggccaccaaaaaacaagatgcaccttgttaatataggtagttccaatcaatccatttaagtcctcttcaactatgcagtcccatacctacacagtct

SEQ ID NO: 74646 - DNA, 746 bp, Cannabis sativa
  modified_base (348)..(360): a, c, t, g, unknown or other
  modified_base (446)..(457): a, c, t, g, unknown or other
tctttttcacttttacaattacaatctctacatttgtattggaattctgccaaaaaatattgtttcttgtacgccatatttcgtaaacaagagctgctatgacaacaactaaaatttacttctttaccttgcttatctttggcctccttaaccaccttataattatttccatacattttatataggagttttttcatttttacaattaaaagtattttttttttatttttacagaaatccatatcgcaacacacatagacactacaaaaaactgctacttttagtgaaaacttttttgtcacaacataatttttttttttttgtgacaaaatgtgacttttagtcacnnnnnnnnnnnnnttgtgactaaaacatagtatttggttacaagttttcataattattagttttagtcacaacatatgaataatgatttataattagtnnnnnnnnnnnnacttttagtcataagttttgttgtgactaaaataattttttttgtagtgagcaaccaatagagcatcttaaattgcaactaaattcacatggcagcccacatagaaaccatcaaagaaactcaaaccgtaaatttgaaaaaaaaaaagttaaaaaaatatttgtggagaaattatgactaaatgttcagaatcaaatcaatgaaactttaaacaatcaaacaattagtaatgacaagattatcaaatctagaacaccaatcgtattaaaaaacagggacaaaaagagta

SEQ ID NO: 74647 - DNA, 827 bp, Cannabis sativa
atactcagcccatacctagtgcagaaagcagtctttggaatttccccctctcgaattctcaactgatgatagctcgatcagagatcaattttggagaagactatttctccctgaagttgatcaaacaggtcatcgatcgtaggtaaaggatacttattcttgatagtcaatttttttagttcccgataatgcacatgcgcagggatttgtctttcttcttaacaaataacatgggagctcccaaaggtgacatacttggtcatgaaaaccctaagtcaagcaacccctgaagctgaatctgtaattctttaagctctatcggatagcaattttgaaaagtgctttagaaatcggttctatccagatgctaaatcgataacaaaatttatttctccctgcagtgctaaaccctgaagttcatcaggaaatacatctaaaattcctgaaccactctaacatcctctggtcgaattgactcaagccgtgtggtaccaataccactaccaaaaaccctagacatccatcttgtaacgattctctagcttccaatactgagataactggaatttaggatccctgaactgaacccacaaatacaaatggttcctcaccctcaagttggaagatcaccatcttctgcttacaatcaatactagctgaatacttggacaagaaatccattccaactatgatatcaaaatccgctaagcccaattccattaaattagctctcaactctctatcctcaattctgatcggcatagacctaatctactttttggagataactaattctctgccaggcagtagggttccaaaccccttat

SEQ ID NO: 74648 - DNA, 1655 bp, Cannabis sativa
ctttgaaggctcgcgttctctgaaattagcttatgttcccgtagctttaaggtcgtttacagtagccgctagtcacgatcttgaatagggaggcttttgagaatttcagcggtttctctacgagttgtgtctagtgccggtcgagccggtctatctccgaaaacaaagaaaagcgagttagctcaaaatcacaaggtaacatgaaaactaactaagtaaggaaatatgcgacgtactaggttgacgattaaagtcagtcctaattcctgggactttaaacacgtaaaaccatttagatttccaattgcccatattggaaccttgccttccaccccattgatttcagaagtggcccacttgctgaaacagtagaagccgttgtggagacccacgttctttatgtcataaaagtaactaaactcctccatcgaaggctccctatgcgcatactccatatacatcgcgtaaaaacctaaagctatgcgatagctatttggggttagttgaaaaggggacacgtcatactgtttaagaatagcgaagatgaatggatggaaagggattgatactccacatcgaagaatgggaatggaaactaccacatcctctgtgggtatgatcgcagggttagtaaaagaaaggtgcgctctctgggtaggacgaggacgcaaggaggcaagtcgcagcaaatttaatctcgcaaaggtggtgagatcagatttggtgactcgcgagaccaagtcctcacatgagaagggcttgttcaattgtgtattatccactgaatcagtcccacttccctcagcgtcctctttctcatctgactcgcaatctggagcctcccagtcctcgtccatctcctcaacttcagtgtcgggagcatgcctggaatgaacaaggtgttcgcggactgacaccgtagactcgctatctcgaatctcgataattcttggttcaacgagctcctgaaccatcctttcgatgtctgcagaggacaacagacctagctccgcatcgccggcaattggggtctcctcttctgaaatcgaggttgggataaagctgtcctcctggtcctgatcaccgtcgaaagcatcgcctccagagccaagcatctgagtgtctgatagatcgctcatctgaaagatagaagatcttctcagtgtggtgaacgtgcgaaaacactataagtgatcccacccgcataaaaaaaattcaaaaatctccttagaaggctaatttggattctcgcgcaaaaccaatcagcccaccaaggcacaaaatcgtaggtgtgcgaatagaagagtatctcaaaaaacggctgggtgtatcccagtgacccaaggggcatgcgttttcgagcatgaccctgaagttactgggaaaaacccaccatttcgaggaatctatccaatcacaacctgcgagtacgtcacgcttatccgactagcaatgtacctcaaaaaacggctgggcgtttcccagtgacccaaggggcatgcattttggagcatgaccctaaagctactgggaaacacccaccgttttgagcaaatctactagtcgaagaacacggttatataggatttgagaacactggcgtatgtcgcaaatggctgggtgtatcacagtacttcaaggaacatgcgatcgca

SEQ ID NO: 74649 - DNA, 683 bp, Cannabis sativa
ttttcccaaagaagtaaaggattgttaggaacacaaaatatcaaaatagtagcaaatagttgacgcaattgataggacattcgatatgtagctgcttcttctaagcatagatgaatattattatcaccttctagtaaaccatttaaaagagctgattctcgtaatgaagagacaacaataccgttaacaatcttgagatcatcacatgatgtaggacttttgatatgactcaataataagcacaaatagtaccgttcaccttcaataggatttgcggcaacaattctccctatcacacaaccattctttctaggagtctaaatcttattctgtctatccgaaacaaaatattcaggaaattctctatatagcattttttttagcttctttgtttgtagaattcattctaaaaaactctgtcagcattgatcttgtaaaaatatctttgtcaataattttggagagattgtctttttttttgtaagtaatcatttggctgtcttcaagatgcagttgcaatgatatcacagatggataaatctcactcaaaataaatccatatattctccatattgcttcaggaggagaaatccatctagcagactggtacattgtaatctcatcaataatttccaacttattattatgagcaacagaataattaactcgatcatgacctttgt

SEQ ID NO: 74650 - DNA, 862 bp, Cannabis sativa
atctagcgaagagaattattggttgaggagcgcctcatgccattgtctatcatcagttataaggtttgaaacaattccatccaaagaacatgaatagaagactggttgaaaagtggagtgtcctgaaatccaaggtcaacaccagatttaactcggcaaccttcgccaattttccatcgcaaacctaatgagagcaattctttaccccatgtatcccttgccatgttaaggaaggggagtgtccaagattagcctcaaggaaagagctatggggaaagtatcaatatttcagcaacttggcaagaaaagagtcaatttgagtaataagtctccaagattgttttgcgagcaacgccagattaaaatgtacaaacgagtgaaaccccataccttttctatcatttcttttgcacagtaggttccatgaacgccaatatattttagagtccttttcatttagaccccaccagaagttaactatcatggattcaagttgattagagaagtaacttggcaagcggactcatagcgtaggtagcaattgattggacaacaactttgagaagaacttcgtgtccaccggctgagaagattttttcactccaactgtacataagtctccatattttctccttaatgtcactgaaaagtttctttttatctctcccagagtatgaaggtagaccaaggtacttctcatggcactcacaaatgggcactgttaactgtctgtggaagaaaacttggggcgcagctagcgttgtgttttgtgaaaatgacataacagacttgtcaaagttgaggactagactcgatgcccagtgacaaatatccaagactctctttattgctagacaagaat

SEQ ID NO: 74651 - DNA, 687 bp, Cannabis sativa
tagaaatgaaaaaaaaaaaaaaacagttttgaagtgtaaaaataaaaaaactcctaattataataataatagtgtgtgtgagatcttactataatcaaagaaactatgtccactagattaaaaatcgaaggttacaaatgtcctcatacatatatcaaatgttcaacattttatgtaataatcagaaatgtctttataagctttttaggccataacccctaataagttcgattaggcatgctcattaaaggttgcagttaactaaaaaaattcatacttctactttaattagactttacacatacagataccaagcccattaactattgatcaccaacaatatgggctaacacaacaaagaatatctaatccatattttattaaaattaataaaagttaatgtaagtctaaataaaaatttaacataattgtcttgagttcatctctttaattttttggtttgcatttattttaatttcgatccaaaacttatcttgtttttaatgtgtttgatcatttaactagtttgagtatatataattttttttaacaaaaaaaacacgctaagaaaagaagtatatacatttgttaaaaaaagtattatttatatgtaattatatatgcattttaaaagatatttaaaataaagggaaattatagtaaatggccccaaatcataggactatg

SEQ ID NO: 74652 - DNA, 797 bp, Cannabis sativa
cgggttcgcgggttcaacccgaaaaactcggtacccctaaaatctcaacccgccaacccacccgaagggtaccgggttgaactcaacccgcccgaaactgttttaaatttttttttgcgggttcaccagttcgggttcgggcgggttggtctggttcgggtctaacccgctcaaaatgtttagccctaatcccaagtccaggttcgggtctgggttcggcacttgggtcccagattcgaattctggtctcggctctctgtttgggtcctggttcgagtccgggtctcaggtcgagtccctagtctgggtctggtcctaggtttgggtccggtgttaggtctgggtccaggtctggtcgggtcggggcccgaacccggacccagtcgagtcgggtctggtaactaggtttgggtccgagtttggatcccgagtgggttcgatccgagttcagatttgaggttcgagtcttgaattaagtttttttttttaatatttgagatccaattagtatctgaatgttttggatcataagagatccgtcaaatcaaaattctgacccgttccaactaaatggatctttttgacatccctaatattttgcataaggccccctaaagttcatagcgagccctattgcaaagtctctactaaatactaatcattgttcaaaaaataaagagtatagataacatatatcattaacatatatatacctattattcttgtgaagacttcataagataaggagataagttaagtagcaaaataacatgacaatataatataatgtatatata

SEQ ID NO: 74653 - DNA, 895 bp, Cannabis sativa
atatatatatatatgacattattaatttcccatgcatagtaacacgacgttaacctatgcacaacattattcattatttcaataataaagtagccccgaataataataggttcaaaaacttatttttgtgtatgaagtattattgggtctctttttaaaaagaattataaaatactatattttttaaagaaaaaaagtatattatttaaaaaatttagactctaaatttgggtaggtcttatagccttataggcacgagcctagtccgctttagcttacggacgtcgtgcttgaaagtagctatagatatatgtaaaaaatgttaaaaggtattataatagtagtctaagagtaccatttaatatgtaatatcgttatcagtacaattaaatattcgatctcatataattaaatatataaatttttgtagaatattactaatcaatcataatgtgttaaatttagatagttttatgtatcactgatacctgataataacaatgctcatatatatatatatactagatgaaagctacgtggcgagccacgtaaatattagttttatttaagttctagtgatttttttaagaattcggtaactaattgtagattattttataaacaatgctcctccactaggttagttgagagatgactgaggaagaggaacgacaaagttaactggtgaggtcacaaaattgtaaacatcattgggttatacagcattaaaatgcttatatagcatttggttcaaatatcttttaataatctaactgcgtcaaacaataaagtcgtgcttgtaataaacttgccttttgaccttcagatacgccatagccctgtttgcataagctctccaacaaaatccttctttccttattgctctcctggtttt

SEQ ID NO: 74654 - DNA, 708 bp, Cannabis sativa
aaccaaactatcctcacatgtgagcagcctccaaccttgctttgccaacaaagaaaaattgaaatctctgaaatcccgaaagcccatacctccattcatcttatgggaagacagcttgtctcaactcaaccaatggatgcctttgttcttgttacttttccaccaaaacttacttatggctctctccacatcatcacatatactgacgggaagaaggaacacattcaaggtataggcagggagagcttgaaccacagatttaataagcacttcctttccagccttcgacaagaacttgttgtcccaagtttgaaccctcttatggactttatccaccacataactaaaggcagcagttttatttcttccaatagtactaggaagacctagatacttgctcttctcatcagcctctcgaatccccattctattacaaatggtttgccacatgtgactcgacgtattggaactaaagaaaactgatgacttagcaaaattgacttgttgacccgatgctttagcaaaaacatcaagcatatgctgaatatttgctacttcacgttccgtggccttacaatacaagaagctatcatccacaaatagcatgtgagacacaataggagcaccattcgccactttacacccatgaattaattttctagcctaaaaacttttgattagagtcgataaaccttcaacacaaataag

SEQ ID NO: 74655 - DNA, 979 bp, Cannabis sativa
taatttcttccaaactaaggcaactatttcttccaaacaaaattgattcgaaccaaacaaaagcaacatagttggttccttcaaaaagaaaaaacacatttgctccaaagaatatgaaagctttattctactctcttacactttttcaaatttatttgtagtagcatatcattttatttgataaaactattttctaaatgatttgtattttaattgataattttttttactattgttctatttttatttcctactactatatatatggtatataaatgtaactgcaacatatatatatattatttaaactctaatatatgataattatttgtattgtttttaatattattatgtcatatagtgatatttcacatttcaccaaataggatatatcattacatttgatatgccattttttctatttatttcgttcataatatattttggtacatataattaatatatcataatcttaaattaatataccataaacaaaaattaaattataatccaagtttttttttatatatatatagaatgctatatcaaggtaaacaaaatatatattttctggtaaaaaattaatatgccatagacttaaattaatatactatccaataacttaagtttttttttttccttgatgatatactttagtaaatagaactaatatactacaatattaaactaatatcataccacaaaattaatatacataatccaacttttttttttctttcttccaaatattatattgatatacacaaaacatatatattctagttaaaaatgaatataccaaagacaaactaatatacaataattaactctaatatatcattgtataaaaagtagatgtagcatttttgttaacattatatacttagggccgggttaggcctgcgcctagggcccactcattttaggggcccaaataaaaaaaaattgccttttaaaaaatatacatatttttttatta

SEQ ID NO: 74656 - DNA, 808 bp, Cannabis sativa
atcttaatgggaaaggttaggctctcggttaccttgtgtcctgacattccccaaagcatgttcaaatactacacttttgttgtggtggattggcccatcgcctgtaatgccattctcggcagaccggccttggtcgactttgtagcaattacctccattcgacaccggtgccttaaattccccactcggaaggccagagtagggacagtgaggggaaatcaaggagaagcaagaaagtgttaatacgcctcagtacatttattggtcctgatgatacgagggtcaggactagttttggtagaagaacaggacgagttggaccctcgtattgggtttgaggcggtgttagaggccatggaggatatcaaggaagtaagggtgtgtgaccccgactcatcaaaagttattcatctagggaaaagcctagaaccagaggagcaaagtaaaagcatagacattataaaggcgtctacgaatgtctttgcttggtgccatggggatatgactagaataagtccccatgtgatcacccatgtcctaaatgtcaacccagatgtgcctcctgtacaacaaaaaagacgcccactagacccaatataaaggctgacgccctggaaaaggaggtggataagttattatccaatatttttatccgggaagtgtactacctagagtggttggccaacccaattctggtgcctaaaccaaatggaacgtggcgagtttacatagacttcaccaatctcaacaaagcttgcccaaaagattgtttctcgctgcctaaaatcgatcaaatggtagacactac

SEQ ID NO: 74657 - DNA, 504 bp, Cannabis sativa
gacttgttgcgccttgcatcagcagaggcttgtgtaaatgcattgaatgaggcatctgaagctgtttccgctggagaatttgaagtcagtgatgcaagtatgtttttgtttgctttatttttgctcttaacaagaaacatgtaatattgtatgcctctatgtatgcttttatggtttgtagtttattatgctattgttttttcagatagagagatattctacctacgtgtattgaacttttctgcagtgtctgaagctggaattattctattaccacatccagaggatgcaaatggaggagagtctttggtggacaaagatacatctgaaccagaacaagctccttcaaaatggccaaaaaaacccgtaaatcagcattctgatgtgtttaatcgcgagaattcttggtttgatactccacctgaggggtttagtttatcagtaacttcttaaaactcttattatttggtgcatgaatttatgctttgttgatgtgtcttctct

SEQ ID NO: 74658 - DNA, 1229 bp, Cannabis sativa
  modified_base (758)..(775): a, c, t, g, unknown or other
  modified_base (916)..(918): a, c, t, g, unknown or other
aacaaaaatatgcaactgttattactgtacacatacattagtattaattagagtactagagaattttttttattattttatagaaaccaaagctatggaacatactatagtcaatgattcaaaaagtctgattttcagttatttcacattatttttattttcagtagaacgttcagttatcaattacattaaatattcaagttatatatatatatgcttagcatattaaaattcacatcaaatgacttgaaatatatatacatgtgagtattttggacatggatagtacacaaagctcaattttgtaagtttaatttaaagtatcgtataattgagcatcgtatgagagtaacttatttcatagaataattgtacttgattaactaaactctatatttatctaaaaaatacttgcaaactgctaacaaaattaagagaaataaatataacccccttttcaaaaaaaaaaatgcttgtatgtagatagaaatctattaaaataattaagaaaaataatcaaatgaaatttatttttatagcaaggtgatttttttttttttttttggatgaatctaaatgagaaattaaagaaaagaaaaagaaagaaagaataaaattcatataggtatatacatataaaatatatttataaataaatagatagatttaaataagtaaaagatatacatgataaaggtatttttcttattattaagattatgttaattatggttaataattgggattatttcacaaannnnnnnnnnnnnnnnnnaaaaattacaaaaatatggtttcacggaattttaaacatttttacgattttcttaatattatttacagaaagtacggtctttttatattgtactcttgttaatttgttgttgattttttgttgtctgtatgttattttttnnngttgttttgatgttattttcatgtcacttttatgtagttttcttgttgtttgtatggaaaatcgtaaaaatataaaaaaaatctttaaacgtaaaaatataatatttttacaaaaagtagtgtcctatgaaattatcctttaataatttacataagttacatattgatttgttattaacaattaggatatgtatggacaaatcatatatattttatgtaaaaaaaacagttatatattttaatgagaaaattactcttactatgggattttaaaagttctattgatgatgttatttttataagggagaaat

SEQ ID NO: 74659 - DNA, 860 bp, Cannabis sativa
agtacaatcaattcaccattcaaagagttgattcgatcgaagatttagataaagtttcactatgctttgattaatattaagactttattttttaattgttttcttccattttaaggtgccacttattctttatttttcgttacataatgtttctattaaattttgcaaaatatatatattattgtttctttaaattttccagaaacaaataataaatgtcaaagtcatatattgttatgacttatcatatataaattaattcttcacgtgaaagataactacaatattggtatgtaaatattgatattagcgtatttttcattattaataacaatgtaaatatcataaatttacaaacacaactatattttactaactaaatgcactgacacaaatttaacttttataaaaacaagtagttggataattataccactttaagtacctaaatctaaaaaaaactaaaaataccaaaccttaaataaaactaacgtttacgtggtctgacacgtaacttccaccaagtatatataaaactctccatgttgtaaaattaaaattcaatatattaaacaacttacacatgttttatgtgtacttagagaaatttacactaaaaattatttttttttcaaattttttatttatactttgacaaggaattttatatatttatactttccttattttttttttactatttttttacttattaaagcttcaaaaaagtttttttttttattttctttatattttttttattcaattttggtttttttttgagtgagttgccgattttttttttctcttctctctctatttctcttttttattttttttttccaattctctctctctct

SEQ ID NO: 74660 - DNA, 882 bp, Cannabis sativa
aagtcagtcgtaatccctggttgaagagcagtaagttgaatattatcgttgaagtttctaactttagtagcaacagtactaaatcaactcaggtaagccttgagtgactcgcctagttgctgctttatgttagtaagggagggtgcttcaagtcgcctgtctcttgctgcttgaaattgtttcttaaaatccttggacagttgttcccaagaagttattgaatgataggtaaacttattgaaccagctactcgttgctccagtcagcgaggtggggaataaaatacaacgcaaattatttgagacattgctagctcgtattatggtattgaaattgttatggtaagtaacgatgtccgaagtcccattgtattgcgagacgtgagggtttttaaatcccttggggaattcagagttcataatgtctgaatggaaagactcgggctcttcatccaagtcataaccaggcagtttcttgtattctccatcttggtatcttctaaatttatcttccaactcaatgatttgcaattggattgggtcctcatgctgtcggttattattgagttggtggcgtaaattaggggcattctgatttaagcgcttgcgtaaatcggcttgtctctgattcaaatgttcacaaagatctggctgtcttcgttcttatttactcacgaaccttgtatctgagtaactcccagattggtacctcctcgtattgctcatactctcttgatcagcataaccacgaggtttatctcctcctcgtgtacacctttctgattgaccgtgcccttggaatcttgaatgtcctgagctagaacttgcctcgtccttcacaggtcttctcctttagaaaaggttggacacactgttgggaata

SEQ ID NO: 74661 - DNA, 853 bp, Cannabis sativa
tcctcatcttccactcatcgacaatggtggaatcgaatgtggtctctgcgattgccaaaaaaacttaagatttttttgtggagattcattaatgaagcgcttcccacggctgttaatcttgtgcataggaagtttagttcttccaatgcttgttctctatgtcaatgcagttggaaaacatccggacatgctatttttcgatgtaaaagggcaaaggctgtttggcaacaattccaatacaaaattcatatgccaaacatgggtaatgctaaaggtttcgatattttttcttacattgcagctgctcacaatgatttggaattagagcagatagtttgtttaatgtggagtatatggtctgaaaggaacaaagagatccatggtactaagcccaaaccggttgctgttttgtgctcttattctgcatcttatttagctcagtttcacaaagccactgctccaatacatgcggctgctggtgtatcatctcaggctaaattttcgaaacctcctcctgttcctgctgctataagcaatcctcaaacatggcgatctccccctcctggcttgcataaattaaatgtggatgctgcgtgtgatcaggctgctggaaaattaggttatgatgctctaattagagatcatttaggtgatgttgttgctggtttttctaggcctttcgatggttttttcacttcaaaagaaatggaagctgctgctctatttcacagtttaacatgggccattcacaaccagctctccattcatttgattgaaacggattctctcttgctggcaaacgcaattaatactatgtcttctactcatcttgtaacttcttttcatgacttag

SEQ ID NO: 74662 - DNA, 762 bp, Cannabis sativa
cactgaccaactgtgtggtggtaggcgtttccctaacaacacctcggggcaacaactgcacagagcaatcgaattcggctttaaagcctcaagtaaggaggctcagtacgaagccctgatagttggcctcaggctggcccacaaagtacgagctgatcacatagacatattcagcgattctcaactattgtgaatcaagtcttgggtgaatacacaactcaaggtgagaaaatggtggcctacttgagcaaaatcaaagacttgttaagtcagctcaaaggctactcaatcaagtagatcccaagtgaacaaaatgccacaggagatgcacttgcccgcctagtgaacagtaccatagctgacaaagcaaacctggtgcccatccagttcctagaagaacccagcattgtcatcctagaagagatcgacatgctagatagcacaccaacatggatgacacccattgagcttacctccaaactagcgccttgccaaaagacaaaaatgaggcaagcaaactaagaagaaaagctgctaggtacctgatcctagacgaaataatgtacgaatgcaatttctctatgcctctcatatggtgtgtcaccaaagccgaagctgaacgattaatgatagaagagcatgaaggcttttgcaacaatcatgccatggggcaaagcttgtccagaaagatactctgataggggcacttttggccaataatgatcgaatactcagtaaactatgtcaaaaaatgtgataagt

SEQ ID NO: 74663 - DNA, 1053 bp, Cannabis sativa
  modified_base (568)..(569): a, c, t, g, unknown or other
gggcaaagataagcgtaagtcacctgtgttgcgatcacgatcccgctgtcctagagggaagaattctagaggacgaagcccaagaagacgcagtccacatagacagcgatgtccgaaattagccaagtcccctccaaagaaggaatcctccccaaaaaggaaaggtgccccgcgctttgtgaactataccgagttagcagtacctcgagaccatatctacgccatcgaagagaagaatggggtcttcaagaagcctcccccaatcaggggaaaccgcggcaagagagaccctaaaaaattctgtaagtatcacaaagatattggtcacactactttggagtgttggtttttgcaggacgagattgaagagctaatcaggagaggaaagttcagtaactacaagaagaatgaggaaagtcatgcccgagcggatgacaaagaagaaaattagaatgcgagttattcgagaactcctcgcaacatcctgaccatcataggcggaccccatatcacgggtgattccaagaagtcgcaagagcaatatgcgagagaagccaaagaaaagccnntcaccaatgtgaacaacctgagcgagcgaccgaagaaactgttcacgagggagtgcgacgacatcacattcatggaaagtgatgcgagatggatccaccaaccacattctgatgcgctggtcattgtcgccaatattggtggagacaacgtccaccgcatactcgtggacaatggaagttatgtgaaccttttaaacttccaagccttcacacaaatggggttgcatgagaaggatctgcgacccgtcacatcgagtatatacggttttaatggcaatgtcatcgcattaaaagggatgatcaagctcccaattactttgggaaccgcctctgtagtggctaagtcgatggctgacctcgcagtaatcgacaaatactcggcatacaatgctgtgattggtcggcctattctaaaagagatgaagattgtgacgtccatctatctctctcacaatgaagttccctactcccgctggagtaggtt

SEQ ID NO: 74664 - DNA, 564 bp, Cannabis sativa
atgggattgatcaatatctattctccatcttgagggggagtgttaattgttggttagttagagttagttgagtttgttagttagttagaggctgttaattgttgttgttgtaaagggtgtgttctctggttttgtactggttttttaattccttttttgctttagctgtatataagctctggtgagcttaattgtaattgatgagattcaatcaataagattcaatcaataagatttcattctcccctttctattgctaaaactgttaagtttagatttttgggattgagtttgaacaggctcagggggttaatttgtatatttctaatgttgttctcattggtagttttttctggttgaggggctgcagttagtcagctgccttttgtttgtttttcttgtgtgtgatttgtttaaataaattattcctttgttctaaaataataataaaaaaaagggatagtttattattttaaatttttaatgagtaaaattagaaaagtatttctttggttaaaatagtgacaaaatacaagaataggggaaatttctgtaactttatta

SEQ ID NO: 74665 - DNA, 710 bp, Cannabis sativa
  modified_base (537)..(541): a, c, t, g, unknown or other
gtcaaagacaggagctctaagcaagaaaatcccatagaacccatgatctcctttaccgaagaagatgaagctccgatcaacttaccgcataataacccctggtcattactgtaagaattgggaacatgaccgtagcaatatgtatggtggatgatggagcccactccaacattcttttcaaatcaacatatgaaaagatggggctccaactcaccgatctagctccttgtaaccaagtgatgtatagtttctttggccaaggcatcgcacctgtcgggtatatcagattacccctcacagtcggagaaaattcaactaccaaaacaataatgatgcaattcgtcgtaattgacgttccctcagctttcaatgccatgattagccgaccggccctcaacgacttgaaggaggtaacatcaatctaccatttatgccataaatttctaatgaggcatgggatgacacttgtgaggggacactagcagtctacccgtcactgttataacttggccctatctgttgggaattattttaccnnnnnctagatttactaacatgtatgtgtcattaacaccctaaatatgaattctctaaaataataatattaaacacatatgagtttagaaaatattacattgatggtagcggaataatatgactccttccgcttagatctctaacccttattcctttctgtcgcagagtaataa

SEQ ID NO: 74666 - DNA, 833 bp, Cannabis sativa
gtaacaaattaattttgtaacacactatataaacatatttttttctaacgaacttaattgtactataaacctttttatatgcatctataaaaatataattgagcttattaacaaagtagagcttatacatgttttttctaatgaacttgtactataaacttttttatatgcatctctcaaaatatttttaaaaatataataaaagtgataagtatgtatatattgttttaagaaaatatatattgttgttgcactatatattgtattatttttctaactatataatatgaaatttatagatttaaatggtatactacaatacatattttagaatttacaaaatttatatttactaattatattaaattttaattccaatatgcacacactaagtaatttaaaaattataactaattgggcaagattgagatactcaatttcaatcacccatgacaaaataaagtgaatgtaaaactactttatttatagcttagaaatacaatacatacatcatctgcaaaccatatggaacttttgctaaaaataaaaaaagaaatcacaaaattatactaaattcactaattctaataaaaatagatatatttatacatattatattttataaaagttaataatgttatacgtatataaaattatacaccacccaaaataatttcatgaacttattattttttttatactgcctaatttttgttcttattaatgtattaagaatatgagaatatcacaatgtaatttattttttctaacttttatcttatatgataagcacatgatacaattataataaataatattatgtaaatgatttt

SEQ ID NO: 74667 - DNA, 1156 bp, Cannabis sativa
  modified_base (44)..(69): a, c, t, g, unknown or other
attttattatacataaataaaaaagtgatccatgaatttctcannnnnnnnnnnnnnnnnnnnnnnnnnacactttatataaaatagatatgagatttttcttacctcataatttatatgaatatgagaaataaaaaaaaatgtgggaagagattgatttaaattttttcatgagattttgattatatactattttccacactccatagataatcagatcggtggcaaaattaaattttggaccattatatatagtttaattattattaagattatagttgtagtgttttagtgtaatagtaaaacttttaaaaactcaagagtttcaacgttaaatcttttatagctacacattaaatattcttaaaaaataaaaaagtaaagattaagaattgattcattgacctttagattctttaccactacatcaaatattatttgttatattttcttattagttaacatttgtttttttttcacaatttcgaggccctgaatgtttggaggcccgaggcgcacgcctagctcacttactatcaggaccaaccctgtagataattgtagatgtagaagttgtgttcactaagagtatctccaatggaaatgtaaatgcaaaatataactcactttgttaaaactctactctattgatgtgcaaaattatgatgcaaatatgtcacataacaaaaagtgatccaaatttagatcacaacatagcatgatgcaaaatttacatcacaataaatactatgtttttatatttaccattatgccatttttaatattttattattaattttagttagcaagctcttttacattaaatgacttacattattattattaaattttatatttatctttgcattattaatattattttatatttttttaataaattattaagtggacattaaatgacattaaattttatatcaagatttaaaattatgcattggagcacaatagtaaaagttgatgtaaaaatgtcacaaaactactttttgtgccaaatatagctcaattttttgtgccaattttttttaaggccaatgtggctagttttttgtatggccaatgtgactagtttttttgtatgaccaatgtggctagttttctttgtacggccaacgtggctagttttttggttttgtaa

SEQ ID NO: 74668 - DNA, 644 bp, Cannabis sativa
ttgtatggtaggaagtgtcgttcttcgaaagaaagtattatggtctagaatcagtttagaggatcagtgatgctatagaaaaaattaatactctgatacttacttcccaaaacatgcagaaaagttatttagaccaaaagcacagagatatagagtttcaggtaagagatcataatttcctacgaattttactaatgaaatgagtaagcgctgcgaaaagaaagccaagttgtgccctaggtttataggaccttttgagattctcaagaaagttggacaagtagcataccatctagccttacctctagcattgttagcaatgcataatatttttcatgtatcaatgttgaggaagtatgcgtcagatccaactcatgccttgagttatgaaactttagggctatagctacacttgtcctatgaggaacaactagttcaaatatcctcgataggaaggataaagtctttcaaaacaaacatatcttttctcaaagtactctggaggaataacaagatggaggaagccacctgggagttagagtttgacacgagggttcaatattcggagttgttcaggttagattttgtaacgtccccgcttcaagcctccattgggcccctacacccacggactaatggctctt

SEQ ID NO: 74669 - DNA, 844 bp, Cannabis sativa
  modified_base (42)..(57): a, c, t, g, unknown or other
catcgttttagaagttcaatattaggttgttaaatcaacatnnnnnnnnnnnnnnnnaagatcctggataaatataattccaacaaagaataccctgagaactgtctcgatgtatttgaatttttaaaacaaattaaagaggcgtcatcgagatctttcatctcaaaatgctcaaaaagaaatctcttggttttgtgcaataagcctataagcctatatcattagtggtaagcaatatgttatctacacatagaattagaaatatgcacttattcccactaaacttgtgatacacacaatcgtcaacatcattcatctcaaaactaaataagagaatcacttgataaaatttgtaataccattgtcgggaaacttgcttgagtccacagataaattttttttaatttacaaactattttctttaggtcaccacacacaaaattttctggtttttccatataaattgactcatcaatgtcgccattgagaaacgttattttaacatctatttaatgtaactcaagatcaaagtgagcaacaagtgccattaatttcctaaaagagtcttaattagccatcaaagtgagcaacaagtgccattgaggctaattaggatttttacccccaaattttgacatgtaccaaatcatgctgcttgaacttttaaggtcgttaaaaatgccacctggattattgaaattgttggatttaaatacttttgtccaattttagtaaaaaaagtctaatatggaaaaaagtttaggagacatgatttaatgcatgtaaaagttcgaggaacatgatttggtagatatcaaaatctggggagcatggtttagtacat

SEQ ID NO: 74670 - DNA, 790 bp, Cannabis sativa
ttcatattatatttaattaaattatacttattttttagtggattatctaatataccttcactctccatttaagttttacattaacctaaggactataataggaatatcatttataaaaaaatatatcttaaagaatataaaaatagaggtaaaaattaaaataaataaagtaaaatgattatacaatgcaatctcctcattaaatataaattttttacaaaaatactagactttgagtaaaagtttacaattttactatcacacagattttttttacaaaagtactatctttttataaaacaactataaaacatcaaaacaaaacaattaaaataacagtataacagctaaaaaataaccgtgaaattattgtaaaaatttagcacaatacacaatataaaatttatacagtattttcaaacaaaaattgcaataaaaaaaagaaaaaagttaaattttcggtagtagtagtgttggacagaagataaactattattaatagtgcccctttatttatttattttttattttttttgaacatttcttgattttttatttttagagaaggacaactcttcttgagtttgattggtaaatatgcattgtttgtatatatttgattaatcggaagagcacttacatggtggaaccagaaatttacgaaatatatctagtacacctcttttaaaatggtatttggaaagattatttaaaggagtttttaagtttaattgtttttcatgactaggtaagttgtgttatttagaattatttataaatttttaaaaaa

SEQ ID NO: 74671 - DNA, 1120 bp, Cannabis sativa
tagcagggttactatcaagagtagaagaattagttgctaagctctcttgagttagttaggaaagtttattaaagtatcgtgttagttagaatcagttagtgtccattgttgtatctcgatatatatagctctctcccctgtttttccattgacatttaatgaatacacgacgttttcttctttctcttctctctttctttctggtttacttagccaaaatggtatccgagctaatctctgtgtaaattccattctcgttcccttgatcttcatcttcatggctagaggtgaaggagttcaaactcgaagctccacagagacttcaaatcgtttttcggctctggatcctggtggccgatcgttctctggtgatgctaggaatccattttttcagtctaatagtgatcatccggagctagcttggttccaaagatcctaactagttgtgaaaactacagcttgtggcatcgagccacgacaatagcgttaattgcgaggaacgcatattcgctaatggcaaacttccagaacctaacaaagacgatgatgactttgagctatggaatcgatgtaacagtacagtgtgatatcttgaattcttcatgctgtgtcgaatgagatagctgagagcatcatgtatatggaaaatgccacaacaatctggacaaatcttgaagagcgattcaatcagaagaatgctcctcgagtttttgaagccataagaacaaagcagtctcttgcacaaggaacaagtagtatcactaactatttcactcctcttaagactatatgggatcttattcaagagtatcgactaggggtgagcaacggtcggtttggtcaattttttacacaaaataaatccaaaatttggttttggttttcatgtttataattcgaaaaccgaccgaccattatataaatataaaaaaaccgaccgttttaatccaaggtttgattggtttaaaccgaccaaaccgagcttcatttttttttttaaaataagtctttagattttctataataatttaaaaactaaaaaaattagagtattgtatcaaatatcatataatttaagaacaaaactttcttagttaaataaataatgtaaaataaattt

SEQ ID NO: 74672 - DNA, 1596 bp, Cannabis sativa
cctccgcccaaaagatctaaaggcagtgagactccgtccaaagagaaggggtcggtcgaagaggtcattgacctttctaaggaatgacctaccgtgcaccctccagtccagaaggtctcgaagtcaaagagttccagaggggggagcttgtacgggtctaatcagactaggaccgcttcaacggccgtggtggttagcacggaggctaagaagggcaaggacatgctccagtattacttgaatagatcactttctgaagtgagcgacgaagatggcttacgcctattcccgagataagtccactactaccaagaacctttccaccaccaacacattgcagagggaggtcgatacagctaaaaagaaagttcaggatgtgaggaaagagctcggggaagtgaacaaaaatctccttgctgctaacacccgcgttgaggagctgactaaggaaatgtaagagatgccctcggtcgagcaattggaggcagataatgacatcttgtctagggaggttaatgagcttaaagacaagagggagaatctccacactcttctcacaaagttggagggggatgtctagactaagcagaccagagaggaagagcttgagaaggaggtggaaagcctggaaacgaccgcccttgagatcttctataaattttgaaaggctaaccccacaggaaatttgattaccttggtgattccaaaggtatgtatcttgattactgtgcaggtcagagggcctaagaaaaccttgaggcaaccacttctacatttctaactgaccagagcaccgaaactcctactgctgaaaatgttgaacctctggcccatacagacaaaacagatctgtacaaagagcctaggacccctgctgtctaaacatttttattcttttttttatgtgtctgttcggcccataggcattttttagggacaaaaataacctgccaaacggttttaaacttgggttatatttttcattttaagacaactggttgaccgagcagcttttaacctcgggtttaccgtgctttgttatctttttcaatgattactatcccttttcttgataattatctatgcaactgtgtttgtttttttttttgagcttgttatttacttttaccaatactttgcacgagtatagttgcccccaagtgaccgagcagtctagtgactcttggtcacttgtatttcaagattatactttttatctgttcgttctttggatttgagcagacatttgtatgcatttaatggtaaatttataacttgctaatagaattgacacaatcagaatttaaatagacaactttattcattcattggtcaaaatatctttgttaccgtagtaacttacataaaagccattatacgatctaatccgatcattcgctaaatttaaacacaacaaattgcacttaaaaggaaattatactttcaaaggtggtcatccaacctgagtacttagtcatttcatccgaacccttaggcaggatctgcccaaaaggccatttacttaagagtaaatgttctttggttttttacttaaagtggtcatccgacttggtacgtttattgatagtacttttt

SEQ ID NO: 74673 - DNA, 510 bp, Cannabis sativa
tgactcactacatgcatcatgtgtcttaaaactaaataagttatttttgttttagagaaattgcctcatatctagaaagaagataaaaatatagagataaataaagaattaagcaaatatttacagaaaccaaactgatcaaaattaataaattaaggggataacatgatggacgtaataactaataataataaggatagagtagataagatatgataacatgatctttctatcactaatattaatgtgttgtttagatatgatagagaaaataaattcaccatcatcacttcatttattatgagcatatacaccaaattgaagtagttagagtacgtagtagtaatagtactacttttgttatactataaatagaatgcatgtagaactcatataatatacccataataatttactagtacgtacaataataagctagtgagaatatacatatatatgatcaatatggagatcaaaaataaaatcggtgtgatgatgatgatgagctat

SEQ ID NO: 74674 - DNA, 1022 bp, Cannabis sativa
tttgtcctctaggtctaggtactcgaatccatgtcttatttctttcaagtgaacccatttcatcattaatggcaccaagccatttctttctattctttccagtaacagcttcaacataggtggtaggttcactgttttcaatttcttcagctgctgcaagtgcaaaagcaatgcagtcagcatagcctagtctttctggtggtcttatatctctcctaactctgtctcggacaggttgataatcttgtagcttagaggacacttgttcttgtccttgctcttcatctgaactaggttctctgtgtgttgcaggtgtatccacctgatcagtaatttctgcattctcctggtctgtctgaagctcaacactttgctttcacgattgttctctgtattggtaaattcattgccatttcatgctccttaaacaccacatctctactaatgatacacttcttgtatccatcttctaggcaccacaatttataacccttgacaccatcagggtaacccaagaacaagcatttatttgctctagcctctaatttatcttgtttaatgtgagcaaaagcagtgcagccaaagactttgagatgatcatatcttggtacttcacttgtccaaaactctagaggagttttaaatcttagtactgttgaatggcatctatttatgagatagcatgcagtttgcagtgcctctccccaaaatttcttgtctaaaccaacaccctttagcatgcatcttaccctctcaagtaatgtcctgttcattctctctgcattcccattttgttgtggtgtcttcacaactgttttgtgtcttgcaatgccactgtcttgacaaaactttgtgaactgatctcagcaaaattctaatccattatcagtccttagtttcttaatctttactgattttctatcaatttcttccaattaacaaaagtttgaaatgcttcatccttagacttgagaagaaacacccaaactctcctagaatagtcatcaataatgctcatgaag

SEQ ID NO: 74675 - DNA, 922 bp, Cannabis sativa
  modified_base (57)..(58): a, c, t, g, unknown or other
tataatcgggatataacaaataaaagagggtataaattaaatatatagaaaagaaanntaaaaatgaaatgggttaacaaaaaaaagtatagggtgtaatttctacaaaaaaaattaaatatgaatatttatttataactgagagttaatttagatatttataccgtaaattattttaaaataaaaataaaaataagaaacctaatggtaccttatgtttatttaattttatttatttattgacaaattttctattttattttttaaagagaaagaatgatgggtcataaataattgtgagggaagagagggaaaatggtttaatttttgataaaacacttgtcttcaatactcaagtgcaacctttccttcgacggacctcgccgtggaccaacaaagtcaaagtgcgaactcaaaaccaatcgcttggtaccgaaactcatctctcttttttctttcatttccttttttatcttcaaatgaccggtctttttgtctaataacccttgttttcaaattcaatgtgctcgtcttgttctaatttttcttttaaccggtgtatgatcaacttcctggactggattaaggcaattgaaatttgacttgtctattagctgtgttagcataatttttgcaatacttattgacacttttgatactcaaaattaggaacatcttctgaaacgttctaactgctgaagctaaggctaaaggaagaacagtagaggcctagaagtccattattctgaaatacaagctcaactacattgttttaccttattgagcaggtttatacaccaattattctagtttctttattattttcagaataaacttttctgggcatttgcatactgattcattactagagtccatcatagtgaaaacccttttatctctttttcagaacatggcacagtta

SEQ ID NO: 74676 - DNA, 693 bp, Cannabis sativa
tttcaagtcacggggtacaagttcaggttgattttggggtcgagtctaggttcaggtccttatttttgtctgggtcgaggttcaggtccgggtttcggtcttagttagagtttaaggttgggtccaaatctgggttcaggtccgatgctaggtcccggtcgcgttccatgatcccgatcgggttctagttcaagtttcgattttggttcccgagtgtgggtctgtgtccaggtcatagttttagtttgagtttgggttcgcgttctcgtctaagtcctagatctagacacccactatgcgtcgggtccaagcatcgagtcccgaatcctaggtcccgaggtgggtccttggtcgaggtttgggtctggggtcgtatcccgaatcctgatccaagttttgaggccaaagttttggtccaagtttgggggcccaattcttgggtccgggttctccatctatgttcaggtccaaggtcccggtcccggtcccggtccaagtttgtgtttctattccggttcagttcttgcgtcccggtcttagtccaggtcccaatttgggtttgagtctgacttcaagtcccaatcctagtatgggtttgatttttgggtcccaagtgcgagtctggttcataggtcctgggtccgggcctagtttttgggtctgggtttgggtttgggttcgggtcccggtttg

SEQ ID NO: 74677 - DNA, 647 bp, Cannabis sativa
catactacagatggtccaatcttcagtccagtttggggggcttccattagaagacccaaacatgcatctagctaacttcaaagagctttgtcagacattcaagctgaatggagttagcgatgacgccatcagactgaagtggttcccattctcactaagggagtgagccaagagttggtttgtatctttgccacccaattctatcaacacttaggaggaattggccctgaaattcctttccaaattctttcctcctgtgaagactgtcaagttgagagctgaaatcaacaacttcacccaccatgacaacgaaactctttatgaagcctaagagagattcaaggacttattgaggaagtgcccgaactatgggattgaaaagtggttacaagtgaataacttttacaatggattggtgagcaacacccgaacactcatagacgtcgtagctggtggggcttttatgaggaaaagtgctaatgaggcctttgaattacttgaagagatggcgataactaatcaacaatggtcaacagagagaggccaatctaaaaaggttgcaggtatgcatgaaatcgatgtcataaccaagttgacaacccaggtggaggcattaacaaagctggtgactgcacaagccaaacaag

SEQ ID NO: 74678 - DNA, 550 bp, Cannabis sativa
aattaaggagagaagaaaaaaatacatttaaaatatttttagagtgtcatatcactgcttcatactttagctttatatatatactagacaatctagtcaatctttgcgcgactaatttaatttttttaatattataataaatagttacttaataatataataaaaaaattattaataatcctgtaaaagaaacataaaaatctgtattatttgctacaacactataaatatatatatatatatattatgcaataataatatgttaaaaacttaaaagaaaaacataataaataataatgaaaagaccttctataaattatattgcatgagatcataatattagaaaacaaaaagaaaaataaattaataattatattaccttctataaatcacattgttttaaagaaagaatacgtgtgactgagtaaagaatgactaatacgaagcaatcgattaatctatatatacatactatttaagggtacaaataaataaatagaggaggagaaaatagataagaaagaggtttcaatggttacatttttattgt

SEQ ID NO: 74679 - DNA, 1326 bp, Cannabis sativa
aataatatgatctttatttatagacttttcactcccatataaatataaatgaccaccatacaattattggatgttaccaaccataaattcagtgtttatagtattaattgggtgatctggaagaattttgaggtgttaaaaaagccctccaaacgttcaaaaagcatgcaaatatatgctaaaaaaaaacatttactagttactaattaccatttttcaactttggtcaattcttatctaaggtgttccaaactactcttacttgattttgaaccatttatacactttataaataaataaatcaaatcttcaacaactatattttcaatagctattattcactcacattcataaataattaataacattttttacaatttaagaatgataatatggagagaaaaattacacaatttataattatcatttctcaaggatttagaactctttttttatgatcattatcaatactttgcaattacataatacatattacaatttaacaaaattaataattaaataatacactaaataaactaaaaacaatggtatttatatatcaattgtaattccacacatttcatcaagctttctgttaaagtcaaaaatctccaacaacgattttttgaatttccccaaatttccattaacatacgaaaataaaacataacaaaatacttagcataactatatgtatatataataaactagagcaagaagcaaagatggtacataaatattatatgatatgaaagagtacttaataacaagatgataatttcttatatatttgttttgaaggattaataactaactgagatacacactaaacttaaaaagcttagaaactccattattcttttgtgagttaatatttactctcttcaaagtggcataaccattggcaccttggtacttaccaacaccaccaataacagcaatatgagactcagtaacacccttttttctaaccccaaagaacctcaaaccattagcctcatcaccatcgccaaaactcgccgttaaggccatcatgtggctactaatccctccttcagaggttgcaacataaatcccttgtgcctttccaatcactactcgcagactatcatcgtgatgatgagagtgatcagagttgtatatgccctcctcgataggggtcactgtcccaaactccaactcttggagggtagctctagccatagggaaggataagccaggaaaactaagcatttgagggaacgattcggttgaggggacacgtactccatctttgggagggattaggcctagtggtttggagaatggaagatcattagtggtagt

SEQ ID NO: 74680 - DNA, 983 bp, Cannabis sativa
ttttaataaaaaatgtaatatgtaattttttttttaaaaaaaattattattttaaattttaattagcctaccctaaaattatatcctgagtccgccactgttagggaacatattcaatatttttaggcttatgtagattcacatatattggatgttaaattttattatctgatccgatctaatgaatttcagttattcaatcgatttaacatccaatatatattagatcaattgaatgattaaaacgactttaacatccaatatatgtgaatctagatataattagttaagtgggagaatttatccatttatggatataattaattaaattgcttgacccccaagtgtatatataaaaaaattgttgaagctatattaatgaatgatggccaataaaaaaaatatttttttcgtcgtaatataaattttttgtgattaaatatgatttttagtcacaacaaaaagatacttgtgattaaaacataaagtatttaaatacaagttgtcactaatttacttttagccacaacaaatattgtgactaaaaatacatttagtcataataagttgtaatttttgtgactaatatttttagccacaaactttttagttacaatataaaaataataatttacaattagtcacaacttttttatttgggttaattggggcaaaacccctaatagttccactttgcttgcaattaacccccaaaccccccaaaattacaataccgttagcaaattacaacttctatccaaatttaactgttaactaccaggttagattgtccacgtcaacacaatgtacaagtgacacaatttagtccacgtaaataattatattaaaataaataaaaataaaaatcattaaaaattgttttttctcctttttttttttttttttcttttcctttgttttctttttcattttctcaaataccctcttctctttctctatctcttaattatgcaggaacccaa

SEQ ID NO: 74681 - DNA, 860 bp, Cannabis sativa
ttttaccaccaaaattttagattaggaggttagttgcaaaaacctgcccactttaggaggttttgccgcaaataacccatatatcaaatgtctcttgaaactatcaacagagaaaaagtgttctttaagggatattatttgaagatgttataattttattgtttaaattttcgggaatagttttatctcatgtaacttgcaataagaattttgcagctcatagtttggcaaaacatactttttggttagacaatgagctatcctagtttgagaaagtgtcgccgccgactgtaaattgctgattcgttaatcatgtgtgattttgatcaccacgtcaatttttttttacaaaaatataaactttattaattttttagtaaatgatgtaattttattaatagtaatcagctataataataatctacaatctaatcacgatatttccctgttggagatacaaacaggattagaattagataaatgagacaaatagttagccacctaattcctaaatcgtttgacaaaaaaaaaaaaaaaaataaagattgttgcattacagttaactttaagaacacttatattcaattttcatatatgcttaaaagatacaatagtagaaactgttagagcaggttcattcaaccttgtagattgaacatcaattattgtacaaggtacgtaactgcactactaaaaaccactaacatcgatttgttaggaaccatcgaagaacaaagaagtactaacaacgaaacaaaacaaaataaaatattatcatacagacaagactaaaacactcaaaactatgttacagagattaaactaattgcaatagaaaaaatcgaatcgcaacagcaaaa

SEQ ID NO: 74682 - DNA, 1004 bp, Cannabis sativa
tgtgaggacctatgtttttggtaagcacatttttaaattattcaaccatttcatttagccaagttcaatattagttagattagtcaatattgtgtatgtttcggctagtttggtatgttggcccccaatgcctacattgcatttgcagttaaaagagttttctaagaaagctaggataaaaaaaaagaaccaaacaaatgagagaaagcaattatagtttaaaagagcattgctattgagcatcagtggtgcctaacacctctagacatgtcactttatgattggttagcgatattaacacataggagggtactaagtactacgggtgcctttacactattgcaggctaacatgcattattgttatataactaaaaaaatcccaatagttggggttttatatagtgaaactagcttaacaataaatttgttaagaattgatgaccaagggcaattagagaaagtaatggtttctttcttaactttatttaacaaaagtactctctactactagaaaaagttacccaaaaagaaaaaggtccaaaaaccatcattcaaatgatgataaattaggtaaataatctaatacaagaccaaaacaagaaagttctaaatgaaaacaacagagttgggatcaatgacaataaacttcaagaaacagaagaataaaaatattgtcctaaaaatgccactaatacaagagaaaccgaaaacccatcaattaagaaaaatcaaactgattaattgaagtactcagaactgtaacaaacaagcacagccatcaaatgcatacaacaacaaaagtagattacagattaggcaattataaataactgtgatccaactcaactaaccgagagaagagatgatcaatctcaatccagtccaccacggcgagctgagcagagtagaaatggtaccaaccttcactgacctgtgaaaatgtggaatagattacaattacaaacacagtaaatatatttttaaagttggaagctttacata

SEQ ID NO: 74683 - DNA, 712 bp, Cannabis sativa
ggtttttatggttaactgttacaaaccgtaaagttcaggtggtttagccgccaatatccccgccaatatccctaataataatatattattattttattaatattaaagttaacagaatgagacaattaatttgtatgttggtagttgtaaaatgtaaaataatgtgctagaattaattggatcatattttaaagaaaaatatagaaaaatgtgattagtcggttttcggattgcacaaatctagatcgaaaattaaattttggatttttatatataaaaaactgaaccgaccgatgctcaaccctagcctcaagtggttgaacattttaaataatttaccatgcccaaaatagatttcaaaataatcctttttacacgtgtattcaaaataacttattttcatgttatacgcacataaaaatattacataatttaattttttcttaatacataacaatgtatgttgtagttgttgacaataatttataatgccaaaaacacattataagtggttttgaagtatattatatatagagtaatttgtggtcaacctccctaaattttgaagtttgatacgttaactccttagattgaaataactagggctagactgccaatttatagaatcattttgctatgtactccttccgtctactttgatatgttaagtgaaagtggactgtcattgtgtacacaagtgtacacgcaacaa

SEQ ID NO: 74684 - DNA, 912 bp, Cannabis sativa
ttttgaatggaaaactcgagaaactaaatcaagtctattttgactctcttcctgttggtcgatttcattaataatttctagccaatttggattgcaagtcattgttaagaaaatatcaaattttccataatattgaactaaatccattgcttccatgtatccttttctgatgtcccttggaccttcaataaatgatgataggagaatcaaaggttttctaatattagaagcatttctttctccgagagcaaatgaatcgacaataccttgatatatctcaaagcgaaattcttcttggtagcgtcgataataatacaatctcgacattttaattttaacatacatatcaacgacatattattgtaatagtattccaaactttagtaagattgaattgtcattttctcgaatttgtagtttgtaacagtaatattcacgacatgaaactatttcactttttttttgtttgtttaataccgccaaagtaaaacataagtaagttgttattaattaaaaattaaaatataattcacattttaatattgttatctaacctctttcttctcttgcaattaattcatctgcattggctgattggtcagggattaatgattgatttgtttcatcatatgtagaattgcagcctccactattccttttaatatcttcatgccatccaatatctccataggaaaacaataataaaaattgtagtggatcataacaaccaaaatagtattgcaccttatgacttaaacaagaatgattatatacaaatatgtcacgaccaattagttcttcatctttatcatttttatccattttgctgcaacttgtgaagacgttggagcattataaacacgttgatcaagtccaatatctattcgtataatatttttttggttttcaaga

SEQ ID NO: 74685 - DNA, 963 bp, Cannabis sativa
aatttgccatttagaaatttacttaacttaattgttgctaatatttgctaattttttaattggtagtggcgattgtggaatgtttgccatggagtacattgagcactgcatgtttgaccgttcatttgagcatgttaatgatgataacatgctcacctttaggcataggtggtgtgtggacttattttacaaggacttgacatggtagtttttgtaacgttatttatatatacacatagtcttttgtaattatattatataatattgtgaaatgttcaatcgctcaaatgtcgtacctatatctcatagacatcacaaataatttaacagttgtaataataacttgcagaaaaaaataattaactcgctaaaaatgtcacaaatatatcgcatagaaatcgtacaaattagacaacatagaatattcggcatgtcaccagtaaaatcgccaaatgtcgcacagaaatcggataggcatcgcaaataaaaaataaaaatggtgcaacaaattcgcacagagtcgcatacatatcgcataaaaattgcacaaaacaacagttatgaaatatgaaataaaatcgcacatgaatcgcataaatgtcgcacaaagtcacagacacattaaaaatgtccatgcatattgttaaatattcaagctatagtcctgttaaataacaaccaacaatataacacatatgcatctaaatattagagaaacaattcaaactcgagctttgcatgtagctctgttgtgccctgcaccgtgacatagcgaacaatgacgaggttccactaccacctcaccactagacggtcgacgcttcgtcggtcttctacctgcattgctcttcctaggccgacctacttgtttttctccactggtaccccgattcttatgttcttgatgtgttccggtagtacccactcatcctcctcgccaacaatattaattgtggcatcgta

SEQ ID NO: 74686 - DNA, 948 bp, Cannabis sativa
  modified_base (679)..(691): a, c, t, g, unknown or other
agtttttttaatatattatatatgcaataaaaataaaaaaataaaaaataaataaaaagtgatcgggttggcgggccggttcgggttcaatccgaaaccaggtaaccataaaaaataaacccgcaaacccgtccgatggtgtaccgggttaaacccgactcgcccgaacataatgggtttttttaaaaaaaattggttgagcgggtcgggtccgagcgagttggtcgggtccggatcaaatccagacaaaatgttcagtcctagttggcacaagtgtaggtgattattttctttaattttttttttaatggatgtgattattaattatttcattactttcactcttattattttatttattaacagctactatattcgttggttgctccctatagttttccatagtcatttattgtgaagtaacacaccttttaattattttggttttgggtagagaaagtttgctcacatcatatagatatttaaataaaaaaaatacaaagaaaatacatatttatatataaagacaaccaaaaaaaaaagatggtagtgtagaaactcataaaatccattaatcaataaaataaaagaaaaatagaaattttcgctctaattactgatgtttttattgtaaatttttaagtgtaacaaatcactttgtcaaaataataataataannnnnnnnnnnnnaataataataataataaaaagacaacgtaatataacagtcaaaattgatataaaaaatgacttgatgtaaaaaaaaatcctttaaaattcattgatgaataaaaaaattaaaatttcttagcaaaaaaaaaaaagaaaataaaatgaaaggaaaaagaaaaaaaagaacacactagtttaatagaaaaaaaatagaacaacagtgatattggtgcggaaattgtgaagatttatatgagagaacttaaaaaaaataa

SEQ ID NO: 74687 - DNA, 1180 bp, Cannabis sativa
ccacgctatcttgagcttcctcattggctgggacaagaacctgctgccaagaagaatacttgcgatatttgtaatcacaagtaaactccttgtcagtaaggagacccacagacctcaagttaacctcgctcaaatggaactcagatgaccaaagactgaatggaaggatccagcaggaacccgcatcgctcagccatctcaggagtaggaactagtcttttaagacagctgtcaaaaataaaagcaaaattaaagtcagcaaaaccagaatttggaataatttaaccaagtctaaagccagcaatcacttgcgtattatgcggacggtggttgtgccgattggggaaagaccagttgtccagaataattattctttaaagggagttttatttggaaaccctataatgatcttgcgattttctgtgtgagtcccaagatagtaaaaatttcttgctacattcttcctcgaaggaatggccttgacagagtaaagatactctatttccaggggagtggggcaatcccagtttaaaattttgtatgaaaccttcaagattgcgaggattctgtatgaaattagaaccaattggaatggggaaattctgagatggtttacgaagtccttgtagtagtctcgcaggggataatttctctagccctgatgtgtttgaggctccaagcgcctatccctgtccagccactcgtattggccttaccactagtcccctcagatgctttgcaagtaagtcgttttggtgtgtaacgccctaaataattaggcacgctacccaatatacttacaaagccctaatcccctaaacgagaaatctaataaaattagtgcaaaatgtaaactttaattatatatggaatgaaaataaaacttgtaataatttaaactttacaatctaaaagttattgaagttgggatccaaaaatcatttacaaaatattattacaagtcctctttctttcagccagtctaagcggcaaaacaaagtctcaaaacacaacactagtagcccccaacctgcttggtctagtatggcccgaacatgtacattcttcgtccagctcctgcactcatggttgatcagcaatatatttactctttcctgcatagtagagcacccgtgagccaagcccagcaagacagtataaatcataacaaatataatat

SEQ ID NO: 74688 - DNA, 1047 bp, Cannabis sativa
acaacaagagaacatgcagtagaatgcatcaaaattagcattgtcaccggaaaaatcaccaagaaagtggtttcttcatcaagaaatcgatttcttgatgatttttctagcgacaatgccaattccgataaatttttaggcgtcaatagcaactttaacgactttttcgacaccgagagctactctagtgatttttccggcaccgacagcaaactccgtcgacttttctggcatcagtgacaaataaaactacctaaacaaataaaaacgttaaatatgggatttgaaaacctaatttacatgtatatggcatatcaaataccataaaaagacctaaaaataataataaaaaaaaataccatataaataggtcaaacttaaaaaagccatatttaacataagaacttttaaaattatacagtaagtgtaatttccttaattgaatattagttaattgcttttataggttatttaggatttttgtcactgaactatgacctgtgtattattgtgcctcttaaatttttcagtttattaaaaataatctctaaaccattcataatgttgtaaattagtcattctttcagtttttgtcactcgtgacaaatagaatgataatttcactgtttagactattatcacacagcggcacgtgtgtaatttaaacaaaaaataaaaatatttaatattttaaaaaattattaaactaaaaaatttgaaaaaaaaaaatttaaattctaaaaaatttatacatgccactctgtgtaacaatagtttaaacaactacattatcattatatttgccacgtatgataaaatttacttaataaccactttacaatactggaatagtttggaaatcaattttaatggactgaaaaatttataagtataataatacatatattatagtttggagagcaaaaattctaaataatcatttttatatgataaattttaagtgggtgggggacttgtgtagattttgaatgtttgataattataaatttgaatattagtgccattttttaattataaattaagaat

SEQ ID NO: 74689 - DNA, 858 bp, Cannabis sativa
gttacaactctcattcatagacgacagaagtcgaccatgatacaagtaattaatctttaacctcccaattcaagaactttggattgaagatctgagcagcttaatcaccgttcgtgagaagttgcggtggaggagcaacattttgaatgaatctttggactcgatttcctttgattgcaatatataaggatctattgtttccaaatgagaaaattgtgattggttagtttctctaaaagtgtataattaaagtatattggagactgagattgctttgtcttgtgagtgtgattccatatagcagtataggaacaagaattggttgagttgcagcaaaggcagacgatgcattaccagcaccagtgaggtgtaatatcattatttgtgtaatttaatatcatgtttcacttattttattttaatgaaaatttatagagaatcgctaatcaattataagatgacacctcataatcacaatagtgctaggcaccttgttgcgccataacaatattgttgtgttggatagttggccaccatataatattaatttttgcttttaaatttaagaaagtggctttcatgcatatctttttcatataattttttagagaaatgtaagtaaatggtcctatttctaactctatagatagttaatgtcccttttttaaaataataaagcaaatgttcttttttactttttaatacctaaaatacccttcattatataaaaagtagtatatattttagtccttagaaattatgaaaaacaataaatcaaaacctctctactgaatttttgtcaactattttttcattatataaaaggtattatatattttattctttttgattttgctg

SEQ ID NO: 74690 - DNA, 1086 bp, Cannabis sativa
gaaattaatcaccaggttttccattctggtttatgcagattctataacctttagtgcctataacatatcctagaaacgtgcctttgacagatctggcatcaagcttatcatcagattgatgtacatacgctacgcatcataacactctcaagtgttttagatttggtatcttcccataccacatctcataaggtgtcttcaagtctatgactcaattaggactcttattaacaaggtaacaagcaatagctaaagcttctccccaatcaggctttccaccccgaactaagaagtaaacatctcactttgttcaaaagggttctattaatactctcaacaactccattttgttgtggagttttcacaactttcctatgcctagttatcccatgcacattacacatcctattaaactcattattgattaattctagaccattattagttctaagtgtcttaacctttaaatttgtcttgttttccaccagagcttttcatatcttaaattgttctagacactcatcattggttttaagtaaataagtccaaacacatctactaaaatcatccataatagataggaaggagtgtttacctgaatgtgttcggattctacttagcccccaaaggtcagcatgcacatactctaggactccctttgtgttttgagttgttgttgtaaacttgatcttgtgttgcaacaaaagtctcacagaattgtaatggacatgtctgaagcttttcaatgactcctttcttctgcaattccctaatgccttgttcactcatatgtctgagtctttgatgccatggctgcatatcactttttaaaccttttactgtatctgcctcagccacaggtacagtttcaccctcgagtacatacaacccatgtactctctttcctttcatcacaagcattgaaccttttatgatacttaggctcccattcaaggacttatagccataaccttcatcttcctaggttccaagtgatatcaaattcctcctcaattctggaatgtgcctcacattatgaaaaatcttcacttcaccattgatttgccttatagccaccttaccaat

SEQ ID NO: 74691 - DNA, 746 bp, Cannabis sativa
attttctacaaaatcttgtgttgagagcgtctgtgatttattggatcaattgtgtacaggttcgtttacaccggatcgatagagatcacagtagatattgctcaagatcttttaagagctgccgatcagtatctcttagaagggcttaagcgactctgtgagtacacgattgcacaggtgagctaacaatgtttaattcttggcatcctaactaactgcttatgcatggttgtctaattaattctatttattttcatttcttaattttaggatatatccttggaaaatgtttcaagcatgtacgaactttcagaagctttcaacgctgcttctttgaggcacacttgcattttgtttatccttcagcaatttgaaaagttgagtgctaggcctgggtatgtgctctctatcttattgtctttcagatatttctttttattcagttagaaagtttgaaatatacaagggcagtatgcagtcattttgatgatattgtttccttaaaagcttccgtctttacattttgatgattttaaatgaaattctcattctttcatgattgcctattttattgaaccaaaaaaagggaagttaagacgaaaatggaagcttaggaaaatatactcttcgtgattttcctttttacaccatcttctttttcctcaccataatccattaaccaaatcttggtaatttttttggtgcaataaatagttatcaagcttgttattgttatgctagtctgc

SEQ ID NO: 74692 - DNA, 1054 bp, Cannabis sativa
  modified_base (987)..(1007): a, c, t, g, unknown or other
gaaggtactttacccatgatccttcaaagtctagtacacatgcccatagtttgtcctctaaaatctgaatagtcctttcagattgcccatttgtttgaggatggaatgatgtgctaaatttcaactgatcacccatagctcgatgtaggctctccagaatattgatgtaaattttagatccctataagaaacaatggactttgtacaccttgaagatgaactttttgtctaacatacagtctttcatactgatcaatggagaaatttgtccaaataggtaaaaagtgtgctgactttgtaaacctgtccactatgacccacataaagtcgtactatcctgtagtcctaggcaatccaaccacgaagtccatggaaatgtcctcccatttccattccaaaagattcagtggctatagtaaacctacatgcctttggtgttcggctttgacttgatgacaagtaaaacactttgcaacatattcaactatatcatttttcattcaaggccacaaaaacatcatcttaagatcttggtacatctttgtccttcacggatgaactgagtagggagtcgtatgagactcatttagaatttctcttttaatgtcaccatccataggcacacaaacacggttcataaactgtagcatccccatatcatctactataaaatcactagtctttccaaccgaaaccctatctcaagacttcactaaatctggatcttgcaactgtgcttctttgattcgttccagaagagtagattgcagggtaatgttagccaacttccccacaacgaactcaatcttagctcgggtcatctcatctgctaaatggctggagatttgctttactgtattcatctggctctgccctttcctattcaaggggtcagctacaatgttggccttcctaagatgataaagaatctgatagtcataatcctttaccaattctagtcaacgtctttgttgggttttatgcccnnnnnnnnnnnnnnnnnnnnntaatcagatttgcttattaatatagatcagaaataacagatcggaag

SEQ ID NO: 74693 - DNA, 1854 bp, Cannabis sativa
  modified_base (1120)..(1120): a, c, t, g, unknown or other
caaagttaactgaaacaagtcatcaaaattggcatagtctccggagttgctaccgacgctgcaaaagtcatcggaattggcattatcccgaaaaaatcacaaaaaataccaagaaattggtttattcatcaagaaacgaaaccagtttcttcgtgatttttccagcgacaatgccaattctgatgaatttcccagagtttgttgtcggtaccgaaaaagtcactggagtagctattggtgtcggaaaagtcatcaaagttgctgccaacgccaaaaaagtcgtcagaatcgatattgtcgtcagaaaaatcacaaaaaaaaatcactaagaaactgaagaaaccaatttcgtggtaattttttcggcgactatgccaatttcgacgacttttttgaagtttgctagtagtgccgaaaaagtcaccggagtagctgcaagtgtcagaaaagtcgtcaaaattgatattgtcatcggaaaaataaaaagtggttcttcatcaagaaacagatttcttcatcgatttcttggtatttttttagtgattttccggcgacaataccgattctgacaaatttttcgacatcagcagcaatttcgacgactattctggcacagaccgctactccagtgatttttttggcaccgacagcaaactctagcgacttttccatcatcggtgacaaatagaactacctaaacaaataaaaatattaaatatggaatttaaaaatataatttacatatatatgacatatcaaataccataaaaaacctaaaacaaaaaataccatataaatttgtcaaacttaaatgtgtcatatttatcataagaacttttaaaatcccatagtaagtgtaatttcttctaaggtaaaaaatcccccaaaaaaatatacaaacagattggcacaacttgagtaatttgcggcataacctccataagtatttagtttattgcaactaacctctaattctattttggtggtaaaacttcctaaactcgtgttctgttaacagtttaacattttcatccatttttaactgttaactgccatggtggaatgtctacgtgtacacgtggcacaagtttatttgtccacgtaaataaatatttaaaanaataaaaataaaattaaaataatttgaaattaggaaaataaataaattttgaaataaaaaaatataaaatataattaaattaaaaactaaaaaaaaaaaccctaatttggaaacctaattcgcaccctcttcctctcagtcgcatctcccacctataattacaccaaccctaccatttggaatctcaatcttcttactcgaaccctgaaatccatacgaaactggtatcgaagattgtgaagacaaagaaccttgttgtcctttataatctacatatataactctaacaaaatcacagaccaatctaaaatacaaaaacaacaacaaaaataaagaaacaagacgaaacacttggagaatcaaagccactgccgccattctcaacctagggcgcttagtatcgtgaggagaagccccagcaccaacactaacattattgaacaagcgagcggcgatctctagcgctcgttgcttggctaactggatctcatcgaccggtggaggaacgttgtagtaggagtcaggaaaggaagaagtgattacggcagagaatccagtgggtcgatgaggcagtggtggagtggtttgttcttcgtatttgcgtttgttattggtgacaaagtctggaccagaagagtattgacgagaaaaagataaaaaaaaatagaaaaatattatgaggaaagaaaataaaaagaaaaaaaaaattgaaagaaaagaaaattttttatttt

SEQ ID NO: 74694 - DNA, 925 bp, Cannabis sativa
atttacatattttaacttttattgaatataaggtcgcaaatgttcactattctagttgttctttattaaagagccgttgaactgagctaatttataaaccccgattgccacaactgcttcaataacatagggaccttcccagtttggattaaacactccgcagatagatctcgtgtgttttcaaatactcaccttaacacaaaatctccaacattaaggattcttttcttaactcttttgttaaagtatcttgtgattcgatgttgatagactacattaattatttgcaactcattacgtccttcttcaagtaagtcagaggaaaggttcaagagctcttagttttctacttgattatagaatttacgtctatgggtcgcaatattaacttctaccggtagcattacctccgagccaaatgctaacgagaatggagtgtgccctgtagtagttttctctgttgctctgtgagcccaaagtacttgtggaagttcatctacccatcttcatttagcagcttccatcttctttttaataatatcttttaaggttttgttaacatcttttacttgtccattttcttagggtcttcaaaccaacgacaagctcgtaataattttattccttttgcagaacttagtgaacaacttaccatcaaattgagttttattgttagatatgggtattccaaatctgcaaattatgttcttgacaacaaaatcaagaacttttttacaagttatagaaactagaggtttagcctctgtctattttgtgaagaagtcgactgctactagtgcatactttgtgcctcctggctatgtgggtaatgccccaatcagatcaatcacccatattacaaatgggtatggcaaggtcatcatccttagttgtgttggtggtatacaaggtatatgtgaaaacc

SEQ ID NO: 74695 - DNA, 724 bp, Cannabis sativa
gccgggtacggggcctaaagggcgggtccaacccgtacccgttatttattattattttttttttttaaaaaattacacctaaaggctgcctaaaactaaaacaaaaaaaaaaaaaccctaaaactaattgtctgatgcacaaccgttccaatcgtcgtcccccttcttctctgcgcgtccccttcttctcttctcccatcgtcaacagtcgccgcccagcctcatcccatcaacgactcaacccactcgactcccttctccacttccaaccagcgtagacggtcgtagagagcgtcagaccttcatctagcctgaacgacgaagccacaacgccgatctacagtgcccgaccacttcgccggaccttcatccagccatagcgaccgtcgacactgtccacagtccaactccacagctgccgatctcctcactcctcaggtatggtattatttatatatattatttaagttttttttatttgtacagaataaaatatatttaatatgaaaattgtagcatcaaaaatttcagtttaatatgcttaatatgaaaatataatcatctaatccaaagctttgggtctatggtgaaataattgctttatatgtttaagtgtaaacttaaatataaataaaatagatttttgaataactgaaatttttgattttatgcttcatatgttgattatattatgtaaatggattagatggcttggttgttcttt

SEQ ID NO: 74696 - DNA, 1259 bp, Cannabis sativa
ttgattcaagcttggatttgtggacttttgtgcttggtctttggaagagcttaaggtagtgtttctaccatttctatcttgagttaattgctataattcatcgtgaaatatatgtgaaatcatggattatgttcttaaaattgcatgcttgtgagatttagattgattatggtgttttatggtgttttgagttatagatattgccttgtgtatgctttagattgtgaatttgagaattcttagttgctgaatttgagttggttggttagaaaggcatgctgagttttgatttttttttttttttttgtgactttcatgtgtagcttctttaggtgaggatatgtgaattttgttcatgtattggactttgtgggattattgttaatctgaaggttataaggcatgaaattggtatttcaactctctgttttgttgagttatatttatggactatgatttgtgagtttgtggaatatttgacatgttttaggtgtgtttggggttaattttcgaagctggtttttaagatttcctgggtttgaaacccaggcgccacgggcccactcattgggcgtcgcagcccgcctccttggaaatcctgggtttgaaaccccggggccgcgaccccatgtggggagtgccgcagcccccccttcatttttggacagattcaaacgcattattcgaatccttgtaactttgtgatctgaactccatttcgggaattctatatatcgttggaaagatcgttccgagctctatgtgattatctggaatttaaatgccaattttatattatgtgaaagtggatttagggattaaccctatatttgtgaatcccagaaattgtgactaagattaccggcacttggtcagaagcacccggggatttggaatctctacgtatgtgggacatcatgtaagacagtagttagcacgtagagttatgcacagtggcgcttatattgaatatgatatatgtgagtaaatagaaactcgaattagggttattaccctaaaataagaggtttattggcctagggttattaccctggtgaattgttatgccatgatatatgtgtatgtatattgagatttaagaattatgcgttcaaggcataatttggttggactcggtaactagaaccgagatgaactattctaaggtcttatcgtatttagacgtgtgagcgtaacacgtgggtctatgccacatatacataaatggcatgtgcgcgtaacacgcgggtctgtgttat

SEQ ID NO: 74697 - DNA, 654 bp, Cannabis sativa
tagggcataaaatccaacagtctaggcatgggtctaggttggggtcgggtaatgagtcttcctccgagtttgggtacgggtttttcggatcccagtctgtgtctaggttcgattcctgggtctcggtcccaggttcgtgtttgggtctacgtctgggtccgggtccaggtccagtgttttgatcccagtctgggtcagggtcggtattcgggtctgggtctgggttcatgtccatgtctatttccgaatccctatttaggtcaggggctttgtttgatttagggattgagtcccgatgttgggctcaggtctcagtcctagtctgggtccgggactgggtcggggactgggtctgaggcagagttctggggttcgattctggtgtaatttgggtccccgcccaggtccaggtactggtcacagtcccggtcctattccagggtcctggtcacattctgaatcaagtttttgttttgggtccaagctctgggtcttcgtccaggtattggtccaacttcgagtctttgtccgagtcccaaatcaagacatcgactatggtcttgtccaagccccagttttcggatcctgggacaagatatggatcctaatcacgggtcccaattgagtgtcaattcatgccccaggtcccgctct

SEQ ID NO: 74698 - DNA, 1235 bp, Cannabis sativa
tattaataaagggaaggtgtttttcaaggtgatggggtattgttcaaatacgttatagttttattgtccatattttcgggggcagttttgtcctatgtggcttgtattttgttttccgcagctcatagtttggcaaaacatgccattcggttagacgatgagctattctggttcgaggggctcccatagccgattgtggtgtgctgcattattaatcatgtgtgactttgttcaccacataaaaaaaaatcaatttacataattattctttaaataaattaaaaatatattattagtttgattgattgattggttgtgttataaaaatgctaaaaattcatcacatttctaagatgaagaatttatatgataagttacacaaatcacaatgccttctcttagttggaacgtggacacatgtgagcctaaaggaatctcctttgcatctcatccctcccaaatcataactatttcttcgaggaaatggaatcataattatcgatggttgcatttcatatttataaattataatattcaacatccaattactttcttttaaataaaaaaagctttttttttttttttttaattatgttattgtttataacgtttttgtaattgttattcgtaaataacacaatcaaaggtaacgattttttcaacaaattatatttagaaaaatttatataatacactaaaaaattaaaaagaaattacaaaaatacatcaataacgatttcttattatttttacgttttcaaatttttctttacaaaaatacctctttcgtaaaaataataaatttttttagttgttttataatttatttatagttgtcatgagtttgcttttctagttatttttagttgttttatagtttatttatatttgatttgtaattattgcaaatttgatttttttttggttgttttttaattattttcttaatttttgttcaaaataaaatgtatttttataatttaaaactttattatcttatttttgtaaataaaaattttaggccataaaattacaaataaaacataaaaattattatttatgaaaattttctaaacaaataaaaaatatgtgtgtaatatttgggtatgcattaagactgatcaaataaccaatctcaaccataaataagataatgagtagtttgatatttataataaaagttggtctaaaactttcaatcaattccaaagaaactaccaaggaaatctaaagta

SEQ ID NO: 74699 - DNA, 1336 bp, Cannabis sativa
ttttgttggtaaaataatccacatgtaccaactaaagtcccacatcgcttagatagtttttaggtattatctttgttggttataaataatactttagttaaatttttttccttagtatacaattttttttatattttaagggtgattgactaatgtcttaccccataagtattttattaatattttagttttaacaattaattttttaaatttattttttattttacctctttgttgttatttttttttattttatcatttttgttgttattttttttataagtttaattatttaaatagtcaaattagagatagaaatagataggtgcttttcttttttccctcaataaaggaaaataaaagtgtttttatatttttttttctattattttaaattttgtgagagtttcttatcaatatatataaataattttattttaagaacttaatttgtactattcaatattcttatattgttatttgttcaagttaaaataattttttacaactaaaatattttctcttaatttttatttgttcaaaagttaaaattttagtctatgtggcatattatctttttttctttatatttttctaattttatgacacattctccttattttgtttgtaaaataatccacatatacaaactaaagtcccacatcgcttagatagtttttaggtattatctatattggttacaaataatactttagttaaacttctttccttactctacgattttttatgttttaagggtgattgactaatgtcttagcccataattattttattaatattttatttttaacaattaattctttaataattatttttatatatatttatgaaaataattttattttaagaattttatttgcactattgagtatttttatattgttatttgttcaagtgaaaatattctcttttaatttttatttgattaaaagttaattttttattttattttatttgtaaaaagtgattgtcaatatcatatatgactatttgaatactcttgattatatatacatatatattttttgttatgttttttatttttttcaattttagaatatagaacataactatttgtactaattgatttattttttattttttttagctctttgttgttatttttttggggttttttcatttttacactttaaaatagttttttattattttttttttttacatttttacgaaattctacatagaaattcctattgcagctaacgctacaaccgaaattgtaacaaaaaaatcgtatagaaaactcctattgcaactagcgctgcaaccaccttagaaactcaaactgtaaatt

SEQ ID NO: 74700 - DNA, 905 bp, Cannabis sativa
  modified_base (840)..(857): a, c, t, g, unknown or other
tcatctactttatattattttataacattttttgttttttaaaattgaaaacagtttttaaaaattagagtaatttgcgacgtaaataggtaagtttatctactggttgcagtttaatacctaaattaaaattttggcggtaaaaataccttctattacagttttggaagttctgtaggtaccttgccgttttctgacacgctaagtgacaaatggcaagacatgtcatttaaaataatgccacatcattttattaactatccacgtgtgaacaattttattcaaaaacaaatttaagttaaactaacaaatatatttgaaaataaaaaaatgaatacaattaatataaatctatatacctaaaatctgaattgtaaaatcaatacattaattgaaacacgatttaaaatataaattgtaaaacctggaaacaaaaactaaataaacttatcatttctttccaacaaaaactcaaaaacatgattgaaaaaaaatctcaggaacacaatgaagagggacaaattctttgggagaagactagcgattccatcttctccaaagaagaccatcgttcgaggttttctatctccgacctcggctgattgattgcatcttcttcagcgtcttcgagtgaggagcaaacttagatttcgggtgagattttttgggttttgatatttttttgggggtttgctcttggttttggagatttttctggttttgcacaaccctgttcaaaagattacaaaatcaaacccaaacccaaaaatcaaatcaaaagttagggaagcaatttttttacccagaataaaaactcatatacagtagaacctctatttnnnnnnnnnnnnnnnnnnaataacctctaatttgttataaaataaaagtcccgatttgggccagtt

SEQ ID NO: 74701 - DNA, 924 bp, Cannabis sativa
cgtgtttaaatattagtggattgctttttggtaagcaaatgggatgagtgtaacaaactagggcctagaactactaacaaggacaacactcttctcttattgcatatgtaaaggcatacaaccaactccactcctagacaatgattttttttttgtcaactggaccatgaaattgatatagaaagaaagatctaataaataaagaaacattgttcaaatattatttgggtggctacaaacaaatttatgttcacatacccatttagagaagtggcagcttgtgagttttgtcatttgctaatggcaactcatttgtgattttggatactttagtagcagtgtttattggaccacatctaatatttttaagcttatttagattcgatctaattatatactggatgttaaattttactatctgatccgatccaattaattttagtcatctaatcgatccaatattcattgaatgttgaattggatcggttatattcactaaatgtatttcttatatatttattaatttaatttggctttacccaatattttagacttagtattttttggagcagatcatatccatccaatattttaaatctagtatgtattagattagactgatccatcccatcaaagaaaaaaagaatagaattttaatgttaattttcatatatacatatagattttatgtataacaagataaaatataattacttatccaaactaaataaaatagtaattattggatgttgaatgtattggatttttagacactccatctaccattcgattcgatccaattgaatatttaaaaataacatccaatctgatccgatcacaattagatattcaatatttagcaatcaattctcattagattggattaatttatgcacatccctaagtctaaagtgatttcaaagt

SEQ ID NO: 74702 - DNA, 693 bp, Cannabis sativa
ctcccgggctaaatttgctacttcgaagagtgcggctctgtccgacaccttgagggcagaggcagacttggcaaagaaggaagctgaggaggccagggcaaaaactcgagctgttcagcatgagccgggcaaagccaacaagaagctttttggtgccgagaagaagatctccgtgctaacaaaggacctcgaggctactgatcgctttgaggagaccatccagatcttatctcctgaagttaacagtcttcaggatgagagggacgccaaggtgaccgaggcgaatatattgaaggagaaggtcaatgctttggagactgccggcctcgagctcttcctcaatttctggaaggctaattcgcaggccaatttcgactacttgggcgatgctaaggacatgtaccttgagtactgtgcggcccaagttgcttatggtgggaaaggggcggctgcctcaacttccggccaagcttctgaccaggctgctaatgcttctcttgcttaaacaattgatcctcctgttccagttggctcagaagaaccgaaccaagagcctggaactccagctgtttaaacacttctctttttatctccaatttatatatatattatatgttgcctcaaggcctttaagacatcgtgaccgaccaagcggtctttaaatttggaattatttttcattttttggacaac

SEQ ID NO: 74703 - DNA, 552 bp, Cannabis sativa
cccattttgtatgatcttagagtccttcaagtagagtttcatcctgtttcttcatactcttgtcgtcttttcttaatttctttgtgagccaaagccttatacacattgattttactcaataatctagtgatcacttattttaagacaattaaacctcatgagacatatatagagattataaggaatataaataatatatataattttaacttatataattataagtgttggacatttataaaaaatattaagtaaattagaacaccttcacccataatcataagacatatatatatatatatataaagataaaatattaagtaaaataaaagattttcactcataattttagaagtctatttttaaagtaatagaaaaaaaaaaaaaacaaacgaaacttgaaaaaagataaaatgataatgatcacgatggataccttcaatgttcaaaccacaaatgttgcatgaaatttttgctttgttcatcttttcagaccaaccattataatcaaataaacctaaacatttggaaaagagtaaaatcagcagcacc

SEQ ID NO: 74704 - DNA, 810 bp, Cannabis sativa
catattttctcttttgaattccaacatgtagggaaattaacatatgttagctctcgtgcatcttcattatttttgttcgtctctaaccattcagtaaactttgttttttctattccaggttggcgaaatacatcgtttacacatttagtttcatcaaatatcactgtatgctctcctggtaaatgaaacggcaatctttcaactgctggctttctgtaatgtatgtcaaattggaagattctccagcaagcttcagttgctgatatatatctacaatccaaatatgttttgatttcatcaatttgttcggtagtgtcaatagattccaatgttgcagtcgttctatcagatcctttatgaacatacttgaaaaggtatttgactgatcttgagtaattgcaaatttcaacattaatatgtgcatcaaactttacaatcaaattcctattgtaaggaactacatatcgattatctaggaatacacctttcttttcgacatgagtacctatatttaattggaaatattgatattaataggtgcatcaaatttcttaataaaattactatagttagtgattgactatgcattgattatttataaatagacatttttttttctatatgaatacctgtatttcgccttctatagactggaaacccatctgtatcaattgtcgtatgattattgatttttttgggaaaatgttttgtgcatcttccttgcatcatacatggggagtgaggattgagctttccacacggtccatgaatcataaatttgttgactgcattataaccatctggatcaat

SEQ ID NO: 74705 - DNA, 1474 bp, Cannabis sativa
gtccgggtttttgtccaggtttcggtcccagtcttcggccgggttcgggtttgggtccccagtcttggtttgagtccaggtcctagtcccggtttttctccaggtttcggtcctagtcttcggccgggctcaggttcagttccttgttaaggtctggatgcttgtttgggtcccagtgaaggtttagaaccacgccaggtccatgtcccgatctaggttcgggtcccaggtctcaggtcccgatcctagtcaatgtctcggtccaagttcttgtctgagtttgggttatggtttgggttcggttttggtctcaggtttgggtcctaatcacagttccaattctaattctctgtcttgcatcgactccgagtcagggtcagagtccaggttgggttggggttcgagtcttagtcggagtccgagtacggttttttcgaatctcggactgggtctaagtctgagtaaaggtcccatgatcgggtctaggtcttcgtcagggtctgggtccgagtctaggtcccatgttttgatccttgtttgggtctgggttagtattcggtttcgggtttgggttcgtgtccatgaccaggtccgaatcccagtctcggtcaggggcttattttggctctaggatcgagtcccgtgttcaggttggggttcgggttcaaggctcagtcctagtgtggatccgggaccagactaggtccgagctcaaagtttcagggcttggttatggactagttcgggttcaaatcctgagttccaatctaggtcagggtttcgaggccaaggtctaggtcccccgtcaaggtccgggtcctacatccaagtctgggtccatgttcgggtttgggtcctagtccaagtttcgattttgattcattgtctaggttcgggtttgggtctgagtcttggttgcggtcagattcctagtttgagtctcggtccgggtctgggtctaagtccaaatctcggtctggtctgtgttcaggtacaagaccgagtttgggtcccgggtgcgggtccatatttgggcatgggtcagggtctcagtcaagatctaggtcctgagttccgatcccggtctgggtccagatctgggttcgagtccaagttgtatccgaatccctatgtaggtccgagtctgggtctgggaccaggtcccagctctaggtcaaggtccgggtttgggtccggatcttggtcccagtctgggtacacgaccgtgtctcgacccgatttctggtctcagttttggtcttggggtaggtctgagttcggttataggtttgggtccgggtcctagtcacagtcctagtcttgttcgagggtcctggtttgccggttcttgttcaagttcaagtttcgggttctacgtttaggtcagggtccgagttttgatcctggtctgagtctcagatctggatccctatcacgtatcccggtctggttctggtttaggtcctgggtccca

SEQ ID NO: 74706 - DNA, 1258 bp, Cannabis sativa
ctccaagcgatttccaacttcctgtggcactaccagaggtgccgaaggatcaggattgggatttagagcaggctaaactccctgctccctcaactctcaaatttgctcaccttgttgccggatggtctcctgcatcgcgacatataattcttcctagtttggtggtggtggaggattttcaccctcacttccaaccccgagcccagcaagctcgcggttacctctaccaaaccacctcaggtgcataatctatacacctgtggtaatatttccacgaaataacaatactaataagtatttccgaacatctcaaactttccctcttttcaagcagctagcatatttctaataaacatgcaatcaggtaattaatagatattctaataattaaaacttactgaaccatgagtcgaacgagtcttcgcaaccaatgtacatatcaaaccagtcttcaggatctttaaacattggtcgctctaatacatgttgtaatgccctgaccaacagagacgccacgtgtgtgtgcttttattaaattctccttttcttatttatataattatatcaaaagtgtgggtaattaaaattttacaattgaaaataaactcataacttttataaaatataagtgctaatctttacagggaccaccttaaaacaaaatatttacattcagttctaaaactgctttacaaagtacgactatacttcaaaatacaattgaaacgagttatcctgtccaccgggccatgacaccacggctgatatgtacaatactgctacgacctcaaactcatggctactcaactttggccttccctttacctgcaccatataacacccgtgagtcacaaagactcagcaagaaaagtgaataaaactataaacaatacaacattcatttaatcacatcatacaataatcatgctttaacaattacacatcatcgtaatcacacaatcttggtacttcataaagtacccttaccactcgttacccacgagctatatatgtccctatcattgcttgatacagcaaacgataagtaagaaacctatccgcggttttaagagtaattactcgtaacaatattgaccgtttccaaccctcggtcataactgaggcttaacaaacatacattcagattctcgattataatcgagactataatcccacaattattaatcacttaaccctaagtgatgtgtaacaccctaactagcataggcgtattacgtgattttaaacatactgtgca

SEQ ID NO: 74707 - DNA, 1139 bp, Cannabis sativa
tgttcatgagtcaaccaccagggttcatagatccatctcaacctcaccatgtttgtcttcttcacaaagccctttatggcttgaaacaagctccaagggcttggaatgataaactaaggaccagtctaatacagtggggtttcattgcttcaaagtctgatacttccctttttattcatggctcgggtacttctcttgttatccttcttgtgtatgttgacgacatactcataactggtccaaatccctcattgatttcaaagttggttactgatttgaatcacaagttctctcttaaagatcttggggatgtacactattttttgggggtcgaaattttcagggattcaacaggcatgtttctgtcccaaactaaatacattacagatttgttggtgaagttgcacatggagggtgctaaagtttgctctaacccgatcagtaacactacaaagctttctctacatgatggtgaattatttgaagatccaactctctacagaagttgcataggagccttgcaatatctctccttcaccagacctgatgtggcttttgttatcaataaactaagccaatttcttaaggctcctactgtacctcactgggaagcatgtaagcggctacttcgctacctcaaaggaaccatttctcatggtctattactcacaccagcagcttcaatgactcttcatagttactccgatgctgactgggccagctgcatcgatgatcggcgttcaacaggcggctatgttgtttatttgggcaacaatttaatctcttggtctgccaagaaacagaacgttgttgcacgctctagcactgagagagaatttcgctctttggctaacactgctgctgaattaaagtggatagtgtctctccttactgaactacaagtaaacttgtctcagtgtccagttatatgggtcgataaccaaagtgcctctgccttagctgccaatcccgtttttcatgctcggtcgaaacatatagaaatagatttgcactttgtaagggatcagatcatggacaaacgcctctctgtcagatacgttccaagtcatgatcaagttgctgatttgctcactaaaccactctcaaaggatcgttttatctacctaaaatccaaactg

SEQ ID NO: 74708 - DNA, 883 bp, Cannabis sativa
ataatgtaaattataaaaataatacatatgatttatcttcttgaactataactattgtacagttttgctccttgatttttttttttttgttgcaaaaaatctaattgaactataaaaattattacaaatattttcctgcagttatattctggttatttattaaaataatttattgatatatagtactaacataacgttaatctagtccaattcaagagtctagacaaaaaataattatataaataaccataaagtagtgtgtacaatcattgagttagctatagtgtttgcatgtttaaagctaataaagtaattttaggtaattaatattaagttattaaacaagccctcatacttcctggaactcatagctacgtacataaataaattatttaaaaaaaaatgagtaaaaatagttagagagaaatatttacagcaattgacatagttcaaaggaaacttttacaagagataaaagatcaaggggcaaaatctacaaaaatcattgttcaaaggataaaaaatttaattattcttaattataagagtaatggttatgatatacatttaaattatatatcgattttttatatatagtcaaaatgaaatttattattttgtcttttgttgtaaaagtatcacaaataataaacatggttgacactcccatatattaatataagagtaatattacatacacatttaaattgtaaatacttgcacttgtgtaggtatgagattgaaaaatgggaataaagacaccatataataagtgctctttagcatttgttttgtgcattaaagcatttctcttacaaaaagagcattgctattaggcatcagtggtgtttagcaccttctcgacatatcgcgttgcgattgg

SEQ ID NO: 74709 - DNA, 838 bp, Cannabis sativa
taatatactgtacaataaaatttatataccaataacccacaacaactcataaaaaattaaaaaaatagacataactttcaaataaaaaatattttaacaactaatatagatatattataaactttaagtaatttacttctaattctaaataaaattattaattttttatgttacaaaaaataatataaataataaataatttaaaaatatcatttctttacaagttttaaaatgagaatatttactaatataatcttatgattaggagctatttactataattttcatattaaaaaattattttatcatttttacaaagaaagagaggatttattaattgtgttaaaagaataaaaaaatatatatattataacccaagcgattggcaaggccaaaaaaaaaattcaaataatgatagtatgtaaaaaatggaatacattaaaaattagggatgtttgtctaattcgtactaaattattttgctcatagtatatctgatccgcattaactgtagattttattttttgaatcaaatccaatccacacaatagctcaaatctaactcaattcaatccgcaaagttattttgcattgattacttttaatattaaattatttattattaatgaattttttttttttcacataactagtaacaaaataaaacaaattattgttattttatatctccaataacaaattaaaataaataaaataacatattcataaaaagacaaaaaattatatgtataaagaaatattcagttttattttaaattatatgtaaaaaaaaatcatatatattatataagaattgaatatacatttgatctattaa

SEQ ID NO: 74710 - DNA, 741 bp, Cannabis sativa
tctctctctctctctctacaaagtcatcgacacacacacacccttaccggagcaccctttaattgtcggagtcttagcttgacaactaagtttgtaggagcaatccaaactccctaccaacatcatatttgaaaaaaaaaatgagcatgtaatttaattaataattattgttgaattaagttgtatttaagctgaaatgaatggatctacacatatcattcttttattttggttgtcttgttcctgaaactcgagctgctgaaattctgtgtttttctagtttttttttattgtattttagcaataatttacgatttctagcgatataatgcgacattagagtacggtgaaggttaggaatgacttttaacgacattttgtgacataaagcgactaagtttacagcatgtgccaatttatgacacatgtgtcgacattgtttgtgacatgtgtcgatattttagacttagagtattgtgttgtgttgcccttaattttgtccaaaatacgtggaccaacgcgactgtgacacgtgggtttgaggagtaaggctttgagataattcgactaagccttattgatcaaaaggatcaacaagaaacatgcctcccagagaaggtatgagggattcacatactcccggaaggcaaagctataataaagcacctccgggaggtatcaaatcccatctgaacagtcacctcgcatttattgccgcatgggagaagacgtattggaact

SEQ ID NO: 74711 - DNA, 573 bp, Cannabis sativa
ttttttttttttgtatttgtgtagaattccacacaaaaattcctctaagaactaacagagcaacttaaatcgtaactaaaatctgtatagcaataaaccacgagactaaactcaaaccgttaattttttttaaaaaaagttcaaaaataatatatagagtaataattctatctcttaaaaaaactatcactaaaatatataaataatggaatttgtaaaatgtgacaaaatatgaaatttaatgacgttttaaaatgtaagtgaaaatacctattttctttaacaatataaaataatgcttttacttaacttttgaaataaataaataaataatagtaaaataaattattaatagatgaaaaaaatgtcattaattttacagttacgggcccgtacgtgtaataaaatctaacaaaatcactattttatataataatgtgaataatgagctgaaaaaatttagaggatcgacataataacatcatatactcatgatgtggcacgtgctgtgattattgattatcaattttctataaaacttattaattaatcaagtaattaattaattaccca

SEQ ID NO: 74712 - DNA, 1378 bp, Cannabis sativa
ttttcaaagggcaaagctgggacccagcgcctagattgacacttggggctgggcctagcgcccagattgacatattgtcgacatgagctgttttcaatcaagtttagcaaaaagcgtttttggcatattttccatcataaaaaataacgaatattcaagtaaactcaaggagaaaccacaatctcgagtccctacaaataggcctagtgcccaagttggcctagggcttggcctagtgcctaggttgaaaatcaaccacacacgctacctttaattactcaaatgccaaatttgatgcgaccgttgaatccgacatggtcaaaaatgggggtggagaccccttcctcaagttaagaagccttgggtgtatcaaaaatagaatctcgagagctcagttttaagggcccaacgcgctgtcaacaaatgacctggtgtgctaggttttgtttatcccaatctgatgtcgtttcaatcgtctgtctagtttttcacaaatacaatgatatatgaaattatagaaatcaaattcacaactttgcatttctcatttccaacacacccagaaatgaagattttcgagtctcctatttctgtaaaatagcaatatctctgagaactggtgaccaacttcgccagaacatataaatggactaactggtgtcagactatcacttagacatcttaaaggacatcccttggatgtttctacacttacccaacgtccaaattgatggtatgtcaacatgggtgctgggatgtcaacgtgggcgctggatgtcaacctgggtgttgggacctgaagtgccttcagtaaaacaaccataactaactcaatttttatctgatttatgcgattgaacttgcattttgaagctatttaaatgctcatcaagtcatgtctcacactctaggcgtaacgctgaagctatcgtcatcaaaattcaccctaagggatttaaataagctccaggttacccacagcgggaccccccgggcatcaaaaattagccatcaccactatatcatcatcaacagtggaaaacaacttatttttatttttctcctatttttgtgggcctccacctataaaaggagggctcccttagctcattttttacatttaaaaaactacccacaaagtcaaagcttctctctctagactttctctctctagagtttggagtttttgatacttagtatattattataattactatcttgtgagaaataaaaacttgaagtagatgtagtcgcattactatcgctatataggggtgaactactataaattttgtctctctctctaaattatttacttaaacttattaatcatctcatcaatctagaaaattgatgttgaccacttttcagagtttac

SEQ ID NO: 74713 - DNA, 1231 bp, Cannabis sativa
  modified_base (711)..(731): a, c, t, g, unknown or other
ggaagctaagtttggaaattgagaacctgaaacacacgtgtatatatgatattttatatataaattcaaatgataattttttaaataaaagataatatttgatatagtattacatttttgaggaattctatttttttttttatgatatagtattacatttaaactaacattatttaatgatccaataataacagttttaactaacattttatcaagtgggaccccactgtctcttaacgcggttatttaaaaatatctcatttactaattttaagattaaataaatatcacaaattttattttaaaagtaaaaaataatagtctaacaagataaaaattcactagaaatatcatttttactgaacactccatctgaacaataaaataaaaatctctattaaagttgtgagttacactaaaaaacttaaacaaaattaaactatatatatactctgtttttatgatctataacagcagagtctcgagtaatattgggcccaaaaaaattattgagtgcatattttatttaaataaaatataaatattattggacttcattttataaaaaaatttcataaatactattctttttcaatgcaaaaataggaatttttacaaaaataaattaaattttgggcaaaaatttataattttactatcacacagatttttttacaaaaatactgtcttttttataaaacaaccgtaaannnnnnnnnnnnnnnnnnnnnaacaacaatggaacaactaaaaaacaattgtaaaacaacagtgaaaatttaacatagtacacagtataaaacaactgtgtatcttttaaaaaaaatcgcccacaataaaagaataaaaaaaattgaaaatttcagtatgtggtgtaaaaactctaaaaaaaatatactatataaaaatttagaccctagatttgagtaggccctaagcatggacctagcccgtcttagcccagaatcgaacctgtataacagagtgattattcttagaggaaattagactttataccatttttatattatcctatttttttaaatctatcatttttatttcttttttaaacactaccaattttacttctgtcacttcaatatactcttcatgtaactcctttatgtcagaatattttgggtacagtacatataaaacgaaatatgtttcaattaaatatatattagaggtagatttagttatttgataaataaaataggtatttttcaat

SEQ ID NO: 74714 - DNA, 1180 bp, Cannabis sativa
tccatgtaacagattatgaaataagatattaatataatttaattattattttaactaaccacactcttgtgccacctttgcccgcttaaggctcagcttgcctcgaagcccccacgggggctcgcacgtgggtcctccatgtatcccgacattcgaaatactgcctttgagaaatatgcattgggcaagtaggccaacttggcgcactctcgcgtgtcacttttcccttaggcgaatagtcctaaaaattaaaagtgctaattttctgggttaacaatacccctctattttcatacgaagggaggatcacaacctagatagccgaagctctactgaacttactctaagatttcctcttcttcaagagaaacacagagtacagagttaggattttctcgcaaaaattatgtaaagacatcatatacgccttctaaggctaatagaatgactcgtagactaaggctcattaacgcctaaaccacataaaaatctcaatcttctttattgttgttactttctaaacccatagtgctactgtagccatggtgtttactggaaaaatggttaccaaaaagactcctcatgtaacaccctactagtttaggcatgctacagtgattttcttaattactgtgcaacctttgctaatcaaagggtttatccaaaagtgataaaatttaaactttaataaataaacataaattgtattacatttataaactttgggatcccatatctacatttttcaactatacataatcaaaagatgtcgcacagcgattacaaaatcatgagccgtagctgtcccaaagatctaacactctaggtagaactgtctcgatatatacaatcttcatctagctccaaactcacagctgttcaacaacaactttgcctttaccaacacataacatagcatctgtaagtcaaaagactcagtaagaaaaacattaagtatcttgaactaatcaccttaatttgaaaaatatcctatttatgttgatccaaaattaacaaattttcaacttacaatattttaaagaatatctgaataactaaatttcaagaagattctatttaatttttaatttcaaaatattctaatttaagttgatccaaaattagtttgaaaaactaattttcaacttaaatatatttctttaaaaattcaaataattaa

SEQ ID NO: 74715 - DNA, 1028 bp, Cannabis sativa
gactcttctttttctgcaaattctgatcagcattgctcaatatgccatttagctaaacaaaaacgacttcccttcatatctaacaataatttttccgataatatctttgacttagtccacacggatatatggggccctttcaacatcattagtgttgaaggttatgggtattttcttaccattgtaaatgaaaaatcaagactcacatggacatacatgctaaaaactaaagctgatgctcccacagttttaaataacttttacaacttgatttgcacttaattttccactccaatcaaagcagttcgatcggacaatgccaaagaattaaacttggcctcttttttttttttgcctctaaaggcatcattcactatcattcttgtgtggaaagaccacaacaaaactcagtagtggaaagaaaacaccaacatatctgaaacatagctcgagctctatgttttcaatctaatctacctctagtctatatatcatctaaactgcaacctatttgtgaaataggacaccctttgcattactaaaagggcttacatcctatgaaattctatacaacaagctcccccaatatgaacatttgagtacctatggctgcttggcttatggctccacgttagtctcaaaaagacacaagttcactcctcacagtcgtgcctccattttcattggatatccatatggtatgaaagcctataccttgttagacatataaacaaacctgatttaccattctagggatgtcacattccatgaaaacatattcccctttttcacataaacccaacactgatgttgatttatgttttccacaaacagtgattccctcacattacaacatacaacccactgtcaatattccatctgctccaattgagcatatacaaaagatagtaccccctgtcaacaaaacacttgctccaacggagcacatacaatagacagaatccactgtcaatacaacacctgctacacacagagcctttacaaaatacaaaggctctaatgaccat

SEQ ID NO: 74716 - DNA, 1284 bp, Cannabis sativa
aattccaaaataacataaaaatcgcaaaaaaaaaaaaaaaaatctaaataaattgaaaaatcttgtaaaaaacaattcgatggaaatgcatgtggtaggttcagcttataattaatctaatgatcactttaatagtatttattacaaaactactaaagcctagctaattaataacaactcacttgcgtgaagtgaagataaaagcaaattaaacacttaggtattgttcggtaacaattatataatcaattttttaattaattaattaaaaaccgtgaacaaattacaagattttgttaagtgaaatttaaaaaaatagaaaacaaaaaagttaccgaacacgcctttaattaaagttaatcactatttacaactactcatcacttaaactaattaaagtaattactactaataggtacttaaatgcatttagaatttaggaccaccacaacacatattgttagaaacaaagttattactaaaatgactgttaattttacaagacaaaataatagttgaaaaaaatgatgggaaatatatatatatatttataagtttgatatcattctttcatcatttatatttatttataattgatgtaaatttcataaaattactataagtaatttttaaattttttttggatgaaaaaaaaagaatatcttttggctttcattttttttttcttaattaaaatccaatgtccaaataaggggagcattgccataagactaagcctcttattcttataaaaaaaaattaaatcataaaaagttataaattccatatttatcaaaattattggggaaaaaagtgaacttgttttaaaaagaaatgtattccattttagttaggcaaattttcaaaaaatactattttttatattttatttatatttttatggtttaaattttatttacaaaaatatatttataaaattttgaaattatacaaatattattttgtttaacaaaaaaaagtcaaaaaataattaaaatagatgagaaatcaatattacaacaactaaaaaataacacaactataaaataaccaagaaaataatttatttccttattgaatatatttttacaaataaaaaagttgaaatagtaaaataaaaatgtttccatgtatttttaaattttttttttcgtctattatataaatgtctctttttttttttcaatgaaatattattaaaatttcaaataaataaataaaaataaaatattaaaaataaaaaaaaaaaaagataaaagaaaaacaattaaaaaaaatggaaaa

SEQ ID NO: 74717 - DNA, 709 bp, Cannabis sativa
  modified_base (638)..(646): a, c, t, g, unknown or other
gtgtttgcaaatactcgtcttaacaccaaatctccgacattgaagagtcttttcttaactcttttgttgaagttcctcatgattcgatgttgataagctacattagtaatttgcaactctgtatatctttcttcaagtaaatccaaggaaaacttaaggagttcttggttttcttcttgattgtagaattaatgtctgtgggtcgcaatattaacttctactggcagcattgcttccgagccaaataccaacgattgattgatcctctatagacgatttacactgagtatagataaaattatcattttacccttcaaagtattttatcctagaatacttagctacttgtaaaggatattttagaaaactaatatgattaccaaaatgagcgctctaacatttatctgttaagccaagcttctaaaaaaaccatcattcacttctaataggcatataagctatagatgtccatttctatgattaacactcccacctaattgcactgccgagttcccaagatataagtattgagttggttctacggtaagcttgtaacgaacaagtcaaagaactcgtgcaatacatgtaagctagagtttaaccatcttagaattaagatcaaatgatctatgatcaannnnnnnnnattgacttagaaaagatataacggtaagtttatgattcctttccactatcaatatcggtccag

SEQ ID NO: 74718 - DNA, 872 bp, Cannabis sativa
aaagattttttaatggagcttaagcttaagaagtgtctaaggagttgtgagacaattaaactctacctatatggattaggattggtgtcgcctcttatgagaattgggagttattctctaaaaatttattgaattggatttgtgcacatggacattaacagtgcaaggcaatccataaggttcttgagtgaacatagcaaaggtgtatatgttaccaccggtttgttatcaaggaatagtggttcaatgctacaacagctaaaattttaacaaactttgtggtaattatactaaggtaaaatttaagtcaaaaaatattttacattatgcaccaatgtaatgacttctattaaagtggagttatttaatcaagaattcatggaacatctgtttctctcatgcaacttggcttttgatttatggaggtcttctccgtgaggtatatttctcattgtcagttctggtatttgtatgtgagactaggtgacatttatctgagatttaaaaaactaaggcattaatattgatgaggtgttcctctacgcctccactattgttgacaccacttggcgggtccgtaatgataaggtacacaataataggctggataatataactcattgcattgattctattcgctcttcttatgcagattattgtgcctccatctttctctctccctccccgttagtggttgatgtttggcgccctcctccccaggattggctcaaattaaattgtgatattagagttggattggagagcatgtgtatcattgtggtagcaaggaaccatcttggtgaggtggtttgcgttagaacaaaactttaaaattttgccgtttagctttagaagtggcgaaagcgaaaggc

SEQ ID NO: 74719 - DNA, 1566 bp, Cannabis sativa
  modified_base (1451)..(1471): a, c, t, g, unknown or other
  modified_base (1536)..(1540): a, c, t, g, unknown or other
tctcttccttactgttttccccgaacaacacagatagctcgctaattagacaacaatattcgattgcccttactgtataacttgtcacatatttaatccacatcttccaagcatttagattttatacggatatcattatcaatatgcgtataccatacacatattcatatcataatcaccattatgctaccttccctaacataatttatgatagtctaggcaggtaatctaatagcaaataatataaacacttactataccatgagtcgacctttcttcacaacaaatgtacatattcgaccagtctttaggacctttaaaaccatggctgctctgataccaagttgtaacaccctatcccatagggacgcgacatgtgtaattttataaactagtttaatactaataaattaattaattattagaaactttgataataaaacttaactaaaataaaacactaaaaacagacattataacgacataaaaagcatgtttcggggatccctattataaaaagctttacaaaagaactatatacgatgacgctttaaaaacataaaaccaaaatacatagtagatacagcccaaaacaactcttggcaacccggcaagcaagccagtgaggtcaatatgtacactgctggagaaggcagtaacctaatggcagctctaacttttccttgcccttacctgcaccacatagcacccatgagtcacaaggactcagcaagaaaagtaacaataataatcatatagtttattattcgaatattatcatttctatacaattagaatcaaaccattacgcattgttcataagatgaaatccaaatcactactcgcatctgccatgaataagcatcagtatacagatatctggtaatacaaaactattataccaataataggaattatattcatttaataatataaattatatatatgttacctcataaagtaaccatcttcatgacatcacatttcctaatcaagcaagtcgatgttttagtctgataatcatgtagtgcattgcctaatcaggcaagcccgtgccatagtctggcacccacatatcacataattgcatcacctaattaggtgagctcgtacctacactcggtactcatatgtcactgacgcccgtacctatgcccggtgcttcgctaggaagaaaccctacagttgtttcaatatatgccataacctggaaattttcatatcactgactcccgtatctacatgttgtcagaaggaaaccctacaacgatttcattctatgccataacctgacaattttcatatcaccgacgcttgtatctataattcgccaggagaaaaccccacaacagtttcattttatgccataacgataattttcttatcactgacgcccgtacctacacgtcgccaggagtattgcattacataattgttggaaatattttacnnnnnnnnnnnnnnnnnnnnnagtatgttgaattaacatcctaatatgaattctctaaaacaatgaaaataaacatataagggttnnnnnaaaccttacattgattgcatcggaat

SEQ ID NO: 74720 - DNA, 668 bp, Cannabis sativa
atgatgcactttttggttataaaaaaatttcaaaaagaaaacttttatgtttgtgccatctttcgaatcaattagaatttgacataatgtattaattactttgaaaatttttagtaagatagttgagttgtcttcttctctactacacaactctcttcttgcctttgcgttcgtcagtacacgtggcatgttttccaatacttcatgattctaacatatacaatttttcacttaaattaattttggttattattataatataatgtatgactaatgtattggttcattcatccctttttgtttctctcgtaattaatttttttatacaactgtatttattataattatgcattatgcaagtttttagaagaacattgttattaggtactagtggtgcctaatatcttcttgacatgtcgtgttgcgattggctagcgatattccttaaaaactattatattaaattttatgggactcgatacttagttggaccaatatcgatattgacatatagaaggatgttaggcactactggtgtcctttaacatatttatttttagaaacttaaaacttatattgcttgttgaaaagttaatttcaaaaaaaaaaaaatatttgaaaagttggctaacttttctcaactttggtgcattttaaaattatcttgt

SEQ ID NO: 74721 - DNA, 586 bp, Cannabis sativa
aactaaattcaaatacctatatttggaaaatgaaagaaaaaataaatatgacacgtgtgaagtaattaactataaaaaaaactcaatgattggatactcaagaagatgaagaaatgataggaatagtggagttagtactatagtgaggaaatgtgtaaaagttgtgtagggtgatttgggggacaagaagcggcgcgtgaggcctaactacgatagctcagccggcacaaagtgggacccacacacttacaccatttcatctcaacccttctttcatattcattcaaaacaaaacactttctcacactttctttctttatctgttttgcaaatattattggttgaattttttattttataaaataataaattaaatattataattttttaaaataaagtgtccaatttattattttataaatacttataattttttttttaaaaaaacaagaagagttggccgtgttaaaaaataggagttcttttatttttatacttcaaaataattttcttcgtatttttatgaaattctatataaaaattcctattacaactagcactacaacctaaattacaataaaaaatc

SEQ ID NO: 74722 - DNA, 793 bp, Cannabis sativa
ttttttggggattggatggatccagtccaatccaatacatactgaatctaaaatattagataaatccaattcaatccgatcaaaaaaatactaggtttaaaatattggatgaactcaaattaaacaaataaatatacatgaaatacatctaatggatataatcgatcgaatctaataactaaatagatgttggatcgattagatgactgaaattaatttaatcagatcagatgacaaaatctataacacccaatatataattggatcggatttaaatatggtctaatgaacacctttgtttgaaagttaaattttaagaaaagaagaaaaaagattaaacaaatatacgaaaaaaataggatttttttatataaaataaaatatgttttatttataattttacaatctaaagtttttatttataaaagtaagattttaaagtttcaaaattatacaaatacgatttgcccaacaaaaagtaaaaaaataattataaaacaacaaaaattcaatatcacagcaactattaatcaactataactaaactataaaacaacaaacaataatcaagaaactaacatcatgacatgtataaataaactatcaaaaaaaaaataaaaaagaacattgagttgtatactgaaatctgtaaaaaaaaataaaaaaaaattcttcatgttcaggtatatgtttataaatttttaaaattcttctatgacatgaaaattaaaaaaaaaaaaaaaaaaattagcgtgtgaaaaataattgttatttagtatggattattttgtta

SEQ ID NO: 74723 - DNA, 1323 bp, Cannabis sativa
  modified_base (869)..(886): a, c, t, g, unknown or other
aaatttcaaaataatttcaaaatatatataaaaaaaataaaaaaaaaagaacaaaaaagttattttcatgttgttatgaagtttcgtttgcattattttgaaacatcttatctttaatttaaaaatactatattaaacaaaattacttttaagttgtagtaaagtttgttatgtgttgtttatactatacaattaaaaaaatacaagctaccaatattttaaatgttttccttcataactaggttgttatttaatgtttttgtatttgttcttgtgaaatggataacttagtcatctcccatgtatattcttgcaaatatatcgtaattacaaagaaaaaaaaaagcccttataatagtcacaactcacaaatgaaatattaatacattattattaccataatgagagtaggtgtgagctctattgttgcagtagatgtgatccccttccttgagctgactttgtttaatcattgaaagtaacctcattatattgctctcatgtagccttataatgttttactattttgttttatgattttcgaaaatctagaaaaaaactaatgcattgaatttctggaaaatatgaaaagaacaatgagtatatgttaaaatttcaatacaaaaatatgttgcgtttacgttgtttttaaatttcatttacgttgttttttcattttcctaaaattaaaagttaaatgtacaggcaatacaataacaacacaaatataactgaatgtgacaagaagatattgcaaatataaagaaaatttatatatactaatgcaataacaacattagtagttgattttgagttattttgtgtgtttgctataattatttgttcatcaatcgatattattttggttnnnnnnnnnnnnnnnnnnacaatatctacaaaagaataattaagttgttttcatattattgtgaagtattttttgtgttgtttttgcaacataaaaatattacataaaatcaagttgttttcgtgttgttgataacaatttagtatacactacattagttgttcaacaagtaaaaaatagaattttacatgtcaaaacaaaaatttatcttatttcttacattaagacatgtataataatatgagaccacacataatattgattttaaataaagtgggggggattaataggaagatattgtaaatatgaagaaaaattacttatatttagtaataacattatttgttattttactgttgttttaaatttgtaaatacgttttttgatattgttgctttttgagcatgttgttttcacattgtttgtacattgagtttcagtggttaaaatctgta

SEQ ID NO: 74724 - DNA, 1147 bp, Cannabis sativa
ttgtgtgtttggctgaggatcataggtgaaatattaggtttttcttggtgtttatgccttgtgattttgaatcttataagttataaattgttgtttattgtgtttatgttttgagctcagtatttcgggcatgagaatgaaatttcaggtttaccgtggtttttatttgccacgagataatttctcggcgtgcatttagtgttttgattattatttgtaaagtactatttacattggaagatatccaaaaattctatttatgctctgtaattgcagctttgactgatctttcacatcagaaaggaatttcggagtccccattgtattattcgcaaatattgatcctgaaagagaattgaaatattgtccattattcccaacataatactgacagcagatacaagttccccattagtataccgaagcttgcttgtgtgtggtggatcgatctcatatcgttcgcaaaggccttttaaaattagaatagtttcatcaacggttggtttagacacttaactagttgaattcgtctttctagatatatagatagtctattactacaatgaatggtgtgttttgcttgattataatatctttgtatcgagcatcagtgtacaaactacaaaacccaaatcctcattacaaaataattaaggcaacaccatggagcgattggaatttgttaatggctaaaaaattttatttcaatcttttgaatcatgtattgaaagacaaacttaattgagtcatcatcatcaacacgagaaacaactcggttcttcacgttgagatttgatcaggagtgtagttttacttcactatttgttgaaagagaagcatactttttttattattattgttttaataagcaagagatcgaacgagaaagcgaatagagaagtaattttattaacaaaatgttattttaatttataaaaaagtaattatataacttaagcgtgagttaatagctatacttaaaaaagtaaaaataaaaaaaaaatattaaataattttttttattaaataactacttttaatatataaaaaaaatactcctacacacatactctttttcaaatgacatttgagtcatcttattataaagggtaactctaatattatcacggtaatttaaatcacatag

SEQ ID NO: 74725 - DNA, 747 bp, Cannabis sativa
tcaataataattaataaacatttacaaaaaatcaatatatattaaaaaattcttaggtaaaaacatcacttttactttgagcagtttttctttttcctataatattagtatatattataattatagtaggtatattgtccattatcgaaaaatcatgagtaatatgttaccgaaaatgtgatttaaataatttattgcacgtatacctacttatgcatgtaattaaatattttgaactttattttcgatgtcataaattatttaaaatttctcgtaagtgtacttattgcctactataattatagtttatactgacatcaaataaaaaaaaattagaatacaatttcactaagtgccaaaaacagaaaatattttacaatgggaggaaaagtgacaccttgaattaagaagctccccatatagaaaaattataattagataatagacaaacattctaataataataataatattattaattgtatttgtacctgaatacgaaggtaatttttcttgtgatgttgagattggaagatagttgatacaagaaaatcaacaacatcagaactagcattagcaaaaatgtcaatgatgggtgtggttccattgtcaaaaatccaattaatgagaccccatttggaggcaatggaagcgttgtacttctcttcatgcttagcttcacctgttcccaatgacaacactaacattttagttccatccatcccaactttttcttcttcttcttct

SEQ ID NO: 74726 - DNA, 1073 bp, Cannabis sativa
tatgttattattagtttatattatattatttaagatatatattattttttttttgtaacatttatgttacctataatcatattgaactaacgcgttaaaataaagtaaaataaatcacataatttattagtaaaatgtttagacatctaaattaataactaattagttattttaaggttatgtcatggtatcctaatattattcaaaatatattttgataactttaatttattgtagaaactaattagttatcatataataattttaaatatgaataacaaagtatattttagtaacctacgaatttagtttgcatattaaattttgtttatttataaaatttggttaattaaatagaaaaagaaactatttttttattgtggttattatttgaatacgtaattatagaaatttttctattgttacatagtaaaaagtaactatttagttaattatgatacttaaaatgtaaagtaactaggaagttactttttcacacacaacacaaaaatgattcatttatttataaatatgcacttctttatcaggaaaaaaaataatcataattgtttacgatgccaataaaaagcgttgtaatgttggattttttgtggcgattagtgatcttataattagtaaactaaagcaataccaatgagttaattgtttaaaatatttatattttaataattatatatggttgaaatgtaactaataagtatataattaatatggtaaataactaaataattactttgattttgaaaaggtgaaaaaatatatgcttcccatatcttgaaatgattacattgaaaagtaggtcacaatgatattatttgtgaggccaaacaactagtagtgtggttaaaatttttattttaaaattaaaaataagagacagaaaaaaatattttattttattttaactatctctatataattgtttaatataattataagacccaccttcaaatggaaaagaaaaaacaaaagaaatagaaagtaaccgtaaatttgtcaataaaaaacggtacaataatattaataagggtataaaacatataaaataagat

SEQ ID NO: 74727 - DNA, 646 bp, Cannabis sativa
gaatgattagcatggccaataatacgtagatacgtgccttatgtgatttcaaacggccttagttgtcatttaatagtcaaaaataaaaaagcactactgcaacaacataaatgctaaccacctccgtgctaaatactactgataactaataacaatactttatagaatattactaactatttataaagtatcacatcaccaatcatgctttctaaacagtccttagctaaaatagagagtaaacttttaagaaaatgagcttcaattatacaaaaaatagtttcctatgatataaaataaatagagagctcttgggatgtgtttgtcataaattttggtttgcatggagtgtgagcaaaaaaatcacttgtgaaaaaatatggaactcaagtggaaaaagagatattttatattagagaattgttaaaaggcaccaatagtgtcaatcaccctatttcatgtcaaatcgctattggtgtaattaaatagcgagtcttatataacttaaaaaaaattacttttaaggaatatcgctaaccaatcgtaaggtaacacttatgaaaggtgttaagtactactggtacccaataacaatgctctatatattatccaaaaaagtctatgagacctaccacattctcacatt

SEQ ID NO: 74728 - DNA, 601 bp, Cannabis sativa
  modified_base (543)..(545): a, c, t, g, unknown or other
agaattattcaaggtataaaatttgtctctaaaactctttaaatacttttgtggcagctgttagtgactcatctcatgaaggctcaccattttctgaaattatcaagcaagtgttctagcaaagtcacacttaaatcctactcaactttctataaaagaatcttcaagatagacaattgggtgcgtttgtgctcaatgtctaccaaatacactttagacagagttctacacggtcgaatccttttcttaaaagtagtatttccacactacccaacgtgcccagttgccaagtgcatagcaaagcatccatgtcacccgcacacgtgcaaaactaatcacagtattttcacactacccaacgtgcccagttgccaagtgaactactcttctcattgctgagcaatggcacaactattcggttttgggaagatatatggattggagatacaacactaaagagtcgttttccggatctggcagtggtatcaaaagcaaaaaactcaactataaaagatcttgttgccattgaaggagaggtaggannntgtgttgcaagttggaattttaagtttagaaggaatttgatggagagagaaatgcc

SEQ ID NO: 74729 - DNA, 527 bp, Cannabis sativa
aatcgtctcttaggaaactaacgattattgctataaataattaagggcaattttcatgtacaatatgacaaaaaaatgtaaaaaaaaaagaacatacataattatataattctatataattttatgaatatttacatataaatatatatatatttacaattttaacttattaattactttcaatttataggtctttaaaaaataaaaaaaaaataaacgcataaagctcaatatgtaaatataaaaatcaatatatatatattaggcggtaattatgtggaagacacgatttaaatttaataaaaacaagtacacgattaattatcaatataatattaatatattgctaccatgcatcgtcacacacataaaagccattatatattgctattaaatttatgacaagggagtgacaaaaaaatacctgtacaagatcgttgcggtgacaacgtaggagactataagtctccagcaagttattctcaaatggtggcagcagggtaatttttttttttcaactttttttt

SEQ ID NO: 74730 - DNA, 825 bp, Cannabis sativa
  modified_base (699)..(701): a, c, t, g, unknown or other
tgcaaaacatccataactctacaatggtgtcactctcatattaaagtatttattttattaattttgaatatttattctaaacattttggaataaagtcatacatacttagcaatacaaataaattgcattcatcttgttaggaaatcttccagtattgcataacagaataagggcacaatcatgtattcgagaagaaaccataaattgattgattatcaaaattaaaatttcaatttcactattctgaaaagtgaatcaaaaagcgattcagtccaaaattacagattttacaaccattaaattaattaaaaataatatataaagggatcgaaatttcatcgaacttacctttctaccctcgtcaaagaagagaggctgatcacagagagagaagtagagatccttcttcgttagagtacgacgatgataatcagaatcgacgataaccagaatttttaatttttaaaaataaataaatatatatatacctgaatatatagggttattttgtgcgagcttggcctgagcagaaacgacaatgttaggggctgagcttggcccgaacggagaagagaacgggagcgagaggagagctgggattggggtggagtgttgcgtcgatgaccagaacttagagaagagggatcggggcgagcagtggggtttgggcgagctttgatcgccattcatggggtttnnngttagggcagagtgagagagagagagagagagagtagcgagatgtgtttttgcaaaatgaaactttgaatagaattagggattttgtaaatatctcaactttattgcgactgttagtaacagac

SEQ ID NO: 74731 - DNA, 853 bp, Cannabis sativa
gaatccaagtccaaggcctggaagctgaaaatacatgaaacagcacccccggaagtcagcccgggtgcctagtgcctaagttgacattccaactagggttttggtttctgggtccgtcttattgcaaatggattaaaattttttactgagacatgaattagacctgtcacgaacatatttaaggcaacagcatcagaatcggagcactttcagttttaagcacccaaagcacctggtgccccaggcacccagcacttaggttgacatattgtcaacctaggacgtttccaaccataatattgaagaagtatccagagagtttttctttgtcttcatccaaaacaaggaaataagtactttcgggaaaggaacagatcgacctagaggccaaaatagggactcagtgcccaagttgacctaagcattgggcctagcgcctagattgacactttgttaacctgggccacttccaacaacagttcagatgaattcttctaggcatattctctgtttttatcaaaaattaagatttgagtccttttgggaaacaaaaggagtcatctgggggtcaaaactgggaaaggcccaggttgacctggtgttgggcacaacgcccaggttgacactttagcaacctaggccatttccaaggagtattctgagaagtattccggtcatattctccattttcatcaaatattaagatataagtgctttcgggaatcaaacggagtcatttggtggcaaaaactagacccattactcaagttgacactcggcagtgggccaagtgcccgggttgatattttgtcaacttgggctgttcacaatcaaatttccagaaaagtttttt

SEQ ID NO: 74732 - DNA, 1630 bp, Cannabis sativa
  modified_base (1140)..(1151): a, c, t, g, unknown or other
atttgataattggtaggagaaattaagatgactctctcatatctaaatactgctatgtgaagtttattaacatctctatttagtttattaaatgtcatttcaccaaaagtgtgacaattatttaaggcaccaactactgcttgacccaccctacaaaggtttcatacatacgaggaaaaaattaatatattaaaaaatatgttaaaaagattgttgccaagtgttagtttctaactgataccaacattttgggggcagtttattttttattttttttgctggaccagttttcattgagatacaaatataagagatttgcatgcacctattatatcattgtactaccattaaaccaacgtacgtactgtacatttcagcagaaaaacaatcaaacatactgttgtacagttgttacacagctcaggctcacccactcatttgtacaattcttgttttacaactataccaaatttattggcttggtggacccgtggtgggggccgtttaataaattgctgcaaaattttaaagtttcgcctacctaccaattcattctccaattcttttttatttctccaaacataggtgttttattactagtttgtcattatatctacctaggcaatatagctgttaatttatgtttttttaataattacttaaaaaaaataattctaagtaaaattataaatatatttttttattattattattattaataatttatttattaattatactaataatgatgtgatactagctcaagtggccataggtgggtgtgtgagtattggaggtcctgagttcgtgtcccaggttaaacatgttgtaatatataaacgcttaaataaaaaaaaaagtaccaggtctcatataacttacacaaataagatttagaaaatatcgctaaccaatcgtagggtgccacctcatgtgcatcactggtgcccaatagtaatgctctttagttatacttatgtgatacttgacattaacgttattatttaaaaaaaacgtaaagtagacttttgttaaaaattaatttatactttttaatgaaaaatttgaacgtggcaaaaaataattaaaatattatttcaagtatcacgtacaacagattcttttattattattattatnnnnnnnnnnnntattattattattatatcttaatgtttttttttttaaaaaaaaggcaaaaatgtacacattagaattattattattattattaaaataaaagcaaaaaacgttaaggttgtatattgaattattattgctgtaatttgagttttatggagttatttttgtattttttttttatagaattgaaattaaaaaagtaaaagaattaaggagaaaagagaaaaatagttttagagtaattttatatgaattaaaaataaaaaaaaaaatgagaaagttaaagagagaaaagaaaaaaattgaaaaaaatgagaaaattgaagaaagaaaaaaaaaatagttttaaaaaaaatttagagtgccatgctaccatcttatgtctatgctttatatatagatttagatttatatatatagggaaatttacatatattactaacttttcccattttattacttttctactgtgacacgcttattgtta

SEQ ID NO: 74733 - DNA, 649 bp, Cannabis sativa
  modified_base (475)..(485): a, c, t, g, unknown or other
tggttaaagacttgtgaactaataggggtggagaaatatttggttatgcagttcaaagatcattaagttgaactttgaatagtattcaaacttacctcctcaggaatatagattgcatattgatgaaaataaaagatctatgattagttactagcagctgcctaagtcattctagggaaacaacctagtgataggaaagctttagaatgatggaatggttatatatttagtgtaaaccattactagattcagggatgtcctgatcatgaacttaaaaaaaacttagaactgttaactaaggtttgcatgtttgatagttattctaaagtgattaggagtggaccgtcctatagtcattaagataagaaagtgtttgtttcaacaaatactaattttttatgaacttgacaaaatctgaaaataaagtagcaaagtagaggagatattttcaatttcaaaagtgttctatcatctnnnnnnnnnnnagatggtcccactacctctgttgtattgacccaaccgatgaagataataccattaatgttcctagactgaaagtcatggtaccttatcgtagttgaagggttttaaggaactcaccctattatgacttagaagatacctatgataaaaatctattgttagttta

SEQ ID NO: 74734 - DNA, 813 bp, Cannabis sativa
ttttttttttttttgaaaaatagagtttataggaaataaaaaaaattatacctcatggtcattatataagatatttaatgatataaaagatagctcgaccataccagtaacatttttagcaaaagtctacctggcaaaattatgagccgcaaaattacaaagtctaaaaataagcaaaaaattacagctaaataaaagattagagagctttttacattgatggatataattatcaataccccaattagagcaatttcctttcagtgcattgataactgtctttgagtcactcttaatcataacaaaatggtgattcatcataatcgccatccccaaagataactgacatgctgcagtttctccaataagcgggtcaaagaaattaagcatgttggtagtcatccacaaaacagtccctgtgtaatccctagctaaagtcaccacgcacatgaaacaacttcccactttaacatcacaattgattttgacccaatcctttggaggaggggaccaaacaggagacacaacagccatcatcgaagaaaataaacacaactcgtaatatgtgtaacaagtagagatagaatcaatacaatgctgaatgttacccagagaattagtgtgtaccttgtcgttgtgggctttccaaatcgtatccaccataatcaaagcatatagaaacaatctgtcagtatccacccctctcgatctcaaattccaaagaaattttacccaatcccaaacacgagcaccagattccaggacatgcataacccccaaggggatgacctccatgttggaatttattttacc

SEQ ID NO: 74735 - DNA, 1046 bp, Cannabis sativa
cagatgcatgctgaaatcattgaaatccatgatacaattcatactgttaaatactttacttgcttcttctaaacaaccacacttaccatacatatctaataaagcattttccaacactaaatttggctaaaatttcttcatatcaagaaattgggactgcatcaggttctttttcacaattctcaatctgtagaaatagatcaaatgcttcaccaagcattgagttacttacaaaaactgttatcatcatattccatgaaaccaaacttttctaaattaccaaacatcttcttaatgcatgagacattgtaagatgatgtgcaatgcctcaaaaaatatgttttcgtgcatgtcatgttggcctggatcatatgttttcgtacttttcaaaaaatataagtcgtgtcgtgtcgtgccctaaaaaaatatgttgtgccataatttttaaagggtaggcacaatacgaaacttgatgttttcgtgtcgtgctttaatcgtgccagcccgtttttatatccgagctcaaattcgtgctttactttttcatatttttttaacaattaaagagttaattattaaaatatatgtatatttatagttttaattatatttatataatttttcaacaatattttacacatataaaaaaaaattaaaattattaaaatttaaatatttacttatgaaatgtcaaatttttgtatcactataaataaattaatatatagttttggttttactttataattatttttttaaaaaaaaaaatcaatagttttaattatgcaattataatttttattgttatgtttaagttttattgttattttattttatttataattaataaatacacatattattattataattattaaattattgagtttttaatgtttcgtatcatgctttttggacttgtcacataccgtgtctttcggactagtctattcgtacttatgtgtcgtgccaatttatagcacgtgtcatatcgtgtccgaacccatattttttcatatctaatcatgctcgtgctttccgagctc

SEQ ID NO: 74736 - DNA, 1127 bp, Cannabis sativa
ggttggaggtggtctctggtctcaatttttttttttttttgatgaaaaggtctcaattttttagttaggagaataaaactgtattatcatacatgcattttggtggaatttgtgtaaaaactatgtagtacataatttcacgtactgagaatgttgttttgtgtattgtaatatatcaacttcatgctttagtacattagaattataattggcctatctaaaatgaatgagacatgaaagtttaaatattttgttttcacttgttcttaattaactgtcatattttgatatataacctgtttttcgagatgaattgttattatgtatgttaaatatttatttatttttatcattgtattagcacttgatatcaaaatatcatgtactatgaactctccattttttttaaagtaataataaacaaagttttatataatgtaaattaaaagcgtaacataatattaaaaaataaaaaattaaattaagcaatgtgtataattcatctctatgactgggttggagctgcttgctggagccttaaagtgccaatttaaggctctccttcccctttaatcaatcatggggatttggaaggaatgcttacgaggggcttgtctcataccctcttggtaagtttctttgtcctaatctgctcacttcttttatttctcttcttcttcctccttgttttttatacatctttgtttgtgaatctccaggcatcatttatctcttttgccgcccagcggcgaggcttagaaaagattaaatacttgaagagcgaggtccagaacttactaggccaacgtgaggtcatggtcaagaaatggaatgatgctcaactggaaattactcgcctcaccaaagaagccaagaggatgaagaagagccttgaagatgccgagaaggcgacaaaggccaaaaccaataaatgcaagaagctcaaaggggaactggaggggaaaaagaccgaaacccaagaacgatacaacaaagtggccttcgtaccctttatcgagcctggatggcaaatccagacatggacacgagtttcttggaggaagaggaggaggaaattctggctttctacgagaagaccaagaagaaggaggaagaggccgaggcag

SEQ ID NO: 74737 - DNA, 1558 bp, Cannabis sativa
gattttagattacctctctcaagtataaaacttaaattctctatactaattaatggtgatcaagcattaagaagatgataattagcacaaaattgcacaaataacaagaacaaatttgggaataatccaaaaacttaaattcataatctaaaatagttccatcaactctctagaatgagtgtttagttcataatcacattcataataacaaaaataatcatgttcataattaaataactaagcaaaagaataaagaagaagaagaagaaaagagctctaatgttgatagttgatgatgattgcttgaagtcttttctctcttgctctttaatgtattttttaatctcaaagttgattgtttctatctctccagtcgcatccctttagtttgatttacacccttctttatataggccaacaaagatagatcaatcctgttaaaattaaaaaaaatttaaaaaaatgatacgtgttgcgctatagcgcctataccccgcactatagtgcctaagagattaaatcccaaacccgtgctgaaattatctttttttttccgtaaaaaatcatttttttttcagctgggcgctatagcgcacaacaccaaaattttttgcttcgacattgctcattaaattatgcataacttttgcgtccagactccaaatgagatcatttaacatgtttcggaaaggtgggaacgagctctatcattttgggtgtcataagctcttcaagaaaatgatgaaatcattgtcaaaaataggctcaaagatctcagtcagtccatcataaaatgtctttccagcacaaacctaacacttggagaaaacacaccattcaaaaaaaaaaaaaaaaaaaacacttggagaaaacacaataaaatctatagaaaaatataatagtaatccatctaataattgactaagaatgagtgtacaaatgtgcactcatcacatccccaaacttaaactattgcttgtcctcaagcaacgaaaaaaaactaaaactaaaaactaacaagtcaattattggatgataaatcaagaaacatagaccaaaagtaatttatctcaaaatacactctctttccattattcaatatgcctttcaaacaaaggactagaatttcaacccatctaaacttgacttcaaatattgtatatttaataaaaatgtgtatatgtcaattctactaactctatatacatgtaatctatgtgcataaagacttcccttaccacaaaacatgaaagataaccataggcttgtataaccaatttatctccactaatgtaaaccaaagtcatgtagatcaaaaagactttataggcatgaaaaattagacttaggtaaatggtagataagaacgtcatttagactagtttcacaccataaagttacaaatctaataaaaatacaaaacccttcatcataaatttctttttctcccaataatattttttctcatttgatactcctttgttcacataattagagttataatcctattaaatttatctcttgctattattttttttccacattatgattttttttt

SEQ ID NO: 74738 - DNA, 678 bp, Cannabis sativa
aaaagtgggatcatccttcacttcttccagttcttccacaagtccaaagcattttgtaggatccccaaagcgaggatctatgtcagcgtccccgctttgggttggaaatcattgccctttcgtgggctcttgattagaactcttagcggacatcttctcttttttttctttgttcaaggttaagttgtaacaatgatgggaaaattgttggtctccccttaaacatcctatcccatgccttgttgggaactttaggcataggtggtagatgggtgttactgcctttaggtcatacagggctggacaaccaatcatggcattaaagtctaaaggcacgcttattacaacaaactatgccatcaacgttcttgtttttggattctctctaaccattaggggcaatcaaatgtaccctatgggcacaatgccttggccaagaagccataaattacttgtgtgcagggtgctatatcagttagctagagccctatcttttcatatattgttctaaaaagaatattgcaggaggctctgttgtccaccacgcaccatgcaactgttatattctcgatttgtacagtaataaccaagggataattgtgcaggaagttaacttgagcagcatctccttctgtgaaagagatagtgggctttagctttggttacttggagcccctt

SEQ ID NO: 74739 - DNA, 840 bp, Cannabis sativa
gcaaggagtcaatggtcctccttacaagttcatccatggcaacaccaatgaaatattaaccatggtgaaggaggtcaaaaccagacctatagtggagttgtcacatgccatctatcctaaacttcaccctcatattcactactgggccaacttatatggttagactctcttagtttaacctttttttttttttctaaatttctttcagttgttataaactttttgtacatatgcaatcaaattaggaaaagtttatcttcagtggtatggttctcgagcactattggtcattttggagcccgacatgatcaaagagatattgattaacaaagatggagcctatatcaaacctgaagccatgccatatgtgaagaaaattataggagatggccttgtcatgtctgaaggtgaaaaatggacaaaaatgcgaaagctagctaattttgctttccatggtgacagcttgaaagtaagctcttggtatctctattttattttattaataaaagagagcaggaatatttcagttcttttctaatgtatatgatattcctggaaacaaaaaggaaaggctaattaagatttttttcgtcggattttttttctcgacatgtattaaattatgttttttaattttttttttttattaaaaatgctcctgaattattgagatccttaaatttaagaacttttgtccaattttagtaaaaaagattctaagtgaaagttcaggacatcatttaatacatattaaagtttaaggggtatgatttagtaggtatcaaagtttgggagaatatagtttagtaataaacaatcactgaaatagtaaaattgaat

SEQ ID NO: 74740 - DNA, 1166 bp, Cannabis sativa
gagagaacatttcggttattataaaagtaatttgcggtaaaaataactaagggtaactctttgttgcaaataaatacgtaagtttaatttttagcggtaataatacctaaatcatatttttaaaactctatacctggccgttgagtgtcaagtcattatccacgtgttattttcttattagtatatttaatctaattttttaaaaaaattaaaaatttaatgacctggaccaattagaaattgtcacatagcaatttacttaacacttaacagctaggtacctactgaagttccaaaattataatttaagtattattaccgtcaaaaattaaatttatgtatttatctacaaccaaaaattgaaatatataccgcaaattactcttatattctaaatatggtaacaatactcttaaatcttaatcttgtttaactaatctcatagggagagtaaaggcaatgcaatgcattatgaaatctcaaggtccattcttttcttttgtccaaattaattaatggtgccataattgggcaagtaggattcattattggcatataaaacattaaatatgatcttcttgtgatctatggtggcatattcagaagggtttttcctatagttcaagaacaaaacataaaatttaaagctatatatatacatatatatatatatatatacaaacactactaattacaatctcctattataattttttagtcaatttttacgtttaaaataacatgttggaatattttcattatagcgatactcgttatagttacaatatcatttctgtaaatttttgaaaatttttaaatagtttacagtatcaaaaataaaattaataatattttaatctaccgcgcgtgttcaaaaaacttcaaacttattttcaatactgtaaactctacaagaatgatgttgtaactataacgaacactatcataaaaatattttgaaaaaaaatattttaacctatattttcgaacactgaggttaactaagagattgtaataagtgattaagagtaacactcctggtaaatataaattttgatgggtataatagaaagtaaagaaagagaaaatatagtaacagacctgatactggtggctgctgtaatggtataaacaatcccacatccacacaagttctgttgcacaaa

SEQ ID NO: 74741 - DNA, 1033 bp, Cannabis sativa
aactgatcataggcatcttcctacatgtttatatattgttgaaggtgtcttgcgatatgagactttctatctcatctttcaactagcgacactcttctgtggtatgaccaatatcatcatggtattcgcatcgcttatttggatccctcttaagcctcgcatgtttcataggtcttggctcgccaaaagcggcttcctgtatatgtgcgaggtatattttttcccaattttcattgagcttggtataaagagggatatacttgttggatttcttattattgtgcagccttttggaatcgtcttttttctttgatcccgaggcttctgaatcaagttttctaatagtatcgtgccctggtcatctcctggctttgtgatttgatgcactctgcagttattctcccactcgctctttcgcaattggaatgaatccttttgccttgaactgagtcgttgataaaggtcaggcttcttcaagttcacatactctcgtagatcactcctatcgtggctgcagttggaccttgcccttcctcttagagtttggttcaccttattctccctatatgggtttgtgcgatactaaagttgcaattgcaacccataatttgatcttcccccatacgtcttctacctcattactgattccttcaaagatcctcccgtttagttccatccaaactgcacaaagaacaacaagaatggttgtgctccagagccaagaagttctcctttttcctttaagtttacacaatagtaactatattcagatttggacagttattctgcatcaagataatcttagcttggtctaatttttatttgacttataaacaaaagttgcaattgcaatcaagaatttgatcttataataatgtaactagaatttgatatcgataaggttaattagattaaagaagagtatacatcattccaaacagcattccctggttgccaatgaaatcacacaatgcaacttgctacaaatcctctctagataacatgatatgggtacgcagtgctatgaatcctc

SEQ ID NO: 74742 - DNA, 1055 bp, Cannabis sativa
tacaactatcaatgtaatctaacaagcataaacaacatgtatgctaaacatgtagtaacaaatgcataacattatactactcttacctcaattataaattcaggtgtctcggccaacctgagtggaacaatagctcagcgaattacagtctcctaaatcacatcaatcacaacaaagataagtgacacgttaaatcgctttttggggacttaaacttgaaactataagtttccctatcgacaaataacatggaaataccctaaacatctcaaaaatgggaaaaactaagattcctaaaactgccccaacactggtagaccggttcccaactggaattccagttctgcggggtttcctggggaccaacaggaattctggttcctacaggtctccctgaactggaatttcgattcagtgcaggaaagtttcaaaatttcacagctctatcaaattaaccccaaaatataccaaaccttccagacctattaattagacctcaaagaacaataccaaagcaacaaaacacatccataagctccaaaacaaaatataccattagagagctaagcttgagttctaaaactcaaagcttgctcaaacatcaaaccagccattacaacaagcctaaaacaacatatctaagcataatttatccactgaaaacaataacaaacactagcagcaactacaacaataaaactcacaaggcatgcataaattcataacataaaacccaagaaatcaaagaggaggttgctagagactatacctttgcttggatcacacaagaatcttgctgaattctactgaaaatgacgaagaaatggcaaaccctagctgcctctaagtggattcgaaagagagagatttgagagtgaaatgtgatttttttgataatttctattttttgtcaaatattgagataatattggttttatccgaataattcagcttaagcctcaattaaaaatctgatttagtacatcccacaaaagacaaaacacaacttggcaaaatgaacattttgcccctttaacactaaaaatcataaaagg

SEQ ID NO: 74743 - DNA, 1200 bp, Cannabis sativa
ttttaaggaattacattctttttcttaatttatatgagcatccttatgggatatcaaggtgtcaagtattactatgagatggtatcttataattggttatagacattctctataattttctattaaattagaataaataagatatgatattgaattgcactaataatgatattacatatcacaagagtattagacactataagtgccatttaaaagcatccccaatgggggacaacatttagttttcaaaatatatatatatattttttttttttgagatgagttctcaaaatatatagaccattctaaaatatattttttttattttttattcacataagatttatggcatttttaagaaaaatactcaaatagttaacaagtctaaaggcagattcaatgctctatttttttcattgctcaacaaaaaatgattggacacctatagtagcttcataggagcaacgatcatgtctcactttttattttttttattttttattcttttctaaataaaagttattaattcaaaaaataaacaataaatagtaaaatagaatattataatttgtgtaaaacatttatagtgataacttgcttggaattagaatattttaataaaaaatgaccaaaactaatgtgcattgcataagataaaaaaataaaatatttatatgacgtgaccattatacatattaagaaacactttccattaaataagtcttgagtgcaacccattggggatgctctaacatttcttaatttatattgcttgcttgtattttgtttatgttctcagatctacacgtgtaactgctcattcagtctttgttctgtactaggacagctgtcaattctagcttcatctccttttagctttgggaagaagtttaagttatcccgtggtgaccaagatttcggctgatagccttaacaaacgtccatattacagcccaaacatctacataaaatacaacacactactactcgggaacataaacttgtcattgtgtatacaaataagagtccatcgataaaaaaaaaatatgtcattaaaactaaaagactatagagtacacaagccaagccagttaatgataaagggcctaaaagatcacaattcacaacaataatgtaaaacatgatactccaccagtacaacaccaccaccatcatcaccccttacataatctagaattg

SEQ ID NO: 74744 - DNA, 775 bp, Cannabis sativa
aaccccatacactatgttgcttatatacaaacctaaaatctatcaattacgtcaccacactattttttatttctaaaccatcaaaattaagagtatatatatatatatatatagaacttgaaacatacaaaattatcactagcttgtaaaatattattcttattacattatcaatcaatataaataagataaagtacaaaaaaaattaaaagaaccttaacgatggcagtaattatcggcttgagcccccaagcctactgaatgtattttagctccagtattaagctcaatatacaaaatatcattcttcactatattcactttcactactcgagctctgagtattcttctccctctctctctatgggtatgatttgtaaaagagtagagccgattggagagagaaaatggcgtttagggttaggattctcattcttataccttaaatatgggattttaaataatcttttacctaaatatggcatatctaaacccatatgaaagcctaaaatagaaaaaatataataaaaattacccaaacttaaaactgccatatttaagtaataaatttttaaaaactcatatttcatgtaatttgctcttatttttttaattgcaaaatttattaattaaaaactaagaaaaaaactaataagttacattttattttggtcatatagtcactgtaaataaaaaaagctttataaactttgtgaagacataaaaaaaggaaaaaattacacttagtatggaattttaaaagttcttatgataa

SEQ ID NO: 74745 - DNA, 1414 bp, Cannabis sativa
acctattggagagtattttacccaaaagttcagtgaggtctttcgatcgtccggagttcctctcactcatgagataagtgatctcattaaccccggagtttcagatgatatgaatgaggagttgactaaacttccctcggaggaggagattcgccttgtggtctggtctatgggtccgcttaaatctccgggtccggatggtatgccaggctgtttctatcggtatcattggaatacggtcaaagcagaagtggtgggtacggttcaggatttctttatgaccggggatcttgatagatctcttaatcatacctttttggtgcttattccgaaaagaccgaatgcagccaaatttgatgatttccgtcctatttcgctttgcaactttgcttataaggttatttcaaaacttttggcaagtaggcttaagaagctgctcccgactcttatttcgccctttcaagcggcctttgtttcgagtagatggattgcagaaaatggaatcttggctcatgaagtgttggattcttttaagaagaaaaaggggaggtcggcctttgttggtcttaaactggatatgtctaaggcgtatgaccggatggaatgggggtttttggataaagtgttagaggccttcggatttgactccaagtttcggtccttggtttctaaatgcatcagttcggtcagtttttccattttgctcaatgggggccctctgaaacgtttgcttccttctaggggtctgcgccaaggggatcttctttccccctttctctttatactgggtagtgaagttctttcgaggcttctccttcaggctgagtttaatggaagtcttacaggctttaaggtgtgtccgcaaagcccttctatttcccatcttatgtttgcggatgacacttttcttttttgcaaggcctctttggaagaaatcgatgtgcttaaaacgtgcttgcaacgttattgtatgtggtcgggtcagatgataaattactctaagtcggctgtggttttctctagtaatgcgaatgactcccttaggtcctctattgtggatgctttgggggtgaggcggatggaggcttctgaggttttcttgggtaatcctcttttctttactaaaagtaagactcgagacttcaactttgtagtggataaagttaagaatcgtcttgagggatggagatgcaagcttctttctcaggcgggccgtaccactcttctgaattctgtgattactaatatcttcatatataccatgtcgtccttccttttgcctaattcgatatgtgggactttggataaattggctcagaaattctggtgggtgggtaattctaagaaggataggttcttggccttgtcccattgggatgggctttgtcggcccaaggcttgtgggggtttgggt

SEQ ID NO: 74746 - DNA, 769 bp, Cannabis sativa
tagacttggtttttgtttatctccttattctcttttagaaaattgcccttcggccgagacaatggtttgcccctagcggcacccccttttttttgtaaagacagatttacaaggttggatggccaactttgttttttaatgccttgcacttttaaatttaaactttaatatgcggatgtttgcttgcgttttactcacaatataaactatcacatgcataaagtttattaggggtttccattgcttgtcctttcctccgacattaagtagttcatttcctactttacgtgtgagtagcttatttgctcgttccacaatttacgagtcatcatccattccacctcgcgatcatcagatttgaacttattttcagcaaattcaaatatatctttaatgatctcgtcatcttgtatatattttcaatgcttacatgagtacttaaattttctacccaggtgttgggtttaagtattttttcaagacattttgttgtctcatttaatactttcccttagcgcgagccgttagtattcagccttatccgcgaatcataccttttgattttcctttcttgttagataggttataaatcaaaaattacaatcgtttgatccctttctcatcagaaaggtttgatcaaggtgctataacgattcgacccctcttccgtcaaaaaggtttggttagggagttataaaagttcgacccctcttcaatcaaaaaggttcggtcgaggcccttttttttaaaggttttcaagaaattttat

SEQ ID NO: 74747 - DNA, 812 bp, Cannabis sativa
aatttttcttcttttcttttctttctttcttctgcaatcaattcagtatgatcatatctatcaaaaaaaaaaaaaaaacgcttccaaaatgtgtgtttgaaaaaataaaaatgaaaatgggaattttatagagcaaaataatatcactaacttatgggttgacttgatgaaatatatggtgaatgttacattacatgtacctccactctctcatcatgactacatttataatgcccatatctaaaaaaaatatatatacattatatatttgtctgttaataatataaggaaaaatatctatgtaacgtaactgattgcgtcatcagcgaaattttagaaatatagaaatttttaattaagttatatatatatttttcatatgtgctgcctattatcaattgctcaaaaatttgtttcaatataagcaatatctaaatgtcttagccaaaaaaatgatagataaattgtgcaacaaatattataatctgattaaaatttgcatgtgttgcacattatggtttttttttttttttttttgaaataattgtgattgatggcctgcctatcccatttgtattattctttctttgaatattttttttataaactaaggtcattcacatcatatattttaaaataattttcttaaaaaatatttaaagaactaaattaaaatatataatcactacaaaaagttactacatttagtgacaacttttagtcacaacataaattttttgtgactaaatatgacttttaatcacaacaaaaagttacttgtgactaactcataatattttgtcacaacaaat

SEQ ID NO: 74748 - DNA, 874 bp, Cannabis sativa
cagcataaactaaatgatttttttagcagcttaagtactaaatattagtaaaattgtaatttttatttaattttatcagtacaatctctactttgaatttattaaaagaagaattagaaaaaattgataaattaaaaaatttacacaaacattgggtatttatgccactcgtgtaaaatatcattaaatttatatcccttacaaacgcaaaactttggatactaagagcatctccaataaagatgcaaataagtaataaaaatacaaaatatagctcactttataaaaagtctactcaaatagtatgctcaattgtaatgcaaatttgtcacataacaaaaagtgatccaaatataaatcacaatatagcatgatagaaaatatgcatcacaataaatatcgtgcttttatatttaccattatacatgttcctttgtattaaatgacttctattagtattattattttattattaaattttatattgtggtgattcaatcaccctccaagagcataacaaacacacagaaatcaaagactaagagcatttccaacgagctcaccaaatttggtgtcacactatcactaagtttggtgtcaaaaattatttttactccaaccacaacaccaaaaattatactaaaaaaatattcattattattatattaattttttaataaaataaaaataattatagtattcatatttaaatttacacacaataaattaaaatgtgcttttacaatgcacccatcttaataaaagagacgcgcgcaatacatagtttgaattttatttttggcgtgttaaatttttttgaaattttaccagatattttaaataactattatgtacatgaccataaaaaaaataa

SEQ ID NO: 74749 - DNA, 837 bp, Cannabis sativa
agcaagcatggcttgattaaaatgcacaagggatctgaaacccaaagtacccctaaatttggactgacatagaaacttccaagacttcaagtgaatttttctggactccccagtagaaccccaccaaaatctggccatcgcagcctcaatacccttacaaattttagtaggtaacttaaagcaagccactgcataagcagggatagcttgaataacggctttcaaaagaacctctttcccagcccgaaaaaaacacttagaggaccatcctttgaggacagaagcaaccttatcacaaagaaaagtaaaagaatgatatttagaccgagaaaggcattgaggaagacctaaatatctataactatcttctaaattgaaagtatgaaaaaataaagtacgaatctcctgtgcagtgttgggagaaaaataatagaggatttagaaaaattaatagcctgcccagaagccctagaatagatattaaaaacctcctgaagagctaagcaagaatttctatcagcataacaaaacaataggctatcatcagcaaaaaaataaataaatgggagatagaaggcgcatgcctagagatagcaatacccttaagaagttgagcatcctgcctaaccctaagcaaataggacaaaccttcagcacaaaggataaaaagatagggagataaaggatctccctgtttaaggcctctagagggtctaagagaacctcagacatcaccattaataagaaaagacagcctagtagtagaaatgcatttcataaccagattaacaaacttaattgggaaggtaaaatggaacattaaactttccaaaaaat

SEQ ID NO: 74750 - DNA, 1200 bp, Cannabis sativa
aaaatgagaggaattttgatttaagtgttcatagagtttatgacattgtgaagtgtgtttaatatagaaattgaaaggacacttaaactggttttgaaagttatattgatttcatagttaaggaattttatgctaatttgactgataaattgcttgataaaaaatatgagttctttagcaaagtctatattcgtgaccattggttttcattcacagaagatgatattaccgaagtcttgaaattgccaaaaggtgttaagagtgatgaagtgtctatggatcgtgattgcattctcactaaaatcactggtgaacaagttgaatggcctactggtgaaagtgttcgcatcactcatcttacttatggccatgcctcactaatacggtttgctcttagcaattggttcccaaactccaataagacaatgatgtctcaagatttcacttatcttcttttttgaataactataggggcaagcattaacttggcttctctcaccatggagcaaattgtttttttctatcgaggtaaaaacgaaactttaagcttatttttcctaacctaatctataaggttctttcctctgagaagaatgtggtctattcaaatgagacacttgagtctccccttactggaataatttttcaaccctcagagtattttaatggagcctttcccaagcaccccaaggtatctgttggtgcaacttcatctgctgctgctgcaggttctagttttgtctctgtagatgtgcaagaagtcaagcaagaagtgaccttggtgaacaatcgcttagctgccctaaaagaggtttcgcaagaaatctccaaacaattgtccactttgatcaagctttatgaggcttaagttttgtgttctctttcctttacttttacgtttttggtgattattgttggacttgttttaattttttcttttttttgtttttgaccattattatagataaataaaaagggggagtaatatttttaatttcttgtgtttgtatactcaactctggaccctttttctagggggagttgaggttggtgtttgtgttaaacttcagtttaaagttagcattcttttttggtttaatgttgtacttctcaaggggagttgttatgtttgtttttgctaacttggtattgcaggtttttgttaattaaaaatattttgattatctaaactgcaaaagg

SEQ ID NO: 74751 - DNA, 814 bp, Cannabis sativa
tccagtctggcattgaggttgttgaacccgacacctttctcggtttttcacttccaaattccttctcaggttctttgtcaccagcagagacttcaaccaagttttgtgcagtagctgtggttgcggtttcaaccctgcaagatgaattgtctgctctagatcgctcacaatcgctaggctgttcatctgccacagttgctcggttactcgaaagtgtactacttagaaccggagtgtttgtgaatgaacattctttctcagcagcattaccaagtgagtttctgcagtgttcaataaagctactgttctcggaaagatctactactctgttcttgttcagactactcataattccttctgttcttttctgtgaaatcactggttcagctgtatgtgatctttcattgctctctatttacaatatacaagaagagtgacataagtgatcatagagtaatcttatcactaattctgaatagatgcaagataaataaaatcacaattgaaatgaagttgaaattgtaaccaaccagaactttttgcagcatatcttagtgatggagcataattgtgttcaatgggaggaccagtatcctttgaaatgacctgataattttcaacatagagagaaatatgaatgactccttgaactcgcatgattctttttccttacaagtacatatttaaaaaaagaaaaaattacagataaacatacagatattatcatatttgtattttgttcgaaagagagaaagtgtgtattacttaatgacatattcttggtttgctttgcatagtattcaacataactaaa

SEQ ID NO: 74752 - DNA, 856 bp, Cannabis sativa
tggtgctctcaatgacgaaatagatatgatttcaatatttttttatgataatatatattgtagttgtttaaaatataatgtaaaattttgaaaattataaaaaaaaaatttatagtatagaaaataaatttataatctattttatatatgcataaaataaaaaaacacatacaaccgactattttaactttatttttagcgtgtagtttattataaatttcttaaaattacactattaaaatactagataagagcaatgatacagagggatatatatatatatatgtatatatatatatactatatatatatatactatatatatatatactaggcaccttcttatcaaaatttgtaggttgtaatcatatttgttattttcatcaattatgtttaaaaaattgttaaaaaaaattatttaaacaaaaatatagtgtggtataaatttatttattgaaactaagatcatcaatcttgtataaattcatgtgatttgttatacatgtaaaaaaataatttacatcaagttttgcaattatatattagaacataatgataaaaattgatgcaaatttatcacaagttatttttttgccaaatagagtacaatttttgcatattccattagaaatattcttgtaaatttatatataataataacaaaaaattaaattttcatcgaaattaataaagatatgtacatataaataacgaaaatattaaagatacattaattgttgtcaagcaccacaaaaaaataatatcgttgttgatgtatttcaatattagttcccacaaattttaatttaatatatatgattaaaaacactacaaaaatattacttttagttacaat

SEQ ID NO: 74753 - DNA, 773 bp, Cannabis sativa
tttttgtgtctaaactcaataatgtcccaactaaactttcacatacatttttttcaatatgcatcacatcgagattgtgtcgtaataaattatccttttagtaaggctattcaaaaaatatactctttttcttccaactatatgtcaactgaggattaacaactatcttttcaaatttaatttggtagctgttatacccaaaatttggctatcattttaaaggaggacacgtgtcaaattgagaagaatatgaatcaatgaatgtaacgtaattacatttgaaaatggaatcagtcattaatgcgaaagtaacaaagtatatttacaaatcgctgactataaggtcttacgcgagataaagatttacaaactgttgtctcatgcattaacgagaaatcatatgccattggatgtgtaaggcgaggcgtcaacctcattacgcatgaagaaacgtaggcgagatataattgatattaagacacttagcgtataatacacagtatacaaactaagtacaatattcgggcaaacccaaaataactattagcgaggcatccatctcgctataggaaggcacatttttggtacattcactaatccgttttagacatctttcaatgagattcatattctcgacgagtcagttctctcagatagaagctgacattcaaatggcgttggctgttgaagttcaccttgttgtcaaggattgcaattgttagatggagcattgtgtctttagtaacagaaacgatgagatttacattatcaac

SEQ ID NO: 74754 - DNA, 573 bp, Cannabis sativa
atattgtcaccatgtagccactttgtagttgaccttaataatatacatatacatagttgattgtttatatatttatcatgtgctctggttgaatttttatttattttattcaaagggagagattttctctttataattacaccactagttcaataattaaagtagtattagcattcccaacttaatgatttagaaagaaaggagtgttatgagcactcatataatatatggacatggagtgttgttataattaggtaccttaaggtgtttagtgtctaatattatactgatatggcactattatataaaattgggctttagaggtagtttttaaggccttttaacgtcagttttattaaaatttgctactgatgctttttagacgacactgtaggattaaacacaaccaacgccataaagagaccttatatatagcgccagttattgtataataaccgatgccatagtgatcttatgctgttagttattatacaacaaccgatgccataggatcctatggaattggtcattattaaataattgacaccctatgatatgatatgtaattttcat

SEQ ID NO: 74755 - DNA, 619 bp, Cannabis sativa
aataataagagttacataagaatacaaatagattttttttagttaaagaatacatatagttttactatagtaatagaaataaataagaaaattgataaaatgaaaaagatgaaagaaaactcatgtgtgatgccacatgagcagttttttttttttttcttcttctaattatttcacatattattatgcatgttatattgttttataattattatataggtggtaattattttaaaatactataggtctttagtttgattttttttaatgattttttttaatttagtatacatggtaattatattagaatactataagtctttgttttgatttcttttaattaataggtattaatttagtgttagttatattgattacgtatactaaattttttaaaaagaaattaaaaaaaataaaaaaatcaagcatatcacatcaactccataaaaccttcttatatatattaatcttttaaaatgtaagatggtagtactatcaaaacacaaatttatgagatattaaatttgaatggatatattcaccaataaaaaaaaataagaaaaaattaacattttaaaaatattcaccgttgtataaaattatgtataaaagtataaaa

SEQ ID NO: 74756 - DNA, 662 bp, Cannabis sativa
ccattccaactaagaccattcactactcaatgacacaaaattcaatttcttcaatgccatttgacaattttatcaattagttcattaatatctttttctttggttatttctttttcgaaattttttaataaactaaataactttttattgattcgaatcgcctcttctcaagatgatcagttcagaaggcttatttttatgcattaaattttagcattcacaatataaaaataataataaaaaacaatttgtccaaattagataattagataattagtttccgagagttggattttgatattgttatatagtacgatttaacattatttcatagtataacactacaaaaaatcttacttttagtcacagcaaaacttgtaactaaaaataaaaaagattgtgactaattataaattatgattcctatgttgtgactaaaaggtgcgtaaataaaagtattagtaacaaaaattacaatttgttgtaactaaatgtatttttagtcacaacttgtaattaaacattatgttttagtcacaagtaacattttattgtgactaaaagtcatatttaatcacaaaaaaattatgttgtaactaaaaagttgtcactaaatgtagtataagagactcattatatatatatattgatgtaatgtaagc

SEQ ID NO: 74757 - DNA, 680 bp, Cannabis sativa
ttctggacatcccatggccggccagcatgcctcctacaggtgcatggctggccagacattggcccgacatgactttggtgcttcacacatgaatagcaagctagattgcgaatcgggccttaacaacccacaaaaatagagtaaaaatatctattttcaaggggcattctagttatttgtattatactgatttgattattttcttatagctcctgagattaatatctctaattctcattatcaataaagattggtatggtagtatcttcaaactagaatctgaccaagttcacattgaacttagaatcagaacctgtataacttttgtgtgtgtttggaagcaatctagattcatctgtatatatctttctggtttaatatgtgtttgctaattttggttcttgatttagcttttgtttgtttaagtgtgatcttgaagctggaattacagaagttaattcctatgtatcagagctaaatttcttacagtatgcatcttccccctcttaacttctactatataactcttctcagcttcattcctctttgatttcttcttcataggacgacggtcgagttttgttactggttcaaaaaactcttgattaaagtcatcatcttccacaatagattgtttttatttttctttgttggcaaacgatttcacacccattgttgta

SEQ ID NO: 74758 - DNA, 547 bp, Cannabis sativa
  modified_base (487)..(516): a, c, t, g, unknown or other
gtatatttttcattgtataatatcactatttttaaaattttgaaacatattttctttacattgtgtagtactttatatatatataatttactttttatggttaaaataaataaaaataaaattttataattttattatttttattaatgttttgttcaatagatatttattagttttttaaattaaattaaacaataaatcaatgtgaatttaatttttaaattaatttagtatatatgtatttttttcttagtttgaagatatttaagaaatttttttaaatatgttacgattataaatttatttttgagagatttttgtttttttttttattattattaaataatataaattataaaaaaaatactttaaaaacaaacattatgttcaagttgcgtggagccctttatgggtagttaattattttcctgctcgaagtagtttgttcggatagagtggtcaatgatactgttggaaattattttannnnnnnnnnnnnnnnnnnnnnnnnnnnnnttattaacatcctaaataagaactttctaaa
